United States Patent Application Publication US 2011/0182862 A1 - sequence listing, part 25

SEQ ID NO: 36368 - DNA, 3934 bp, Muscodor strobelii
  misc_feature: SGI EST ID NO. CUFF.86956.1
  misc_feature: Variant of the nucleotide sequence at SEQ ID NO 36366
gctcggtggcatcccagcatccgccgccccccagttctgcccgtatcttttgtgtcgcccattgaaattacagcatcaacaacacctggcagagcaaaaattgcccaggtgtctccccaaaccacttcacttgtgccgcggtcttccatctttccatctacagcatcgccgtcaacacccaggccgcgccgtctcgtgatacccccatccgcgttctgtatcccttcgttgtttctggccttgccctgttgtcgatcgacgtcttctatttaccggttccccagccttgattcaatccccctttcgcgaaccaccagcactagcctaatatgtcgtccccagccgtgagtaattctcctatctgctgccatgattccaccgtgatatgcaattttgtcacattgcgtctcctgttgaccgcctcgcactcctcgacccgatcacgtcccactaccctggcgctcctgcctcaaaccctctcgcgctgtcgctgccgccgctactaccctcgtcgccgtcgagccagcttcacccatcgtcactgctcattgtattgaccctagctaacccgtggccatgcggtcccagaagatgatgcgtcggaagaagaacgtgaagaagggaatccagttctgtctgatggtctgtggtgcttccggtacaggcagaactaccttcgtcaacactctctgcagcaagagcgtcctcaatcataaggactctgatgatgccaatgctgctcacgtggaggatggcgttaagatcaagcctatcaccgttgaactcgagctggacgaggagggaacacgtatctccctgaccattgtcgacactcccggcttcggcgaccaaatcgacaatgaagccagcttttccgagatcgtcggatacctcgagagacaatatgacgatatcttggccgaggagtcgcgtatcaagcgtaaccccagattcagagacaaccgagtacatgccatgctgtacttcattgctcctacaggtcatggtcttcgagaactcgacatcgagctgatgaagcgccttgcgccccgcgtcaacgttatccccgtcattggccgagccgattcgcttactcccggtgagcttgctgaatccaagaagctggttatggaggacatcgagcactaccgcatccctgtctacaacttcccctacgatatcgaggaggatgacgaggatactgtcgaggagaacgctgagctccgaggcctcatgccgttcgctattgtcggctcggaggagaccattgagatcggcggccgcaaagtccgcgctcgacagtacccctggggtgtcgtcgaggtcgacaacccccgccactccgacttcttggccatccgctctgcgctgctccacagccatctggctgacctcaaggagattacccacgatttcctatacgagaactatcgtaccgagaagctttctaagagtgtcgagggtggtgctggagtcgactcctccatgaaccccgaagatcttgcgtctcagtcggtccgtctcaaagaagagcaactccgtcgtgaggaagagaagctccgcgaaatagagatcaaggtgcagcgcgagatcaacgagaagcgacaagagctcctggcccgcgagtcccagcttcgcgagatagaggctcgtatgcagcgcgaggctgccgctgctggatcatcggtcccatctgaggctaatggcgaacatgatggcaactagaagtccgccaccactacgaactcatcagtcctatccgaggctagtaccttgcagatgaacaacggccattagatcgtaattacgcctgggcgtgtggtttctgccgttggcgatatcggcagctggagagagaaatgcagagttgcggcgttgcgtgtctcgagagaaacgcactttctcgctcgcgcacacccgacctgacgtatttcacggataaaaaggctggacattgcttaatggtttcttcttatgcgagcttgagaacagcagagtttggcggatttgtcaggaatacaagaccggaccggagttgcgattcccccgaaaaagcatgctgtattgatggccctctgaaaggtatagataagccatattgtatggttgcgtcacgtcacttggcttcttctcgccgatacccccagtggaggaagatggatggggagctgtcatgaatccacgttgagaaaatacctttgcgagaatcgatgtcctttattacgatttgaggctatcaagtggccttgtttttgtgcattaatgcatctcctagttttagtgtcattctaatacagaaatcaatggtaattcattgtctgactacattgcaaatgtaaactcttccaaaatacacacttcaagtacatcatccaggtcacagatgatgtgattggctatccatgtctgggaacgactcatgttgaataatttctacatgatcgatgagcctgatatctcatcatcctcgcgttgttttgtttccctgccataactaagtaacatcgcaagaacaggacgaggctctggagagcctctgatgcaaagaatgaagaagtgaaccagctaggaaaccatgctttctcttctgtagtccttagcccaagtactcttcccagctcaggttcagtactcaatgccctgccttccctgtgcacctctttccgcgaggccagactcggtcgtcaaactcccgtccatctgagatcaatccattcctaacaatatacaccttaatcgaacaaaaaaacaaaagagcgagatagaaagcaacctagttgttattctgactgttaaggatcctcagaatggcgaggaacaagttgatgatatcaaggtacaagctaatagcggccgcaatctcctcctcgacatggtgcttgcgaagcacgagctgagtatcaacgaggatataaccggagaagatcaaagctgccagaccgccgtagatcaactctccagtggaagagtaaggcaggaatgcggccatgaaaccgaagagtaggaggccccagagagcaccgaagaggtagggcatccaggatgtgaagtcgtatttcgtctggcaggcgaagagcgtcaagaatatgaatataccgcctgtgaggatcgcggcgttcaggacgatgcgggtttcgtagagagatacgatgacggagattgtgtaggcttcgaggagggtgaagccggagaggaagagcaggtttgttgggtaggaggtgcgcttccagtaggttagaccgaggaagattagggagccgaagagctgtggttttttgttagtctagctattccatggttttgggttgaggtttagagtgttggggagaagtgaggctggataaaaaagcttacagaagcccagacaagaccgggatgagactggatccaagacttgtagtcagcgctccagaacgagagcgcgctgacaccggccgtgacgaggagctgcgcggtcaggatggtgtagaccttgcggatgaactggtttcggatgtcgagcgtggcttcggcgacggaaccaccgaacttgaagtcatctgggatgttgtcctcgctgctgcggggagcggcgccgaagatgccgcccgctgcggatgtcgatgcttcgtccgcttggtaggagggcggcgcttgagaccaagacccctcgtccgggtcttgcgttggcgctggtgtgtacttggtattggacgacatggttactggtcgctgctctatttcgtagtaggctcgtcgtcgcagattctcgattcggtgattcggtgtcgtgtgtaagtttttcgcgatgagcgaagacgatgaaggtggtggatcaatagaaattctagggtgatgaaggcgaggctattggtggtgatctgacctttgctgttgacggcgcgggacagagggatggatgaggcggtgcacaagcgtgggaaggcgatgggcg

SEQ ID NO: 36369 - DNA, 1185 bp, Muscodor strobelii
  misc_feature: SGI cDNA ID NO. 572606
  misc_feature: Encodes the peptide sequence at SEQ ID NO 36370
atgaacactagaccacccatcgaaagacctagcgaacatgccgctctctctgtcgccttcaatagcgatgcaagtcgatttgctgtcggtctagattcgggtttttgcatattcctcgctagcaaatgtcaagtacaaacagcaagagatctcaatgcgggtctcgggttggtacagatgatgggtaatgccaactatctcgccctcgtcggtggtggtcgcgcacccaagttcccccagaataaggtcatcatctgggatgatagcaaaggcaaggttgctttcgagattgctgcattgacaaatgttcgtggagtgcaaatcacgaggaatcgggtcgttgtcgtacagcagaacagcgtgcgcctctacgctttcgagaagccgcccaaacctctcggcaagtatgagacggcagacaacttccttggtctttgctgcttgacagacaagtatctcgtcttccctggtaggacgccaggtcatgtgcagatagtctcactagatacggacagtgtgactatcatacccgcccactcgtctgctctcagggctttgcaggtcagcgcagatggcgagttactcgccactgcaagcgagaaggggacgattattcgcgtgttcgaaacaggcactagccggaagatggcagagcggaggcgaggcactgaatccgccacgatcttctcactgcgtttcagtccatccggttcgatgttggcctgcacatcggacaaaggaagtctgcacatcttcgatgttcctaacccacgcagacctaactcggctacgaaccggtcatcatcaccagtctcaccgtccgtcgcatctttcaaccttaatacaggagccaatcccagtgtcgacgctacaaacaaatggggattcctgagcaatatcccctttggaccattttcggacgtgtactcatttacgtcggcgccatttgagacaggcaatgagcccctacataacaataacagcatgcggcgtctgagcgataacgccgtactagggacgacgcgcccgatcaagggcgtcattggctggattgacgagcgtaacttgctcgtcattggagctggtcaagatgcgcggtgggagaaatttgtgcttcaggaagggaatgatggacgctatgtgctggctcgcgagggatggaaacgataccttgggaatgagtag

SEQ ID NO: 36370 - protein, 394 aa, Muscodor strobelii
  misc_feature: SGI Peptide ID NO. 572606
  misc_feature (1)..(393): NCBI GI: 46135809 Blast Desc: FG09420.1 [Gibberella zeae PH-1]
  misc_feature (1)..(393): NCBI GI: 171683193 Blast Desc: protein product [Podospora anserina] gi|170941556|emb|CAP67208.1| protein product [Podospora anserina]
  misc_feature (1)..(391): NCBI GI: 116193999 Blast Desc: CHGG_06717 [Chaetomium globosum CBS 148.51] gi|88182630|gb|EAQ90098.1| CHGG_06717 [Chaetomium globosum CBS 148.51]
  misc_feature (1)..(391): NCBI GI: 156058604 Blast Desc: SS1G_03314 [Sclerotinia sclerotiorum 1980] gi|154701101|gb|EDO00840.1| SS1G_03314 [Sclerotinia sclerotiorum 1980]
  misc_feature (1)..(392): NCBI GI: 169778965 Blast Desc: [Aspergillus oryzae RIB40] gi|83772686|dbj|BAE62814.1| protein product [Aspergillus oryzae]
  misc_feature (1)..(393): NCBI GI: 119183784 Blast Desc: CIMG_06779 [Coccidioides immitis RS]
  misc_feature (1)..(393): NCBI GI: 240109702 Blast Desc: CPC735_032070 [Coccidioides posadasii C735 delta SOWgp]
  misc_feature (1)..(392): NCBI GI: 242790689 Blast Desc: phosphatidylinositol 3,5-bisphosphate-binding protein, [Talaromyces stipitatus ATCC 10500] gi|218718191|gb|EED17611.1| phosphatidylinositol 3,5-bisphosphate-binding protein, stipitatus
  misc_feature (1)..(392): NCBI GI: 212534624 Blast Desc: phosphatidylinositol 3,5-bisphosphate-binding protein, [Penicillium marneffei ATCC 18224] gi|210069867|gb|EEA23957.1| phosphatidylinositol 3,5-bisphosphate-binding protein, marneffei
  misc_feature (1)..(392): NCBI GI: 226286985 Blast Desc: conserved [Paracoccidioides brasiliensis Pb18]
MNTRPPIERPSEHAALSVAFNSDASRFAVGLDSGFCIFLASKCQVQTARDLNAGLGLVQMMGNANYLALVGGGRAPKFPQNKVIIWDDSKGKVAFEIAALTNVRGVQITRNRVVVVQQNSVRLYAFEKPPKPLGKYETADNFLGLCCLTDKYLVFPGRTPGHVQIVSLDTDSVTIIPAHSSALRALQVSADGELLATASEKGTIIRVFETGTSRKMAERRRGTESATIFSLRFSPSGSMLACTSDKGSLHIFDVPNPRRPNSATNRSSSPVSPSVASFNLNTGANPSVDATNKWGFLSNIPFGPFSDVYSFTSAPFETGNEPLHNNNSMRRLSDNAVLGTTRPIKGVIGWIDERNLLVIGAGQDARWEKFVLQEGNDGRYVLAREGWKRYLGNE

SEQ ID NO: 36371 - DNA, 3308 bp, Muscodor strobelii
  misc_feature: SGI EST ID NO. CUFF.86850.0
  misc_feature: Variant of the nucleotide sequence at SEQ ID NO 36369
cttgcctgcaagcgtgctggtcccctcttctaccagtcaacattggaagactgtgacggcagcttgccaggctccaactgctacaaagacggcagcctttcactcaagtctcgtccaaatagacatatggtgaacctgttctaagacagcattgcatacccgctgcccattaagcttacagaccagtgaaagcatgatattacacctttctcattcagaacccgcatagatatttctcaaacgcattaacatctatttattgattgatatccaaatctcattaatcttttcctgtgataagcctgcttgaccctatttataagtctatcttgaccacctcttacctgctcccactcaacctcattctcaccacgacaggtgcaagcaagacgtccatactctctgccagcctcgctatctagctcgttcacacttagctagcacccaggaccactcgcacagctaggggctttgcttcgtttagcaaactagccctcataatcaatgagacttcatcggtagcatcatctgatgcattgcatctgtaccggtcacgtcatcgccagctgccgtcacttccagtccacccattcatcgcatctactggatcggcacattccttagagcaatcatgaacactagaccacccatcgaaagacctagcgaacatgccgctctctctgtcgccttcaatagcgatgcaagtcgatttgctgtcggtctagattcgggtttttgcatattcctcgctagcaaatgtcaagtacaaacagcaagagatctcaatgcgggtctcgggttggtacagatgatgggtaatgccaactatctcgccctcgtcggtggtggtcgcgcacccaagttcccccagaataaggtcatcatctgggatgatagcaaaggcaaggttgctttcgagattgctgcattgacaaatgttcgtggagtgcaaatcacgaggaatcgggtcgttgtcgtacagcagaacagcgtgcgcctctacgctttcgagaagccgcccaaacctctcggcaagtatgagacggcagacaacttccttggtctttgctgcttgacagacaagtatctcgtcttccctggtaggacgccaggtcatgtgcagatagtctcactagatacggacagtgtgactatcatacccgcccactcgtctgctctcagggctttgcaggtcagcgcagatggcgagttactcgccactgcaagcgagaaggggacgattattcgcgtgttcgaaacaggcactagccggaagatggcagagcggaggcgaggcactgaatccgccacgatcttctcactgcgtttcagtccatccggttcgatgttggcctgcacatcggacaaaggaagtctgcacatcttcgatgttcctaacccacgcagacctaactcggctacgaaccggtcatcatcaccagtctcaccgtccgtcgcatctttcaaccttaatacaggagccaatcccagtgtcgacgctacaaacaaatggggattcctgagcaatatcccctttggaccattttcggacgtgtactcatttacgtcggcgccatttgagacaggcaatgagcccctacataacaataacagcatgcggcgtctgagcgataacgccgtactagggacgacgcgcccgatcaagggcgtcattggctggattgacgagcgtaacttgctcgtcattggagctggtcaagatgcgcggtgggagaaatttgtgcttcaggaagggaatgatggacgctatgtgctggctcgcgagggatggaaacgataccttgggaatgagtaggctccgaatgtatctggaccgttttgtttgcgaagaaggatgttgggacatggttttaagtgaggacttggtcatttgtggttagctggcgaggagtacgggaacggcattacgggacaagagacggcgttcagggacggaagcaatataccgtcagataacttgatattcaacacggaaggctttttgcaagatcaaaatttgatagcaggtacttcgggcgtgaatgagatcaatcaaagggtatacattttcttctcgctatagtatggtacagatgtgtatatgagagtttagcctctatgagatcgtggacgaggagatctactccggcttcgtcgtcggtctcttcgatctctgcggtctctgtccctgtctcggtcgccgtgtctgtccctgtctccccggcgatctctatcgttacggcggtcatcatcgttgcgtcttcggtctgcatcgcggtcccgtgaccaatctcgcgtccttttaggagtctcatctctccctctaccgttctccttcgcgacaggcgtctcatcacgtctggatctccgacttcgatggtcgtccctttcttcatcgccgtccctcctcgatcgatgatgactcttatgatgatgtcgatgcctcctctccttcttttccccgcgccctttatctttctttagcgcatcctgtatctccttcttcttctcctcgatcaagaagcccttcatgggatcatcatcatcgtgatccgcgatcagcttctgtaattccaactcctccctaatcatctcccttctctcttcttcctcttcgctctcctcaccttccgtctccccattatccttccctccttctttaccactcaacttcttccaactaacatcgaactcagcaggatcctcatcatccctcgccttataccgcgcatggtcgactcgcactagtctccccgcgatatcggcccctcccagattatcgacggcgaggtcgcaggaccgctggtcttcgtatttcaaccagccgaaacccttagatttccccgactctgcgtcccgcgcgagcttcaggaatacgggttctccgtattgagagaatatcgtcaggatgtcgccttcggttaggttgtagggcagaccaccgaagtttatgtatgctgtgtcgcggtagtctgtgtgccaggatgcttcgggtgtgctgggagtgggtgtgttagttgggtgggagagaaagagggtggtttgagaggggagaggagggagaggatggcgacttacattccggcttcgatctcacgtttgttgagcgcttggatggagcggatttggttcatggtgtgagtcgcatggagaatgctgtttgtgtggtggttcggaggtaattgttgtcgcgggggtgtgatgtcgtaccgagatcgaatttcggagaagtatggcaagtcgcgagaagtgtttggattctgaggtgcaaggctccaatatcatagatgatgttcgttatgacgaag

SEQ ID NO: 36372 - DNA, 945 bp, Muscodor strobelii
  misc_feature: SGI cDNA ID NO. 572607
  misc_feature: Encodes the peptide sequence at SEQ ID NO 36373
atgaaccaaatccgctccatccaagcgctcaacaaacgtgagatcgaagccggaatcacacccgaagcatcctggcacacagactaccgcgacacagcatacataaacttcggtggtctgccctacaacctaaccgaaggcgacatcctgacgatattctctcaatacggagaacccgtattcctgaagctcgcgcgggacgcagagtcggggaaatctaagggtttcggctggttgaaatacgaagaccagcggtcctgcgacctcgccgtcgataatctgggaggggccgatatcgcggggagactagtgcgagtcgaccatgcgcggtataaggcgagggatgatgaggatcctgctgagttcgatgttagttggaagaagttgagtggtaaagaaggagggaaggataatggggagacggaaggtgaggagagcgaagaggaagaagagagaagggagatgattagggaggagttggaattacagaagctgatcgcggatcacgatgatgatgatcccatgaagggcttcttgatcgaggagaagaagaaggagatacaggatgcgctaaagaaagataaagggcgcggggaaaagaaggagaggaggcatcgacatcatcataagagtcatcatcgatcgaggagggacggcgatgaagaaagggacgaccatcgaagtcggagatccagacgtgatgagacgcctgtcgcgaaggagaacggtagagggagagatgagactcctaaaaggacgcgagattggtcacgggaccgcgatgcagaccgaagacgcaacgatgatgaccgccgtaacgatagagatcgccggggagacagggacagacacggcgaccgagacagggacagagaccgcagagatcgaagagaccgacgacgaagccggagtagatctcctcgtccacgatctcatagaggctaa

SEQ ID NO: 36373 - protein, 314 aa, Muscodor strobelii
  misc_feature: SGI Peptide ID NO. 572607
  misc_feature (35)..(106): Pfam Id: PF00076 Pfam Desc: RNA recognition motif. (a.k.a. RRM, RBD, or RNP domain)
  misc_feature (38)..(106): Pfam Id: PF00076 Pfam Desc: RNA recognition motif. (a.k.a. RRM, RBD, or RNP domain)
  misc_feature (1)..(235): NCBI GI: 171683191 Blast Desc: protein product [Podospora anserina] gi|170941555|emb|CAP67207.1| protein product [Podospora anserina]
  misc_feature (1)..(206): NCBI GI: 116193997 Blast Desc: CHGG_06716 [Chaetomium globosum CBS 148.51] gi|88182629|gb|EAQ90097.1| CHGG_06716 [Chaetomium globosum CBS 148.51]
  misc_feature (1)..(193): NCBI GI: 261353750 Blast Desc: U2 snRNP component IST3 [Verticillium albo-atrum VaMs.102]
  misc_feature (1)..(195): NCBI GI: 39971239 Blast Desc: MGG_03086 [Magnaporthe grisea 70-15] gi|145017061|gb|EDK01424.1| MGG_03086 [Magnaporthe grisea 70-15]
  misc_feature (1)..(193): NCBI GI: 145237900 Blast Desc: An07g05140 [Aspergillus niger] gi|134076074|emb|CAK39433.1| protein product [Aspergillus niger]
  misc_feature (1)..(293): NCBI GI: 85116496 Blast Desc: NCU02467 [Neurospora crassa OR74A] gi|28926863|gb|EAA35825.1| conserved [Neurospora crassa OR74A] gi|38567120|emb|CAE76416.1| conserved [Neurospora crassa]
  misc_feature (17)..(232): NCBI GI: 46135807 Blast Desc: FG09419.1 [Gibberella zeae PH-1]
  misc_feature (1)..(176): NCBI GI: 149210833 Blast Desc: MGCH7_ch7g889 [Magnaporthe grisea 70-15] gi|86196844|gb|EAQ71482.1| MGCH7_ch7g889 [Magnaporthe grisea 70-15]
  misc_feature (20)..(180): NCBI GI: 256727068 Blast Desc: NECHADRAFT_33762 [Nectria haematococca mpVI 77-13-4]
  misc_feature (1)..(209): NCBI GI: 212534622 Blast Desc: conserved [Penicillium marneffei ATCC 18224] gi|210069866|gb|EEA23956.1| conserved [Penicillium marneffei ATCC 18224]
MNQIRSIQALNKREIEAGITPEASWHTDYRDTAYINFGGLPYNLTEGDILTIFSQYGEPVFLKLARDAESGKSKGFGWLKYEDQRSCDLAVDNLGGADIAGRLVRVDHARYKARDDEDPAEFDVSWKKLSGKEGGKDNGETEGEESEEEEERREMIREELELQKLIADHDDDDPMKGFLIEEKKKEIQDALKKDKGRGEKKERRHRHHHKSHHRSRRDGDEERDDHRSRRSRRDETPVAKENGRGRDETPKRTRDWSRDRDADRRRNDDDRRNDRDRRGDRDRHGDRDRDRDRRDRRDRRRSRSRSPRPRSHRG

SEQ ID NO: 36374 - DNA, 2512 bp, Muscodor strobelii
  misc_feature: SGI EST ID NO. CUFF.86851.1
  misc_feature: Variant of the nucleotide sequence at SEQ ID NO 36372
cttcgtcataacgaacatcatctatgatattggagccttgcacctcagaatccaaacacttctcgcgacttgccatacttctccgaaattcgatctcggtacgacatcacacccccgcgacaacaattacctccgaaccaccacacaaacagcattctccatgcgactcacaccatgaaccaaatccgctccatccaagcgctcaacaaacgtgagatcgaagccggaatcacacccgaagcatcctggcacacagactaccgcgacacagcatacataaacttcggtggtctgccctacaacctaaccgaaggcgacatcctgacgatattctctcaatacggagaacccgtattcctgaagctcgcgcgggacgcagagtcggggaaatctaagggtttcggctggttgaaatacgaagaccagcggtcctgcgacctcgccgtcgataatctgggaggggccgatatcgcggggagactagtgcgagtcgaccatgcgcggtataaggcgagggatgatgaggatcctgctgagttcgatgttagttggaagaagttgagtggtaaagaaggagggaaggataatggggagacggaaggtgaggagagcgaagaggaagaagagagaagggagatgattagggaggagttggaattacagaagctgatcgcggatcacgatgatgatgatcccatgaagggcttcttgatcgaggagaagaagaaggagatacaggatgcgctaaagaaagataaagggcgcggggaaaagaaggagaggaggcatcgacatcatcataagagtcatcatcgatcgaggagggacggcgatgaagaaagggacgaccatcgaagtcggagatccagacgtgatgagacgcctgtcgcgaaggagaacggtagagggagagatgagactcctaaaaggacgcgagattggtcacgggaccgcgatgcagaccgaagacgcaacgatgatgaccgccgtaacgatagagatcgccggggagacagggacagacacggcgaccgagacagggacagagaccgcagagatcgaagagaccgacgacgaagccggagtagatctcctcgtccacgatctcatagaggctaaactctcatatacacatctgtaccatactatagcgagaagaaaatgtataccctttgattgatctcattcacgcccgaagtacctgctatcaaattttgatcttgcaaaaagccttccgtgttgaatatcaagttatctgacggtatattgcttccgtccctgaacgccgtctcttgtcccgtaatgccgttcccgtactcctcgccagctaaccacaaatgaccaagtcctcacttaaaaccatgtcccaacatccttcttcgcaaacaaaacggtccagatacattcggagcctactcattcccaaggtatcgtttccatccctcgcgagccagcacatagcgtccatcattcccttcctgaagcacaaatttctcccaccgcgcatcttgaccagctccaatgacgagcaagttacgctcgtcaatccagccaatgacgcccttgatcgggcgcgtcgtccctagtacggcgttatcgctcagacgccgcatgctgttattgttatgtaggggctcattgcctgtctcaaatggcgccgacgtaaatgagtacacgtccgaaaatggtccaaaggggatattgctcaggaatccccatttgtttgtagcgtcgacactgggattggctcctgtattaaggttgaaagatgcgacggacggtgagactggtgatgatgaccggttcgtagccgagttaggtctgcgtgggttaggaacatcgaagatgtgcagacttcctttgtccgatgtgcaggccaacatcgaaccggatggactgaaacgcagtgagaagatcgtggcggattcagtgcctcgcctccgctctgccatcttccggctagtgcctgtttcgaacacgcgaataatcgtcccctataggtgttggtcatattactatagctggatatagggaagaaaaaggaccacataccttctcgcttgcagtggcgagtaactcgccatctgcgctgacctgcaaagccctgagagcagacgagtgggcgggtatgatagtcacactgtccgtatctagtgagactatctgcacatgacctggcgtcctaccagggaagacgagatacttgtctgtcaagcagcaaagaccaaggaagttgtctgccgtctcatacttgccgagaggtttgggcggcttctcgaaagcgtagaggcgcacgctgttctgctgtacgacaacgacccgattcctcgtgatttgcactccacgaacatttgtcaatgcagcaatctcgaaagcaaccttgcctttgctatcatcccagatgatgaccttattctgggggaacttgggtgcgcgaccaccaccgacgagggcgagatagttggcattacccatcatctgtaccaacccgagacccgcattgagatctgtg

SEQ ID NO: 36375 - DNA, 1575 bp, Muscodor strobelii
  misc_feature: SGI cDNA ID NO. 572608
  misc_feature: Encodes the peptide sequence at SEQ ID NO 36376
atgacggccaactcgaaccggttttcgacctacacgagcacgtcggtcggcacgggcaccgaggacaagaaggatgaccaaaagaaggacatgtggagctccatgctcgactcggtcgccagcggcaagaggttacctgagaagaacatgctggttctaggcggttctgtcgactcgcaacgcgaattcctcgaatccctcgccaacaacgatcagcgtagaaacatagaccaccagagggacaacctgccgccgatagctaacagcttcgctctgggctatacatactacgatgtcctagatgccgaccaagaagatatcctcgcccgcatatcactctacctcctcaccaacccctcgccctccttcgcctccctcgtcaagcccctcctgactccccaatccataccgaataccctaattgtaatactcctcgactggtcccagccgtggtcgtggatgcgccagctccgcgaatggcttctgttgctgcgggcagttatcacctccctgagcccagagtgcaaggagaccatggctgaggtcatgacgagctggcgcgaacggggacggacaggggcctcggtcaatctcgacgggaccggcgcagttgctgccgaaggagaagtggttctgccacctggacccggagagtgggaggatgctcttggtctgcctctatgtgtagtgtgtcaaaatagtgaaaggatagactatctggagaaatcccagggatggaaggaagaaaagtttgacttggtactgcaatacttgaggactgtgcttctgaggcatggtgcttcactcatatacactgcgccatccatgaccacacctctacaaagtctagtacatgcaagtttaggcatccgatcactgctaaagcgagcacccttaaaacacaatgtcatcgaccgagacaagattgtagtcccgccaaactgggactcctggggcaaaattcgggttcttagagacggattcgatgtggagtctattagcgagaactggtcggtagatatagaccagcccttctccgtcgagcaacagccaggggcagacaggcaagaaggagagacatacgagtctaacgacaaccctcacggcaccgtagtcgcggcgtatgaggaacaggtccaagactcgtctctcgatgcgttgcagattgcgcaaggaaggcaagacacgaaacagctggaagaggcggctgttgatacccagacattccttggaacacttgttgggcgtctagagtcgcagaagaaagaagatgaaaaggagaaggcgacgaaagagaactcctttgcgcaggtggccacggacgatattatctctgatcatattggacctgtgcagttcaatatgggtggcattcaggttgacgccgacgatatggttcagcggcttaaggatcgccaagcctacggacactcacctgaacccttaccactggatgatgagtcgcagggtggagagacggtaccgcctgctcccgtggacacggatacgttggccaagttctttggcaacttgatgaatcggaaaccggcttctggtagcatgactaaaagttaa

SEQ ID NO: 36376 - protein, 524 aa, Muscodor strobelii
  misc_feature: SGI Peptide ID NO. 572608
  misc_feature (124)..(272): Pfam Id: PF05783 Pfam Desc: Dynein light intermediate chain (DLIC)
  misc_feature (1)..(517): NCBI GI: 116194005 Blast Desc: CHGG_06720 [Chaetomium globosum CBS 148.51] gi|88182633|gb|EAQ90101.1| CHGG_06720 [Chaetomium globosum CBS 148.51]
  misc_feature (1)..(519): NCBI GI: 171683201 Blast Desc: protein product [Podospora anserina] gi|170941560|emb|CAP67212.1| protein product [Podospora anserina]
  misc_feature (1)..(514): NCBI GI: 164422573 Blast Desc: NCU09982 [Neurospora crassa OR74A] gi|157069725|gb|EAA28729.2| NCU09982 [Neurospora crassa OR74A]
  misc_feature (1)..(522): NCBI GI: 39971217 Blast Desc: MGG_03075 [Magnaporthe grisea 70-15] gi|149210811|ref|XP_001522780.1| MGCH7_ch7g878 [Magnaporthe grisea 70-15] gi|86196833|gb|EAQ71471.1| MGCH7_ch7g878 grisea
  misc_feature (5)..(514): NCBI GI: 154303178 Blast Desc: BC1G_09609 [Botryotinia fuckeliana B05.10] gi|150855072|gb|EDN30264.1| BC1G_09609 [Botryotinia fuckeliana B05.10]
  misc_feature (1)..(481): NCBI GI: 261353749 Blast Desc: dynein light intermediate chain [Verticillium albo-atrum VaMs.102]
  misc_feature (24)..(515): NCBI GI: 225554555 Blast Desc: dynein light intermediate chain [Ajellomyces capsulatus G186AR]
  misc_feature (24)..(515): NCBI GI: 240277137 Blast Desc: dynein light intermediate chain [Ajellomyces capsulatus H143]
  misc_feature (24)..(518): NCBI GI: 121713178 Blast Desc: dynein light intermediate chain [Aspergillus clavatus NRRL 1] gi|119402353|gb|EAW12774.1| dynein light intermediate chain [Aspergillus clavatus NRRL 1]
  misc_feature (1)..(517): NCBI GI: 212534620 Blast Desc: dynein family protein [Penicillium marneffei ATCC 18224] gi|210069865|gb|EEA23955.1| dynein family protein [Penicillium marneffei ATCC 18224]
MTANSNRFSTYTSTSVGTGTEDKKDDQKKDMWSSMLDSVASGKRLPEKNMLVLGGSVDSQREFLESLANNDQRRNIDHQRDNLPPIANSFALGYTYYDVLDADQEDILARISLYLLTNPSPSFASLVKPLLTPQSIPNTLIVILLDWSQPWSWMRQLREWLLLLRAVITSLSPECKETMAEVMTSWRERGRTGASVNLDGTGAVAAEGEVVLPPGPGEWEDALGLPLCVVCQNSERIDYLEKSQGWKEEKFDLVLQYLRTVLLRHGASLIYTAPSMTTPLQSLVHASLGIRSLLKRAPLKHNVIDRDKIVVPPNWDSWGKIRVLRDGFDVESISENWSVDIDQPFSVEQQPGADRQEGETYESNDNPHGTVVAAYEEQVQDSSLDALQIAQGRQDTKQLEEAAVDTQTFLGTLVGRLESQKKEDEKEKATKENSFAQVATDDIISDHIGPVQFNMGGIQVDADDMVQRLKDRQAYGHSPEPLPLDDESQGGETVPPAPVDTDTLAKFFGNLMNRKPASGSMTKS

SEQ ID NO: 36377 - DNA, 2109 bp, Muscodor strobelii
  misc_feature: SGI EST ID NO. CUFF.86759.1
  misc_feature: Variant of the nucleotide sequence at SEQ ID NO 36375
gccccaaatcacttgccggcctgcatgaaagaaacaccattacgtgcactgtactaacactgcttcaatcgctgtcgagttgtttcgtgctgtctttgtccatttgtgtttcagtactgtacaagtggtaatcgagtgctgtgtcaaacagccaccgccgttcgaccacccgcaacttcgcagctcctgacgcgccccatattccaatagtccgccgatcgcgcgttgaaaggagctaaacaacggccaactacaccaaccagtcatactcttttccctcgctgaacgctttctaaaacgacccaatgctgtgttcctctaggtagcgaccatgacggccaactcgaaccggttttcgacctacacgagcacgtcggtcggcacgggcaccgaggacaagaaggatgaccaaaagaaggacatgtggagctccatgctcgactcggtcgccagcggcaagaggttacctgagaagaacatgctggttctaggcggttctgtcgactcgcaacgcgaattcctcgaatccctcgccaacaacgatcagcgtagaaacatagaccaccagagggacaacctgccgccgatagctaacagcttcgctctgggctatacatactacgatgtcctagatgccgaccaagaagatatcctcgcccgcatatcactctacctcctcaccaacccctcgccctccttcgcctccctcgtcaagcccctcctgactccccaatccataccgaataccctaattgtaatactcctcgactggtcccagccgtggtcgtggatgcgccagctccgcgaatggcttctgttgctgcgggcagttatcacctccctgagcccagagtgcaaggagaccatggctgaggtcatgacgagctggcgcgaacggggacggacaggggcctcggtcaatctcgacgggaccggcgcagttgctgccgaaggagaagtggttctgccacctggacccggagagtgggaggatgctcttggtctgcctctatgtgtagtgtgtcaaaatagtgaaaggatagactatctggagaaatcccagggatggaaggaagaaaagtttgacttggtactgcaatacttgaggactgtgcttctgaggcatggtgcttcactcatatacactgcgccatccatgaccacacctctacaaagtctagtacatgcaagtttaggcatccgatcactgctaaagcgagcacccttaaaacacaatgtcatcgaccgagacaagattgtagtcccgccaaactgggactcctggggcaaaattcgggttcttagagacggattcgatgtggagtctattagcgagaactggtcggtagatatagaccagcccttctccgtcgagcaacagccaggggcagacaggcaagaaggagagacatacgagtctaacgacaaccctcacggcaccgtagtcgcggcgtatgaggaacaggtccaagactcgtctctcgatgcgttgcagattgcgcaaggaaggcaagacacgaaacagctggaagaggcggctgttgatacccagacattccttggaacacttgttgggcgtctagagtcgcagaagaaagaagatgaaaaggagaaggcgacgaaagagaactcctttgcgcaggtggccacggacgatattatctctgatcatattggacctgtgcagttcaatatgggtggcattcaggttgacgccgacgatatggttcagcggcttaaggatcgccaagcctacggacactcacctgaacccttaccactggatgatgagtcgcagggtggagagacggtaccgcctgctcccgtggacacggatacgttggccaagttctttggcaacttgatgaatcggaaaccggcttctggtagcatgactaaaagttaagctgaggggcgaagtggaaagtacatagtcctcgtctgagatataggagcgtggagagagacgtgaagatggattcgtgtccagagtgatccgagatggttgcggcattgagcacttggagtttttgagactgtacggcggtgagagactgtggaatagataccccgaatgaaaaatgaagaattttactaaacctactccca

SEQ ID NO: 36378 - DNA, 486 bp, Muscodor strobelii
  misc_feature: SGI cDNA ID NO. 572609
  misc_feature: Encodes the peptide sequence at SEQ ID NO 36379
atggagcatttccccgacgccctcgaagccgctatccaagctgtagcagattcgtccgacaagggagaagagacaaccgccatcgttcctcagcagcccaatgacgatgcagagaagcgcgcggtcaacgatctagtaagtcagaccgtcagcgcccaagaagccatcaccactatggaccagaaaaacaccgccgacataaccgtcgagcacacggttgatgccgttccgagccaagccctcaatgaccaggagactaccaacaaggctccccgagaagcataccatcaccaaggcggtcgattccatcgccgcctttgcctcaccatgataaatatgcagcgacaatacaacgccgagaaggcagccatggaacgagatgacgagggacaaggggctaccgaagagcccctaacctctaagaagactgccaagaaattgcgggatggagtccgggtagttgtagacggttacggttccgagtag

SEQ ID NO: 36379 - protein, 161 aa, Muscodor strobelii
  misc_feature: SGI Peptide ID NO. 572609
MEHFPDALEAAIQAVADSSDKGEETTAIVPQQPNDDAEKRAVNDLVSQTVSAQEAITTMDQKNTADITVEHTVDAVPSQALNDQETTNKAPREAYHHQGGRFHRRLCLTMINMQRQYNAEKAAMERDDEGQGATEEPLTSKKTAKKLRDGVRVVVDGYGSE

SEQ ID NO: 36380 - DNA, 3510 bp, Muscodor strobelii
  misc_feature: SGI cDNA ID NO. 572610
  misc_feature: Elevated expression when VOC is produced
  misc_feature: Encodes the peptide sequence at SEQ ID NO 36381
atggatcacgacgccccccaacagcccaagacagacacggagattgagtgcgagggctgtgatgaaacaaaagaggtcaagttctgcgaagcatgcaatgactactactgcgacacttgttggcgcaagcgaaaagcacatcgacagaatagagtcggtcctaatgggatccctcatagccagctagatcctatcatcgtgcagcgggtgaacgaatggatggctgagcctaaggacaatgaggatgagaagactcaacaccaatttaataccgagacagtttggttcggcctcagcaaggacaattatggcgatcctgtcctagctgaatacagacggttctccgctgtcatgatggagaccttggaaggcatctcgggcccaagatacccgggcctcgtttcatttattgggcagacaggcgcaggaaagagctctcttatccgacttctactgggtattcataactatgacgatacgccgttgacggcgccagttattggccggagcaacgtcgatgtgccgacatcggcagatgtccatctctttctcgatcccgcttccgaatatgaacggcctattctatttgctgactgtgaaggcttcgagggcggcgagagggaacctgtcgcgcaatccgtctctttgaactccagcttgttaacgacatcatcacatgaagtcctaccatccctcaaccgtattctgcactttaccaaacatgcccttcggtgggcgtctcgtgattctcgagattacgaaaagaccagcaagcgtcagtatgccgtatctgagatgtatccccgcatcttccatgcattctcggacgtcattgtcttcgtccttaacaacccaaagaccatggaagatgttgttgagaaactcttgctctgggcggattcgaattactcagcctcgatcaatcttcctagcaagccgcacgcaataattgttcttaacaaatcgaacaatgagaccccaggggaccaatggagccggcatcatgcaacagaagaattcttcaaatcgatggatccgcaagtgttcaaaaacaagacattcgaacgatatatgaagaagtgggcgaaaagcgacatcacgaacatgcaggagctgtttgggtgctattactcgagcatgaatgtcatccgcattccagacaagagtcgatatcagctcttccacgagcagggcaaagtactggcccagacgatccgcgaaaaatgcgacactgctcaacgcaagaagagagaccgcaaaatgctgccagatgccgaccagttccagcagtacctttcattagcgttcgatcacttttctgagactctggatgaaccgtttgattatatcaaagcttcactcaaaagccgtccaccaccaaagaccctgtcggacaacctgcaagagttcgtcttgcttctcgcacatataactgaaagagaagggaagccccacgagtggttctctatgacctgggcagactcaaacacatcataccgcggtatctgcattgacgttataagcggattcgagtgtgtggcgtccaagaagacccacgacaacgtacaccgaggcagaacacttatcatggatgaaccgaggggcaaatatgaaccccccgaagatttcgagcctcttacatacgattggggctctcgcgttgaggctcgcctcgccgatattcatcaagattacaagagcagtagcacagctgaagcccgtatccaggcacatggccgcattcttgcgaccttctataatgacttcggcgagtatatcgttgctagtaatcggatctgtctcggctgcttattcaacccggctcagtacacgctgaactgtggccatattctctgtcgtgagtgcgtactggatttcggtcgccgagagcagccatgcgaagtcattctcagcaactgtccgctggctggtagtggaccatcatgtcagaatagtgctatccctgccacgcaaccaatgcaagtgcccactcggttgacgctcgaaccggcctacgcggggctgaggattctaagcttagatggtggcggtattcgcggaatcatagagcttgtggtgctgagagccatagaagactgtattggcgtgccgctgcagcgattttttgacatcgtgattggcactagcactgggggcattgtttccctcggcttcggtcataagatgtggtctataccttactgtatggagcagttcgaaggactggtagaacgagcattcaccaaacgaaagtttcaaaacgtccgaggcatcaggcaccttgcgatggcatggaagggcagccgttatgagaccaaagccttcgaaaatgcgctccaggagtctcttgggtcctcatctctttttggtacaccgccacaataccaagaaaggagcaacgggccgccgctgaaggtcgccgttctgagttcttctagttcgggaacgaagaccaacgttatatccaactataatgtcaagcagactcacaatgccgtcagagagacaagtcagcactcatcgaaaggcgacaagtacggatctgtgctcaactacgaaagatacagacatccggaccctaaaaatgagctgaaagtgtggcaagcgtctgttgtttgttatagagcacgagcgacgtctgcggcacctggctacttcaagccttttacacacggtaatgagcagtttgtcgatggggcgatcctccacaacaatccaatcgaagtagccgcagcagaatggcggaacgtcatagcatcgagtaatttacatgcaacaccagatatcattctatcgctaggcacaggcttgcagaatgactataagtacaacgacgaagcgcatcccaagatctcgggtttcgtgagtcacctgcccgagatccatagcaaaatcgcctttgtcaaaatgctcttcaccatgatcaagtaccaggtaaagctgaacctcgacgctgagtcgcggtggcaaaaatggtacgagagcatttctgatgaacagctgctatcacgtatctttcgtattaacccagatctcggcgaagcgccgccgctgctcgacgccgtcgatcaagtcaagcctctcaaggataaagtcactggctggctgcacaacagcgaaatacagcaacagcgtatccgggaaattgcgtgtcgtctcgtcgccagctcattctactacgagcgtataggcaacgctcataggaaggacgggcttcttcaactccgcggcgtgatccgttgtcgactgcctaacgagtcgcaagatatgaagaaactgggtgattttctcacttataaacccagtgcggtgcctgcgtttctggttatgcagaaagatggagacgaccagcgatttactgtgcccattcgacagatgattagtgaaggctgtttccccgatgtgcccgtgactatcactgcgcctctcgaggagacgacgacggcaatggctatcgagattactggaaacgctggaagctctttcaataaaactaatgatcgcttataa

SEQ ID NO: 36381 - protein, 1169 aa, Muscodor strobelii
  misc_feature: SGI Peptide ID NO. 572610
  misc_feature (678)..(911): Pfam Id: PF01734 Pfam Desc: Patatin-like phospholipase
  misc_feature (28)..(1095): NCBI GI: 67525721 Blast Desc: AN3318.2 [Aspergillus nidulans FGSC A4] gi|40744106|gb|EAA63286.1| AN3318.2 [Aspergillus nidulans FGSC A4] gi|259485712|tpe|CBF82965.1| TPA: Patatin-like serine FGSC
  misc_feature (37)..(1135): NCBI GI: 46127523 Blast Desc: FG08139.1 [Gibberella zeae PH-1]
  misc_feature (5)..(1061): NCBI GI: 116198629 Blast Desc: CHGG_07470 [Chaetomium globosum CBS 148.51] gi|88178749|gb|EAQ86217.1| CHGG_07470 [Chaetomium globosum CBS 148.51]
  misc_feature (571)..(1162): NCBI GI: 46114440 Blast Desc: FG03062.1 [Gibberella zeae PH-1]
  misc_feature (164)..(485): NCBI GI: 171688346 Blast Desc: protein product [Podospora anserina] gi|170944135|emb|CAP70245.1| protein product [Podospora anserina]
  misc_feature (28)..(452): NCBI GI: 46114440 Blast Desc: FG03062.1 [Gibberella zeae PH-1]
  misc_feature (594)..(1093): NCBI GI: 171689740 Blast Desc: protein product [Podospora anserina] gi|170944832|emb|CAP70944.1| protein product [Podospora anserina]
  misc_feature (594)..(1093): NCBI GI: 189211822 Blast Desc: conserved [Pyrenophora tritici-repentis Pt-1C-BFP] gi|187979438|gb|EDU46064.1| conserved [Pyrenophora tritici-repentis Pt-1C-BFP]
  misc_feature (594)..(1082): NCBI GI: 154280477 Blast Desc: [Ajellomyces capsulatus NAm1] gi|150411230|gb|EDN06618.1| [Ajellomyces capsulatus NAm1]
  misc_feature (595)..(1087): NCBI GI: 154271165 Blast Desc: [Ajellomyces capsulatus NAm1] gi|150409659|gb|EDN05103.1| [Ajellomyces capsulatus NAm1]
  misc_feature: Useful for introducing or modulating the production of volatile compounds
MDHDAPQQPKTDTEIECEGCDETKEVKFCEACNDYYCDTCWRKRKAHRQNRVGPNGIPHSQLDPIIVQRVNEWMAEPKDNEDEKTQHQFNTETVWFGLSKDNYGDPVLAEYRRFSAVMMETLEGISGPRYPGLVSFIGQTGAGKSSLIRLLLGIHNYDDTPLTAPVIGRSNVDVPTSADVHLFLDPASEYERPILFADCEGFEGGEREPVAQSVSLNSSLLTTSSHEVLPSLNRILHFTKHALRWASRDSRDYEKTSKRQYAVSEMYPRIFHAFSDVIVFVLNNPKTMEDVVEKLLLWADSNYSASINLPSKPHAIIVLNKSNNETPGDQWSRHHATEEFFKSMDPQVFKNKTFERYMKKWAKSDITNMQELFGCYYSSMNVIRIPDKSRYQLFHEQGKVLAQTIREKCDTAQRKKRDRKMLPDADQFQQYLSLAFDHFSETLDEPFDYIKASLKSRPPPKTLSDNLQEFVLLLAHITEREGKPHEWFSMTWADSNTSYRGICIDVISGFECVASKKTHDNVHRGRTLIMDEPRGKYEPPEDFEPLTYDWGSRVEARLADIHQDYKSSSTAEARIQAHGRILATFYNDFGEYIVASNRICLGCLFNPAQYTLNCGHILCRECVLDFGRREQPCEVILSNCPLAGSGPSCQNSAIPATQPMQVPTRLTLEPAYAGLRILSLDGGGIRGIIELVVLRAIEDCIGVPLQRFFDIVIGTSTGGIVSLGFGHKMWSIPYCMEQFEGLVERAFTKRKFQNVRGIRHLAMAWKGSRYETKAFENALQESLGSSSLFGTPPQYQERSNGPPLKVAVLSSSSSGTKTNVISNYNVKQTHNAVRETSQHSSKGDKYGSVLNYERYRHPDPKNELKVWQASVVCYRARATSAAPGYFKPFTHGNEQFVDGAILHNNPIEVAAAEWRNVIASSNLHATPDIILSLGTGLQNDYKYNDEAHPKISGFVSHLPEIHSKIAFVKMLFTMIKYQVKLNLDAESRWQKWYESISDEQLLSRIFRINPDLGEAPPLLDAVDQVKPLKDKVTGWLHNSEIQQQRIREIACRLVASSFYYERIGNAHRKDGLLQLRGVIRCRLPNESQDMKKLGDFLTYKPSAVPAFLVMQKDGDDQRFTVPIRQMISEGCFPDVPVTITAPLEETTTAMAIEITGNAGSSFNKTNDRL

SEQ ID NO: 36382 - DNA, 4290 bp, Muscodor strobelii
  misc_feature: SGI EST ID NO. CUFF.86678.0
  misc_feature: Variant of the nucleotide sequence at SEQ ID NO 36380
agacgaacatagcgtacaaacaggcccccactgaatggcaaactgcgcatcttcgagctgcaatgaacatctttcagcggagtgtcagtgttagaatatatccgtagatacgtcttcagcgttgtctacagccaatcttacaataatatgggggagccagattagcaacgatctcctttaaaggcaaagaaccaccatgtcactgacatcgatataatcttgaatacattctcgcgcatcttacggagaaagaaaattctggctatcatggatcacgacgccccccaacagcccaagacagacacggagattgagtgcgagggctgtgatgaaacaaaagaggtcaagttctgcgaagcatgcaatgactactactgcgacacttgttggcgcaagcgaaaagcacatcgacagaatagagtcggtcctaatgggatccctcatagccagctagatcctatcatcgtgcagcgggtgaacgaatggatggctgagcctaaggacaatgaggatgagaagactcaacaccaatttaataccgagacagtttggttcggcctcagcaaggacaattatggcgatcctgtcctagctgaatacagacggttctccgctgtcatgatggagaccttggaaggcatctcgggcccaagatacccgggcctcgtttcatttattgggcagacaggcgcaggaaagagctctcttatccgacttctactgggtattcataactatgacgatacgccgttgacggcgccagttattggccggagcaacgtcgatgtgccgacatcggcagatgtccatctctttctcgatcccgcttccgaatatgaacggcctattctatttgctgactgtgaaggcttcgagggcggcgagagggaacctgtcgcgcaatccgtctctttgaactccagcttgttaacgacatcatcacatgaagtcctaccatccctcaaccgtattctgcactttaccaaacatgcccttcggtgggcgtctcgtgattctcgagattacgaaaagaccagcaagcgtcagtatgccgtatctgagatgtatccccgcatcttccatgcattctcggacgtcattgtcttcgtccttaacaacccaaagaccatggaagatgttgttgagaaactcttgctctgggcggattcgaattactcagcctcgatcaatcttcctagcaagccgcacgcaataattgttcttaacaaatcgaacaatgagaccccaggggaccaatggagccggcatcatgcaacagaagaattcttcaaatcgatggatccgcaagtgttcaaaaacaagacattcgaacgatatatgaagaagtgggcgaaaagcgacatcacgaacatgcaggagctgtttgggtgctattactcgagcatgaatgtcatccgcattccagacaagagtcgatatcagctcttccacgagcagggcaaagtactggcccagacgatccgcgaaaaatgcgacactgctcaacgcaagaagagagaccgcaaaatgctgccagatgccgaccagttccagcagtacctttcattagcgttcgatcacttttctgagactctggatgaaccgtttgattatatcaaagcttcactcaaaagccgtccaccaccaaagaccctgtcggacaacctgcaagagttcgtcttgcttctcgcacatataactgaaagagaaggtcagattaaatggctctttgacaaaattacaacgctggtggcgtcttgtgtgatgcttgactcggcgaggaagcggctatttgggaagccccacgagtggttctctatgacctgggcagactcaaacacatcataccgcggtatctgcattgacgttataagtgagtattacgagtttcgagttccttgtaacttccgcataaagccaggcgttgcttatccaggcggattcgagtgtgtggcgtccaagaagacccacgacaacgtacaccgaggcagaacacttatcatggatgaaccgaggggcaaatatgaaccccccgaagatttcgagcctcttacatacgattggggctctcgcgttgaggctcgcctcgccgatattcatcaagattacaagagcagtagcacagctgaagcccgtatccaggcacatggccgcattcttgcgaccttctataatgacttcggcgagtatatcgttgctagtaatcggatctgtctcggctgcttattcaacccggctcagtacacgctgaactgtggccatattctctgtcgtgagtgcgtactggatttcggtcgccgagagcagccatgcgaagtcattctcagcaactgtccgctggctggtagtggaccatcatgtcagaatagtgctatccctgccacgcaaccaatgcaagtgcccactcggttgacgctcgaaccggcctacgcggggctgaggattctaagcttagatggtggcggtattcgcggaatcatagagcttgtggtgctgagagccatagaagactgtattggcgtgccgctgcagcgattttttgacatcgtgattggcactagcactgggggcattgtttccctcggcttcggtcataagatgtggtctataccttactgtatggagcagttcgaaggactggtagaacgagcattcaccaaacgaaagtttcaaaacgtccgaggcatcaggcaccttgcgatggcatggaagggcagccgttatgagaccaaagccttcgaaaatgcgctccaggagtctcttgggtcctcatctctttttggtacaccgccacaataccaagaaaggagcaacgggccgccgctgaaggtcgccgttctgagttcttctagttcgggaacgaagaccaacgttatatccaactataatgtcaagcagactcacaatgccgtcagagagacaagtcagcactcatcgaaaggcgacaagtacggatctgtgctcaactacgaaagatacagacatccggaccctaaaaatgagctgaaagtgtggcaagcagcacgagcgacgtctgcggcacctggctacttcaagccttttacacacggtaatgagcagtttgtcgatggggcgatcctccacaacaatccaatcgaagtagccgcagcagaatggcggaacgtcatagcatcgagtaatttacatgcaacaccagatatcattctatcgctaggcacaggcttgcagaatgactataagtacaacgacgaagcgcatcccaagatctcgggtttcgtgagtcacctgcccgagatccatagcaaaatcgcctttgtcaaaatgctcttcaccatgatcaagtaccaggtaaagctgaacctcgacgctgagtcgcggtggcaaaaatggtacgagagcatttctgatgaacagctgctatcacgtatctttcgtattaacccagatctcggcgaagcgccgccgctgctcgacgccgtcgatcaagtcaagcctctcaaggataaagtcactggctggctgcacaacagcgaaatacagcaacagcgtatccgggaaattgcgtgtcgtctcgtcgccagctcattctactacgagcgtataggcaacgctcataggaaggacgggcttcttcaactccgcggcgtgatccgttgtcgactgcctaacgagtcgcaagatatgaagaaactgggtgattttctcacttataaacccagtgcggtgcctgcgtttctggttatgcagaaagatggagacgaccagcgatttactgtgcccattcgacagatgattagtgaaggctgtttccccgatgtgcccgtgactatcactgcgcctctcgaggagacgacgacggcaatggctatcgagattactgggtttgttgacaaccataatttgtttcatattagtgggtttccgaggtcattgatgaagcatgactttggatcgctaaggatattataataggttactgatttgcaaacagaaacgctggaagctctttcaataaaactaatgatcgcttataaaagaggaaaacgagaagtactatatgaactcacactgatttacttggtttataaaggcggcactctcttagagtttggtcatcgtttgatgtcaccgcgtgatgcttaggtgaattttcatgtgcgtagtgcagcagcgcattctcggactatactcttccttcagcgagatcagacaatattgagcctaatcccggcatggtgatgatgtgtaacatagttacagtagaagaatattaacgatgagtaagtagacgtatgatacatgctgccg

SEQ ID NO: 36383 - DNA, 1491 bp, Muscodor strobelii
  misc_feature: SGI cDNA ID NO. 572611
  misc_feature: Elevated expression when VOC is produced
  misc_feature: Encodes the peptide sequence at SEQ ID NO 36384
atgaaggtcttgcagacagccgccgtatgcctgttagcgagtacgatcgaggcagcgacgaactcgaccaagccctttgtaacgtccgagtcactgcaggccgatattactaccgaggggttgatgtccaatctcgaggatttataccaaatcgcactagacaacgacaacacccgcgctttcggcttgccaggttacgatgcatcggtagaatacgtcctatcgcgcattggcgaggtggaaggcgcgaaaccttggatacaggaattctctgcgcttttccagatcgtcactagcatctcactagccatcgactccgtatccgtttacgtcttcgggttgagctattcgccctcgaccagcgaggatggattgacggcaccgctcgtcctcggcccggagggtgaggcgggttgcgatgtggctggctacgagggcctcgacgtccagggcaaaattgtgcttgtggaccggtttcggtgcccgacgggcggtacgctagccggacgtgtgcgccctgctgcggcggcaggtgcgattgctgtcttggtgtataatgatgtgcaaactaacgctacggcgggaacgctgagtgcgccggacccagagggatttgtgccggctggcttcatcaaccaagtggatggcatagcgctgaaggaacggttgcaagccggcgaagcgcttgagacctactttcaacagacgcagatcatcgagcagaggaccacgcaaaatgtgttcgttgaaactgagggtggagattcgaccaacgtggtcatgatgggcgctcacttggattcagtacaagccggccctggtatcaatgacgacggctccggaaccagtctacttctcgaggtcttcgccgccatttcaaagtacaagaccaataacaaggtccggttcgcttggtgggcagccgaggagaacggtctgctgggatctgactattactgcagaaccctcgacgttcccgaagcgaacaacatactagcctacctcaacttcgacatggtgtccaggggatactacggcgtcggcgacgtcgacggcagcacacacgggagcgttgggcctgcgggctccgagatcatcgaggcgctgtactatgagcatttcgaaggccagggactgaccgtaacgccagcgattttgaccaatggtagtgactatgcctcgttctggaagtacttgaacaagcctattggtttcatcaatacaggaactggattcgaacaagatccatgctaccaccaagcctgtgacactatcgagaatcccaacccagggaccatcaccattatggccaaggctggagcgcacatgctctctattctggcaatgaatggaaccacgttacttcccaagactccgatcaactccaacattaacatcgcgacagcgcgacatgtcgaaccagatttcgccatgcttgcacatcttgaagcaatgggcgagcaacatttgggttgcggccatgaagaataa

SEQ ID NO: 36384 - protein, 496 aa, Muscodor strobelii
  misc_feature: SGI Peptide ID NO. 572611
  misc_feature (120)..(223): Pfam Id: PF02225 Pfam Desc: PA domain
  misc_feature (261)..(446): Pfam Id: PF01546 Pfam Desc: Peptidase family M20/M25/M40
  misc_feature (258)..(434): Pfam Id: PF04389 Pfam Desc: Peptidase family M28
  misc_feature (261)..(325): Pfam Id: PF01546 Pfam Desc: Peptidase family M20/M25/M40
  misc_feature (24)..(495): NCBI GI: 171683714 Blast Desc: protein product [Podospora anserina] gi|170941817|emb|CAP67470.1| protein product [Podospora anserina]
  misc_feature (23)..(496): NCBI GI: 46139793 Blast Desc: FG11411.1 [Gibberella zeae PH-1]
  misc_feature (5)..(495): NCBI GI: 145616591 Blast Desc: MGG_14292 [Magnaporthe grisea 70-15] gi|145009407|gb|EDJ94107.1| MGG_14292 [Magnaporthe grisea 70-15]
  misc_feature (1)..(495): NCBI GI: 189212174 Blast Desc: leupeptin-inactivating enzyme 1 precursor [Pyrenophora tritici-repentis Pt-1C-BFP] gi|187979611|gb|EDU46237.1| leupeptin-inactivating enzyme 1 precursor [Pyrenophora Pt-1C-BFP]
  misc_feature (1)..(464): NCBI GI: 46114370 Blast Desc: FG03027.1 [Gibberella zeae PH-1]
  misc_feature (1)..(481): NCBI GI: 256721295 Blast Desc: NECHADRAFT_52779 [Nectria haematococca mpVI 77-13-4]
  misc_feature (20)..(495): NCBI GI: 261358924 Blast Desc: aminopeptidase Y [Verticillium albo-atrum VaMs.102]
  misc_feature (1)..(464): NCBI GI: 145608422 Blast Desc: MGG_12773 [Magnaporthe grisea 70-15] gi|145015902|gb|EDK00392.1| MGG_12773 [Magnaporthe grisea 70-15]
  misc_feature (170)..(495): NCBI GI: 169611660 Blast Desc: SNOG_08944 [Phaeosphaeria nodorum SN15] gi|160702340|gb|EAT84112.2| SNOG_08944 [Phaeosphaeria nodorum SN15]
  misc_feature (27)..(496): NCBI GI: 256726543 Blast Desc: NECHADRAFT_93056 [Nectria haematococca mpVI 77-13-4]
  misc_feature (24)..(495): SWISSPROT Homolog: EC 3.4.11.15 Aminopeptidase Y
  misc_feature: Useful for introducing or modulating the production of volatile compounds
MKVLQTAAVCLLASTIEAATNSTKPFVTSESLQADITTEGLMSNLEDLYQIALDNDNTRAFGLPGYDASVEYVLSRIGEVEGAKPWIQEFSALFQIVTSISLAIDSVSVYVFGLSYSPSTSEDGLTAPLVLGPEGEAGCDVAGYEGLDVQGKIVLVDRFRCPTGGTLAGRVRPAAAAGAIAVLVYNDVQTNATAGTLSAPDPEGFVPAGFINQVDGIALKERLQAGEALETYFQQTQIIEQRTTQNVFVETEGGDSTNVVMMGAHLDSVQAGPGINDDGSGTSLLLEVFAAISKYKTNNKVRFAWWAAEENGLLGSDYYCRTLDVPEANNILAYLNFDMVSRGYYGVGDVDGSTHGSVGPAGSEIIEALYYEHFEGQGLTVTPAILTNGSDYASFWKYLNKPIGFINTGTGFEQDPCYHQACDTIENPNPGTITIMAKAGAHMLSILAMNGTTLLPKTPINSNINIATARHVEPDFAMLAHLEAMGEQHLGCGHEE

SEQ ID NO: 36385 - DNA, 2201 bp, Muscodor strobelii
  misc_feature: SGI EST ID NO. CUFF.86675.0
  misc_feature: Variant of the nucleotide sequence at SEQ ID NO 36383
caggtcgaagctctagattctgaggccaagcgccgagaagtctcggcagtgcgctgcaacagtgcagaccccggtcgccgttcccggaacgccctgccgaaggggaaggagacaagacaagaacacttggctggcgatatgcagatagtctacaagtaaacctctatttttctcttaccggttgataaaacggcatcacgcgccctaggaaaagctgagatgaaacataatctctcccgttccctcgtctaggcgaaatcttgcaaagatgaaggtcttgcagacagccgccgtatgcctgttagcgagtacgatcgaggcagcgacgaactcgaccaagccctttgtaacgtccgagtcactgcaggccgatattactaccgaggggttgatgtccaatctcgaggatttataccaaatcgcactagacaacgacaacacccgcgctttcggcttgccaggttacgatgcatcggtagaatacgtcctatcgcgcattggcgaggtggaaggcgcgaaaccttggatacaggaattctctgcgcttttccagatcgtcactagcatctcactagccatcgactccgtatccgtttacgtcttcgggttgagctattcgccctcgaccagcgaggatggattgacggcaccgctcgtcctcggcccggagggtgaggcgggttgcgatgtggctggctacgagggcctcgacgtccagggcaaaattgtgcttgtggaccggtttcggtgcccgacgggcggtacgctagccggacgtgtgcgccctgctgcggcggcaggtgcgattgctgtcttggtgtataatgatgtgcaaactaacgctacggcgggaacgctgagtgcgccggacccagagggatttgtgccggctggcttcatcaaccaagtggatggcatagcgctgaaggaacggttgcaagccggcgaagcgcttgagacctactttcaacagacgcagatcatcgagcagaggaccacgcaaaatgtgttcgttgaaactgagggtggagattcgaccaacgtggtcatgatgggcgctcacttggattcagtacaagccggccctggtatcaatgacgacggctccggaaccagtctacttctcgaggtcttcgccgccatttcaaagtacaagaccaataacaaggtccggttcgcttggtgggcagccgaggagaacggtctgctgggatctgactattactgcagaaccctcgacgttcccgaagcgaacaacatactagcctacctcaacttcgacatggtgtccaggggatactacggcgtcggcgacgtcgacggcagcacacacgggagcgttgggcctgcgggctccgagatcatcgaggcgctgtactatgagcatttcgaaggccagggactgaccgtaacgccagcgattttgaccaatggtagtgactatgcctcgttctggaagtacttgaacaagcctattggtttcatcaatacaggaactggattcgaacaagatccatgctaccaccaagcctgtgacactatcgagaatcccaacccagggaccatcaccattatggccaaggctggagcgcacatgctctctattctggcaatgaatggaaccacgttacttcccaagactccgatcaactccaacattaacatcgcgacagcgcgacatgtcgaaccagatttcgccatgcttgcacatcttgaagcaatgggcgagcaacatttgggttgcggccatgaagaataagcggtgtatagatggcgagaaataataagccatgccgaagtacgagaaaacagaagcaccctgaaaggcttatatgtccgcaacagcaaggatcagctatatctagtcttcacatactcaatacataaagattgcagttatctgcaaatcctcgcgttggattcgccctcgggcgtgaaggatgctgatgctcgtccgaattcggagatacacagtatcgcgacatccgcttgcatactcattttcgcttgcttaacggttatcatgggcgagtctcatgatcgagaagcttcagggactcaaaggaaaccgctgatttgcgtacgctgcgcacaaaagttgatattttggaatagtgtgtccgacagagtgcctaatgcgcgggaatccgaaatcaacggttatcagattgtagatatgccggttagcgaagctataagag

SEQ ID NO: 36386 - DNA, 2394 bp, Muscodor strobelii
  misc_feature: SGI cDNA ID NO. 572612
  misc_feature: Encodes the peptide sequence at SEQ ID NO 36387
atggcgcagtcagcgttggcagccacgtccagcacgcccctcatgaaccgagcactccagagtcagagcccgttcgtgcgtgcgcgtgccaacagtcccgtcgcatggcagctctttgatcacgaagctgtaagccgcgcaaaggccgaggacaagctcatctttatgagcatcggctttctcgcttcccaccactgccacattgcacatcacgaatccttctccaaccccaacgtcgcaaacctcctcaacgccgagttcatccccgtcctagtcgaccgcgagctatacccccacttcgactacatctacatgaactacaaccagtctctgcacagcagcggtggatggcccctcaacgtattcttgacccccgagctcgagcctgtctttagtagcacgtactgggctctgccgagcagcgttgccagtgacacccccaacggcagtgagacagatgccgacaaccctactgactggcgctatgtcatcaacaaggtgcactccgcctggagggacgagaaccctcgtctgcgtgatgaggctaagaagaatatcagagacctggcggtcgtcatcggagagggaacactggaccatggaaccgtgtccactgccgcttcaactgctggcacaactactagggactctagggactcctcgaatgttgattatactgaggatatccaaggtgaagtcgatctggaccagatcgaggatgccttctcccttatcattcgctccttcgaccatgactttggcggctttgggcagcaggacaaattcttcaccccctcccgactatcactcatgttgagagctacgcactttccagctgaagtgcaggatgtggcaggagaggatgaatgtgcttttattagcaccgcagcactccgcaccttgcgcctgatgagcaacggtgcagtacatgaccacctcggaggaggcttccaccgtcactcatacacccgggactggtctctgcccgctttcgagaagatgcttatcgataatgccttgctcctcggtatcttcctcgacgcatggctgctgatgggctccaagcctgaggacggacttctggacactgtgaaagagattgcagactacatcaccagcagcgttcttacatcaccagagggtggattctacacttcggaggcggcagactcgtacaacaagcgggaggatcaagcgatgctgaacggaggcttctacctttggacgagaaaggagttcgacgctgctattggagatgatatgcaggccaaagttgctgctggatactgggatgtgcgagaacatggaaatgtggacccaacctacgatccactcgatgagttcctgaaccagaatgtgctgcgcgttacaaagacatatgcagcacttagtaagggtctaggtacggacgtgaacgaggtcaagacacttatcgattccgcccgagagaagttgagactgtacaaggacaaagaacgcgtgagaccgattgtggatacgaagattgtcacatcatacaacggcatgactattgccggtctatctcgtgcatctgccgttctgagagacctggacgcagctcgagccgagaaatacctatctgctgcaacaagagcagcggtttacatcaagaacacactctacgacaaagagcgcaaagtgctgtacagagcatacagccaagagagattcacgaccgaaggctttgcagaggactacgcctatcttatcgagggacttctcgaactttacgaggcgacggcggatgatggttggttggagtgggccgatgagctgcaaactaagcagatcagtctattctacgacaatgcaccgagtacaagcgggaccactaagtgtggcgctttcttctcaacgactgccgatgagaagtttacgttgttaagagtgaaggagggtatcgatggcagtcagccgtcagtgaacagtgtctcagtatcgaatctgttcagactgggtgcattgctgaatgataagcagtacacgtacatggccaagacgagcgtcaatgcgtttagtgtcgagatgctggagcatcctaatctcttccctggattactctgcggcgtcattccgtggagactaggcggaagacagtgggttagtgtagcaggggaacagggagaacacaagaaagctcatgatctgttccataaagcgccccgtgcctcgctttcgacactgaggtatcatgatccaacgaccaagaacgccgactcgtggttgagcaaacgagacacgagcagcatcccgactaaggcggggatctacacgacagatgcgaatgcagagtacagagagatcacggatcaagatacgccctggattggcagagtgttcgagggtatggcgaagatgagatatggaaattag

SEQ ID NO: 36387 - protein, 797 aa, Muscodor strobelii
  misc_feature: SGI Peptide ID NO. 572612
  misc_feature (14)..(86): Pfam Id: PF03190 Pfam Desc: Domain of function, DUF255
  misc_feature (14)..(754): NCBI GI: 156058630 Blast Desc: SS1G_03327 [Sclerotinia sclerotiorum 1980] gi|154701114|gb|EDO00853.1| SS1G_03327 [Sclerotinia sclerotiorum 1980]
  misc_feature (3)..(747): NCBI GI: 116194007 Blast Desc: CHGG_06721 [Chaetomium globosum CBS 148.51] gi|88182634|gb|EAQ90102.1| CHGG_06721 [Chaetomium globosum CBS 148.51]
  misc_feature (7)..(706): NCBI GI: 256727067 Blast Desc: NECHADRAFT_33848 [Nectria haematococca mpVI 77-13-4]
  misc_feature (14)..(735): NCBI GI: 164422571 Blast Desc: NCU09980 [Neurospora crassa OR74A] gi|157069724|gb|EAA28727.2| NCU09980 [Neurospora crassa OR74A]
  misc_feature (12)..(703): NCBI GI: 46135803 Blast Desc: FG09417.1 [Gibberella zeae PH-1]
  misc_feature (14)..(753): NCBI GI: 189195556 Blast Desc: PTRG_03783 [Pyrenophora tritici-repentis Pt-1C-BFP] gi|187979995|gb|EDU46621.1| PTRG_03783 [Pyrenophora tritici-repentis Pt-1C-BFP]
  misc_feature (8)..(735): NCBI GI: 149210815 Blast Desc: MGCH7_ch7g880 [Magnaporthe grisea 70-15] gi|86196835|gb|EAQ71473.1| MGCH7_ch7g880 [Magnaporthe grisea 70-15]
  misc_feature (8)..(735): NCBI GI: 145609662 Blast Desc: MGG_03077 [Magnaporthe grisea 70-15] gi|145017069|gb|EDK01432.1| MGG_03077 [Magnaporthe grisea 70-15]
  misc_feature (66)..(753): NCBI GI: 154303146 Blast Desc: BC1G_09593 [Botryotinia fuckeliana B05.10] gi|150855056|gb|EDN30248.1| BC1G_09593 [Botryotinia fuckeliana B05.10]
  misc_feature (1)..(703): NCBI GI: 171683203 Blast Desc: protein product [Podospora anserina] gi|170941561|emb|CAP67213.1| protein product [Podospora anserina]
MAQSALAATSSTPLMNRALQSQSPFVRARANSPVAWQLFDHEAVSRAKAEDKLIFMSIGFLASHHCHIAHHESFSNPNVANLLNAEFIPVLVDRELYPHFDYIYMNYNQSLHSSGGWPLNVFLTPELEPVFSSTYWALPSSVASDTPNGSETDADNPTDWRYVINKVHSAWRDENPRLRDEAKKNIRDLAVVIGEGTLDHGTVSTAASTAGTTTRDSRDSSNVDYTEDIQGEVDLDQIEDAFSLIIRSFDHDFGGFGQQDKFFTPSRLSLMLRATHFPAEVQDVAGEDECAFISTAALRTLRLMSNGAVHDHLGGGFHRHSYTRDWSLPAFEKMLIDNALLLGIFLDAWLLMGSKPEDGLLDTVKEIADYITSSVLTSPEGGFYTSEAADSYNKREDQAMLNGGFYLWTRKEFDAAIGDDMQAKVAAGYWDVREHGNVDPTYDPLDEFLNQNVLRVTKTYAALSKGLGTDVNEVKTLIDSAREKLRLYKDKERVRPIVDTKIVTSYNGMTIAGLSRASAVLRDLDAARAEKYLSAATRAAVYIKNTLYDKERKVLYRAYSQERFTTEGFAEDYAYLIEGLLELYEATADDGWLEWADELQTKQISLFYDNAPSTSGTTKCGAFFSTTADEKFTLLRVKEGIDGSQPSVNSVSVSNLFRLGALLNDKQYTYMAKTSVNAFSVEMLEHPNLFPGLLCGVIPWRLGGRQWVSVAGEQGEHKKAHDLFHKAPRASLSTLRYHDPTTKNADSWLSKRDTSSIPTKAGIYTTDANAEYREITDQDTPWIGRVFEGMAKMRYGN

SEQ ID NO: 36388 - DNA, 3250 bp, Muscodor strobelii
  misc_feature: SGI EST ID NO. CUFF.86807.0
  misc_feature: Variant of the nucleotide sequence at SEQ ID NO 36386
ttagggaagctgtcgcggggttgcgtcggaggcggcgctgtttccactttgcagctccatcccaccatgaaaacatttctcgccgacttgggacaaccaacgtgccaacggcgtaatcagtagcgaagagagatctgcctgctcgccgtacactctgtcgttaccaaccctattttccttgccgttccattctaattgtgctgcacggtcgcatggccgtgacccaagactgacttaggaaactgcgtctcgtgtcgcgcgatgatgtcgtcggtgcagttgggaagcctcaacaccgacaggccgcaaccgcatgcgcccaccatggcgcagtcagcgttggcagccacgtccagcacgcccctcatgaaccgagcactccagagtcagagcccgttcgtgcgtgcgcgtgccaacagtcccgtcgcatggcagctctttgatcacgaagctgtaagccgcgcaaaggccgaggacaagctcatctttatgagcatcggctttctcgcttcccaccactgccacattgcacatcacgaatccttctccaaccccaacgtcgcaaacctcctcaacgccgagttcatccccgtcctagtcgaccgcgagctatacccccacttcgactacatctacatgaactacaaccagtctctgcacagcagcggtggatggcccctcaacgtattcttgacccccgagctcgagcctgtctttagtagcacgtactgggctctgccgagcagcgttgccagtgacacccccaacggcagtgagacagatgccgacaaccctactgactggcgctatgtcatcaacaaggtgcactccgcctggagggacgagaaccctcgtctgcgtgatgaggctaagaagaatatcagagacctggcggtcgtcatcggagagggaacactggaccatggaaccgtgtccactgccgcttcaactgctggcacaactactagggactctagggactcctcgaatgttgattatactgaggatatccaaggtgaagtcgatctggaccagatcgaggatgccttctcccttatcattcgctccttcgaccatgactttggcggctttgggcagcaggacaaattcttcaccccctcccgactatcactcatgttgagagctacgcactttccagctgaagtgcaggatgtggcaggagaggatgaatgtgcttttattagcaccgcagcactccgcaccttgcgcctgatgagcaacggtgcagtacatgaccacctcggaggaggcttccaccgtcactcatacacccgggactggtctctgcccgctttcgagaagatgcttatcgataatgccttgctcctcggtatcttcctcgacgcatggctgctgatgggctccaagcctgaggacggacttctggacactgtgaaagagattgcagactacatcaccagcagcgttcttacatcaccagagggtggattctacacttcggaggcggcagactcgtacaacaagcgggaggatcaagcgatgctgaacggaggcttctacctttggacgagaaaggagttcgacgctgctattggagatgatatgcaggccaaagttgctgctggatactgggatgtgcgagaacatggaaatgtggacccaacctacgatccactcgatgagttcctgaaccagaatgtgctgcgcgttacaaagacatatgcagcacttagtaagggtctaggtacggacgtgaacgaggtcaagacacttatcgattccgcccgagagaagttgagactgtacaaggacaaagaacgcgtgagaccgattgtggatacgaagattgtcacatcatacaacggcatgactattgccggtctatctcgtgcatctgccgttctgagagacctggacgcagctcgagccgagaaatacctatctgctgcaacaagagcagcggtttacatcaagaacacactctacgacaaagagcgcaaagtgctgtacagagcatacagccaagagagattcacgaccgaaggctttgcagaggactacgcctatcttatcgagggacttctcgaactttacgaggcgacggcggatgatggttggttggagtgggccgatgagctgcaaactaagcagatcagtctattctacgacaatgcaccgagtacaagcgggaccactaagtgtggcgctttcttctcaacgactgccgatgagaagtttacgttgttaagagtgaaggagggtatcgatggcagtcagccgtcagtgaacagtgtctcagtatcgaatctgttcagactgggtgcattgctgaatgataagcagtacacgtacatggccaagacgagcgtcaatgcgtttagtgtcgagatgctggagcatcctaatctcttccctggattactctgcggcgtcattccgtggagactaggcggaagacagtgggttagtgtagcaggggaacagggagaacacaagaaagctcatgatctgttccataaagcgccccgtgcctcgctttcgacactgaggtatcatgatccaacgaccaagaacgccgactcgtggttgagcaaacgagacacgagcagcatcccgactaaggcggggatctacacgacagatgcgaatgcagagtacagagagatcacggatcaagatacgccctggattggcagagtgttcgagggtatggcgaagatgagatatggaaattagacgtttctacaagtcctgtaccctcctggaccatggtctgcgggagtaggaagatgggagacagaacgaggagacgttttgtttttctccagtgatgatgaggaggattgatcggtactttggtacctatatctggtggagttgggaggagttttcaaggcacgggtgatgcgtgtatgggtgtgagatgatgatgaggcgatgtggtcggacttgggggtgatgatgatgaggtgatgtgtttacgactgctacgttgtttcttgtttgactaatttgacctggaaagtggttgcattgaggagtgcgttgtttttgtacatggattggtagcatggcgggtgttgcttgttgctttgttggttcataggcggtctcgttgatggtttacttcgtaatgatgttaatgagctttacattgcagatgatgttgatgacctttctttgcggactaggtacggactagcttgaggtagcagacgatagattgttaatacttgcttttgttctaaactacgttgcttgatgaggc

SEQ ID NO: 36389 - DNA, 1044 bp, Muscodor strobelii
  misc_feature: SGI cDNA ID NO. 572613
  misc_feature: Encodes the peptide sequence at SEQ ID NO 36390
atgactgacgccacaaagaaatctgaggaagccgcacacaggacagaatcctcacaggacactctcgccacagagatgacgatcacgaagaagacttcagcgacgggggcatctggcacagataatgaccaagcgacagaaagcctcgacgccaaggatgatcctcaaaccacagccctggtttcatttgcaagcgagaatccagccacagacattacattccctatcaacaagctccccaccgagttacgctggattatatgggatgctgcactcctacaagaagcagcaaatcgattcgtacttctcaccattgcctcatttgaaatacttcaccaccagggcatttcgaatgaaccattccagagaacagccattctgccccttaaacatctcatttcttctctgctctcgacttgtcatgaaagcaggcaaagaggattaaaattctactgctaccgagaaaaagtgttcaagccccagacttcggtcgacaagcttcaatatccgcgcacccacaatggcaagaatatttgcttcggcacaatatacattaatccacgtcatgacatatttctcgatatgtttcccgacagtcgcagcgccgtaaaccttaccaggtacctgatgagcatagatgagaaacttgatgccgggtgtcggcttttgaagtgctctaaagatatccgaaaagtttgctccttgcaggtgggaatcacagaacatcctataaccaagagcggacatctggcgatgacgcggagatattttcccaacctgagtcattggcttgctctgtacatcagatacggtgttcgaccatacgagtcggacctcaaggcgatttgtgagaaaggctgggcgggagtggttgagtattttgagcaatttggccttgaggcccgtattggccgggtagtcaaagacgaatatcacccagtggcccgcggcgtcagttacttggacgcatacgactttgattgcatctatcctgcagaagccgcttcaattttcgatgacgcaaagtcctggccgatctattaa

SEQ ID NO: 36390 - protein, 347 aa, Muscodor strobelii
  misc_feature: SGI Peptide ID NO. 572613
MTDATKKSEEAAHRTESSQDTLATEMTITKKTSATGASGTDNDQATESLDAKDDPQTTALVSFASENPATDITFPINKLPTELRWIIWDAALLQEAANRFVLLTIASFEILHHQGISNEPFQRTAILPLKHLISSLLSTCHESRQRGLKFYCYREKVFKPQTSVDKLQYPRTHNGKNICFGTIYINPRHDIFLDMFPDSRSAVNLTRYLMSIDEKLDAGCRLLKCSKDIRKVCSLQVGITEHPITKSGHLAMTRRYFPNLSHWLALYIRYGVRPYESDLKAICEKGWAGVVEYFEQFGLEARIGRVVKDEYHPVARGVSYLDAYDFDCIYPAEAASIFDDAKSWPIY

SEQ ID NO: 36391 - DNA, 1053 bp, Muscodor strobelii
  misc_feature: SGI cDNA ID NO. 572614
  misc_feature: Encodes the peptide sequence at SEQ ID NO 36392
atgtcaccagccataacgaaggacaaagccttcagggctactatctgggatacggacaaatacgcgaaagaccttcaagcggcgaaagacaatcaatatgcggtatcgtctatcagccgacttccacctcacttgcgcgatccagacaagaacatgagagatacccaagccgcacaggtcaatcaaaacgaggtgtttccgttcagccgatttcctacagagttgcgccacatgatctgtgattccgcattgctccaagaatcgacccagcgcattgtcctcattaccaattgcgaaatgacagggatagaaatcgtcccccgaccaaatcttgtctcaccttatctctcggcttgtgttgagagtagagaaagaggactgaagttttattactatcgagacgaggtattcatttaccaattagctagccgtttttcagatcgcaaaacacggtttccaagaagacttgagcgtggagctgtctacatcaacccgaaatatgacatattcctggattgggacgagccctgtctgcggactcacacatggttgaaatggaacgccttgtgtggtccgatgcagtgtcttcaagacgttgagaaggtttgcatagtgcgggaggcacaaccagcatacaggatccagcacggaggaagtgctaatagttactgtgattggaaagcgcgacgcaacaccttccctaacgtcggtcgttggctcttgttgtacatcaggagccacatggttgaggttaaccccaaggctctcgagcggcgagactgttttgaggaattatacgaggaggacctccggctcatctgtgagaagggctggcctggagtgactgagtatctgcagttgtttgatacgaattatcatcttgcccaactggctaaagacccggaactagaagatcagcctgataggcgcattgaggtactggatccctcagatgtggcaacgattttcgacgatccgtctaataagcgtactaaagtaccagatattccacagctggcgagaaattggaatgaaggatggcgatatctgtga

SEQ ID NO: 36392 - protein, 350 aa, Muscodor strobelii
  misc_feature: SGI Peptide ID NO. 572614
MSPAITKDKAFRATIWDTDKYAKDLQAAKDNQYAVSSISRLPPHLRDPDKNMRDTQAAQVNQNEVFPFSRFPTELRHMICDSALLQESTQRIVLITNCEMTGIEIVPRPNLVSPYLSACVESRERGLKFYYYRDEVFIYQLASRFSDRKTRFPRRLERGAVYINPKYDIFLDWDEPCLRTHTWLKWNALCGPMQCLQDVEKVCIVREAQPAYRIQHGGSANSYCDWKARRNTFPNVGRWLLLYIRSHMVEVNPKALERRDCFEELYEEDLRLICEKGWPGVTEYLQLFDTNYHLAQLAKDPELEDQPDRRIEVLDPSDVATIFDDPSNKRTKVPDIPQLARNWNEGWRYL

SEQ ID NO: 36393 - DNA, 202 bp, Muscodor strobelii
  misc_feature: SGI EST ID NO. CUFF.86693.0
  misc_feature: Variant of the nucleotide sequence at SEQ ID NO 36391
gcacaaccagcatacaggatccagcacggaggaagtgctaatagttactgtgattggaaagcgcgacgcaacaccttccctaacgtcggtcgttggctcttgttgtacatcaggagccacatggttgaggttaaccccaaggctctcgagcggcgagactgttttgaggaattatacgaggaggacctccggctcatctgtg

SEQ ID NO: 36394 - DNA, 978 bp, Muscodor strobelii
  misc_feature: SGI cDNA ID NO. 572615
  misc_feature: Encodes the peptide sequence at SEQ ID NO 36395
atgagcagcgaagttgttcacgcaaattccaccgagatcactgaagttatggaagctgccgatattgcaacaaagtctcccgccgcgggcgaggcttctatcgagactacaagcgagagtctggtcactacaaatacgaagatcccagaggctacgaacgccgcagatgacaccactatcacaagcgtcacgtttcccatcggccacctcccacccgaactgcgccatatgatttgggatgctgcgctgttggaagagtcgacaaatcggattgttcttatcggcaacttctgggatgagtccagttcagggcatgaaattattcccctgaagcatctcgtttccccgtatctatcgacttgcgttgagagtaggcaaaggggcttggcattttatttctaccttgaaggcgtttttgctccacgagagcctaagaccagcctacctgaagtagttttacttcttcggatggtccaagaagcccggcaagggttaccccatcagcagacgcagagtccgcgtctaggcaccttgtacatcaatccacatcatgacatattcctcgttccgtcatgggaggggccaatcaagctctcatgcggtaagatgagatcccttcaagagatcaagaaactgggctcatttgaggatctgccaagcgactggaaaggctacgattcaacggtgaactacttcaaacgcagatttccgtgggatgctcatatttctcttaatacgagtcgctggttcaaaattttctccccgttcaaccgccaagtgctggagggaacaggtattctacaggtctgtcataaaggatggcaggaaatacttagacacattgggtttggcactgatgggagggattgcatttgccgggtcctcccggatccagagcgaaacaatcggcgcagcctgggcaagcgcctggaggtggtggctccttcggaaatcgagtccattttcaaggaggtataa

SEQ ID NO: 36395 - protein, 325 aa, Muscodor strobelii
  misc_feature: SGI Peptide ID NO. 572615
MSSEVVHANSTEITEVMEAADIATKSPAAGEASIETTSESLVTTNTKIPEATNAADDTTITSVTFPIGHLPPELRHMIWDAALLEESTNRIVLIGNFWDESSSGHEIIPLKHLVSPYLSTCVESRQRGLAFYFYLEGVFAPREPKTSLPEVVLLLRMVQEARQGLPHQQTQSPRLGTLYINPHHDIFLVPSWEGPIKLSCGKMRSLQEIKKLGSFEDLPSDWKGYDSTVNYFKRRFPWDAHISLNTSRWFKIFSPFNRQVLEGTGILQVCHKGWQEILRHIGFGTDGRDCICRVLPDPERNNRRSLGKRLEVVAPSEIESIFKEV

SEQ ID NO: 36396 - DNA, 351 bp, Muscodor strobelii
  misc_feature: SGI EST ID NO. CUFF.86705.0
  misc_feature: Variant of the nucleotide sequence at SEQ ID NO 36394
tacgaagatcccagaggctacgaacgccgcagatgacaccactatcacaagcgtcacgtttcccatcggccacctcccacccgaactgcgccatatgatttgggatgctgcgctgttggaagagtcgacaaatcggattgttcttatcggcaacttctgggatgagtccagttcagggcatgaaattattcccctgaagcatctcgtttccccgtatctatcgacttgcgttgagagtaggcaaaggggcttggcattttatttctaccttgaaggcgtttttgctccacgagagcctaagaccagcctacctgaagtagttttacttcttcggatggtccaagaagcccg

SEQ ID NO: 36397 - DNA, 546 bp, Muscodor strobelii
  misc_feature: SGI cDNA ID NO. 572616
  misc_feature: Encodes the peptide sequence at SEQ ID NO 36398
atgaagtacttcgctctgcaagccatcgcggctttccttgctgctcaggctgtagctgcccccttggaggctgtcaagcgcgaagcaaaaccagagcttagcaacgctgatagacccgacatcatgaagatcagacgtgatggacaaaagtcagaggacactcaagaacctgacactatctactatcacccttacagcaagcgtggcgtccagaagtcagacgacacccaggaacctgacaccatttactatcatccttatagtaaacgtgatgggaaagaaactgcggagcctgataccatttactaccacccctacagcaagcgtgatggggagaagactcaggagcccgatactatctactatcacccttatagtaagcgtgatgggcagaagtcagatgacactcaggagcctgacacgatctattaccatccttacagcaagcgtggccaacagaagtcagaggatacgcaagagcctgacaccatttattatcatccttatagcaaacgtgatggtaaggagactgcgacctccaagtga

SEQ ID NO: 36398 - protein, 181 aa, Muscodor strobelii
  misc_feature: SGI Peptide ID NO. 572616
MKYFALQAIAAFLAAQAVAAPLEAVKREAKPELSNADRPDIMKIRRDGQKSEDTQEPDTIYYHPYSKRGVQKSDDTQEPDTIYYHPYSKRDGKETAEPDTIYYHPYSKRDGEKTQEPDTIYYHPYSKRDGQKSDDTQEPDTIYYHPYSKRGQQKSEDTQEPDTIYYHPYSKRDGKETATSK

SEQ ID NO: 36399 - DNA, 885 bp, Muscodor strobelii
  misc_feature: SGI cDNA ID NO. 572617
  misc_feature: Encodes the peptide sequence at SEQ ID NO 36400
atgaatatttctgatctcgtatctaagatattctttcgagagaagctcagaagaacaacggactacactaccgaccaatatcgagacagtagttctgactgtgatagtgaagagaccgctttgaactcatctctatcacagcaaatcgagaaaattttgaagccgcattctaatagtctgaactggccattaatacacttttgtactattatcttttatactggtctatgggctttggcgattcactttgggactacatgtcgaagcggagatctcgaatattcaccggctaaggatgtcatatcatatcatgttggctcctttaacaacacactggatgttggtaatccctacaaaggcgaacggcgtcctggattagatgatctatggtacgacatatccaccaaatatctatcatttagactcaccaaagaggaactcgtagcaatgggccgagacgcagagaactcggtcgagttcagtgacgaacaaggtggctacatggctaccatcgacgtctttcatcaggtccattgcctcaatatgatccgccagcagcttcggcgtgatgagtatccggagaacacaaacgcacactcccagcaattagagcatgtcgaccattgcatcgacacactgcgcgaggttgtaatgtgtcacggcgatgtcagcgtgctaacgtacacctggaaagacggataccaatggccgtgggccaacttcgccattgacagggtatgtcgggactgggaccgtatcacggactgggtgaagagtcccaagcgggaagtgaaaacacttcgaggagaaatcttgagacatccaaaacttggtgtgtcttggcctctctcggatgtagaagaaaaggaaccaaaccctggatag

SEQ ID NO: 36400 - protein, 294 aa, Muscodor strobelii
  misc_feature: SGI Peptide ID NO. 572617
  misc_feature (94)..(282): NCBI GI: 242804865 Blast Desc: conserved [Talaromyces stipitatus ATCC 10500] gi|218717807|gb|EED17228.1| conserved [Talaromyces stipitatus ATCC 10500]
  misc_feature (95)..(258): NCBI GI: 212534390 Blast Desc: conserved [Penicillium marneffei ATCC 18224] gi|210069750|gb|EEA23840.1| conserved [Penicillium marneffei ATCC 18224]
  misc_feature (70)..(256): NCBI GI: 242211074 Blast Desc: [Postia placenta Mad-698-R] gi|220729542|gb|EED83414.1| [Postia placenta Mad-698-R]
  misc_feature (70)..(256): NCBI GI: 242207340 Blast Desc: [Postia placenta Mad-698-R] gi|220731553|gb|EED85397.1| [Postia placenta Mad-698-R]
  misc_feature (100)..(256): NCBI GI: 242222427 Blast Desc: [Postia placenta Mad-698-R] gi|220723760|gb|EED77873.1| [Postia placenta Mad-698-R]
  misc_feature (71)..(259): NCBI GI: 67900556 Blast Desc: AN7265.2 [Aspergillus nidulans FGSC A4] gi|40741946|gb|EAA61136.1| AN7265.2 [Aspergillus nidulans FGSC A4] gi|259483389|tpe|CBF78739.1| TPA: conserved [Aspergillus FGSC
  misc_feature (29)..(287): NCBI GI: 226292646 Blast Desc: conserved [Paracoccidioides brasiliensis Pb18]
  misc_feature (87)..(276): NCBI GI: 67902778 Blast Desc: AN8376.2 [Aspergillus nidulans FGSC A4] gi|40747740|gb|EAA66896.1| AN8376.2 [Aspergillus nidulans FGSC A4] gi|259484308|tpe|CBF80416.1| TPA: [Aspergillus nidulans FGSC
  misc_feature (50)..(259): NCBI GI: 238501772 Blast Desc: conserved [Aspergillus flavus NRRL3357] gi|220692357|gb|EED48704.1| conserved [Aspergillus flavus NRRL3357]
  misc_feature (92)..(278): NCBI GI: 154279252 Blast Desc: [Ajellomyces capsulatus NAm1] gi|150412382|gb|EDN07769.1| [Ajellomyces capsulatus NAm1]
MNISDLVSKIFFREKLRRTTDYTTDQYRDSSSDCDSEETALNSSLSQQIEKILKPHSNSLNWPLIHFCTIIFYTGLWALAIHFGTTCRSGDLEYSPAKDVISYHVGSFNNTLDVGNPYKGERRPGLDDLWYDISTKYLSFRLTKEELVAMGRDAENSVEFSDEQGGYMATIDVFHQVHCLNMIRQQLRRDEYPENTNAHSQQLEHVDHCIDTLREVVMCHGDVSVLTYTWKDGYQWPWANFAIDRVCRDWDRITDWVKSPKREVKTLRGEILRHPKLGVSWPLSDVEEKEPNPG

SEQ ID NO: 36401 - DNA, 831 bp, Muscodor strobelii
  misc_feature: SGI cDNA ID NO. 572618
  misc_feature: Encodes the peptide sequence at SEQ ID NO 36402
atggactcgccccgacgttcaagcgagtcagagaatcatacaagcgtcgcatcaggcgacgtggagcagaagctcatctggtcttcagaaacagagacagaagccctcccgagagaaaccgcgacgttcaactggcttaaggcatctgtatttttccacggagcttctctgatatttttcttgctcaccggctccatggttgaatacttcattccccagacgcctgtgataggtgctactcttgcacactgtatgtgggattatcccttcaacattgttatcgaagtatttacacaatgtctagcgccagccaaagacgccgtggtgtacgaaaaagtagagattgatctcaagcttggtcgtccggcaccattcttcgaccctcctagttctgacgtcgacggggcatgggacaatctcctcaagtattctgtgtctgcggtgaaatgggacggacttgaagattatcaagagagcaggctcaaggatgagaacggaaagactttattgatgttagacgtcttttctagtctgagctgcctcaatgtggctagaaagtacataaataggggatactacggtactgctgcgccaaccgaagagcgcgtcaacgggtgcatcgatcagattcgaagggctctgatgtgctacctcgatatcgtcattctttctttcggctggacacaggagcttgagggaatagaagcaccattggcgaattttgtagtagagcatgaatgtcggaattgggatctgatacaagactgggcaacacaaaatcacgcctctgatgatatcagaacgcttgtaagcttggaatgccaagtctaa

SEQ ID NO: 36402 - protein, 276 aa, Muscodor strobelii
  misc_feature: SGI Peptide ID NO. 572618
  misc_feature (102)..(263): NCBI GI: 242804865 Blast Desc: conserved [Talaromyces stipitatus ATCC 10500] gi|218717807|gb|EED17228.1| conserved [Talaromyces stipitatus ATCC 10500]
  misc_feature (102)..(266): NCBI GI: 170092667 Blast Desc: [Laccaria bicolor S238N-H82] gi|164647414|gb|EDR11658.1| [Laccaria bicolor S238N-H82]
  misc_feature (107)..(265): NCBI GI: 169780700 Blast Desc: [Aspergillus oryzae RIB40] gi|83773554|dbj|BAE63681.1| protein product [Aspergillus oryzae]
  misc_feature (107)..(265): NCBI GI: 238505104 Blast Desc: conserved [Aspergillus flavus NRRL3357] gi|220689895|gb|EED46245.1| conserved [Aspergillus flavus NRRL3357]
  misc_feature (102)..(257): NCBI GI: 238837581 Blast Desc: [Microsporum canis CBS 113480]
  misc_feature (101)..(267): NCBI GI: 212534390 Blast Desc: conserved [Penicillium marneffei ATCC 18224] gi|210069750|gb|EEA23840.1| conserved [Penicillium marneffei ATCC 18224]
  misc_feature (102)..(257): NCBI GI: 242809279 Blast Desc: conserved [Talaromyces stipitatus ATCC 10500] gi|218715961|gb|EED15383.1| conserved [Talaromyces stipitatus ATCC 10500]
  misc_feature (128)..(268): NCBI GI: 115401080 Blast Desc: [Aspergillus terreus NIH2624] gi|114190069|gb|EAU31769.1| [Aspergillus terreus NIH2624]
  misc_feature (102)..(256): NCBI GI: 242207340 Blast Desc: [Postia placenta Mad-698-R] gi|220731553|gb|EED85397.1| [Postia placenta Mad-698-R]
  misc_feature (102)..(256): NCBI GI: 242211074 Blast Desc: [Postia placenta Mad-698-R] gi|220729542|gb|EED83414.1| [Postia placenta Mad-698-R]
MDSPRRSSESENHTSVASGDVEQKLIWSSETETEALPRETATFNWLKASVFFHGASLIFFLLTGSMVEYFIPQTPVIGATLAHCMWDYPFNIVIEVFTQCLAPAKDAVVYEKVEIDLKLGRPAPFFDPPSSDVDGAWDNLLKYSVSAVKWDGLEDYQESRLKDENGKTLLMLDVFSSLSCLNVARKYINRGYYGTAAPTEERVNGCIDQIRRALMCYLDIVILSFGWTQELEGIEAPLANFVVEHECRNWDLIQDWATQNHASDDIRTLVSLECQV

SEQ ID NO: 36403 - DNA, 1182 bp, Muscodor strobelii
  misc_feature: SGI cDNA ID NO. 572619
  misc_feature: Encodes the peptide sequence at SEQ ID NO 36404
atgttcggaccgatcaaaggtcgtctaggcccgagatatgttccagtaaacgcttcatctgaccatagcgatgaatacgatgagaagcttgataagacatcattattcaggcaagtccctaagaaagtgccatcaactaacaagttttccgaagagaaaaaaagattaaaattcggcaacgtcttaattaccgctttctgtgtcggtctcctgatttttatggcagtgggttcatggagtagatgggaaaaggaagtgcaccctagggcctgcaagcaagcgccgctacgtcgcgagtggcgtacgcttgggcccgatgaacagcagagctatattgatgctgttctgtgtctctcaaagctgccttcgctctttgaacccggaagcagccggttcgacgacatggcgtatgcacatttgtttgagggcagtatcacgcactacgccgccgcatttctgccgtttcatcgctatttcatacacgtctatgagaaagcgctgagagaagagtgcaggtacgaaggcggcctagcttattgggattggagtctcgactcatctgacttagctgcctcgcctatctggagcgacgtgagtggcttcggtgggagcggaaatgaggcagtcggcgaggaagtatacagtggacactgcgtcaccagcggaccttttgctcgtgccgaacggcactggaaagctaagtacaacggcgaaggattcgatcccgtagcagagccacattgcctaagtcggggcttcctcaagcccggagacgagaaagatgctttccaaaacaccatttcagctccgtcattagcagaggtgttggacaataaggagtatgataacttcttagaggctctggagatgacctcgcataattcgattcctcaattcgtccgtggggacttcttcttgggcacggcgcctaacgatcccgtcttctacctgcaccacgcacagattgatcgtctgtggtggatgtggcaacagaaagatcccgagagccgactgtacgcttttcaaggtgctgctgaaaacacaatgtttggaggctctaacagcactgagaagagcgaggccaggctctctgatgttttgtctctgggcagatttgcggatcctgtacagatcagagacttaatgcgaaccgacacttcgcttctgtgctactcatactag

SEQ ID NO: 36404 - protein, 393 aa, Muscodor strobelii
  misc_feature: SGI Peptide ID NO. 572619
  misc_feature (66)..(393): Pfam Id: PF00264 Pfam Desc: Common central domain of tyrosinase
  misc_feature (308)..(330): Pfam Id: PF00264 Pfam Desc: Common central domain of tyrosinase
  misc_feature (62)..(393): NCBI GI: 154311963 Blast Desc: BC1G_06015 [Botryotinia fuckeliana B05.10] gi|150850665|gb|EDN25858.1| BC1G_06015 [Botryotinia fuckeliana B05.10]
  misc_feature (69)..(393): NCBI GI: 164422542 Blast Desc: NCU10031 [Neurospora crassa OR74A] gi|157069708|gb|EAA28788.2| conserved [Neurospora crassa OR74A]
  misc_feature (89)..(393): NCBI GI: 116208326 Blast Desc: CHGG_03456 [Chaetomium globosum CBS 148.51] gi|88184053|gb|EAQ91521.1| CHGG_03456 [Chaetomium globosum CBS 148.51]
  misc_feature (90)..(393): NCBI GI: 46127259 Blast Desc: FG08007.1 [Gibberella zeae PH-1]
  misc_feature (97)..(393): NCBI GI: 39969953 Blast Desc: MGG_10585 [Magnaporthe grisea 70-15] gi|145021738|gb|EDK05815.1| MGG_10585 [Magnaporthe grisea 70-15]
  misc_feature (101)..(393): NCBI GI: 189191292 Blast Desc: monoxygenase [Pyrenophora tritici-repentis Pt-1C-BFP] gi|187973591|gb|EDU41090.1| monoxygenase [Pyrenophora tritici-repentis Pt-1C-BFP]
  misc_feature (65)..(393): NCBI GI: 170108688 Blast Desc: tyrosinase [Laccaria bicolor S238N-H82] gi|164639428|gb|EDR03699.1| tyrosinase [Laccaria bicolor S238N-H82]
  misc_feature (97)..(368): NCBI GI: 149209289 Blast Desc: MGCH7_ch7g137 [Magnaporthe grisea 70-15] gi|86196092|gb|EAQ70730.1| MGCH7_ch7g137 [Magnaporthe grisea 70-15]
  misc_feature (90)..(376): NCBI GI: 85093654 Blast Desc: NCU05762 [Neurospora crassa OR74A] gi|28921188|gb|EAA30501.1| conserved [Neurospora crassa OR74A]
  misc_feature (106)..(393): NCBI GI: 242774860 Blast Desc: conserved [Talaromyces stipitatus ATCC 10500] gi|218722146|gb|EED21564.1| conserved [Talaromyces stipitatus ATCC 10500]
  misc_feature (96)..(332): SWISSPROT Homolog: EC 1.14.18.1 Monophenol monooxygenase
MFGPIKGRLGPRYVPVNASSDHSDEYDEKLDKTSLFRQVPKKVPSTNKFSEEKKRLKFGNVLITAFCVGLLIFMAVGSWSRWEKEVHPRACKQAPLRREWRTLGPDEQQSYIDAVLCLSKLPSLFEPGSSRFDDMAYAHLFEGSITHYAAAFLPFHRYFIHVYEKALREECRYEGGLAYWDWSLDSSDLAASPIWSDVSGFGGSGNEAVGEEVYSGHCVTSGPFARAERHWKAKYNGEGFDPVAEPHCLSRGFLKPGDEKDAFQNTISAPSLAEVLDNKEYDNFLEALEMTSHNSIPQFVRGDFFLGTAPNDPVFYLHHAQIDRLWWMWQQKDPESRLYAFQGAAENTMFGGSNSTEKSEARLSDVLSLGRFADPVQIRDLMRTDTSLLCYSY

SEQ ID NO: 36405 - DNA, 1707 bp, Muscodor strobelii
  misc_feature: SGI cDNA ID NO. 572620
  misc_feature: Elevated expression when VOC is produced
  misc_feature: Encodes the peptide sequence at SEQ ID NO 36406
atggggcaacggcaccaactcttcgtcatcgccaagattggcaatcggttccgcggtcttgccgctgttcatcaccaatggctttacggagacgcagctatcgcgcgctgcgctaggctgatcaagatattccaagaaccgaaaaaccaccgattgctaacatatgaactgggtcttgcagctgccttacctaaagagaaatgggaagggaacactaccgactggcgcgatgaaagagctgtattcccattcatcgctacaagccttatgctcggggcttcatttgaccctactgcgaagctcggctcgaacgtcgcacctctccctttcaacatgcgctacaacgcgggagataacaacgacggcatcacaattcttgacgttaccgatccgttctctattcgatacgcgtttgttttcttcggcgagctaccatgtggaggacgggatatgtttcacagcactcctcttactggtgttgagtatgcctgcttttataagttacattccgaacgggaaggggtggaagaaggcattcaacagaaacgcatcgcagaacttctgcgcggtcccaaaagcattgacacaactctgagaagctcaccgtcttctatcactgccaggttgattgaccatgaaaccctagccagtgcctggcctgggaattggcgatccagagcagaatgggggctccccgtagactcaaagccatataatccgccagcagcagtcgccacgcccgtcgatagtgcgccgctacagaaggagtatgaagctttccaaaaggcagaggaggtttttgcagcagactatgtggaagaattccgcaaatatgatccaatgccaattaagcagatcattcacatcgcgacgagcggagacacaaataacgaagccattcttgagctatccaaaacaggctcagacggatttacggatctctcactttcacttgccactctatcacttgacgacacgagactatcttccgcaatgactctccatgggctttatacatggatacgctccctgtcactcgatttctggggaaggcagaagtccttcagtctgggaagaatcggcaccgcttcagcgcaagacctcatcaaatccttcagcgtagacggctcagaattcacggttatcaagccaatgtcagcaaaggcatttcgacgagccagagattgttttcactccagtatcgactggttgacagcacagattgacgatatcaagccgggcgagtggaccatcatagtgcatgagctttgggaggagcacacagctcaatcggacagcgagcctgattttgagccttggaagcgaaaagatcttcagattggttttgtgacaggccatgagtcaggagatctcactgtagtcagtgccaaggaatttcatgagcaactaggctcgaaaggaccaaacggcgagcccttggcctggagcaacgatgaaggatattatttcaaagagctcatcgaagctctcgaaacagaagaggggaagattggccagattcatgtcacttcaatgggaatcgaccgagcgcgttgcattgtagatgcttgtgtagctcgtggtgtttgggagaaagagaaactctcagagaacttgtatcagcatcgggctgaatatcgacgtcgcgcaagatggatggagaatgtgctgtcttcagaaggagcccaactcgtgccaaatccatag

SEQ ID NO: 36406 - protein, 568 aa, Muscodor strobelii
  misc_feature: SGI Peptide ID NO. 572620
  misc_feature (1)..(228): NCBI GI: 256725318 Blast Desc: expressed protein [Nectria haematococca mpVI 77-13-4]
  misc_feature (1)..(143): NCBI GI: 261361600 Blast Desc: [Verticillium albo-atrum VaMs.102]
  misc_feature (1)..(225): NCBI GI: 170106269 Blast Desc: [Laccaria bicolor S238N-H82] gi|164640692|gb|EDR04956.1| [Laccaria bicolor S238N-H82]
  misc_feature (1)..(143): NCBI GI: 169861612 Blast Desc: [Coprinopsis cinerea okayama7#130] gi|116501461|gb|EAU84356.1| [Coprinopsis cinerea okayama7#130]
  misc_feature (2)..(141): NCBI GI: 171684557 Blast Desc: protein product [Podospora anserina] gi|170942239|emb|CAP67891.1| protein product [Podospora anserina]
  misc_feature: Useful for introducing or modulating the production of volatile compounds
MGQRHQLFVIAKIGNRFRGLAAVHHQWLYGDAAIARCARLIKIFQEPKNHRLLTYELGLAAALPKEKWEGNTTDWRDERAVFPFIATSLMLGASFDPTAKLGSNVAPLPFNMRYNAGDNNDGITILDVTDPFSIRYAFVFFGELPCGGRDMFHSTPLTGVEYACFYKLHSEREGVEEGIQQKRIAELLRGPKSIDTTLRSSPSSITARLIDHETLASAWPGNWRSRAEWGLPVDSKPYNPPAAVATPVDSAPLQKEYEAFQKAEEVFAADYVEEFRKYDPMPIKQIIHIATSGDTNNEAILELSKTGSDGFTDLSLSLATLSLDDTRLSSAMTLHGLYTWIRSLSLDFWGRQKSFSLGRIGTASAQDLIKSFSVDGSEFTVIKPMSAKAFRRARDCFHSSIDWLTAQIDDIKPGEWTIIVHELWEEHTAQSDSEPDFEPWKRKDLQIGFVTGHESGDLTVVSAKEFHEQLGSKGPNGEPLAWSNDEGYYFKELIEALETEEGKIGQIHVTSMGIDRARCIVDACVARGVWEKEKLSENLYQHRAEYRRRARWMENVLSSEGAQLVPNP

SEQ ID NO: 36407 - DNA, 2076 bp, Muscodor strobelii
  misc_feature: SGI EST ID NO. CUFF.86756.0
  misc_feature: Variant of the nucleotide sequence at SEQ ID NO 36405
cacaactccaagctacgaagcgatcaaggcaccaaaagacagcgtccttttccctggtctctctctcttttaaactccaatcgctgtgtccacaattcgttttgggtggcactgacacatagagaaacaacgaaatcggaaatcgagtcgttcagtacctatggggcaacggcaccaactcttcgtcatcgccaagattggcaatcggttccgcggtcttgccgctgttcatcaccaatggctttacggagacgcagctatcgcgcgctgcgctaggctgatcaagatattccaagaaccgaaaaaccaccgattgctaacatatgaactgggtcttgcagctgccttacctaaagagaaatgggaagggaacactaccgactggcgcgatgaaagagctgtattcccattcatcgctacaagccttatgctcggggcttcatttgaccctactgcgaagctcggctcgaacgtcgcacctctccctttcaacatgcgctacaacgcgggagataacaacgacggcatcacaattcttgacgttaccgatccgttctctattcgatacgcgtttgttttcttcggcgagctaccatgtggaggacgggatatgtttcacagcactcctcttactggtgttgagtatgcctgcttttataagttacattccgaacgggaaggggtggaagaaggcattcaacagaaacgcatcgcagaacttctgcgcggtcccaaaagcattgacacaactctgagaagctcaccgtcttctatcactgccaggttgattgaccatgaaaccctagccagtgcctggcctgggaattggcgatccagagcagaatgggggctccccgtagactcaaagccatataatccgccagcagcagtcgccacgcccgtcgatagtgcgccgctacagaaggagtatgaagctttccaaaaggcagaggaggtttttgcagcagactatgtggaagaattccgcaaatatgatccaatgccaattaagcagatcattcacatcgcgacgagcggagacacaaataacgaagccattcttgagctatccaaaacaggctcagacggatttacggatctctcactttcacttgccactctatcacttgacgacacgagactatcttccgcaatgactctccatgggctttatacatggatacgctccctgtcactcgatttctggggaaggcagaagtccttcagtctgggaagaatcggcaccgcttcagcgcaagacctcatcaaatccttcagcgtagacggctcagaattcacggttatcaagccaatgtcagcaaaggcatttcgacgagccagagattgttttcactccagtatcgactggttgacagcacagattgacgatatcaagccgggcgagtggaccatcatagtgcatgagctttgggaggagcacacagctcaatcggacagcgagcctgattttgagccttggaagcgaaaagatcttcagattggttttgtgacaggccatgagtcaggagatctcactgtagtcagtgccaaggaatttcatgagcaactaggctcgaaaggaccaaacggcgagcccttggcctggagcaacgatgaaggatattatttcaaagagctcatcgaagctctcgaaacagaagaggggaagattggccagattcatgtcacttcaatgggaatcgaccgagcgcgttgcattgtagatgcttgtgtagctcgtggtgtttgggagaaagagaaactctcagagaacttgtatcagcatcgggctgaatatcgacgtcgcgcaagatggatggagaatgtgctgtcttcagaaggagcccaactcgtgccaaatccatagatccagatatcttagattatttgacctaggaggagaaactgcggctttcgctactgagtgcatatgggcaatgctttgcgggatgctcatgtatcacgttgacagatcggtagtgattagcaaaagttcaatgacaataaaccctacaatggtctcaagctcgtgagtcatacattgcaaggacgcacgctgttgttgatcgatttaga

SEQ ID NO: 36408 - DNA, 750 bp, Muscodor strobelii
  misc_feature: SGI cDNA ID NO. 572621
  misc_feature: Encodes the peptide sequence at SEQ ID NO 36409
atgtccggatccccgatcacatccgccacaggttcctcaactactataacaagcttcacttcatccgccctctcttctgccacgtcatcctccacctcatcaatgtgttcgtcaccgtcgattgatacaggaatcctcgacaacggggacttcgagatgggtctaaacccctggtctctagtattgattgacctcttcgacacctcctatgccctagtcaccccaggggccaatcaatcctgcaccgcattctccgtaaatatgactgagaacggcctaacacagaatctgcgcgcgaacctagtcctccgctctgacctcgtgttctcacgcccaggggcacatctcacaatctcattcttcatccgtttcgctgctcgaaacacggcatctgtcacgttgtccgacgacaagaagataatccgaacaatctctgcttttgactacggacctggcggaaacttcagcggtgtcatggagaacagcgtagctgttggggacctgggtgattggacacaggtcgttatcccgtatatctctatggagaaactctttgaactgagttttacgttctcgctgggttctgcttcgcagaatatcattgggcttgatcaggttgcgatatttcctgactttgggagtggaccgacaacgctagaagcgccgactacagccatgccagctacgaccgtaccgggtacgaccatgattacggccttgcggcctcggcgatatgcgagtgctatgtga

SEQ ID NO: 36409 - protein, 249 aa, Muscodor strobelii
  misc_feature: SGI Peptide ID NO. 572621
MSGSPITSATGSSTTITSFTSSALSSATSSSTSSMCSSPSIDTGILDNGDFEMGLNPWSLVLIDLFDTSYALVTPGANQSCTAFSVNMTENGLTQNLRANLVLRSDLVFSRPGAHLTISFFIRFAARNTASVTLSDDKKIIRTISAFDYGPGGNFSGVMENSVAVGDLGDWTQVVIPYISMEKLFELSFTFSLGSASQNIIGLDQVAIFPDFGSGPTTLEAPTTAMPATTVPGTTMITALRPRRYASAM

SEQ ID NO: 36410 - DNA, 222 bp, Muscodor strobelii
  misc_feature: SGI EST ID NO. CUFF.86747.0
  misc_feature: Variant of the nucleotide sequence at SEQ ID NO 36408
acaatccttatcttcaacacaaagcttcacatcgtcatctattagtagcatcatcacccgaacctcgtcaacccttgcaacctccactgttccgacaagcggcgtaccgacaagcaccatctcgtcatctgtcactgcttcacccacatccacactctccacgatgtccggatccccgatcacatccgccacaggttcctcaactactataacaagcttcac

SEQ ID NO: 36411 - DNA, 1827 bp, Muscodor strobelii
  misc_feature: SGI cDNA ID NO. 572622
  misc_feature: Encodes the peptide sequence at SEQ ID NO 36412
atggaagcgttttgggtctgtgagttcgacgaaattgataaagttgttgccggagcggaacttgtcacaacggtcatgatactgcttattgacgtgctgccgcttccagattgcgtagcagacgatatcggtgaagtaggcgaactaattattgtgccagtgagcgtcgaggataatgtcgatgatagcgaattagttggcatgctagtattaccagacatcgttatagaagacataattgaggacggcgagctagacgtagctgtagtagtgagactgctgctcgctgtcatagtagtgtttgctgacccaggagcagaggacatcattgatgacagcgagctcgcaacggtagtacctgttaaactacccattgtggatgtgccattgatagatcctgaagaagccgggatagaattggttacactaccacttggagacacactgttgttactagatcccgaagtagtcgatatagttggtgagagtgtgctcgttgttgttatgccagtaagactgctgctcatcaatgtagtgttgtttgacgtcgagctggtcgggattgagcgtgtcatggtactagtcattgatatgttgttatttccggacgttgtggtagaagaaatcatcgatgtagctgagttgagagacgtgctattgccagaccccgagctagtaggaattgagccagtcatgctggttctcgttatcgtgctgttcccgccggattgcgatggtgttggcattgtgaaggtcatcctactgctcgttatcgtgctgttacctccagacctcgtagatgatgagagagatcccgtcatcatggatgtgtttgcggcaaggcttgatgtcatgagagtccttgtcgttgtcggcggcagaggcgtccctgtgcctgtagatgatgacgctggcgcgctagtcacaaaactagccgtcatagaggataaagatgaaactccgcctgagatggaagagacactggagcctgggatggttcctgtaaaagagttgaaggaagaggtaacggagcttggcagggcagtgtttgtcacagtgatgctcccagaaacacctgacgatgaagctgatgtcgttgccggtatacttgtctcaaatgagctcgtagaactaactcccggatctgtacttgctgaggtggttgtaggcgcagttgccccagaacttgtacttgaaattgggccagaggtagtagatcctacagttgagttagtagatgtggaactcattggcagtcagtgtctgtcacctcccaaggtcctagtcattggcattgtcccagttgaattcagtgcagtgcctgaactcagacttgatggtgtctccaacgttgtcgttgagttaatgactccagatgtgctactcaaggacgtcattgttgcgatcgcggtgtcagttgcattgacagtgtttgagaagctcgagctaagagtcgacgtcattgttataaatgaggagttagtaatcccagttgaactggacatcaagctaccggaagaagtagatagtccagaagacattcctgatgaaattggagtcatcgtcgtcgggttcgacactccagaagatgtcatagatgttccattccctgtacttgtgcctgttgtgctcagaagcgtaggtgacgagccacttaatggaaccgacgtcgtatcccatgaagaacttgttgacagtacgctggaagttgaaatgggcggcaagtctgtccaccaagtgctcgaagtagattgggtcggttgcgataggatggagctagaagtagacgctacggggctgctgcttgatactggaggcccaggatag

SEQ ID NO: 36412 - protein, 608 aa, Muscodor strobelii
  misc_feature: SGI Peptide ID NO. 572622
MEAFWVCEFDEIDKVVAGAELVTTVMILLIDVLPLPDCVADDIGEVGELIIVPVSVEDNVDDSELVGMLVLPDIVIEDIIEDGELDVAVVVRLLLAVIVVFADPGAEDIIDDSELATVVPVKLPIVDVPLIDPEEAGIELVTLPLGDTLLLLDPEVVDIVGESVLVVVMPVRLLLINVVLFDVELVGIERVMVLVIDMLLFPDVVVEEIIDVAELRDVLLPDPELVGIEPVMLVLVIVLFPPDCDGVGIVKVILLLVIVLLPPDLVDDERDPVIMDVFAARLDVMRVLVVVGGRGVPVPVDDDAGALVTKLAVIEDKDETPPEMEETLEPGMVPVKELKEEVTELGRAVFVTVMLPETPDDEADVVAGILVSNELVELTPGSVLAEVVVGAVAPELVLEIGPEVVDPTVELVDVELIGSQCLSPPKVLVIGIVPVEFSAVPELRLDGVSNVVVELMTPDVLLKDVIVAIAVSVALTVFEKLELRVDVIVINEELVIPVELDIKLPEEVDSPEDIPDEIGVIVVGFDTPEDVIDVPFPVLVPVVLRSVGDEPLNGTDVVSHEELVDSTLEVEMGGKSVHQVLEVDWVGCDRMELEVDATGLLLDTGGPG

SEQ ID NO: 36413 - DNA, 3561 bp, Muscodor strobelii
  misc_feature: SGI cDNA ID NO. 572623
  misc_feature: Encodes the peptide sequence at SEQ ID NO 36414
atggcgtcgcaagcaagtgtcgcaagcagccagccagatcaacgtcatctacgtttaatagctgcatccgctcaagctaacgaagctcgtgtccgagatatcctcgccgaagaacttcaatggacgtcgagccacgaccttgatgctctgcgccaatcgttgcagaaagtcgcggcccgcggcaaactctcgatcgttcgtctcctactccaaaatggcgctgacgtcaacccgaaacgcgacaccgaagtccccgcccttgtgaaagcagccgaaggtggaaacgtttctgttgtttccgaacttcttgcgcacaaagccgatccgaatgcccgcaaccgactcggacagaccgcgttgtttattgctgctataaaaggccatgatagggtcattgagactttgctcgaggccggcgcaaccgtcgattctcctgataaagagggaaggtctgcgcttctattccttgcctcggagaagccgagcaaattgaagtgcaccaataacactctacgggtactacgagatcatggtgcaaatattgaagtacgagatcaaattgaacgcacgccgttgctatgggctgctaccaatggaaacattccgcttgcccggttcttgcttgagagtcgagccaatgtcgctgcgaagaacaatcgtggacgtaccgcgcttcacttggcggccgagagcaatgataaggacaatcgcgaagctatgatccgccttttgctcgactatagcgctgacccaagaacaacgagtgacggaggctggaccccattgcataatgcagctcaagccggtttcctcccggtagcgattttattacttggcgcaaatgctgatgtgaatgctgtgcttacgaatggcatgacgcctctccactgggctgctttcaatggattcgaggatatcgtaagacttctgcttactagaactgacataaatctcgcgattaaagacagctttgaccgtacaccaatgctgtgtgccgctgagaaacatcattcaaccattgtccagcttctctcccctcatcgaactgtagatagactctcacaacttgaggagcaagcttgtaaggcctttgaagccacggttgtcgactttggacagttcgagaagaagcaacttgtatcgaaacactcagtatatgacttgttgtatggctggaatactgagcttgacaagcccaaggtctcgacactgacgaaaaatattaactacaaacctgacttcagatggatccatcttcctgcgaataatattgcttgggttgagacgctcttggccaaatccttcattgaagcaggtcaccgagatatcgaatcattcaaagcattagaaaaatgttttgaccaagagcatcgaggaccatttgctcatgctcattttatgcgcaccttttgtcatcgtatatcatcagcacaaagagacgcacctgaaaagaaacctgataagagagaagataaactgcttatgacactatctgaagagccttcagagattagtacgaaatcaactcaaagtggtgatgccacgccatttcccccaacatcccgaaagctaccagagccgccggaaagtggcacacccaaattcgaagccaagaagaagggtaaaggcgaacaaattgccgaacgacatccaaaaagaagcaagagggccaaaggacctccaggaaatccgccccaaagacaagatagcactgcaagtggtgctagcggaaaatccgttggtcctctcccttgggacaccggtcgtcacgctgtgtcaaatggaaaaatcattctctttatgccatttctccattatgaaacagatgagaggcgtcgaaagatgagtagtgctataaagtgtgtccgtgaaaagagacaaatggtggagaatacgtctcgagattccttgctggtaaacgcgtacatgaacagcacaccgcccttgcatccgcgtcgaacactggatcagtcattttaccatggaatcgacacatcggctcgcgatacagatcaggtcgtgtatcgttattgtaagaggcacaagaaggagatgaaggtcttcatggtggaccaactgtggctatgggtcattagcaaggatcttgtcgtcacctgttttcctcaacgatgggatcaaccgaaaaacgacccgctgaacgttttggacggcatcattgaagagaccaacgcgaagacacgaccgccgattcagtccgtttacgaccttgccatgcttattacgagccgttgttcaagtatgttcgaccgacacagactggacgaccaggattatcaattccttgacatgttcgagaattccattggtgtagttacagatcgcgagagtcgactcttcagccgtttcaatcgtgcttcggctgaatcggcacagtggcttcgacgtcatcgtagaagacgtatggatcgactggctcgtcttggatcacttgattcggaccacgacggagatcaagaaagcccagatcagtttcccgacgcattacttaacattggcgttgaaacatcactattggccgagataaaggatatacgcgacgagctgaacattatcatggggatattagatgctcaacttcagactgtcaatgacttcgagagctttgtcacagacgaactacgagctgaaggctcacgacgcgcgaccgaccagatggtgcacgaaattcggcggcgagccggcgagcagaaaagaggactggatgctcggcagaaggatataactcgaatggacaatcaagcttattcattatatcacaacctgacggatctactagatcttaagcagaagcatagcaatgcgctagaggcgaggtttgccggtgatcaagctctgattgcggcgaaacagggacaaacaatcatggtgttcacaattgtcaccatcgtattcttacccttgtcctttattgcggcatttttcgctatcaacctggaagaatgggggtcaacaacaccgctgaccattccatatgtcagcaagtatatgtttggaattggactcggcataagcgtccccctcgtggcgcttgccttcacggttgacgatatctcggacgcagctgtgaatctctatacgcggataagaggcattttcccccgctctaaatctggctctcgcaagagaagaggatccctgggattccgaaggaaacgcgcacaggagactgacgatcaagatggtgaaataccacataccgactcggagccgccgcatctgaatacttccatcacgcatgagaagccagactattcgaagccgtctttttcgtcacgacgagacgatcactattctccaaatggtcgactaggagactgggatagtgcagcggtccagagaccccgttttcatggtggagagcggagtgatgaacatcagtaccaggcccgtggccgcttgtcgcctgtcttggctgcgaggcataggggagcgagcatgaacagtggaaatatcacgtgggcgccgaaattgagccttgatcgggagtcaggcgcaagatcgcggaagttgagtcaggatcttgagagtggaagattttga

SEQ ID NO: 36414 - protein, 1186 aa, Muscodor strobelii
  misc_feature: SGI Peptide ID NO. 572623
  misc_feature (290)..(323): Pfam Id: PF00023 Pfam Desc: Ankyrin repeat
  misc_feature (115)..(147): Pfam Id: PF00023 Pfam Desc: Ankyrin repeat
  misc_feature (220)..(256): Pfam Id: PF00023 Pfam Desc: Ankyrin repeat
  misc_feature (257)..(289): Pfam Id: PF00023 Pfam Desc: Ankyrin repeat
  misc_feature (187)..(219): Pfam Id: PF00023 Pfam Desc: Ankyrin repeat
  misc_feature (82)..(114): Pfam Id: PF00023 Pfam Desc: Ankyrin repeat
  misc_feature (90)..(114): Pfam Id: PF00023 Pfam Desc: Ankyrin repeat
  misc_feature (1)..(1031): NCBI GI: 145602854 Blast Desc: MGG_04781 [Magnaporthe grisea 70-15] gi|145011220|gb|EDJ95876.1| MGG_04781 [Magnaporthe grisea 70-15]
  misc_feature (3)..(1036): NCBI GI: 119495022 Blast Desc: ankyrin repeat protein [Neosartorya fischeri NRRL 181] gi|119412469|gb|EAW22410.1| ankyrin repeat protein [Neosartorya fischeri NRRL 181]
  misc_feature (54)..(1035): NCBI GI: 212531615 Blast Desc: ankyrin repeat protein [Penicillium marneffei ATCC 18224] gi|210071328|gb|EEA25417.1| ankyrin repeat protein [Penicillium marneffei ATCC 18224]
  misc_feature (3)..(1046): NCBI GI: 70996130 Blast Desc: ankyrin repeat protein [Aspergillus fumigatus Af293] gi|66850455|gb|EAL90782.1| ankyrin repeat protein [Aspergillus fumigatus Af293] gi|159131573|gb|EDP56686.1| ankyrin repeat
  misc_feature (54)..(1024): NCBI GI: 242773540 Blast Desc: ankyrin repeat protein [Talaromyces stipitatus ATCC 10500] gi|218721880|gb|EED21298.1| ankyrin repeat protein [Talaromyces stipitatus ATCC 10500]
  misc_feature (3)..(1028): NCBI GI: 121701093 Blast Desc: ankyrin repeat protein [Aspergillus clavatus NRRL 1] gi|119396954|gb|EAW07385.1| ankyrin repeat protein [Aspergillus clavatus NRRL 1]
  misc_feature (3)..(1029): NCBI GI: 115492215 Blast Desc: conserved [Aspergillus terreus NIH2624] gi|114197595|gb|EAU39295.1| conserved [Aspergillus terreus NIH2624]
  misc_feature (50)..(1036): NCBI GI: 145230782 Blast Desc: An01g12480 [Aspergillus niger] gi|134055776|emb|CAK37300.1| protein product [Aspergillus niger]
  misc_feature (3)..(1043): NCBI GI: 169783090 Blast Desc: [Aspergillus oryzae RIB40] gi|83774751|dbj|BAE64874.1| protein product [Aspergillus oryzae]
  misc_feature (3)..(1043): NCBI GI: 238492835 Blast Desc: ankyrin repeat protein [Aspergillus flavus NRRL3357] gi|220696148|gb|EED52490.1| ankyrin repeat protein [Aspergillus flavus NRRL3357]
MASQASVASSQPDQRHLRLIAASAQANEARVRDILAEELQWTSSHDLDALRQSLQKVAARGKLSIVRLLLQNGADVNPKRDTEVPALVKAAEGGNVSVVSELLAHKADPNARNRLGQTALFIAAIKGHDRVIETLLEAGATVDSPDKEGRSALLFLASEKPSKLKCTNNTLRVLRDHGANIEVRDQIERTPLLWAATNGNIPLARFLLESRANVAAKNNRGRTALHLAAESNDKDNREAMIRLLLDYSADPRTTSDGGWTPLHNAAQAGFLPVAILLLGANADVNAVLTNGMTPLHWAAFNGFEDIVRLLLTRTDINLAIKDSFDRTPMLCAAEKHHSTIVQLLSPHRTVDRLSQLEEQACKAFEATVVDFGQFEKKQLVSKHSVYDLLYGWNTELDKPKVSTLTKNINYKPDFRWIHLPANNIAWVETLLAKSFIEAGHRDIESFKALEKCFDQEHRGPFAHAHFMRTFCHRISSAQRDAPEKKPDKREDKLLMTLSEEPSEISTKSTQSGDATPFPPTSRKLPEPPESGTPKFEAKKKGKGEQIAERHPKRSKRAKGPPGNPPQRQDSTASGASGKSVGPLPWDTGRHAVSNGKIILFMPFLHYETDERRRKMSSAIKCVREKRQMVENTSRDSLLVNAYMNSTPPLHPRRTLDQSFYHGIDTSARDTDQVVYRYCKRHKKEMKVFMVDQLWLWVISKDLVVTCFPQRWDQPKNDPLNVLDGIIEETNAKTRPPIQSVYDLAMLITSRCSSMFDRHRLDDQDYQFLDMFENSIGVVTDRESRLFSRFNRASAESAQWLRRHRRRRMDRLARLGSLDSDHDGDQESPDQFPDALLNIGVETSLLAEIKDIRDELNIIMGILDAQLQTVNDFESFVTDELRAEGSRRATDQMVHEIRRRAGEQKRGLDARQKDITRMDNQAYSLYHNLTDLLDLKQKHSNALEARFAGDQALIAAKQGQTIMVFTIVTIVFLPLSFIAAFFAINLEEWGSTTPLTIPYVSKYMFGIGLGISVPLVALAFTVDDISDAAVNLYTRIRGIFPRSKSGSRKRRGSLGFRRKRAQETDDQDGEIPHTDSEPPHLNTSITHEKPDYSKPSFSSRRDDHYSPNGRLGDWDSAAVQRPRFHGGERSDEHQYQARGRLSPVLAARHRGASMNSGNITWAPKLSLDRESGARSRKLSQDLESGRF

SEQ ID NO: 36415 - DNA, 4991 bp, Muscodor strobelii
  misc_feature: SGI EST ID NO. CUFF.86763.0
  misc_feature: Variant of the nucleotide sequence at SEQ ID NO 36413
atgcgactgcagggtacgatgatatcaccttgagtcacttgaccctaatggccagtgttaaatgttgattgcactggaactttcgattgctgaccgtatagactgcatgccgcagtggttggcgaaaatttcctggcattagtttgcgacaacaccacttgaagcctgccgagacaaaagctgcatacctgtggcgatggagacgacaaggacaacagtataaactactcaattgttagcaacatggatccgttgttgtagagtttaccgggaatacggttgtggaacactattacaaactcaattgcgaagctatggcgtcgcaagcaagtgtcgcaagcagccagccagatcaacgtcatctacgtttaatagctgcatccgctcaagctaacgaagctcgtgtccgagatatcctcgccgaagaacttcaatggacgtcgagccacgaccttgatgctctgcgccaatcgttgcagaaagtcgcggcccgcggcaaactctcgatcgttcgtctcctactccaaaatggcgctgacgtcaacccgaaacgcgacaccgaagtccccgcccttgtgaaagcagccgaaggtggaaacgtttctgttgtttccgaacttcttgcgcacaaagccgatccgaatgcccgcaaccgactcggacagaccgcgttgtttattgctgctataaaaggccatgatagggtcattgagactttgctcgaggccggcgcaaccgtcgattctcctgataaagagggaaggtctgcgcttctattccttgcctcggagaagccgagcaaattgaagtgcaccaataacactctacgggtactacgagatcatggtgcaaatattgaagtacgagatcaaattgaacgcacgccgttgctatgggctgctaccaatggaaacattccgcttgcccggttcttgcttgagagtcgagccaatgtcgctgcgaagaacaatcgtggacgtaccgcgcttcacttggcggccgagagcaatgataaggacaatcgcgaagctatgatccgccttttgctcgactatagcgctgacccaagaacaacgagtgacggaggctggaccccattgcataatgcagctcaagccggtttcctcccggtagcgattttattacttggcgcaaatgctgatgtgaatgctgtgcttacgaatggcatgacgcctctccactgggctgctttcaatggattcgaggatatcgtaagacttctgcttactagaactgacataaatctcgcgattaaagacagctttgaccgtacaccaatgctgtgtgccgctgagaaacatcattcaaccattgtccagcttctctcccctcatcgaactgtagatagactctcacaacttgaggagcaagcttgtaaggcctttgaagccacggttgtcgactttggacagttcgagaagaagcaacttgtatcgaaacactcagtatatgacttgttgtatggctggaatactgagcttgacaagcccaaggtctcgacactgacgaaaaatattaactacaaacctgacttcagatggatccatcttcctgcgaataatattgcttgggttgagacgctcttggccaaatccttcattgaagcaggtcaccgagatatcgaatcattcaaagcattagaaaaatgttttgaccaagagcatcgaggaccatttgctcatgctcattttatgcgcaccttttgtcatcgtatatcatcagcacaaagagacgcacctgaaaagaaacctgataagagagaagataaactgcttatgacactatctgaagagccttcagagattagtacgaaatcaactcaaagtggtgatgccacgccatttcccccaacatcccgaaagctaccagagccgccggaaagtggcacacccaaattcgaagccaagaagaagggtaaaggcgaacaaattgccgaacgacatccaaaaagaagcaagagggccaaaggacctccaggaaatccgccccaaagacaagatagcactgcaagtggtgctagcggaaaatccgttggtcctctcccttgggacaccggtcgtcacgctgtgtcaaatggaaaaatcattctctttatgccatttctccattatgaaacagatgagaggcgtcgaaagatgagtagtgctataaagtgtgtccgtgaaaagagacaaatggtggagaatacgtctcgagattccttgctggtaaacgcgtacatgaacagcacaccgcccttgcatccgcgtcgaacactggatcagtcattttaccatggaatcgacacatcggctcgcgatacagatcaggtcgtgtatcgttattgtaagaggcacaagaaggagatgaaggtcttcatggtggaccaactgtggctatgggtcattagcaaggatcttgtcgtcacctgttttcctcaacgatgggatcaaccgaaaaacgacccgctgaacgttttggacggcatcattgaagagaccaacgcgaagacacgaccgccgattcagtccgtttacgaccttgccatgcttattacgagccgttgttcaagtatgttcgaccgacacagactggacgaccaggattatcaattccttgacatgttcgagaattccattggtgtagttacagatcgcgagagtcgactcttcagccgtttcaatcgtgcttcggctgaatcggcacagtggcttcgacgtcatcgtagaagacgtatggatcgactggctcgtcttggatcacttgattcggaccacgacggagatcaagaaagcccagatcagtttcccgacgcattacttaacattggcgttgaaacatcactattggccgagataaaggatatacgcgacgagctgaacattatcatggggatattagatgctcaacttcagactgtcaatgacttcgagagctttgtcacagacgaactacgagctgaaggctcacgacgcgcgaccgaccagatggtgcacgaaattcggcggcgagccggcgagcagaaaagaggactggatgctcggcagaaggatataactcgaatggacaatcaagcttattcattatatcacaacctgacggatctactagatcttaagcagaagcatagcaatgcgctagaggcgaggtttgccggtgatcaagctctgattgcggcgaaacagggacaaacaatcatggtgttcacaattgtcaccatcgtattcttacccttgtcctttattgcggcatttttcgctatcaacctggaagaatgggggtcaacaacaccgctgaccattccatatgtcagcaagtatatgtttggaattggactcggcataagcgtccccctcgtggcgcttgccttcacggttgacgatatctcggacgcagctgtgaatctctatacgcggataagaggcattttcccccgctctaaatctggctctcgcaagagaagaggatccctgggattccgaaggaaacgcgcacaggagactgacgatcaagatggtgaaataccacataccgactcggagccgccgcatctgaatacttccatcacgcatgagaagccagactattcgaagccgtctttttcgtcacgacgagacgatcactattctccaaatggtcgactaggagactgggatagtgcagcggtccagagaccccgttttcatggtggagagcggagtgatgaacatcagtaccaggcccgtggccgcttgtcgcctgtcttggctgcgaggcataggggagcgagcatgaacagtggaaatatcacgtgggcgccgaaattgagccttgatcgggagtcaggcgcaagatcgcggaagttgagtcaggatcttgagagtggaagattttgagaatttagcaacaaggcacaagaaatgccaccatgtggaattgcatactatacgatcgcattacactttctcgccttcacgagtggttattgaaacggaccgactcgccaacaatcaactgcgctcctttcaacatcagatcttagctgtcttgacgccacatcatgaatcggacgagtgcggaaatgaaaattcatgctgcgcacttctcatagcacagtagaatcgcgtaactatcagcccatacaaggatgaatctgactctggatcattagagtttttccaactttacgaagtccatttgagtcaactttccgaatccacgaatgttctacgggtaatttctccgccagctttgcttcctctgccggcgagtcaactcaatctggaaggagatacagttgttaagatttgattcggagtattcgcatcatcattcttgacatgtcggcagttgtcatagaggtcgggcattgaataaaacgatagtccatttcaatcatcgagctgatgataaatccaacggtttacgtttgaagacttccggaagattggctccggtgtcaacaaggcagtatccaggctacgtacggactccatccttatgccacatgcatgtgttattctggacgatgaacagatcaaaatgttattgtctcgggcttacgagtctcttcgtggctcttgcgaggccagccttatgtaaaatctaaagacagcaaatcgaccacctggtcatactttgacgttcaactataactaagatctctcggacgttactccacatgcggaaagcgttgtttctagttcctagcagctacgtgatcgtctttgaaagtttgcgcgtgacaggatcttgtattccgaccgagatcggtatctcactacactccgcgagttgaggagacacagacagaatccgcaagaagtaaatggttctgacacaaaacggtagtgcagcatgcgtcgaggtctcaggtacgacaacctaaatggtcacccacacccctgcttcactctttatcatcgcaaatatgagaaggtaggtaaaggcaggcgagagctgaaagcagctttctgagacctcaaacattcgtcaccaaagcttactttcgc

SEQ ID NO: 36416 - DNA, 1344 bp, Muscodor strobelii
  misc_feature: SGI cDNA ID NO. 572624
  misc_feature: Elevated expression when VOC is produced
  misc_feature: Encodes the peptide sequence at SEQ ID NO 36417
atggacaaacttccagcgtttccagtttcttttcccaagcaaatccaagccacgaccacgaacttcttgtccgtggtcatggcgaggaagcgcatgcttgtctttttattcgtgcctctggttctgctcgcgttactcttctcgggaagcgtgaactacgatagcgaatggtcgcagtcgcttggcaatggcttgaaaaatggcgtgagctacgtaacgggcgacggacatagctcttcgttgagcggcggtggaatcgtgtacatttcggccaatagctctaatagttctcttggccatggtaccacgaaatattggaagagcaaggcttacctgcgccctggctacgatttgcctctggccgatggtatgcctctacgtatcatggccttgggtgcgtcgactacccgtggcgacagccccgaacatggaatcgacaacaacggtttccgccgaccccttcgcgacagacttacaagcatcggcaatccggtcaacttcgttggttctcagcgtctgggcaatatgaccgataacgacatcgaggcctaccctggtgtgcccacgcatagaatccatgcgcacgctaagcagacggtcccaactcgcaaacccaacgtcttcctcatcaatgctggctccaatgactgcttccagcatattgatatcgacaacttctataagcgctacgacgcgctcgttgaatattgcctcaaggcctcgcctcgttccacaattattatgtccaccatcttacctacctgggacaagcgattcaacggtcgagaggatgtattccgtgtaaaccctcaaatccgaagactcgcacaaatttaccaggagcaagggaaaccagtcgtcttggctgaacttcaaggacccgacggcatccaagatggtaacatcgccgaagacggtatgcatccgggcactgctggttacgagatgatggctaccaagatgttcgaggctattgttgaggcagacgccagaggtttcctccaatcgcccgagcctatcatgggtattcttgatgatggtaacgaggagcgaaaagaagaagctacgatgaaacttgagaagatcatgatggtccagaactcaactgaagtctacgaggcagctcaaatagacaagatgaaggcaggactgaaggagttccacaagcaggaggccgagaaggccaaggaagagaaggctaaggagtctgagaaggctaaagactcccagaaggctgggtctggatccgggccatcgaagtcatcgaagtcatccaaaaagtcgaccaagctaagaagggaacagaagcgagaaaacagatttccgcagttgaaggtcgtctga

SEQ ID NO: 36417 - protein, 447 aa, Muscodor strobelii
  misc_feature: SGI Peptide ID NO. 572624
  misc_feature (128)..(321): Pfam Id: PF00657 Pfam Desc: GDSL-like Lipase/Acylhydrolase
  misc_feature (119)..(347): NCBI GI: 171691426 Blast Desc: protein product [Podospora anserina] gi|170945661|emb|CAP71774.1| protein product [Podospora anserina]
  misc_feature (120)..(347): NCBI GI: 85082538 Blast Desc: NCU04526 [Neurospora crassa OR74A] gi|28918018|gb|EAA27701.1| [Neurospora crassa OR74A]
  misc_feature (119)..(343): NCBI GI: 116195422 Blast Desc: CHGG_04309 [Chaetomium globosum CBS 148.51] gi|88180222|gb|EAQ87690.1| CHGG_04309 [Chaetomium globosum CBS 148.51]
  misc_feature (114)..(342): NCBI GI: 261357824 Blast Desc: conserved [Verticillium albo-atrum VaMs.102]
  misc_feature (125)..(334): NCBI GI: 256731629 Blast Desc: NECHADRAFT_122845 [Nectria haematococca mpVI 77-13-4]
  misc_feature (126)..(334): NCBI GI: 255931095 Blast Desc: Pc12g02110 [Penicillium chrysogenum Wisconsin 54-1255] gi|211581723|emb|CAP79838.1| Pc12g02110 [Penicillium chrysogenum Wisconsin 54-1255]
  misc_feature (121)..(335): NCBI GI: 238482081 Blast Desc: conserved [Aspergillus flavus NRRL3357] gi|220700329|gb|EED56667.1| conserved [Aspergillus flavus NRRL3357]
  misc_feature (114)..(380): NCBI GI: 169778429 Blast Desc: [Aspergillus oryzae RIB40] gi|83772417|dbj|BAE62547.1| protein product [Aspergillus oryzae]
  misc_feature (124)..(338): NCBI GI: 255945471 Blast Desc: Pc20g10090 [Penicillium chrysogenum Wisconsin 54-1255] gi|211588238|emb|CAP86338.1| Pc20g10090 [Penicillium chrysogenum Wisconsin 54-1255]
  misc_feature (126)..(337): NCBI GI: 116203537 Blast Desc: CHGG_09652 [Chaetomium globosum CBS 148.51] gi|88175780|gb|EAQ83248.1| CHGG_09652 [Chaetomium globosum CBS 148.51]
  misc_feature: Useful for introducing or modulating the production of volatile compounds
MDKLPAFPVSFPKQIQATTTNFLSVVMARKRMLVFLFVPLVLLALLFSGSVNYDSEWSQSLGNGLKNGVSYVTGDGHSSSLSGGGIVYISANSSNSSLGHGTTKYWKSKAYLRPGYDLPLADGMPLRIMALGASTTRGDSPEHGIDNNGFRRPLRDRLTSIGNPVNFVGSQRLGNMTDNDIEAYPGVPTHRIHAHAKQTVPTRKPNVFLINAGSNDCFQHIDIDNFYKRYDALVEYCLKASPRSTIIMSTILPTWDKRFNGREDVFRVNPQIRRLAQIYQEQGKPVVLAELQGPDGIQDGNIAEDGMHPGTAGYEMMATKMFEAIVEADARGFLQSPEPIMGILDDGNEERKEEATMKLEKIMMVQNSTEVYEAAQIDKMKAGLKEFHKQEAEKAKEEKAKESEKAKDSQKAGSGSGPSKSSKSSKKSTKLRREQKRENRFPQLKVV

SEQ ID NO: 36418 - DNA, 2458 bp, Muscodor strobelii
  misc_feature: SGI EST ID NO. CUFF.86855.0
  misc_feature: Variant of the nucleotide sequence at SEQ ID NO 36416
aacggtttgaactcgattgaaccaaacacaaggcatctatcgattataacgtcaccacacatcaaacccaaagcgatgggtgcctattgctattgttgcacatctccatcttccgtctggtgaatctcactcctttcctcctatcgccaagtcttcccacacaccgccgagccctgccccgtctcatccctcttctgcattcggccgccactcacagctggaaggcccaattagacggcgacgacgctattgtcctggcccgattagctgatcttggcggatactaatcctggccgccgctggcttggctctggcttggctcattcagccccgactctgtagtggagttgggaatgaaaatcgggggtgaaaaaggaaggggcccgaggggcgccagccagcccaggacatttctggacgtcctatcagtggcgtgctagtgatcatcacctcctcttcctctgcgcgctccccttctcttcttgcgtttcatggatttgtcttgctgagcaaactgctgcatttggcctttgcaactggcacatttgtttcctcttcttcttctatctattcaccaaagtcattcttttagagctattattatacatattaagtgtgcataccgagaccccttgtccctcgttaattacccgacctaccgattgtgtccttttaccctgtgcgacagcacgacaatatagtagagatggacaaacttccagcgtttccagtttcttttcccaagcaaatccaagccacgaccacgaacttcttgtccgtggtcatggcgaggaagcgcatgcttgtctttttattcgtgcctctggttctgctcgcgttactcttctcgggaagcgtgaactacgatagcgaatggtcgcagtcgcttggcaatggcttgaaaaatggcgtgagctacgtaacgggcgacggacatagctcttcgttgagcggcggtggaatcgtgtacatttcggccaatagctctaatagttctcttggccatggtaccacgaaatattggaagagcaaggcttacctgcgccctggctacgatttgcctctggccgatggtatgcctctacgtatcatggccttgggtgcgtcgactacccgtggcgacagccccgaacatggaatcgacaacaacggtttccgccgaccccttcgcgacagacttacaagcatcggcaatccggtcaacttcgttggttctcagcgtctgggcaatatgaccgataacgacatcgaggcctaccctggtgtgcccacgcatagaatccatgcgcacgctaagcagacggtcccaactcgcaaacccaacgtcttcctcatcaatgctggctccaatgactgcttccagcatattgatatcgacaacttctataagcgctacgacgcgctcgttgaatattgcctcaaggcctcgcctcgttccacaattattatgtccaccatcttacctacctgggacaagcgattcaacggtcgagaggatgtattccgtgtaaaccctcaaatccgaagactcgcacaaatttaccaggagcaagggaaaccagtcgtcttggctgaacttcaaggacccgacggcatccaagatggtaacatcgccgaagacggtatgcatccgggcactgctggttacgagatgatggctaccaagatgttcgaggctattgttgaggcagacgccagaggtttcctccaatcgcccgagcctatcatgggtattcttgatgatggtaacgaggagcgaaaagaagaagctacgatgaaacttgagaagatcatgatggtccagaactcaactgaagtctacgaggcagctcaaatagacaagatgaaggcaggactgaaggagttccacaagcaggaggccgagaaggccaaggaagagaaggctaaggagtctgagaaggctaaagactcccagaaggctgggtctggatccgggccatcgaagtcatcgaagtcatccaaaaagtcgaccaagctaagaagggaacagaagcgagaaaacagatttccgcagttgaaggtcgtctgaacaacgcctcagcccatagatcaagcgtgatattttataatagagcaagacggacaaaagcgggatctgattacagttctacgacttcccgattgcctacgacgccacggactcacagctacgccaagccatgtaacacatagactattgtaatatgaggtgctcaaataagcgacgggatttgatgttggggaaatataccattattatgatgcacaacgcattgaccagcccaactctgagatatgaataacatatcgtcgacttggatcgttctttattctggatttacctaggaagatttgaaattagaagcttcttgggagctaatcatgatattcgttggagaagagaagagaagccttagtatactagcctgagatggccaatgccagtgtctgatatttg

SEQ ID NO: 36419 - DNA, 864 bp, Muscodor strobelii
  misc_feature: SGI cDNA ID NO. 572625
  misc_feature: Encodes the peptide sequence at SEQ ID NO 36420
atgaagtcttcaatcttcatcgccgccactggcgctatgctggctatggccaagccgctcaacaagcgcgtcatggaaaccgaggtcgtggttgagtactacaccgtcacggtcactggcaacgctcctgccgagcccacttccaccgtgaagcccacctcgcacatcaagaagcccaccaagccttccaccacccacattgagcctgctcctaccccttccacgacctctgtaccttacgtcgttgttaccgtcactcagggcaacacccctattcatgaggccacatccacttccaaggctgaggagcacacgacgactacgtccgaacaggccgctgctactggcaacgacttcgtctccaaggccctgtaccaccataacatccaccgatccaaccactctgctcctgctctggtttggaaccagaccattgccgactacgccgctgcaactgccggcaagtgtgtttttgcacatgacatgaagcaaggaaacggtggctacggccagaacctcgcgtctttcggtacatccgctaatgttcaggccattggtgacgatggcgctgtctccatggctgccaccaaccagtggtatgatggcgagttcaacggctaccagggacgtttcggccaggccccaaacatgaccgcgtttgagtcatggggacatctgagccagctgctgtggtcgtccactaccgcggtcggatgccatgctcagctctgcaacgccggcaccatttttgatggcttcgatgcttggttcaccgtctgcaactactaccctcctggcaatgttgccgaccaatacgacacgaacgttaaggtgccccatggtgatgctaccgtcacggtctaa

SEQ ID NO: 36420 - protein, 287 aa, Muscodor strobelii
  misc_feature: SGI Peptide ID NO. 572625
  misc_feature (124)..(262): Pfam Id: PF00188 Pfam Desc: SCP-like extracellular protein
  misc_feature (1)..(286): NCBI GI: 39971237 Blast Desc: MGG_03085 [Magnaporthe grisea 70-15] gi|149210831|ref|XP_001522790.1| MGCH7_ch7g888 [Magnaporthe grisea 70-15] gi|86196843|gb|EAQ71481.1| MGCH7_ch7g888 grisea
  misc_feature (1)..(287): NCBI GI: 256727636 Blast Desc: NECHADRAFT_99312 [Nectria haematococca mpVI 77-13-4]
  misc_feature (1)..(285): NCBI GI: 85116508 Blast Desc: NCU02470 [Neurospora crassa OR74A] gi|28926866|gb|EAA35828.1| conserved [Neurospora crassa OR74A]
  misc_feature (56)..(285): NCBI GI: 38567118 Blast Desc: conserved [Neurospora crassa]
  misc_feature (1)..(287): NCBI GI: 156053149 Blast Desc: SS1G_06742 [Sclerotinia sclerotiorum 1980] gi|154704520|gb|EDO04259.1| SS1G_06742 [Sclerotinia sclerotiorum 1980]
  misc_feature (117)..(283): NCBI GI: 116194039 Blast Desc: CHGG_06737 [Chaetomium globosum CBS 148.51] gi|88182650|gb|EAQ90118.1| CHGG_06737 [Chaetomium globosum CBS 148.51]
  misc_feature (1)..(287): NCBI GI: 46136065 Blast Desc: FG09548.1 [Gibberella zeae PH-1]
  misc_feature (1)..(285): NCBI GI: 212538497 Blast Desc: SCP-like extracellular protein, [Penicillium marneffei ATCC 18224] gi|210069146|gb|EEA23237.1| SCP-like extracellular protein, [Penicillium marneffei ATCC 18224]
  misc_feature (121)..(286): NCBI GI: 261353725 Blast Desc: conserved [Verticillium albo-atrum VaMs.102]
  misc_feature (1)..(285): NCBI GI: 242806547 Blast Desc: SCP-like extracellular protein, [Talaromyces stipitatus ATCC 10500] gi|242806552|ref|XP_002484767.1| SCP-like extracellular protein, [Talaromyces stipitatus ATCC 10500] ATCC
MKSSIFIAATGAMLAMAKPLNKRVMETEVVVEYYTVTVTGNAPAEPTSTVKPTSHIKKPTKPSTTHIEPAPTPSTTSVPYVVVTVTQGNTPIHEATSTSKAEEHTTTTSEQAAATGNDFVSKALYHHNIHRSNHSAPALVWNQTIADYAAATAGKCVFAHDMKQGNGGYGQNLASFGTSANVQAIGDDGAVSMAATNQWYDGEFNGYQGRFGQAPNMTAFESWGHLSQLLWSSTTAVGCHAQLCNAGTIFDGFDAWFTVCNYYPPGNVADQYDTNVKVPHGDATVTV

SEQ ID NO: 36421 - DNA, 2140 bp, Muscodor strobelii
  misc_feature: SGI EST ID NO. CUFF.86818.0
  misc_feature: Variant of the nucleotide sequence at SEQ ID NO 36419
cttctttcttcccttctgcaggtttgacctacctctgaatatatcaacgcgcctgttcgtgagacctcagagtcctctctgaccaaccacttccactccttcgtgtctgcctccggcgcacttacactccttaagaaccccccaggtcttcacttgcgaactcattctctgcacacctcaccgtctcgactttgacagacgacctcaacggcggccccgacacaattgatttgagtcaactcattcactctctttagcactttgctactgccattccttgcccggacgccagccgttctgaaatccaaccgccaagtctgcttcagccagcacccagctctgcaacaataagctgctcgacggtcgaacaagtttcgctgttgtctcaccacattcactcgatttgactcaaccaattgtcgcctttttgattctctcgtgtcccgttgacactataagttgtattgagatcgccttgaaatccgatatcaacaaactccaacccattgttccattttgggttacattctaaaagttatatacaaaacttttggacattcggaaaaatgaagtcttcaatcttcatcgccgccactggcgctatgctggctatggccaagccgctcaacaagcgcgtcatggaaaccgaggtcgtggttgagtactacaccgtcacggtcactggcaacgctcctgccgagcccacttccaccgtgaagcccacctcgcacatcaagaagcccaccaagccttccaccacccacattgagcctgctcctaccccttccacgacctctgtaccttacgtcgttgttaccgtcactcagggcaacacccctattcatgaggccacatccacttccaaggctgaggagcacacgacgactacgtccgaacaggccgctgctactggcaacgacttcgtctccaaggccctgtaccaccataacatccaccgatccaaccactctgctcctgctctggtttggaaccagaccattgccgactacgccgctgcaactgccggcaagtgtgtttttgcacatgacatgaagcaaggaaacggtggctacggccagaacctcgcgtctttcggtacatccgctaatgttcaggccattggtgacgatggcgctgtctccatggctgccaccaaccagtggtatgatggcgagttcaacggctaccagggacgtttcggccaggccccaaacatgaccgcgtttgagtcatggggacatctgagccagctgctgtggtcgtccactaccgcggtcggatgccatgctcagctctgcaacgccggcaccatttttgatggcttcgatgcttggttcaccgtctgcaactactaccctcctggcaatgttgccgaccaatacgacacgaacgttaaggtgccccatggtgatgctaccgtcacggtctaagttggttctgtccaggaagatcgcgactcttctaccatttatggtttgtgtatgcaaaaagctgtttgtcagcaatgtttcttgacgacaacgcaatggatgcgccttgtatcaaagacaaatgggatggatggcgagcaatggtagcttgcaacgatgacgattccatgtatacattcagtccagcaactcactcagatggcgcgatgtagatgacggtcaacaatccctttcgattctttgccagaccttaccaagctcattttgcatccatttcagactcgaggctggattagctcttgtttggacatgtcttgcaacaggtctggcccctgctatatggctagactgcccattttcacttcacttcttgtatctaaactcgttcgtttctgtatggcaagtcttctttttcccatggacagatgtgaaaggctcgtatacccatcgatctcacaccggttggccagtcgatgggttcgagtcctttgggttccatttcagagatcgatggccggactctatctgctatttgcaaataggcttgactgtgcatttacattcaatgaaaaactgtgatgaattatgacccaagtccctctggtatctgataaactaagtgagacctcgagtaagacgttcgagtgacagctgaacctcggctgaaagttgggcgaggcctcacatccattcgaaacgataatataaat

SEQ ID NO: 36422 - DNA, 543 bp, Muscodor strobelii
  misc_feature: SGI cDNA ID NO. 572626
  misc_feature: Encodes the peptide sequence at SEQ ID NO 36423
atgtcgtcccggaagcctgtcttcaaccagcaggtcctctacgacaccactcccctgcccgactctatccccgccgtcaaggagctcggcgccacctccgcaccccttctctccgcctccttcttcatcggcgcccggtgccgcccctacaacgatgactacatgcagtgcaagaccgagaacccgggcaagggcgagatggagtgtctgaaggagggtcgccgcgtcaccagatgtgccgccagcgtcatcgacgacgttaacaagcactgcctggaagaattccgcaagcactggcagtgcctcgacaacaacaaccaccagctgtggcagtgccgcaaggacgagtggaagctcaacaaatgcgtctttgacaacctcaaacttcaaaagactatccccgacgcccccaaggaccagatccccgtccacctccgaacaacacagatctacgcccactaccccatcctcagagaccgcggacaggctccttacggcaaatccgtcgacccgccttctgctcaggcttctcagtcatcctag

SEQ ID NO: 36423 - protein, 180 aa, Muscodor strobelii
  misc_feature: SGI Peptide ID NO. 572626
  misc_feature (84)..(125): Pfam Id: PF06747 Pfam Desc: CHCH domain
  misc_feature (1)..(180): NCBI GI: 116194035 Blast Desc: CHGG_06735 [Chaetomium globosum CBS 148.51] gi|88182648|gb|EAQ90116.1| CHGG_06735 [Chaetomium globosum CBS 148.51]
  misc_feature (1)..(156): NCBI GI: 171683207 Blast Desc: protein product [Podospora anserina] gi|170941563|emb|CAP67215.1| protein product [Podospora anserina]
  misc_feature (1)..(165): NCBI GI: 39971213 Blast Desc: MGG_03073 [Magnaporthe grisea 70-15] gi|149210807|ref|XP_001522778.1| MGCH7_ch7g876 [Magnaporthe grisea 70-15] gi|86196831|gb|EAQ71469.1| MGCH7_ch7g876 grisea
  misc_feature (1)..(156): NCBI GI: 256727637 Blast Desc: [Nectria haematococca mpVI 77-13-4]
  misc_feature (1)..(158): NCBI GI: 85116516 Blast Desc: NADH:ubiquinone oxidoreductase 20.8kD subunit [Neurospora crassa OR74A] gi|51704263|sp|P21976.2|NDUA8_NEUCR RecName: Full=NADH-ubiquinone oxidoreductase 20.8 kDa subunit 22K
  misc_feature (1)..(158): NCBI GI: 168781 Blast Desc: complex I 22-kDa polypeptide [Neurospora crassa]
  misc_feature (1)..(156): NCBI GI: 46136063 Blast Desc: FG09547.1 [Gibberella zeae PH-1]
  misc_feature (1)..(154): NCBI GI: 154308331 Blast Desc: BC1G_07911 [Botryotinia fuckeliana B05.10] gi|150852996|gb|EDN28188.1| BC1G_07911 [Botryotinia fuckeliana B05.10]
  misc_feature (1)..(154): NCBI GI: 156058922 Blast Desc: NADH-ubiquinone oxidoreductase [Sclerotinia sclerotiorum 1980] gi|154701260|gb|EDO00999.1| NADH-ubiquinone oxidoreductase [Sclerotinia sclerotiorum 1980]
  misc_feature (1)..(154): NCBI GI: 189195414 Blast Desc: NADH-ubiquinone oxidoreductase 20.8 kDa subunit [Pyrenophora tritici-repentis Pt-1C-BFP] gi|187979924|gb|EDU46550.1| NADH-ubiquinone oxidoreductase 20.8
MSSRKPVFNQQVLYDTTPLPDSIPAVKELGATSAPLLSASFFIGARCRPYNDDYMQCKTENPGKGEMECLKEGRRVTRCAASVIDDVNKHCLEEFRKHWQCLDNNNHQLWQCRKDEWKLNKCVFDNLKLQKTIPDAPKDQIPVHLRTTQIYAHYPILRDRGQAPYGKSVDPPSAQASQSS

SEQ ID NO: 36424 - DNA, 959 bp, Muscodor strobelii
  misc_feature: SGI EST ID NO. CUFF.86815.0
  misc_feature: Variant of the nucleotide sequence at SEQ ID NO 36422
ctccatttccacggccgcgaagctcaaccgcagcgtagcggcacgatatctctcgagcgacacaccaccaaccgccatcatgtcgtcccggaagcctgtcttcaaccagcaggtcctctacgacaccactcccctgcccgactctatccccgccgtcaaggagctcggcgccacctccgcaccccttctctccgcctccttcttcatcggcgcccggtgccgcccctacaacgatgactacatgcagtgcaagaccgagaacccgggcaagggcgagatggagtgtctgaaggagggtcgccgcgtcaccagatgtgccgccagcgtcatcgacgacgttaacaagcactgcctggaagaattccgcaagcactggcagtgcctcgacaacaacaaccaccagctgtggcagtgccgcaaggacgagtggaagctcaacaaatgcgtctttgacaacctcaaacttcaaaagactatccccgacgcccccaaggaccagatccccgtccacctccgaacaacacagatctacgcccactaccccatcctcagagaccgcggacaggctccttacggcaaatccgtcgacccgccttctgctcaggcttctcagtcatcctagagtgttgaatgagaaaagccttgtatacgacacatttcctaccaacttttagaccggaagtcagcggatgagacccatgatatgtaaatagatacagcagagaacttcgtcaaatggtctttcgtccacaagctatgctttccctatatgtgatatagtgtccatactaatctcgagttctcgtgcattgaatgttgatatctgcagctctaagggttttgtaggtagcttcggatggaaatattggtcagccgtgatccgcgacaagctgtggtatgggttgttatttacaataattgcgcttaatctctccttgcgctcccagtccgtgttcaag

SEQ ID NO: 36425 - DNA, 1107 bp, Muscodor strobelii
  misc_feature: SGI cDNA ID NO. 572627
  misc_feature: Encodes the peptide sequence at SEQ ID NO 36426
atgtcgctcttcggcaataagccggcggccccatctgcctttggcaccagcagcctgtttggccagcccgcaaacagcaacacgcctaccaatcccaccaccagtctcttcggccagccctcaaatcagacgcaaactcaaccgcagacaagcgcattcggcggcagcttgcttggccaacccgccgcccaacagcaacctcagtccaatgccttcggtggcagtttactcggccagcccactgtccagcaacagcagcctcagctcggtacatcattcttgggcgcaagtcagaaccaggccgcgctgcagaacaagagctcaatatgggagcccggccgcgaatctctcagccacaagcccgtcaccgagcagatggagcaaatgatagccaaatggtccccaggccaccccaacaccatgttcaagtactacttctacaacaaagtcgaccaatcccgcgtgcccttctaccagccctcccccggcgaagacccccgcgagtgggagcaagctgtgcacgacaagccagcgccaggctacatgcccgccctcgccacgggcttcggagccgtcagcgacagactcaaggtgcagaagggcgtactatctaacttccagcaagccctgcacgccatcaactcctcgctagacgccatcctctcacagcaagatttgcagaccagcgtccgcgctgtcaacgcccggaggaaacacgcgatactaagacaaaggtgtttgactctcgcgactaaagttcaggtcctgcggaatagaggatattcgctggataaggatgaagatgagctcaagacgaaactagagagtcttgagcaggggttactgaatccggcgcttagtgcgaggaccgaggagctgtggacgagactttcgctgcttaaggatcttgcggggagattgcgcgccgaggttgagagacggggcgcggagagtgaggaggggcttggtgaggaggctgaggagaaggctaagaagattctggaggattacgataaacagcttcagacgctcaagagccaggtcgaggcgatcaagaaggattatgaggagtggcagaaggagacgaacccgccatctaagacgtaa

SEQ ID NO: 36426 - protein, 368 aa, Muscodor strobelii
  misc_feature: SGI Peptide ID NO. 572627
  misc_feature (81)..(367): NCBI GI: 46136061 Blast Desc: FG09546.1 [Gibberella zeae PH-1]
  misc_feature (12)..(364): NCBI GI: 38567116 Blast Desc: related to nuclear pore protein NUP57 [Neurospora crassa]
  misc_feature (107)..(368): NCBI GI: 149210809 Blast Desc: MGCH7_ch7g877 [Magnaporthe grisea 70-15] gi|86196832|gb|EAQ71470.1| MGCH7_ch7g877 [Magnaporthe grisea 70-15]
  misc_feature (107)..(367): NCBI GI: 145609666 Blast Desc: MGG_03074 [Magnaporthe grisea 70-15] gi|145017072|gb|EDK01435.1| MGG_03074 [Magnaporthe grisea 70-15]
  misc_feature (91)..(364): NCBI GI: 164427942 Blast Desc: NCU02473 [Neurospora crassa OR74A] gi|157071946|gb|EAA35831.2| conserved [Neurospora crassa OR74A]
  misc_feature (108)..(364): NCBI GI: 116194033 Blast Desc: conserved [Chaetomium globosum CBS 148.51] gi|88182647|gb|EAQ90115.1| conserved [Chaetomium globosum CBS 148.51]
  misc_feature (18)..(367): NCBI GI: 256727060 Blast Desc: [Nectria haematococca mpVI 77-13-4]
  misc_feature (120)..(367): NCBI GI: 171683209 Blast Desc: protein product [Podospora anserina] gi|170941564|emb|CAP67216.1| protein product [Podospora anserina]
  misc_feature (120)..(364): NCBI GI: 156058924 Blast Desc: SS1G_03474 [Sclerotinia sclerotiorum 1980] gi|154701261|gb|EDO01000.1| SS1G_03474 [Sclerotinia sclerotiorum 1980]
  misc_feature (17)..(364): NCBI GI: 154308333 Blast Desc: BC1G_07912 [Botryotinia fuckeliana B05.10] gi|150852997|gb|EDN28189.1| BC1G_07912 [Botryotinia fuckeliana B05.10]
MSLFGNKPAAPSAFGTSSLFGQPANSNTPTNPTTSLFGQPSNQTQTQPQTSAFGGSLLGQPAAQQQPQSNAFGGSLLGQPTVQQQQPQLGTSFLGASQNQAALQNKSSIWEPGRESLSHKPVTEQMEQMIAKWSPGHPNTMFKYYFYNKVDQSRVPFYQPSPGEDPREWEQAVHDKPAPGYMPALATGFGAVSDRLKVQKGVLSNFQQALHAINSSLDAILSQQDLQTSVRAVNARRKHAILRQRCLTLATKVQVLRNRGYSLDKDEDELKTKLESLEQGLLNPALSARTEELWTRLSLLKDLAGRLRAEVERRGAESEEGLGEEAEEKAKKILEDYDKQLQTLKSQVEAIKKDYEEWQKETNPPSKT

SEQ ID NO: 36427 - DNA, 2616 bp, Muscodor strobelii
  misc_feature: SGI EST ID NO. CUFF.86948.1
  misc_feature: Variant of the nucleotide sequence at SEQ ID NO 36425
cgcgactgttgtcgatacagaagtcaaacgaaccaccaatgtaaataacaccatcgcattttcctcgtcgtcgccacaacgacgcatctgttgcgcccgaccatcgtcgcactcgacgatccatcttttcctttctacctcggccactctcccttttctgcgctccacgactgtgcacactttcctgcctgcgacgactgaagctgcccgcccttaagctcgacttgcgatacacgccttgcctttcgatcccgattgcaccaccgacgcgatcagataaagcattttagcttgtagacattgctgcgatagatattatcgttcgtgcgccatgtcgctcttcggcaataagccggcggccccatctgcctttggcaccagcagcctgtttggccagcccgcaaacagcaacacgcctaccaatcccaccaccagtctcttcggccagccctcaaatcagacgcaaactcaaccgcagacaagcgcattcggcggcagcttgcttggccaacccgccgcccaacagcaacctcagtccaatgccttcggtggcagtttactcggccagcccactgtccagcaacagcagcctcagctcggtacatcattcttgggcgcaagtcagaaccaggccgcgctgcagaacaagagctcaatatgggagcccggccgcgaatctctcagccacaagcccgtcaccgagcagatggagcaaatgatagccaaatggtccccaggccaccccaacaccatgttcaagtactacttctacaacaaagtcgaccaatcccgcgtgcccttctaccagccctcccccggcgaagacccccgcgagtgggagcaagctgtgcacgacaagccagcgccaggctacatgcccgccctcgccacgggcttcggagccgtcagcgacagactcaaggtgcagaagggcgtactatctaacttccagcaagccctgcacgccatcaactcctcgctagacgccatcctctcacagcaagatttgcagaccagcgtccgcgctgtcaacgcccggaggaaacacgcgatactaagacaaaggtgtttgactctcgcgactaaagttcaggtcctgcggaatagaggatattcgctggataaggatgaagatgagctcaagacgaaactagagagtcttgagcaggggttactgaatccggcgcttagtgcgaggaccgaggagctgtggacgagactttcgctgcttaaggatcttgcggggagattgcgcgccgaggttgagagacggggcgcggagagtgaggaggggcttggtgaggaggctgaggagaaggctaagaagattctggaggattacgataaacagcttcagacgctcaagagccaggtcgaggcgatcaagaaggattatgaggagtggcagaaggagacgaacccgccatctaagacgtaaggactgggtgtgaacatgtaatagtctagatcacggcgtcgagattatttgaggacaagacgacttgtgactttgtgctcgatagacgcgcgcggcgcaggggaggggtctcaagagagaagaggctcttgcagcgttttgtaatttaaatccgcgaagatagggcggaaggaaaaatagagcatggcgttcgtgtacagttgctgggaccaagcgtgttgatatgatatatatcactggccgtgtcatgcataaatacttaataccactgaaataggccagtgtacacgtatatcatatctcttcatttcctcattcaagacagccaagatctgaatcgatatagtttgtaatgtgtgagcgggaaccacgatgctttattgatatatgcgttgcctctcagtccatcattgcattagtatgttatgctcccgcccagcatccccatgcatggtgtctatgcaaatgtatatgtacaattcttattcttacagatgcccctaggactgctcatctgtcctccatatgcagtattacgtccgcttcttcgtggtgattatttgtacaatgcacaagcctctctagctacagcatggcggcgctctactatgacatgtcgtctgacttcatgtattgatactctttctccgtctttcatttggtgattgggtgaggtgcggacggcctagaagaagctcgtaacggcatcgacgacgaagggcgctttgtcgcagatacgggttagcttgcgacatcgaatacgatagggtggagatgacggaacaggacatacagatgtaaagcacgatggcggtggcggcccatgccttgacgttcatgttggcctcggcctcgagcatggccatctcctcttcggagagctgtggtgctgcgactgcaacatatttgtttagtatgtgtttaattttgccgggttgcgactggatgcgctggctgggaacgatgggcgaagggggggggaatgcttacagccgcctccgaacatgttgagagtatttagttggtaagggtattaggaaggtggtggatggtaggttgggagcgcagagtcgttgagtgttcgtatgtaaaggatgttgggatatgaagctgatgagataggtatcggtagatacgcggtacagatgcgaaatgacgatggtagtattgaatttttc

SEQ ID NO: 36428 - DNA, 3276 bp, Muscodor strobelii
  misc_feature: SGI cDNA ID NO. 572628
  misc_feature: Reduced expression when VOC is produced
  misc_feature: Encodes the peptide sequence at SEQ ID NO 36429
atgtcttccgtttcgcgtgcggtccctcgccgcctgggccagctatcggctcaatcgcgaggccccttcgccctcaatgctcgcctcactcgatccagcaactgggtatgccgtagctgcacggctctcaccacactgaggaccgcggcgacagcctcaaaagcccgacagacgcccataccacagtccgcagaggactgcaacatgtatcagggctctgttcgtgcttggtccgaatatttccccttggacacattcccccgtcgccacataggcccggataagaccgacacagacgcgatgcttgcagctctatcccctccagcagagaatcttgaagactttgtgtcttcggttgtaccgcccaacataagagatgctcgagaactagaaatcgccgaatacccatcgactaagtccgaatccggtctccagtctcatatcaatgtctaccgcagagagactacccacaaacactacttcattggccaaggatactatcccacccatacgcccagtgtcatcaagcgcaatgttttggaaagcccggcttggtacacaagctacactccataccagcctgagattagccaaggtcgtctggaatcattggtcaactttcagactatggtttcagatctcacagggcttcccattgcgaatgctagtctgctcgacgagggaactgccgctgccgaagccatgaccctctccatgaatgccctgtcaactgaaagggcgaagcggccaggcaagacctacgtcgtctctgagacaatgcatccccagaccatttccgtcatgcagggacgtgctgaaggctttggcatccagctacttagattggacctcacctcgaaagagtcttttgatcgtatagaggctcttggtgatgatcttgtcggtgtcatggttcagtatccggacacctacggctttattgatgaccattccgccctagccgagctggctcacaagcaaggcgtccttcttagtgctgctaccgatttgctggcctgtaccatgctgaaaccccccggagaatggggtgccgacattgcctttggcagtgcccaacgtttcggtattcctctgggatttggtggaccccacgccgctttcttctcggtgacagagaaacacaagcgcaagataccgggccgcttggttggtctctccaaagatcgactcggccacaatgcatatcgacttgccctgcagacccgagaacaacatattcgacgagagaaagcgacgagcaatgtttgtacttcgcaggcgctgttggctaacatgagtgctctatatgccatctaccatggtcccaagggcctcaaactgatcgcggaaagggtcatgcgtggagccagagcgctccagaccgccattgaggcccatggctttgctgttgaacggaacacaactaatcgtggagggcctgttgcgttcgatacccttatcgtggatttcggagactgggagaagcaacagttcttcattacgctgtcggaaattgtgggaatgctgtaccgcccaattggacaaacacgagttggcatcacgatcgacgaaacggtcaagtttgggatattatgtcgcatcatatatgctgtcttccgtacccgaaatgggccatacacgcttgaactgttggaccaggaggaagaggccattcgcactgcagaaatgcgacaatatctcaaggctcttcttaccgaacaagcagagcaacctctctcgatccctgagaatcttcgacgaacaacgcctttcttgactcatcccgttttcaacacgcatcactccgagacggagctcctgcgatacatctatcatcttcagtccaaagatctttccttggttcattccatgattcctcttggctcatgcactatgaaactcaatggaacaaccgaaatggctcttatcactgaaaattccttttccaatgtccaccctatgacacccgatcgtctcaacggtggctacttgcggctcttggacgcatttaagcaacaattgtcacatatcactggaatgcaggcaacatcccttcagccaaattcgggagcccaaggcgagtttgctggactacgcgcaatcagggactatcacgcagcaactgaacacaatggaaagaaacgcgatatctgtctcatcccagtatctgcccatggcacaaatccggcatctgccgcaatggcaggtatgcgagttgtacccatcaaatgcgacgcaaaaaccggaaacttggatctggcagatcttgaagacaagtgcaagaaatatcaagagcaattggcagctatcatgatcacctatcccagcacatacggcgtcttcgaacccgcagtcaaggaagtctgtgaaatagtgcattattatggcggccaggtgtatatggatggcgccaatatgaacgcacagatcggattgtgttcgcccggtgcaattggtgctgatgtatgccatttgaaccttcacaagactttctgtattccccatggtggaggtggtcccggtgttggcccgatctgtgttaagagccatcttgcaccatatctgcctggggaccactcaaagagaatcaaggcggccaacgacggtacgatccaaaagaccggcagcgctcccgtcagcagtgccgcttttggtagtgccagtatcaacctcattagttgggcgtacaacgtgttgatgggcggtgagggcctcacactggccaccaagatcggtctgctgaatgcgaactacattatgtcgcgtctcaaacctcactatcctatcttgtatgttaacgagaacgaccgatgtgcccacgaattcatcctcgatgttcgaggttttagtaagactgctggagtagaggccattgatattgccaagcgtctccaagattatggcttccatgccccaactatgagttggcctgttgccaacacattgatgatcgagccgacagagagtgagagcaaagaggagctcgaccgcttcattgatgcgcttatcagcatccgtgaggagatccgcgaagttgaagagggcaaggtacctagggctgccaacgtgctgaagaatgcacctcatcctatgaacgatctgatctacggtgacggtgagggcaaatgggatcgtgtctacacgcgcgagaaggctgcatacccattgccctacctcaaggagaagaagttctggcccagcgttggcaggattgacgatacatatggcgacttgaacctattctgtacatgcccaccggtcgaggacacgacgtag

SEQ ID NO: 36429 - protein, 1091 aa, Muscodor strobelii
  misc_feature: SGI Peptide ID NO. 572628
  misc_feature (88)..(538): Pfam Id: PF02347 Pfam Desc: Glycine cleavage system P-protein
  misc_feature (88)..(452): Pfam Id: PF02347 Pfam Desc: Glycine cleavage system P-protein
  misc_feature (9)..(1091): NCBI GI: 38567114 Blast Desc: glycine decarboxylase P subunit [Neurospora crassa]
  misc_feature (76)..(1091): NCBI GI: 164427938 Blast Desc: glycine dehydrogenase [Neurospora crassa OR74A] gi|157071944|gb|EAA35833.2| glycine dehydrogenase [Neurospora crassa OR74A]
  misc_feature (80)..(1090): NCBI GI: 156058930 Blast Desc: SS1G_03477 [Sclerotinia sclerotiorum 1980] gi|154701264|gb|EDO01003.1| SS1G_03477 [Sclerotinia sclerotiorum 1980]
  misc_feature (83)..(1091): NCBI GI: 149210845 Blast Desc: MGCH7_ch7g895 [Magnaporthe grisea 70-15] gi|86196850|gb|EAQ71488.1| MGCH7_ch7g895 [Magnaporthe grisea 70-15]
  misc_feature (6)..(1091): NCBI GI: 171683211 Blast Desc: protein product [Podospora anserina] gi|170941565|emb|CAP67217.1| protein product [Podospora anserina]
  misc_feature (83)..(1089): NCBI GI: 189204982 Blast Desc: glycine dehydrogenase [Pyrenophora tritici-repentis Pt-1C-BFP] gi|187985925|gb|EDU51413.1| glycine dehydrogenase [Pyrenophora tritici-repentis Pt-1C-BFP]
  misc_feature (37)..(1091): NCBI GI: 240110088 Blast Desc: glycine dehydrogenase, [Coccidioides posadasii C735 delta SOWgp]
  misc_feature (37)..(1091): NCBI GI: 119179388 Blast Desc: CIMG_08452 [Coccidioides immitis RS]
  misc_feature (37)..(1090): NCBI GI: 258577653 Blast Desc: glycine dehydrogenase [Uncinocarpus reesii 1704] gi|237903274|gb|EEP77675.1| glycine dehydrogenase [Uncinocarpus reesii 1704]
  misc_feature (80)..(1090): NCBI GI: 242814930 Blast Desc: glycine dehydrogenase [Talaromyces stipitatus ATCC 10500] gi|218714809|gb|EED14232.1| glycine dehydrogenase [Talaromyces stipitatus ATCC 10500]
  misc_feature (78)..(1087): SWISSPROT Homolog: EC 1.4.4.2 Glycine dehydrogenase (decarboxylating)
  misc_feature: Useful for introducing or modulating the production of volatile compounds
MSSVSRAVPRRLGQLSAQSRGPFALNARLTRSSNWVCRSCTALTTLRTAATASKARQTPIPQSAEDCNMYQGSVRAWSEYFPLDTFPRRHIGPDKTDTDAMLAALSPPAENLEDFVSSVVPPNIRDARELEIAEYPSTKSESGLQSHINVYRRETTHKHYFIGQGYYPTHTPSVIKRNVLESPAWYTSYTPYQPEISQGRLESLVNFQTMVSDLTGLPIANASLLDEGTAAAEAMTLSMNALSTERAKRPGKTYVVSETMHPQTISVMQGRAEGFGIQLLRLDLTSKESFDRIEALGDDLVGVMVQYPDTYGFIDDHSALAELAHKQGVLLSAATDLLACTMLKPPGEWGADIAFGSAQRFGIPLGFGGPHAAFFSVTEKHKRKIPGRLVGLSKDRLGHNAYRLALQTREQHIRREKATSNVCTSQALLANMSALYAIYHGPKGLKLIAERVMRGARALQTAIEAHGFAVERNTTNRGGPVAFDTLIVDFGDWEKQQFFITLSEIVGMLYRPIGQTRVGITIDETVKFGILCRIIYAVFRTRNGPYTLELLDQEEEAIRTAEMRQYLKALLTEQAEQPLSIPENLRRTTPFLTHPVFNTHHSETELLRYIYHLQSKDLSLVHSMIPLGSCTMKLNGTTEMALITENSFSNVHPMTPDRLNGGYLRLLDAFKQQLSHITGMQATSLQPNSGAQGEFAGLRAIRDYHAATEHNGKKRDICLIPVSAHGTNPASAAMAGMRVVPIKCDAKTGNLDLADLEDKCKKYQEQLAAIMITYPSTYGVFEPAVKEVCEIVHYYGGQVYMDGANMNAQIGLCSPGAIGADVCHLNLHKTFCIPHGGGGPGVGPICVKSHLAPYLPGDHSKRIKAANDGTIQKTGSAPVSSAAFGSASINLISWAYNVLMGGEGLTLATKIGLLNANYIMSRLKPHYPILYVNENDRCAHEFILDVRGFSKTAGVEAIDIAKRLQDYGFHAPTMSWPVANTLMIEPTESESKEELDRFIDALISIREEIREVEEGKVPRAANVLKNAPHPMNDLIYGDGEGKWDRVYTREKAAYPLPYLKEKKFWPSVGRIDDTYGDLNLFCTCPPVEDTT

SEQ ID NO: 36430 - DNA, 4103 bp, Muscodor strobelii
  misc_feature: SGI EST ID NO. CUFF.86860.0
  misc_feature: Variant of the nucleotide sequence at SEQ ID NO 36428
gcttgccgaagcaatcgactccgttactagccattccgatcgtcggtaacgctgtcgaggcagatacttctgtatcttcttcttcatctaccctcgcttctaagatttgttcttgttgaacttgatttcgatcccagcatgtttacatcgtgaacgagactgaccttcgtctgccattaacacccgttccccgctacgggcagtctctgcaatagcagtgctcgacggcttcgacatcatcccgcccaattgacacgatctttggctccgactcacagccagcatgtcttccgtttcgcgtgcggtccctcgccgcctgggccagctatcggctcaatcgcgaggccccttcgccctcaatgctcgcctcactcgatccagcaactgggtatgccgtagctgcacggctctcaccacactgaggaccgcggcgacagcctcaaaagcccgacagacgcccataccacagtccgcagaggactgcaacatgtatcagggctctgttcgtgcttggtccgaatatttccccttggacacattcccccgtcgccacataggcccggataagaccgacacagacgcgatgcttgcagctctatcccctccagcagagaatcttgaagactttgtgtcttcggttgtaccgcccaacataagagatgctcgagaactagaaatcgccgaatacccatcgactaagtccgaatccggtctccagtctcatatcaatgtctaccgcagagagactacccacaaacactacttcattggccaaggatactatcccacccatacgcccagtgtcatcaagcgcaatgttttggaaagcccggcttggtacacaagctacactccataccagcctgagattagccaaggtcgtctggaatcattggtcaactttcagactatggtttcagatctcacagggcttcccattgcgaatgctagtctgctcgacgagggaactgccgctgccgaagccatgaccctctccatgaatgccctgtcaactgaaagggcgaagcggccaggcaagacctacgtcgtctctgagacaatgcatccccagaccatttccgtcatgcagggacgtgctgaaggctttggcatccagctacttagattggacctcacctcgaaagagtcttttgatcgtatagaggctcttggtgatgatcttgtcggtgtcatggttcagtatccggacacctacggctttattgatgaccattccgccctagccgagctggctcacaagcaaggcgtccttcttagtgctgctaccgatttgctggcctgtaccatgctgaaaccccccggagaatggggtgccgacattgcctttggcagtgcccaacgtttcggtattcctctgggatttggtggaccccacgccgctttcttctcggtgacagagaaacacaagcgcaagataccgggccgcttggttggtctctccaaagatcgactcggccacaatgcatatcgacttgccctgcagacccgagaacaacatattcgacgagagaaagcgacgagcaatgtttgtacttcgcaggcgctgttggctaacatgagtgctctatatgccatctaccatggtcccaagggcctcaaactgatcgcggaaagggtcatgcgtggagccagagcgctccagaccgccattgaggcccatggctttgctgttgaacggaacacaactaatcgtggagggcctgttgcgttcgatacccttatcgtggatttcggagactgggagaagcaacagttcttcattacgctgtcggaaattgtgggaatgctgtaccgcccaattggacaaacacgagttggcatcacgatcgacgaaacggtcaagtttgggatattatgtcgcatcatatatgctgtcttccgtacccgaaatgggccatacacgcttgaactgttggaccaggaggaagaggccattcgcactgcagaaatgcgacaatatctcaaggctcttcttaccgaacaagcagagcaacctctctcgatccctgagaatcttcgacgaacaacgcctttcttgactcatcccgttttcaacacgcatcactccgagacggagctcctgcgatacatctatcatcttcagtccaaagatctttccttggttcattccatgattcctcttggctcatgcactatgaaactcaatggaacaaccgaaatggctcttatcactgaaaattccttttccaatgtccaccctatgacacccgatcgtctcaacggtggctacttgcggctcttggacgcatttaagcaacaattgtcacatatcactggaatgcaggcaacatcccttcagccaaattcgggagcccaaggcgagtttgctggactacgcgcaatcagggactatcacgcagcaactgaacacaatggaaagaaacgcgatatctgtctcatcccagtatctgcccatggcacaaatccggcatctgccgcaatggcaggtatgcgagttgtacccatcaaatgcgacgcaaaaaccggaaacttggatctggcagatcttgaagacaagtgcaagaaatatcaagagcaattggcagctatcatgatcacctatcccagcacatacggcgtcttcgaacccgcagtcaaggaagtctgtgaaatagtgcattattatggcggccaggtgtatatggatggcgccaatatgaacgcacagatcggattgtgttcgcccggtgcaattggtgctgatgtatgccatttgaaccttcacaagactttctgtattccccatggtggaggtggtcccggtgttggcccgatctgtgttaagagccatcttgcaccatatctgcctggggaccactcaaagagaatcaaggcggccaacgacggtacgatccaaaagaccggcagcgctcccgtcagcagtgccgcttttggtagtgccagtatcaacctcattagttgggcgtacaacgtgttgatgggcggtgagggcctcacactggccaccaagatcggtctgctgaatgcgaactacattatgtcgcgtctcaaacctcactatcctatcttgtatgttaacgagaacgaccgatgtgcccacgaattcatcctcgatgttcgaggttttagtaagactgctggagtagaggccattgatattgccaagcgtctccaagattatggcttccatgccccaactatgagttggcctgttgccaacacattgatgatcgagccgacagagagtgagagcaaagaggagctcgaccgcttcattgatgcgcttatcagcatccgtgaggagatccgcgaagttgaagagggcaaggtacctagggctgccaacgtgctgaagaatgcacctcatcctatgaacgatctgatctacggtgacggtgagggcaaatgggatcgtgtctacacgcgcgagaaggctgcatacccattgccctacctcaaggagaagaagttctggcccagcgttggcaggattgacgatacatatggcgacttgaacctattctgtacatgcccaccggtcgaggacacgacgtagagttaataacggcgcaatggacgggacttactatcttcctcatccgaggatcattataaaacggcgtacgcgtttgaacagagttaaaattagagatctcaacgataccgatatcccagggtttttcaacatcatggcagaccaggcgtttgtttttttgtgcttcctgcattgctatggattcatcgcgcactggaacttggaatctataggacaggcggggcttcaagacctggtgcgcagatagaatgtattcttttcaacattttggataccggtgtctgttcaaccacctggcgtggctttgcccctttaactaggcgaagacgttgagatttacctgcctaaccacggcgtttggtatgggatggggaagacgggaagaggaaaggatggaggattgtatatagggattaattgagagtggttgaaagttatttttgtgttttgacgttgatcgtgatttgtttgtgtgtgtgtgtcttggaagtctggtcgttgcgaacggtcttgatgcttagacatttcatctggagactgtcgg

SEQ ID NO: 36431 - DNA, 339 bp, Muscodor strobelii
  misc_feature: SGI cDNA ID NO. 572629
  misc_feature: Encodes the peptide sequence at SEQ ID NO 36432
atgcaactcacttctatcgtcgccacggcgcttctgcctctgttggttgccgcccaaggcacttcgaccctcacgtcgacaatgaccatgacaaaatatatcaccattgccaaggccgccacgacgacaacctatgccgcgaactcgactacgtctttctacatgcctactggttctggtggcaactcagtatcgactctccccacgtcaacgtctggcactcctaccacctcggcgccaactgtcagcccaacgatcgacaacggtaatggcgctggctctctgactgcctttggattagcaggtgtggctggtatgattgccgctgctctgctctag

SEQ ID NO: 36432 - protein, 112 aa, Muscodor strobelii
  misc_feature: SGI Peptide ID NO. 572629
MQLTSIVATALLPLLVAAQGTSTLTSTMTMTKYITIAKAATTTTYAANSTTSFYMPTGSGGNSVSTLPTSTSGTPTTSAPTVSPTIDNGNGAGSLTAFGLAGVAGMIAAALL

SEQ ID NO: 36433 - DNA, 2252 bp, Muscodor strobelii
  misc_feature: SGI EST ID NO. CUFF.86908.0
  misc_feature: Variant of the nucleotide sequence at SEQ ID NO 36431
caaaggggagcgatcaaaggcaaggtccccttctgatcccccaagtctgccccagaaagggccaggtttctttcaggtacccgggcgcaacccttggagccctgaggcaccttgtccggcgctgcattgagcactgcaaaacagcgctccgtgctgacttgccaagtaccccggctgtcgctcccccttcccacttttctcacacactcccctcgacgattctcgtcactctcatttactgcgatacacgcgcacttcacttacacactctcttcgtctccccttctcccacccacagacactcgttttctgaaacagacggacttcgttggcagagtcccccaaaagcaacatcttacgacttctacgacaaccttgagtaccgagtattcacatccacattctttgcatatactgcgcaacaacacgcactacgagtataactcaaaaacccgcgatacacaagtacaagcacaagccaaatcacaaaggatatttaccaacaggaatctgcttctctggtatagactttgcaatcgatttacattgaattaaaaaggaggaacgattgatctcacgtttggcgcatatcaacatcatacaacgtcaaaatgcaactcacttctatcgtcgccacggcgcttctgcctctgttggttgccgcccaaggcacttcgaccctcacgtcgacaatgaccatgacaaaatatatcaccattgccaaggccgccacgacgacaacctatgccgcgaactcgactacgtctttctacatgcctactggttctggtggcaactcagtatcgactctccccacgtcaacgtctggcactcctaccacctcggcgccaactgtcagcccaacgatcgacaacggtaatggcgctggctctctgactgcctttggattagcaggtgtggctggtatgattgccgctgctctgctctagagacctgatagcttgcgccgcctggtgtggctcttggggatgagaagcggatggggttaggaggacgctaggagcaggcaggtcatagttacactatgatctcaattattgatgtcgcgcccgttttgatgcggacatcacttttcttttcattccatcaaaaccagcaattcgttttcagcgctatcagtttacacttctatgcgacgatacgaacgatccaacgatatatcaaaaccttacggcaatgaaagcaacacgaactaaacccccgagatacctcttccgtttctgagagtcgtgggcaattgcgctcacggctcacataatcaccacttttgtcggtctcaacaacattattttccacctcttcttcaatggtgttgagcgtttggtgccattcgagcatgcccgttaatgtttcaatgaaccagcaacagccgtctctcatgtccttgcgactggacgtccctaagcagacctgcaagtctgccaagtcacagctttacatgttcacgtctgatacttcaacccttaccaccctcttctgataccctctactgtgacttggcagactggtttgaaatcttcgcactctctgccagttatcgccaaagaaaatgacgctggacccgggtaacgattcgccggtggacatgaagagatgcactgttgctggctggtcttttactttacttcagacaaccccttttccctaggctgtattcactgagctcgtttcgagcgtagcgatagcagccgacggaggcaccctttttcaaaagcttatcacttcttactacaactttcaagtgcctccgcgttgttgagatacccagttgttgagatgctcgccggacgaggacggtctgaggtcaccttgcgagtaagagaaaactaccacaacactactgcgccggaaaaacacaaatcacatctatcgtaccacatccactcggtggttggggatcttggttggtttcgaccaaaccttttacaaaaatctttcggctctcgccacatttctttgtctctttcactctaggtcacttccggaccttctgtcgcggtgcgttggatatgagttccagtggttgaaggaacagtgttggtgcgtgtaggggatatcctaagatgagcctctgtagtgtagcgaatacagtgattgaagtcatctgttgcgtcttctcgtataattagtgttgtgatctctgaatatgacacccgtaggcgcggtcttagaatgacataactgcttatatgcgtttcctggcggagcatttcatattaaaccgatgtact

SEQ ID NO: 36434 - DNA, 1635 bp, Muscodor strobelii
  misc_feature: SGI cDNA ID NO. 572630
  misc_feature: Encodes the peptide sequence at SEQ ID NO 36435
atgaagttcacctacctgtgctcccaccttctgctggccgttctcagcacggcggtcgcgtcgtccgcatcgtcgtcgttgacgaccggcaactcaacatactataacccaatcctaccggggtggcattcagacccatcatgtgtctgtgttgaagaaaccttcttctgcgtcacatcgacgtttatatcctttcccggattgccgatttatgcttctaaggatctgatcaattggaaactcgtcagccatgcttggaatcgtgattctcaaattcccggcgctagttggaagacaagtggccagcagcaggggatgttcgctgcaacaattcgccaccacgatggcattttctatgtcatatgcgaatatcttggtaccttaacggatgggaacctgggtgttgtattcaagtccccagatccattcaacgagacaacatggagcgacgccgtgacttttatcgctgataaaattgacccggatttgttctgggacgatgatggcaaagtctacatggctacacagactgttctcttgcaagaaatcaatctgggaacaggagcgctcaccgaacctatcaatatttggaacggaactggcggcgtttggcctgaagctcctcacatttataagaaagatgggtattattatctcatgattgcagaaggcgggacggagttgggtcacagcgtcaccatcgcgaggtctcggaatatcacaggtccttatcaggcatatgagcataatccaatcttgacgaaccgcaatacgaccgagtatttccagactgtgggccatgcagatttatttcaaggctctagaggaaactggtggggagtggctctatcgactcgatctgggccccaatgggagatttatcccatgggtcgcgaagctgttctgtatcccgtaacttgggatgaaggagagtggccgattttggaacccgtaaggggtgtaatgaatggctgggcgctaccacctacaaaccgtgatctgcctggcgacggtccattcaattctgacgatgatgtttacaatttcccagaaaatacagctataccccgtaacttggtttactggcgagtgccccgtgaaggcacattcgcaattagcaagaatggcttgcagattatccctagtcgtgccaatctcacaggtgtctcgacagatccaactttggagctgacagggcagcgcggtctctccttcatcggccgccgacaaacagatacgctcttcacattcagcttcgatgtgtcatttgctcccaaatcagttggccaagaaaccggcatcactgtgttcttgacgcagaatgctcatattgatttgggtcttgtgcttctcggatcgaattctacatatggcagccagttatcgcttcgatttcaagctcagggaacggggataccgccaccaccaaagaccataccggtgccatctgattggagctccgatcccatcaggctcaagattcacacgctgaatactacacattatagcttcagcactatgcccgatcgcagcccgcaaaaaggagatcactattggaatagccgctgcagggctggtcagtggtggcgatggcccgttcactgggagtcttgttggtgcatatgcgacgtgtag

SEQ ID NO: 36435 - protein, 544 aa, Muscodor strobelii
  misc_feature: SGI Peptide ID NO. 572630
  misc_feature (34)..(313): Pfam Id: PF04616 Pfam Desc: Glycosyl hydrolases family 43
  misc_feature (148)..(313): Pfam Id: PF04616 Pfam Desc: Glycosyl hydrolases family 43
  misc_feature (34)..(121): Pfam Id: PF04616 Pfam Desc: Glycosyl hydrolases family 43
  misc_feature (10)..(514): NCBI GI: 256724755 Blast Desc: NECHADRAFT_95941 [Nectria haematococca mpVI 77-13-4]
  misc_feature (18)..(504): NCBI GI: 46126523 Blast Desc: FG07639.1 [Gibberella zeae PH-1]
  misc_feature (32)..(504): NCBI GI: 56555505 Blast Desc: xylanase 27 [Gibberella zeae]
  misc_feature (31)..(514): NCBI GI: 116198477 Blast Desc: CHGG_07394 [Chaetomium globosum CBS 148.51] gi|88178673|gb|EAQ86141.1| CHGG_07394 [Chaetomium globosum CBS 148.51]
  misc_feature (1)..(504): NCBI GI: 169622464 Blast Desc: SNOG_14455 [Phaeosphaeria nodorum SN15] gi|111057206|gb|EAT78326.1| SNOG_14455 [Phaeosphaeria nodorum SN15]
  misc_feature (18)..(514): NCBI GI: 256719904 Blast Desc: NECHADRAFT_89525 [Nectria haematococca mpVI 77-13-4]
  misc_feature (12)..(508): NCBI GI: 39941134 Blast Desc: MGG_05479 [Magnaporthe grisea 70-15] gi|145022136|gb|EDK06156.1| MGG_05479 [Magnaporthe grisea 70-15]
  misc_feature (3)..(510): NCBI GI: 119481499 Blast Desc: xylosidase : arabinofuranosidase [Neosartorya fischeri NRRL 181] gi|119408932|gb|EAW18881.1| xylosidase : arabinofuranosidase [Neosartorya fischeri NRRL 181]
  misc_feature (21)..(514): NCBI GI: 71001940 Blast Desc: xylosidase : arabinofuranosidase [Aspergillus fumigatus Af293] gi|66853289|gb|EAL93613.1| xylosidase : arabinofuranosidase [Aspergillus fumigatus Af293]
  misc_feature (21)..(514): NCBI GI: 159129709 Blast Desc: xylosidase : arabinofuranosidase [Aspergillus fumigatus A1163]
  misc_feature (36)..(449): SWISSPROT Homolog: EC 3.2.1.55 Alpha-N-arabinofuranosidase
  misc_feature (36)..(449): SWISSPROT Homolog: EC 3.2.1.37 Xylan 1,4-beta-xylosidase
MKFTYLCSHLLLAVLSTAVASSASSSLTTGNSTYYNPILPGWHSDPSCVCVEETFFCVTSTFISFPGLPIYASKDLINWKLVSHAWNRDSQIPGASWKTSGQQQGMFAATIRHHDGIFYVICEYLGTLTDGNLGVVFKSPDPFNETTWSDAVTFIADKIDPDLFWDDDGKVYMATQTVLLQEINLGTGALTEPINIWNGTGGVWPEAPHIYKKDGYYYLMIAEGGTELGHSVTIARSRNITGPYQAYEHNPILTNRNTTEYFQTVGHADLFQGSRGNWWGVALSTRSGPQWEIYPMGREAVLYPVTWDEGEWPILEPVRGVMNGWALPPTNRDLPGDGPFNSDDDVYNFPENTAIPRNLVYWRVPREGTFAISKNGLQIIPSRANLTGVSTDPTLELTGQRGLSFIGRRQTDTLFTFSFDVSFAPKSVGQETGITVFLTQNAHIDLGLVLLGSNSTYGSQLSLRFQAQGTGIPPPPKTIPVPSDWSSDPIRLKIHTLNTTHYSFSTMPDRSPQKGDHYWNSRCRAGQWWRWPVHWESCWCICDV

SEQ ID NO: 36436 - DNA, 586 bp, Muscodor strobelii
  misc_feature: SGI EST ID NO. CUFF.86878.0
  misc_feature: Variant of the nucleotide sequence at SEQ ID NO 36434
tgttctgtatcccgtaacttgggatgaaggagagtggccgattttggaacccgtaaggggtgtaatgaatggctgggcgctaccacctacaaaccgtgatctgcctggcgacggtccattcaattctgacgatgatgtttacaatttcccagaaaatacagctataccccgtaacttggtttactggcgagtgccccgtgaaggcacattcgcaattagcaagaatggcttgcagattatccctagtcgtgccaatctcacaggtgtctcgacagatccaactttggagctgacagggcagcgcggtctctccttcatcggccgccgacaaacagatacgctcttcacattcagcttcgatgtgtcatttgctcccaaatcagttggccaagaaaccggcatcactgtgttcttgacgcagaatgctcatattgatttgggtcttgtgcttctcggatcgaattctacatatggcagccagttatcgcttcgatttcaagctcagggaacggggataccgccaccaccaaagaccataccggtgccatctgattggagctccgatcccatcaggctcaagattcac

SEQ ID NO: 36437 - DNA, 558 bp, Muscodor strobelii
  misc_feature: SGI cDNA ID NO. 572631
  misc_feature: Encodes the peptide sequence at SEQ ID NO 36438
atgtttactagcttagacaacgctattaattactttttccagggcctagaaaacttcacgtacttggaacggatggccgtgccatacgacgaatggaaatttgagataatgaacagccaaaacgagcgtattggagcgatccatatcggtaccgaacgcatcttcttcgacttcgaggggactggcgaggactcagccaatgttgattctgaagcttatgtcgacgtcatggactatactatatggagtgattgggacggaagcgatcaaattagaagcgatcaaattagaagcgatgaggatggaagcgatgaggatggaagcggcagcgagaatgaaaatggccaatatcgaagacgtcgtgatcaaagcaatcttgagcacaacgacgaggatgaaagcaataaaaacttggacgcaattgcggaaatcatgaagcaagcatctcgacaaacctatcagtccacccgggagttacttacgccgttgctgccactgactactatgagcaaattgcgatccatgatcgagtctgggttgactaacaacaaggggtga

SEQ ID NO: 36438 - protein, 185 aa, Muscodor strobelii
  misc_feature: SGI Peptide ID NO. 572631
MFTSLDNAINYFFQGLENFTYLERMAVPYDEWKFEIMNSQNERIGAIHIGTERIFFDFEGTGEDSANVDSEAYVDVMDYTIWSDWDGSDQIRSDQIRSDEDGSDEDGSGSENENGQYRRRRDQSNLEHNDEDESNKNLDAIAEIMKQASRQTYQSTRELLTPLLPLTTMSKLRSMIESGLTNNKG

SEQ ID NO: 36439 - DNA, 841 bp, Muscodor strobelii
  misc_feature: SGI EST ID NO. CUFF.86881.0
  misc_feature: Variant of the nucleotide sequence at SEQ ID NO 36437
tgaggatggaagcgatgaggatggaagcggcagcgagaatgaaaatggccaatatcgaagacgtcgtgatcaaagcaatcttgagcacaacgacgaggatgaaagcaataaaaacttggacgcaattgcggaaatcatgaagcaagcatctcgacaaacctatcagtccacccgggagttacttacgccgttgctgccactgactactatgagcaaattgcgatccatgatcgagtctgggttgactaacaacaaggggtgacacttacctaggtgaagaatggaaggtacatagagctgaacagagaaattttctccacggcacaaaagagtatgtatagtgtgcggctccactagggcattaaagggaacatttcagtcaaagagaggtctctcaatcattgcgtggcttttacgatcttaattgtcagataaccggtcttcctcgggtatccagatcataactttacggggcattgatcatgattcacagagtacgcttgagaagagctcgatctcgtggttatctagccactgtgtggaatcagataacacaatgcctaacttcgtggtgatcaaaatgctgtgaatcaactgaggtatataaaatctgggtagaagtcatcgagcccaaatctcgaatgacaacgatttcaacgggaagtcccgaatatactttcagcttcgcttatatactgtgctataccagtgtagcgccatcgcctcacgttagcatctccaccctcaggacatttgtctcctgagccggcgccgctacacgtcgcatatgcaccaacaagactcccagtgaacgggccatcgccaccactgaccagccctg

SEQ ID NO: 36440 - DNA, 687 bp, Muscodor strobelii
  misc_feature: SGI cDNA ID NO. 572632
  misc_feature: Encodes the peptide sequence at SEQ ID NO 36441
atgtggctactgaatgctagtagttgggaactcagagacttcatttccgagaagagcgctcccccgtacgccattctttcccatacatggggtgaagaagaggtctcattcaaagactgggagacgcagtccgcgactcaagtcgagaagaaagaaggttttcggaagattgaatactgctgcactcaggctatatcggacggatacgagtgggtatggattgatacatgctgcatcgataagtcgagtagcgcagagttgtcagaagccatcaactccatgttcaaatggtaccgcaaggccgaagtatgctatgtatatctctccgatacctccgaagccttaacgcccatcgagactcagtctgcgctgtcgacatgccgttggataacccggggttggacattgcaagaactactcgctccgcgggaagtaatcttctactcgaaacactggcaacctatcgggtcacgagtcgagctgtcgtcgcgacttgctgaagttacgggaattcaacgacaatacctcgaagggcgcagtcttcatgaagcccctcttgcacaaagaatgtcatgggccgcccggcgtagcacatcacgcgaagaagacatagcttattgccttcttgggatattcgatgtgaacatgacacttctctacggggagggaatgaaagcatttagatga

SEQ ID NO: 36441 - protein, 228 aa, Muscodor strobelii
  misc_feature: SGI Peptide ID NO. 572632
  misc_feature (23)..(138): Pfam Id: PF06985 Pfam Desc: Heterokaryon incompatibility protein (HET)
  misc_feature (1)..(227): NCBI GI: 145608538 Blast Desc: MGG_06555 [Magnaporthe grisea 70-15] gi|145016004|gb|EDK00494.1| MGG_06555 [Magnaporthe grisea 70-15]
  misc_feature (1)..(228): NCBI GI: 261354085 Blast Desc: HET domain-containing protein [Verticillium albo-atrum VaMs.102]
  misc_feature (1)..(228): NCBI GI: 169595686 Blast Desc: SNOG_00587 [Phaeosphaeria nodorum SN15] gi|111070962|gb|EAT92082.1| SNOG_00587 [Phaeosphaeria nodorum SN15]
  misc_feature (1)..(227): NCBI GI: 256729159 Blast Desc: NECHADRAFT_39749 [Nectria haematococca mpVI 77-13-4]
  misc_feature (1)..(227): NCBI GI: 46114894 Blast Desc: FG03289.1 [Gibberella zeae PH-1]
  misc_feature (1)..(227): NCBI GI: 256720831 Blast Desc: NECHADRAFT_28122 [Nectria haematococca mpVI 77-13-4]
  misc_feature (1)..(227): NCBI GI: 46139697 Blast Desc: FG11363.1 [Gibberella zeae PH-1]
  misc_feature (1)..(228): NCBI GI: 46105150 Blast Desc: FG00203.1 [Gibberella zeae PH-1]
  misc_feature (1)..(227): NCBI GI: 256722255 Blast Desc: NECHADRAFT_52327 [Nectria haematococca mpVI 77-13-4]
  misc_feature (1)..(227): NCBI GI: 145257695 Blast Desc: An04g04570 [Aspergillus niger] gi|134058737|emb|CAK38721.1| protein product [Aspergillus niger]
MWLLNASSWELRDFISEKSAPPYAILSHTWGEEEVSFKDWETQSATQVEKKEGFRKIEYCCTQAISDGYEWVWIDTCCIDKSSSAELSEAINSMFKWYRKAEVCYVYLSDTSEALTPIETQSALSTCRWITRGWTLQELLAPREVIFYSKHWQPIGSRVELSSRLAEVTGIQRQYLEGRSLHEAPLAQRMSWAARRSTSREEDIAYCLLGIFDVNMTLLYGEGMKAFR

SEQ ID NO: 36442 - DNA, 859 bp, Muscodor strobelii
  misc_feature: SGI EST ID NO. CUFF.86897.0
  misc_feature: Variant of the nucleotide sequence at SEQ ID NO 36440
gtatcagcgatgtggctactgaatgctagtagttgggaactcagagacttcatttccgagaagagcgctcccccgtacgccattctttcccatacatggggtgaagaagaggtctcattcaaagactgggagacgcagtccgcgactcaagtcgagaagaaagaaggttttcggaagattgaatactgctgcactcaggctatatcggacggatacgagtgggtatggattgatacatgctgcatcgataagtcgagtagcgcagagttgtcagaagccatcaactccatgttcaaatggtaccgcaaggccgaagtatgctatgtatatctctccgatacctccgaagccttaacgcccatcgagactcagtctgcgctgtcgacatgccgttggataacccggggttggacattgcaagaactactcgctccgcgggaagtaatcttctactcgaaacactggcaacctatcgggtcacgagtcgagctgtcgtcgcgacttgctgaagttacgggaattcaacgacaatacctcgaagggcgcagtcttcatgaagcccctcttgcacaaagaatgtcatgggccgcccggcgtagcacatcacgcgaagaagacatagcttattgccttcttgggatattcgatgtgaacatgacacttctctacggggagggaatgaaagcatttagatgattgcaagaaatacttgcacatgaatattacaaggaccacaccttatatgcctggggagagcctgtttcatcccttcccggatcgatgacccatgccgacgcccgatactggaagccacgtagatatgttcctagtaaacacgatcggaagttttacgggttgg

SEQ ID NO: 36443 - DNA, 996 bp, Muscodor strobelii
  misc_feature: SGI cDNA ID NO. 572633
  misc_feature: Encodes the peptide sequence at SEQ ID NO 36444
atgaagactacgttcattactcaagcccttgcgcttgttgtgccttctcaggcatatcttcgattcggatgtgcaacgctcagtgtccagcgtctcgatcctctcgtcgagccaggacaaattccctcagctcatctgcaccagatcattggtggcaatggcttcaacgcgaccatggatccaacgaccgacgttgctgagcgcgctacttgcacgacttgtacattctcagaggacttcagcaactactggacggcagtgatgtacttggctcgcaatggtacctacaagcgtgtaccacagtacccaaatgctctgctcggcaatatcaaaggtggtatgacagtctactatatccagcaggacttctcctcgaacggcaatcagaagatcacagcattcaagaagggcttccgcatgacggtgggctccccttcagccaaggatggcagtaatcctggccttcgatacacttgtctgcaagacgtcaacaccaggttccctgaaaccgctgagttccccaaggcggcatgtcctgctggtatcatggctatccaccatttccccgcctgctgggacggcaagaacctcgatagtcctaatcatcaggatcatatgtacaacactaaccgcggcgctttcactaacgcgggagcatgccctgcttctcacccagtacgcatgccgcaactagcgtacgagaccatgtgggacacccgtccattcaacaacaaggccgactggccagcagatggttctcagcccttcgtgtggagctacgaggacagcatcgggtacggcacccacggcgactacgtcttcggctggaaggcggacgcactgcagcgcgccatggactccaagtcgctgctcagtaacggtatcaccacccagaccgttgacaaagccaaccagtgcacgattaagaataccgtcaacgaggatatcgacagttggctcactgttctccccgggagaggtagcatgcccatgtaa

SEQ ID NO: 36444 - protein, 331 aa, Muscodor strobelii
  misc_feature: SGI Peptide ID NO. 572633
  misc_feature (33)..(276): Pfam Id: PF09362 Pfam Desc: Domain of function (DUF1996)
  misc_feature (9)..(317): NCBI GI: 171678167 Blast Desc: protein product [Podospora anserina] gi|170937153|emb|CAP61810.1| protein product [Podospora anserina]
  misc_feature (5)..(327): NCBI GI: 116178994 Blast Desc: conserved [Chaetomium globosum CBS 148.51] gi|88184422|gb|EAQ91890.1| conserved [Chaetomium globosum CBS 148.51]
  misc_feature (5)..(318): NCBI GI: 164425163 Blast Desc: NCU11317 [Neurospora crassa OR74A] gi|157070815|gb|EAA33351.2| conserved [Neurospora crassa OR74A]
  misc_feature (21)..(331): NCBI GI: 39975065 Blast Desc: MGG_00321 [Magnaporthe grisea 70-15] gi|145018793|gb|EDK03072.1| MGG_00321 [Magnaporthe grisea 70-15]
  misc_feature (20)..(331): NCBI GI: 169596100 Blast Desc: SNOG_00801 [Phaeosphaeria nodorum SN15] gi|111071176|gb|EAT92296.1| SNOG_00801 [Phaeosphaeria nodorum SN15]
  misc_feature (9)..(327): NCBI GI: 169868148 Blast Desc: CC1G_10434 [Coprinopsis cinerea okayama7#130] gi|116498252|gb|EAU81147.1| CC1G_10434 [Coprinopsis cinerea okayama7#130]
  misc_feature (1)..(317): NCBI GI: 171685460 Blast Desc: protein product [Podospora anserina] gi|170942691|emb|CAP68344.1| protein product [Podospora anserina]
  misc_feature (11)..(315): NCBI GI: 171680783 Blast Desc: protein product [Podospora anserina] gi|27764287|emb|CAD60567.1| protein product [Podospora anserina] gi|170940019|emb|CAP65245.1| protein product [Podospora anserina]
  misc_feature (9)..(325): NCBI GI: 18376214 Blast Desc: conserved [Neurospora crassa]
  misc_feature (4)..(325): NCBI GI: 116179322 Blast Desc: CHGG_00289 [Chaetomium globosum CBS 148.51] gi|88184586|gb|EAQ92054.1| CHGG_00289 [Chaetomium globosum CBS 148.51]
MKTTFITQALALVVPSQAYLRFGCATLSVQRLDPLVEPGQIPSAHLHQIIGGNGFNATMDPTTDVAERATCTTCTFSEDFSNYWTAVMYLARNGTYKRVPQYPNALLGNIKGGMTVYYIQQDFSSNGNQKITAFKKGFRMTVGSPSAKDGSNPGLRYTCLQDVNTRFPETAEFPKAACPAGIMAIHHFPACWDGKNLDSPNHQDHMYNTNRGAFTNAGACPASHPVRMPQLAYETMWDTRPFNNKADWPADGSQPFVWSYEDSIGYGTHGDYVFGWKADALQRAMDSKSLLSNGITTQTVDKANQCTIKNTVNEDIDSWLTVLPGRGSMPM

SEQ ID NO: 36445 - DNA, 398 bp, Muscodor strobelii
  misc_feature: SGI EST ID NO. CUFF.86894.0
  misc_feature: Variant of the nucleotide sequence at SEQ ID NO 36443
caacaacaaggccgactggccagcagatggttctcagcccttcgtgtggagctacgaggacagcatcgggtacggcacccacggcgactacgtcttcggctggaaggcggacgcactgcagcgcgccatggactccaagtcgctgctcagtaacggtatcaccacccagaccgttgacaaagccaaccagtgcacgattaagaataccgtcaacgaggatatcgacagttggctcactgttctccccgggagaggtagcatgcccatgtaaatttctaggtatcctgtgcagtcgatactgtgttagtgtatcttaggtaaagttgtcggatatcgcagtagtaattcgcagactgggcatctatacattctttttgttgaaatacaaacgattttca

SEQ ID NO: 36446 - DNA, 1035 bp, Muscodor strobelii
  misc_feature: SGI cDNA ID NO. 572634
  misc_feature: Encodes the peptide sequence at SEQ ID NO 36447
atgaagactacgttcattactcaagcccttgcgcttgttgtgccttctcaggcatatcttcgattcggatgtgcaacgctcagtgtccagcgtctcgatcctctcgtcgagccaggacaaattccctcagctcatctgcaccagatcattggtggcaatggcttcaacgcgaccatggatccaacgaccgacgttgctgagcgcgctacttgcacgacttgtacattctcagaggacttcagcaactactggacggcagtgatcaaggctcgcaatggtacctacaagcgtgtaccacagtacccaaatgctctgctcggcaatatcaaaggtggtatgacagtctactatatccagcaggacttctcctcgaacggcaatcagaagatcacagcattcaagaagggcttccgcatgacggtgggctccccttcagccaaggatggcagtaatcctggccttcgatacacttgtctgcaagacgtcaacaccaggttccctgaaaccgctgagttccccaaggcggcatgtcctgctggtatcatggctatccaccatttccccgcctgctgggacggcaagaacctcgatagtcctaatcatcaggatcatatgtacaacactaaccgcggcgctttcactaacgcgggagcatgccctgcttctcacccagtacgcatgccgcaactagcgtacgagaccatgtgggacacccgtccattcaacaacaaggccgactggccagcagatggttctcagcccttcgtgtggagctacgaggacagcatcgggtacggcacccacggcgactacgtcttcggctggaaggcggacgcactgcagcgcgccatggactccaagtcgctgctcagtaacggtatcaccacccagaccgttgacaaagccaaccagtgcacgattaagaataccgtcaacgaggatatcgacagttgtgagtctttacatgattcggtgagacagtcggaggctaacgatcgaattttcagggctcactgttctccccgggagaggtag

SEQ ID NO: 36447 - protein, 344 aa, Muscodor strobelii
  misc_feature: SGI Peptide ID NO. 572634
  misc_feature (33)..(275): Pfam Id: PF09362 Pfam Desc: Domain of function (DUF1996)
  misc_feature (9)..(332): NCBI GI: 171678167 Blast Desc: protein product [Podospora anserina] gi|170937153|emb|CAP61810.1| protein product [Podospora anserina]
  misc_feature (5)..(319): NCBI GI: 164425163 Blast Desc: NCU11317 [Neurospora crassa OR74A] gi|157070815|gb|EAA33351.2| conserved [Neurospora crassa OR74A]
  misc_feature (5)..(316): NCBI GI: 116178994 Blast Desc: conserved [Chaetomium globosum CBS 148.51] gi|88184422|gb|EAQ91890.1| conserved [Chaetomium globosum CBS 148.51]
  misc_feature (1)..(319): NCBI GI: 171685460 Blast Desc: protein product [Podospora anserina] gi|170942691|emb|CAP68344.1| protein product [Podospora anserina]
  misc_feature (11)..(319): NCBI GI: 171680783 Blast Desc: protein product [Podospora anserina] gi|27764287|emb|CAD60567.1| protein product [Podospora anserina] gi|170940019|emb|CAP65245.1| protein product [Podospora anserina]
  misc_feature (21)..(316): NCBI GI: 39975065 Blast Desc: MGG_00321 [Magnaporthe grisea 70-15] gi|145018793|gb|EDK03072.1| MGG_00321 [Magnaporthe grisea 70-15]
  misc_feature (20)..(316): NCBI GI: 169596100 Blast Desc: SNOG_00801 [Phaeosphaeria nodorum SN15] gi|111071176|gb|EAT92296.1| SNOG_00801 [Phaeosphaeria nodorum SN15]
  misc_feature (9)..(315): NCBI GI: 169868148 Blast Desc: CC1G_10434 [Coprinopsis cinerea okayama7#130] gi|116498252|gb|EAU81147.1| CC1G_10434 [Coprinopsis cinerea okayama7#130]
  misc_feature (9)..(316): NCBI GI: 18376214 Blast Desc: conserved [Neurospora crassa]
  misc_feature (4)..(316): NCBI GI: 116179322 Blast Desc: CHGG_00289 [Chaetomium globosum CBS 148.51] gi|88184586|gb|EAQ92054.1| CHGG_00289 [Chaetomium globosum CBS 148.51]
MKTTFITQALALVVPSQAYLRFGCATLSVQRLDPLVEPGQIPSAHLHQIIGGNGFNATMDPTTDVAERATCTTCTFSEDFSNYWTAVIKARNGTYKRVPQYPNALLGNIKGGMTVYYIQQDFSSNGNQKITAFKKGFRMTVGSPSAKDGSNPGLRYTCLQDVNTRFPETAEFPKAACPAGIMAIHHFPACWDGKNLDSPNHQDHMYNTNRGAFTNAGACPASHPVRMPQLAYETMWDTRPFNNKADWPADGSQPFVWSYEDSIGYGTHGDYVFGWKADALQRAMDSKSLLSNGITTQTVDKANQCTIKNTVNEDIDSCESLHDSVRQSEANDRIFRAHCSPRER

SEQ ID NO: 36448 - DNA, 173 bp, Muscodor strobelii
  misc_feature: SGI EST ID NO. CUFF.86903.0
  misc_feature: Variant of the nucleotide sequence at SEQ ID NO 36446
ctccccttcagccaaggatggcagtaatcctggccttcgatacacttgtctgcaagacgtcaacaccaggttccctgaaaccgctgagttccccaaggcggcatgtcctgctggtatcatggctatccaccatttccccgcctgctgggacggcaagaacctcgatagtccta

SEQ ID NO: 36449 - DNA, 726 bp, Muscodor strobelii
  misc_feature: SGI cDNA ID NO. 572635
  misc_feature: Elevated expression when VOC is produced
  misc_feature: Encodes the peptide sequence at SEQ ID NO 36450
atgaagcacatcacagtcgcctcgatctcagcagctttgctcgcatctcttgccagtgctcaggcggatcaggagtatggcaactgcacacaattcaattgggatcaacagcctgcctacattgtcaaagatgaccctcagcccgtcagcggtgctaaagcgtgcccgcagtcggcaggcaacggaacctgctatataactgccaaaggcgatgctcaattcaactggagcaagaatgtcacgaatctacgaacttacatccctcaaactggccccgttcaagacgttcttattaatgccatcaacgcagccgcaagtggcgaattgaactcgacaggcccgtcgccatcgctaaatgacaccgtcattgcagcgatcgaccagacacgagttctagcacctggccaggccgcctacctgaatttcacagcatatcaattttgctttgtcgggacacttgcgaattgtactggtactgtggaagatggaacaccggtcgaggcctgtgcgccactatggaggagagtatcgcggaatgctcccgcagaagtcgatggcgaatacacattagtgaatatcagcgctgacgacgtcgaccaatatacggatcctttcaagggacagtccagcggagaagatgccgagggtgctgcttctactgtcggcgccgtcagcaacgtgttgttgggcatgaccttagcggctgcactcttcacgttgcaatga

SEQ ID NO: 36450 - protein, 241 aa, Muscodor strobelii
  misc_feature: SGI Peptide ID NO. 572635
  misc_feature (22)..(238): NCBI GI: 121700438 Blast Desc: conserved [Aspergillus clavatus NRRL 1] gi|119396626|gb|EAW07058.1| conserved [Aspergillus clavatus NRRL 1]
  misc_feature (11)..(208): NCBI GI: 67902188 Blast Desc: AN8081.2 [Aspergillus nidulans FGSC A4] gi|40740513|gb|EAA59703.1| AN8081.2 [Aspergillus nidulans FGSC A4] gi|259480838|tpe|CBF73843.1| TPA: conserved [Aspergillus FGSC
  misc_feature: Useful for introducing or modulating the production of volatile compounds
MKHITVASISAALLASLASAQADQEYGNCTQFNWDQQPAYIVKDDPQPVSGAKACPQSAGNGTCYITAKGDAQFNWSKNVTNLRTYIPQTGPVQDVLINAINAAASGELNSTGPSPSLNDTVIAAIDQTRVLAPGQAAYLNFTAYQFCFVGTLANCTGTVEDGTPVEACAPLWRRVSRNAPAEVDGEYTLVNISADDVDQYTDPFKGQSSGEDAEGAASTVGAVSNVLLGMTLAAALFTLQ

SEQ ID NO: 36451 - DNA, 2136 bp, Muscodor strobelii
  misc_feature: SGI EST ID NO. CUFF.86905.0
  misc_feature: Variant of the nucleotide sequence at SEQ ID NO 36449
gtcagtctgagggagaaggagatcctctaagccttacccaagcctcaagtccaccaccaacagtcccaacccctttgatcgatgatctgtattatcatcaagtcataaatatgtagtcgctgggcctcctgccggtacattacgaggcatgtatcaaaagcgcgcttctggcctcgacgtcttagctttgcatcgtctacgtgcgttgtccaatacctagttccggcgggaccattaacaacaaccctcgactgccagcatgaagcacatcacagtcgcctcgatctcagcagctttgctcgcatctcttgccagtgctcaggcggatcaggagtatggcaactgcacacaattcaattgggatcaacagcctgcctacattgtcaaagatgaccctcagcccgtcagcggtgctaaagcgtgcccgcagtcggcaggcaacggaacctgctatataactgccaaaggcgatgctcaattcaactggagcaagaatgtcacgaatctacgaacttacatccctcaaactggccccgttcaagacgttcttattaatgccatcaacgcagccgcaagtggcgaattgaactcgacaggcccgtcgccatcgctaaatgacaccgtcattgcagcgatcgaccagacacgagttctagcacctggccaggccgcctacctgaatttcacagcatatcaattttgctttgtcgggacacttgcgaattgtactggtactgtggaagatggaacaccggtcgaggcctgtgcgccactatggaggagagtatcgcggaatgctcccgcagaagtcgatggcgaatacacattagtgaatatcagcgctgacgacgtcgaccaatatacggatcctttcaagggacagtccagcggagaagatgccgagggtgctgcttctactgtcggcgccgtcagcaacgtgttgttgggcatgaccttagcggctgcactcttcacgttgcaatgatcgcgttcaacgcgcaagcaagtaatgtacatacagatccactgttgttgcactgggataggactgaaaaatgatatcgactttaccgatacctttgtgcagtctagcataacatagtatacccaatattgctttgcatgagccctctggcatttctgactttgagcatcccattgagccctctgtactctacatccaagactttactgataataacctatctctataccaattagcacttcgttgcattgtaagtgttgaaggaacgacccatttttaccaccatgccgtcgccagtaatgtatccgggacaaagtgcgtcaggcgtttgaagcttgtgggcgaagtaaaacacagtcaatatcagtaccaataaagatcattgacggcactcgcaacgacaccaaaaatgcttcgacgtcaactcgaatagtatgtagaaaatctgctttcaagttgaaagagtgaagtcttagattccgtcgcttagtctctatgcctagaggatgagtattggaccccagttagctccgccgatgaggatcatggcacctcgacagcctactatgcgtgacagacgcgagggaaacattgacaggaggacgccgctactttctagcgcttttttttgcaaagtcacccaagcaccaggttctcgtagcagcggtgcagttgcctcgtagtattcgcaccgcctgggggaataacaatgctaccctgtacaagaattggcgaccaagatggacggtaagagaagatcaggtggtcctaaggtacagatgcacggctgtagccatgttcggttggcgcattcacataagctaccaggtaaagaccgggttagcctcgcccgctagaactttccaacccattgagccaccgcttctctcgaccagaagaacacaactattaagctcagccttctgttcatcctgcttatgactcatcatatcgatagattagcgactggtatcaaagcagggacatgaatgcgacggacttacgttgatccgtcatatccccaatacgtgcgccgaaccgtggccctctagcatttgccggctaatgttgggaggcttcatctgaggataatccgagccgtcggagagcgcgttccgggggcgataaacgaggcccaatcattcaactgc

SEQ ID NO: 36452 - DNA, 546 bp, Muscodor strobelii
  misc_feature: SGI cDNA ID NO. 572636
  misc_feature: Encodes the peptide sequence at SEQ ID NO 36453
atggagggctctgatacccagatcagaagcgaccattctgagtccatgatttgtgactgcagggcggacagtgaaaaacgtgcagagaatcccaaggagattcgcactcgatttgccaagactgaagaaggagtgaggagcattgatgagcaggctttcgaacacaataagaaaatcgaactgttgctgatcacaagtcatgccattaccgagcgcaacgctgttggcttgaagcgccgtcacggcttcaaaaatatcgataatcttaacgagttcgtcaagaccttgcgccccagcggcagtaccccactgaaggcgacgctgaaggacgccctggatacctacgtgggaaaactcagaaagaatcctaaggccaaagcactgaacctaatctttttccttgacggcgttgacgacagtatggccacagacctagaggaagtgtcggacatggaggctactggcctggggtgtaaccaggttttcccaggacgaggcagtagtatatgtgttaccgcaatgtcagggcactcgcgagccacctga

SEQ ID NO: 36453 - protein, 181 aa, Muscodor strobelii
  misc_feature: SGI Peptide ID NO. 572636
MEGSDTQIRSDHSESMICDCRADSEKRAENPKEIRTRFAKTEEGVRSIDEQAFEHNKKIELLLITSHAITERNAVGLKRRHGFKNIDNLNEFVKTLRPSGSTPLKATLKDALDTYVGKLRKNPKAKALNLIFFLDGVDDSMATDLEEVSDMEATGLGCNQVFPGRGSSICVTAMSGHSRAT

SEQ ID NO: 36454 - DNA, 861 bp, Muscodor strobelii
  misc_feature: SGI cDNA ID NO. 572637
  misc_feature: Encodes the peptide sequence at SEQ ID NO 36455
atggttgctgatgcatttggagaatacccggtgtcggagaccctccaattcaaggacgtctatcccccccgccacccaggcatggctggcatggcaaatctgtccgaagggattgtcaaaaactttagcaggagtcgcattgttctcgtcggagattcttgccaccgttttacacctaacgcaggtctcgggctcaacaacggcatacaggatgttgtgtccatctgcaacgagcttttcgatacggtcaagagatcaaaggacggtaatccgagcagagctgagatagagtccacttttcgccactatactggcgatagactggcattcatgaagaaagatctgcgtgcctcggcgctgctgacacggttgcaagcttgggctagcacgtggtatttgttctgctccaggttccttttggtgcctgactggttccaacggtttactatcaaacgcttcgcggtccctacaatgaggcttgcccccatactgaaacccgaacaggatgagtatcccatctggtatttcttctacggcacgctaggcaacgggaagaagctggccgaagtctttcaaaggcataagggtatcgatccagccgctttcaaaccagcctttgttcgcggtggacagcttgctgcactgggtcgttacaaggctatggtccacgcagacgacgactcagccgtatgtggatccgcattcctggtcctgactgaagaggaggaggacgcattaagacaatatgagactgacctatactacgtcgcccgctgcaccatccacatctgtgacgaggattcagagggtgcgaagttacccaaaaagatcaaaggactcacattcctggctagtgtgtaa

SEQ ID NO: 36455 - protein, 286 aa, Muscodor strobelii
  misc_feature: SGI Peptide ID NO. 572637
  misc_feature (175)..(285): Pfam Id: PF06094 Pfam Desc: AIG2-like family
  misc_feature (46)..(73): Pfam Id: PF01494 Pfam Desc: FAD binding domain
  misc_feature (2)..(164): NCBI GI: 256728204 Blast Desc: NECHADRAFT_54017 [Nectria haematococca mpVI 77-13-4]
  misc_feature (3)..(164): NCBI GI: 189197565 Blast Desc: FAD binding domain containing protein [Pyrenophora tritici-repentis Pt-1C-BFP] gi|187981068|gb|EDU47694.1| FAD binding domain containing protein [Pyrenophora tritici-repentis
  misc_feature (3)..(164): NCBI GI: 256734858 Blast Desc: NECHADRAFT_75548 [Nectria haematococca mpVI 77-13-4]
  misc_feature (2)..(164): NCBI GI: 145241766 Blast Desc: An09g02150 [Aspergillus niger] gi|134078069|emb|CAK40152.1| protein product [Aspergillus niger]
  misc_feature (2)..(164): NCBI GI: 145234591 Blast Desc: An03g00370 [Aspergillus niger] gi|134057615|emb|CAK38015.1| protein product [Aspergillus niger]
  misc_feature (3)..(135): NCBI GI: 156041122 Blast Desc: SS1G_11540 [Sclerotinia sclerotiorum 1980] gi|154695923|gb|EDN95661.1| SS1G_11540 [Sclerotinia sclerotiorum 1980]
  misc_feature (2)..(140): NCBI GI: 116179230 Blast Desc: CHGG_00243 [Chaetomium globosum CBS 148.51] gi|88184540|gb|EAQ92008.1| CHGG_00243 [Chaetomium globosum CBS 148.51]
  misc_feature (5)..(164): NCBI GI: 256722361 Blast Desc: NECHADRAFT_82202 [Nectria haematococca mpVI 77-13-4]
  misc_feature (3)..(114): NCBI GI: 154313266 Blast Desc: BC1G_05330 [Botryotinia fuckeliana B05.10] gi|150849399|gb|EDN24592.1| BC1G_05330 [Botryotinia fuckeliana B05.10]
  misc_feature (2)..(127): NCBI GI: 119483518 Blast Desc: FAD binding domain protein [Neosartorya fischeri NRRL 181] gi|119409818|gb|EAW19765.1| FAD binding domain protein [Neosartorya fischeri NRRL 181]
MVADAFGEYPVSETLQFKDVYPPRHPGMAGMANLSEGIVKNFSRSRIVLVGDSCHRFTPNAGLGLNNGIQDVVSICNELFDTVKRSKDGNPSRAEIESTFRHYTGDRLAFMKKDLRASALLTRLQAWASTWYLFCSRFLLVPDWFQRFTIKRFAVPTMRLAPILKPEQDEYPIWYFFYGTLGNGKKLAEVFQRHKGIDPAAFKPAFVRGGQLAALGRYKAMVHADDDSAVCGSAFLVLTEEEEDALRQYETDLYYVARCTIHICDEDSEGAKLPKKIKGLTFLASV

SEQ ID NO: 36456 - DNA, 342 bp, Muscodor strobelii
  misc_feature: SGI cDNA ID NO. 572638
  misc_feature: Encodes the peptide sequence at SEQ ID NO 36457
atgccgcagcacagcttaccaacacgcaacgggaagaagctggccgaagtctttcaaaggcataagggtatcgatccagccgctttcaaaccagcctttgttcgcggtggacagcttgctgcactgggtcgttacaaggctatggtccacgcagacgacgactcagccgtatgtggatccgcattcctggtcctgactgaagaggaggaggacgcattaagacaatatgagactgacctatactacgtcgcccgctgcaccatccacatctgtgacgaggattcagagggtgcgaagttacccaaaaagatcaaaggactcacattcctggctagtgtgtaa

SEQ ID NO: 36457 - protein, 113 aa, Muscodor strobelii
  misc_feature: SGI Peptide ID NO. 572638
  misc_feature (10)..(109): NCBI GI: 169619209 Blast Desc: SNOG_12799 [Phaeosphaeria nodorum SN15] gi|111058479|gb|EAT79599.1| SNOG_12799 [Phaeosphaeria nodorum SN15]
  misc_feature (15)..(109): NCBI GI: 256722183 Blast Desc: NECHADRAFT_18724 [Nectria haematococca mpVI 77-13-4]
  misc_feature (28)..(109): NCBI GI: 169786077 Blast Desc: [Aspergillus oryzae RIB40] gi|83776247|dbj|BAE66366.1| protein product [Aspergillus oryzae]
  misc_feature (28)..(109): NCBI GI: 238507011 Blast Desc: conserved [Aspergillus flavus NRRL3357] gi|220689420|gb|EED45771.1| conserved [Aspergillus flavus NRRL3357]
  misc_feature (32)..(109): NCBI GI: 169623084 Blast Desc: SNOG_20166 [Phaeosphaeria nodorum SN15] gi|160704912|gb|EDP89863.1| SNOG_20166 [Phaeosphaeria nodorum SN15]
  misc_feature (34)..(110): NCBI GI: 121719741 Blast Desc: conserved [Aspergillus clavatus NRRL 1] gi|119404781|gb|EAW15143.1| conserved [Aspergillus clavatus NRRL 1]
  misc_feature (32)..(109): NCBI GI: 258565349 Blast Desc: [Uncinocarpus reesii 1704] gi|237907120|gb|EEP81521.1| [Uncinocarpus reesii 1704]
  misc_feature (34)..(109): NCBI GI: 258574553 Blast Desc: [Uncinocarpus reesii 1704] gi|237901724|gb|EEP76125.1| [Uncinocarpus reesii 1704]
  misc_feature (17)..(109): NCBI GI: 116191255 Blast Desc: [Chaetomium globosum CBS 148.51] gi|88181258|gb|EAQ88726.1| [Chaetomium globosum CBS 148.51]
MPQHSLPTRNGKKLAEVFQRHKGIDPAAFKPAFVRGGQLAALGRYKAMVHADDDSAVCGSAFLVLTEEEEDALRQYETDLYYVARCTIHICDEDSEGAKLPKKIKGLTFLASV

SEQ ID NO: 36458 - DNA, 423 bp, Muscodor strobelii
  misc_feature: SGI cDNA ID NO. 572639
  misc_feature: Encodes the peptide sequence at SEQ ID NO 36459
atggcgcccctcaaggatgttgtcgtggccgccgcagctcagataaaaaaattgacgaacagcaccgacgtgagcgagaagctcggcgtgcaattctgcctcgcgcctggcgaccagcgagttattgacgcttacgaagactttgacgaggccgtcgcgtatacggaccccgatacgggcaacacgttcgagtgcgacgtcttcgatctcactactgccgggcaaatgcagatgataggcggctgggactcacctcttgcacgcgcgaaaattatcggtggtgcgcgcaacaagacgatgggaaacatgctggagtatcttgagaagcacgctttggactacgaccaaaacagcgatgccactcccccgagttacgaacaagaattgaccgaggtcaacaagaaacaagaaacgagctattaa

SEQ ID NO: 36459 - protein, 140 aa, Muscodor strobelii
  misc_feature: SGI Peptide ID NO. 572639
MAPLKDVVVAAAAQIKKLTNSTDVSEKLGVQFCLAPGDQRVIDAYEDFDEAVAYTDPDTGNTFECDVFDLTTAGQMQMIGGWDSPLARAKIIGGARNKTMGNMLEYLEKHALDYDQNSDATPPSYEQELTEVNKKQETSY

SEQ ID NO: 36460 - DNA, 924 bp, Muscodor strobelii
  misc_feature: SGI EST ID NO. CUFF.86942.1
  misc_feature: Variant of the nucleotide sequence at SEQ ID NO 36458
atcgaccctctctctaataggcttatcgagcttttcatagcatattatcattgctaaatcattcccaatcatgacagcgagcgttcgattcgtgtcttgtgtctcgccccctagccccggtgccagcgaggcaggtacattaatatggcgcccctcaaggatgttgtcgtggccgccgcagctcagataaaaaaattgacgaacagcaccgacgtgagcgagaagctcggcgtgcaattctgcctcgcgcctggcgaccagcgagttattgacgcttacgaagactttgacgaggccgtcgcgtatacggaccccgatacgggcaacacgttcgagtgcgacgtcttcgatctcactactgccgggcaaatgcagatgataggcggctgggactcacctcttgcacgcgcgaaaattatcggtggtgcgcgcaacaagacgatgggaaacatgctggagtatcttgagaagcacgctttggactacgaccaaaacagcgatgccactcccccgagttacgaacaagaattgaccgaggtcaacaagaaacaagaaacgagctattaagaggccatttgacaaatggatgttttattacgctgacgtacaccgtacctattcgatggaccctttttctttcacgctttgccttttgagtttacttggtgggcacagaatctacatgtcggctagcatctcggacactcgttgtggcgagctactttactggttaagcagtctattgtagtctttaactttgtatttctctttactcagctgtattgatcccggcacaacacactgtggtcgcttgaagggtctgtgttgctatataatgagatacgctagtctagtgctttcctgcgttcgaagacggaaatgaaaacaagcagtgttaatgcctgatacgctaactgtcttggc

SEQ ID NO: 36461 - DNA, 1137 bp, Muscodor strobelii
  misc_feature: SGI cDNA ID NO. 572640
  misc_feature: Reduced expression when VOC is produced
  misc_feature: Encodes the peptide sequence at SEQ ID NO 36462
atgcgcaagtcgcgctcgtcccatgtcaaatgcgattgcggcgagagaacgcacaagtgcgcccacctgcaaccgacgctggatggccacaaggaaacgtgctgctgcaaccacggcgggcgatgcacctgctcgcataagaaagagtcgtcgctcgagcccgtgctcgagtctgagtccgagggcgaacaatgctcgaccaccaaaccaaaggccaccaacagcagtggcagcagtcgccgtcggcgagctaacacctccaattcggagcccctgctgagcttcgacgagaatggccaccacaggcccacgcacaagcactccaaggcatcgcaaaagtgtggcccatacactctgagtcgtggcgccacgatgcacggcacaggtacggggacaagccccggcatgggaaatcgatccgtcgacaacctcgtgcactatggtgaagcggctgcgcgctcgcgctcgcgcaccgccccgtctggtgcttcggatctggaggcgcgcatggtgaagtccgaacaggcatctcccctgatgagtagctcgtcctttcaacacctcaacggccagctgccaccactggacctttccaacatccagcatcctgaatactcttccacgttcgacctgttcggtaccagcggcatctccgactacgatgcgcccatgttcagcgctggactgagcgctgcttctgtcgactggacacagtacgatggtctagaggtcaacggggataatatagcgtcttccagcttcggccagtctcaggcttacgccggtttcgatctcgccagctctgtcgaacccacgctgacctctaactctggggacgtttcagaagcggaggactgggcatccgcattcaacgaaactcccttcgatggatttcgcagtggcgcgggcagctatctcagtatgccccagagcatcgtgaacggcaacgatgtgagcaatctcgactttgacgactttaaggggactgcggctgcaagtaaatttatgtctttgtctcccgcgcacgaagatgcgcgctatttagaggaagagagctattggggcatgagcaattttaacgacggcatttcgcattcaccggatccgattactacggccctctgggataacgcatga

SEQ ID NO: 36462 - protein, 378 aa, Muscodor strobelii
  misc_feature: SGI Peptide ID NO. 572640
  misc_feature (1)..(336): NCBI GI: 116202049 Blast Desc: CHGG_08909 [Chaetomium globosum CBS 148.51] gi|88177427|gb|EAQ84895.1| CHGG_08909 [Chaetomium globosum CBS 148.51]
  misc_feature (1)..(373): NCBI GI: 46128031 Blast Desc: FG08393.1 [Gibberella zeae PH-1]
  misc_feature (1)..(376): NCBI GI: 256733939 Blast Desc: [Nectria haematococca mpVI 77-13-4]
  misc_feature (1)..(337): NCBI GI: 85097135 Blast Desc: NCU04830 [Neurospora crassa OR74A] gi|28921879|gb|EAA31153.1| [Neurospora crassa OR74A]
  misc_feature (1)..(336): NCBI GI: 171681858 Blast Desc: protein product [Podospora anserina] gi|170940888|emb|CAP66538.1| protein product [Podospora anserina]
  misc_feature (1)..(339): NCBI GI: 154293761 Blast Desc: BC1G_14107 [Botryotinia fuckeliana B05.10] gi|150845263|gb|EDN20456.1| BC1G_14107 [Botryotinia fuckeliana B05.10]
  misc_feature (1)..(340): NCBI GI: 156047729 Blast Desc: SS1G_09554 [Sclerotinia sclerotiorum 1980] gi|154693949|gb|EDN93687.1| SS1G_09554 [Sclerotinia sclerotiorum 1980]
  misc_feature (82)..(364): NCBI GI: 261360768 Blast Desc: conserved [Verticillium albo-atrum VaMs.102]
  misc_feature (1)..(358): NCBI GI: 145243492 Blast Desc: An11g02700 [Aspergillus niger] gi|134078946|emb|CAK40612.1| protein product [Aspergillus niger]
  misc_feature (1)..(333): NCBI GI: 242764056 Blast Desc: Copper fist DNA binding domain protein [Talaromyces stipitatus ATCC 10500] gi|218723894|gb|EED23311.1| Copper fist DNA binding domain protein [Talaromyces stipitatus ATCC 10500]
  misc_feature: Useful for introducing or modulating the production of volatile compounds
MRKSRSSHVKCDCGERTHKCAHLQPTLDGHKETCCCNHGGRCTCSHKKESSLEPVLESESEGEQCSTTKPKATNSSGSSRRRRANTSNSEPLLSFDENGHHRPTHKHSKASQKCGPYTLSRGATMHGTGTGTSPGMGNRSVDNLVHYGEAAARSRSRTAPSGASDLEARMVKSEQASPLMSSSSFQHLNGQLPPLDLSNIQHPEYSSTFDLFGTSGISDYDAPMFSAGLSAASVDWTQYDGLEVNGDNIASSSFGQSQAYAGFDLASSVEPTLTSNSGDVSEAEDWASAFNETPFDGFRSGAGSYLSMPQSIVNGNDVSNLDFDDFKGTAAASKFMSLSPAHEDARYLEEESYWGMSNFNDGISHSPDPITTALWDNA

SEQ ID NO: 36463 - DNA, 4367 bp, Muscodor strobelii
  misc_feature: SGI EST ID NO. CUFF.86952.0
  misc_feature: Variant of the nucleotide sequence at SEQ ID NO 36461
gaaggagcaattggcctgcactacgtccatcagctaccggctgaccacatttgtccagtcagcctacaaagttccgactacctgattctacctggggcggacagcgtatacgtattgagcagacactgtctccatagcgaggccacagcatatccactcaccacctagtatgcttccttagccgacctacctaatcctccatgagaattcggaccgctttcgctactgtacgtgtgctactcaactcacggggtttcgcgagggacgagtaagggactaaggcatcacgaaggggaagggtggaaaacggcaagaagtaataaatagccatggcacgctatcgaaagacgatcgctttctaccgacagaacgttccccccgtcttcgcgttatcgtagcccccttctcgtctcgatagtcggcacgcaacttgcaggtataatacaagtactcgtagaagcactgcagtaagacgtcggacgtcagttgatcgacaagcgccctctctgtgcaggagacgacgacataacatcatcggccgcagcagcgaggacgcgagtgacgagaggctggctgcacaacggttcctgttcatcccggccatcgtctccggacaattcctacctaccctgaaagaaccctaggctatgagcgcatagctcggtccgtctgcgtcgtgtgcccactttgcggcggccgtgtctcccttttatcccacgcccccatccagaccccatcctcgatccagcagcccattcacgcgcccagcgccaggccagcacagtcaggcatcccgagggcaaggtactgcaaccgcagggttaccttggacgttgtatgtacatacatgtagtctcgtagactcgctgctctgccgtacggattgttagcaggtagctggaggtgtttggccttggcccgttgttcttgtcctgcttgccgagcctttgctgcaagtgacccttattacttcaactcgttactcggccctttgttcctcgttcgcgaagcctgccacccccctttgccccgagtcctagcgccgcagcttcattcagtatcccactcccggctcttctcgtctttttggattccatatcgcaacgacactcactgactcttccccttcttcactccccattgcacctcgtcgccgccaatctgggaactcattgccacttcgtcgacatttccgcttagtttgaacattaccctcctcgacatacggggctgagagcgtcggtaaagtagcaggcgccatgttaatcgacggggagaaatgggcctgcgaggcctgcgttcggggccacagggtcagcaattgccaacattcaggtgagccattatcgcgcgtttttttgtcccttcgccatgccctcttcacgcccaaatgtaaggtgcaattcaacgtccagacatgtctgtttgacgcgccgcactctggtgtctcagttagccagtagaggtcggaactttcaaggtgctgtggctactggtgtctcggaggggcttcttgtaagtcgcatgcgtcgtgagagctccatgcgacacacacccgccgcggggcggtgtgtcttgcctcatctcgccgtttgctctttccccaggcgctaaatgacttgtttatcccaaaccaagacaaggaggacaaatcgggcagggcgttggaaaaagaaataggaaaagaagcctcaggctaatgcgcaagttgcagatcggccacttcagcacatcaacaagaaaggtcgaccggtgtcgcaatgccatcactgtcgctccatgcgcaagtcgcgctcgtcccatgtcaaatgcgattgcggcgagagaacgcacaagtgcgcccacctgcaaccgacgctggatggccacaaggaaacgtgctgctgcaaccacggcgggcgatgcacctgctcgcataagaaagagtcgtcgctcgagcccgtgctcgagtctgagtccgagggcgaacaatgctcgaccaccaaaccaaaggccaccaacagcagtggcagcagtcgccgtcggcgagctaacacctccaattcggagcccctgctgagcttcgacgagaatggccaccacaggcccacgcacaagcactccaaggcatcgcaaaagtgtggcccatacactctgagtcgtggcgccacgatgcacggcacaggtacggggacaagccccggcatgggaaatcgatccgtcgacaacctcgtgcactatggtgaagcggctgcgcgctcgcgctcgcgcaccgccccgtctggtgcttcggatctggaggcgcgcatggtgaagtccgaacaggcatctcccctgatgagtagctcgtcctttcaacacctcaacggccagctgccaccactggacctttccaacatccagcatcctgaatactcttccacgttcgacctgttcggtaccagcggcatctccgactacgatgcgcccatgttcagcgctggactgagcgctgcttctgtcgactggacacagtacgatggtctagaggtcaacggggataatatagcgtcttccagcttcggccagtctcaggcttacgccggtttcgatctcgccagctctgtcgaacccacgctgacctctaactctggggacgtttcagaagcggaggactgggcatccgcattcaacgaaactcccttcgatggatttcgcagtggcgcgggcagctatctcagtatgccccagagcatcgtgaacggcaacgatgtgagcaatctcgactttgacgactttaaggggactgcggctgcaagtaaatttatgtctttgtctcccgcgcacgaagatgcgcgctatttagaggaagagagctattggggcatgagcaattttaacgacggcatttcgcattcaccggatccgattactacggccctctgggataacgcatgagcgcgaagtagccggcttcttcgacacgatacaaaattacaccacgcgataatgagttcacctatcggattcttgggattcttctacatggtactctgctgggacggatgatgctccgcgacatttcttcttataccccattagtttgcgtgtttcggtcgtctgcctttcaattacagatttcaatcatcatctcatcatgggaaggcgctcggcggcaaaaaagtatacattggatacaaagctatcttgtttgcaaacaaccatttttggtaaccctgtagcacgagggtcattaacgcagttgtgggaattggcgcaaggctggacgataaacctggaagcttatatatccgactacgtgtgtcccaagagcaccggtgcacgcatcgtgaccaaggttctctattttgaggctcttgtttctttacattacttgtttcgaattctcttcccatcactgcgcacagttaccgccatcggcagctgtttcgcgtggttagacttcttgcagcatcctcgacatagcagtaggagttctgtcatataggttacatacatttttgcacatactagaaagtagagcatttggcgggcgatggcgttggtaaaatagaggggcaatcatattcggaatacaatttgcttgtacttaccgacttcctgttttcttgacgtcctcttacctgctgtgcgagcccactcatcgagcccaacacaatgtgtggacattagagttcccttgcagcattgctatgttgataagtacagcaacatgcaaaattaacaaagccgagacttcgaagattagatactgccatttcaccaacggccaatgcaaagagtacacggggggatctcggtggttatcggtatttccttgtgacaagtcagtaacgacccatctcggtgtcgtctccgaggtgtggaaatagaacccctagctatcatcgaaacacccctttcgaaaatttcttccctttggattttttgcccattgctaagcgatttcgggcctccacagtgtcgctcgctcgaccctaaatctcgatgcgcgtttggctcgcctagatgcgtcaggttgccgctcgtctcgggttgaaaagtgtgctgtcttgttgcgtctgccatcataatttccccaagcgcgtagcccggaccgagagtctcctccaacttcaaacgcccgtgccagtgcaccgggctcgagtcgttgcaggacaaagtagagaagttttcgtgtgatagttttcgactagtgttgtgccagccgtctcgttctttgcagtgtaaagagtagtgtgtataagtgactattgtcctcataggttgcccatgttcttagatagctgatgtatcagatcgtaaagtaggttaggtgaccattttacttctcttctagaaattgggaccacgcatttgcaggcactggggcaaaagaacgaagcctg

SEQ ID NO: 36464 - DNA, 1278 bp, Muscodor strobelii
  misc_feature: SGI cDNA ID NO. 572641
  misc_feature: Encodes the peptide sequence at SEQ ID NO 36465
atgttaatcgacggggagaaatgggcctgcgaggcctgcgttcggggccacagggtcagcaattgccaacattcagatcggccacttcagcacatcaacaagaaaggtcgaccggtgtcgcaatgccatcactgtcgctccatgcgcaagtcgcgctcgtcccatgtcaaatgcgattgcggcgagagaacgcacaagtgcgcccacctgcaaccgacgctggatggccacaaggaaacgtgctgctgcaaccacggcgggcgatgcacctgctcgcataagaaagagtcgtcgctcgagcccgtgctcgagtctgagtccgagggcgaacaatgctcgaccaccaaaccaaaggccaccaacagcagtggcagcagtcgccgtcggcgagctaacacctccaattcggagcccctgctgagcttcgacgagaatggccaccacaggcccacgcacaagcactccaaggcatcgcaaaagtgtggcccatacactctgagtcgtggcgccacgatgcacggcacaggtacggggacaagccccggcatgggaaatcgatccgtcgacaacctcgtgcactatggtgaagcggctgcgcgctcgcgctcgcgcaccgccccgtctggtgcttcggatctggaggcgcgcatggtgaagtccgaacaggcatctcccctgatgagtagctcgtcctttcaacacctcaacggccagctgccaccactggacctttccaacatccagcatcctgaatactcttccacgttcgacctgttcggtaccagcggcatctccgactacgatgcgcccatgttcagcgctggactgagcgctgcttctgtcgactggacacagtacgatggtctagaggtcaacggggataatatagcgtcttccagcttcggccagtctcaggcttacgccggtttcgatctcgccagctctgtcgaacccacgctgacctctaactctggggacgtttcagaagcggaggactgggcatccgcattcaacgaaactcccttcgatggatttcgcagtggcgcgggcagctatctcagtatgccccagagcatcgtgaacggcaacgatgtgagcaatctcgactttgacgactttaaggggactgcggctgcaagtaaatttatgtctttgtctcccgcgcacgaagatgcgcgctatttagaggaagagagctattggggcatgagcaattttaacgacggcatttcgcattcaccggatccgattactacggccctctgggataacgcatga

SEQ ID NO: 36465 - protein, 425 aa, Muscodor strobelii
  misc_feature: SGI Peptide ID NO. 572641
  misc_feature (1)..(39): Pfam Id: PF00649 Pfam Desc: Copper fist DNA binding domain
  misc_feature (1)..(420): NCBI GI: 46128031 Blast Desc: FG08393.1 [Gibberella zeae PH-1]
  misc_feature (1)..(423): NCBI GI: 256733939 Blast Desc: [Nectria haematococca mpVI 77-13-4]
  misc_feature (1)..(384): NCBI GI: 85097135 Blast Desc: NCU04830 [Neurospora crassa OR74A] gi|28921879|gb|EAA31153.1| [Neurospora crassa OR74A]
  misc_feature (1)..(408): NCBI GI: 171681858 Blast Desc: protein product [Podospora anserina] gi|170940888|emb|CAP66538.1| protein product [Podospora anserina]
  misc_feature (1)..(387): NCBI GI: 156047729 Blast Desc: SS1G_09554 [Sclerotinia sclerotiorum 1980] gi|154693949|gb|EDN93687.1| SS1G_09554 [Sclerotinia sclerotiorum 1980]
  misc_feature (48)..(383): NCBI GI: 116202049 Blast Desc: CHGG_08909 [Chaetomium globosum CBS 148.51] gi|88177427|gb|EAQ84895.1| CHGG_08909 [Chaetomium globosum CBS 148.51]
  misc_feature (1)..(386): NCBI GI: 154293761 Blast Desc: BC1G_14107 [Botryotinia fuckeliana B05.10] gi|150845263|gb|EDN20456.1| BC1G_14107 [Botryotinia fuckeliana B05.10]
  misc_feature (1)..(405): NCBI GI: 145243492 Blast Desc: An11g02700 [Aspergillus niger] gi|134078946|emb|CAK40612.1| protein product [Aspergillus niger]
  misc_feature (1)..(380): NCBI GI: 242764056 Blast Desc: Copper fist DNA binding domain protein [Talaromyces stipitatus ATCC 10500] gi|218723894|gb|EED23311.1| Copper fist DNA binding domain protein [Talaromyces stipitatus ATCC 10500]
  misc_feature (1)..(377): NCBI GI: 70991641 Blast Desc: Copper fist DNA binding domain protein [Aspergillus fumigatus Af293] gi|66848302|gb|EAL88631.1| Copper fist DNA binding domain protein [Aspergillus fumigatus Af293]
MLIDGEKWACEACVRGHRVSNCQHSDRPLQHINKKGRPVSQCHHCRSMRKSRSSHVKCDCGERTHKCAHLQPTLDGHKETCCCNHGGRCTCSHKKESSLEPVLESESEGEQCSTTKPKATNSSGSSRRRRANTSNSEPLLSFDENGHHRPTHKHSKASQKCGPYTLSRGATMHGTGTGTSPGMGNRSVDNLVHYGEAAARSRSRTAPSGASDLEARMVKSEQASPLMSSSSFQHLNGQLPPLDLSNIQHPEYSSTFDLFGTSGISDYDAPMFSAGLSAASVDWTQYDGLEVNGDNIASSSFGQSQAYAGFDLASSVEPTLTSNSGDVSEAEDWASAFNETPFDGFRSGAGSYLSMPQSIVNGNDVSNLDFDDFKGTAAASKFMSLSPAHEDARYLEEESYWGMSNFNDGISHSPDPITTALWDNA

SEQ ID NO: 36466 - DNA, 4367 bp, Muscodor strobelii; identical to SEQ ID NO: 36463
  misc_feature: SGI EST ID NO. CUFF.86952.0
  misc_feature: Variant of the nucleotide sequence at SEQ ID NO 36464

SEQ ID NO: 36467 - DNA, 2697 bp, Muscodor strobelii
  misc_feature: SGI cDNA ID NO. 572642
  misc_feature: Reduced expression when VOC is produced
  misc_feature: Encodes the peptide sequence at SEQ ID NO 36468
atgccggacaccgagccgctgatagatgatgcaaggctcatcaccaagatcgaagaagacgacggcgcgcctcgataccccctgcctgtcgccgcaggcacagagacaacaccggcctacaccgaccagtccgagccggagtcgtccgcggccgagcagtcggcagagcagtccagccacgcccacgagtccgaagcctccgtgtcccatcacgagtcccctcaccctcagcctcacccggacatcgcaaacgccgaggagctgcagttggctgcgcagctgagccgcgacctcgcccaggatgtcaccgtgctgctgaacgtcaacggctccggggagcagggccacgatctggacgccgccgttgccagccatgcgcagcgtcaagacatcgccccgcacgagcaacgcccgactacgcaagccggccagcagaacgggcatcagtatctgcctcgcgttgaagagcccacgacgcagctcgagcacccggtggcgcacctcgaacgaccgtcagagcgaacgcagcagctgcaaggggaaggtcagccacatcaagaccgctaccatacagcgcgcgagcagcagcagcagcagcagcagccacagcaacatcaacatcaacatgtgcattctccttcgcattctcgttcacgttcccactcgcagtttctacccagcgaccaactgcaccagcaggcgcaattacaggtcttcctccctgcctcgcaccagcaccagcaaccgcaatcgcacccggcacccccatcacacccacgccctccgcctctccaaccacacggcgccctcaaccaactagcccagcacttcgggtctcatcctcaccctcaccctcacccccatccccatcctcatgccgtgcacggcgacgttccgccccgcaagcgctccaaggtgtcgcgggcctgtgacgagtgcttgttcagtaggatcccacagaagaggggccccagtaagggctatatcaaagagctcgccgatcgcatccacagcatcgaagggaagctcgcaagtgagggcggtaacctggactcgttgaccgagctcttgggcggagcgaaccgacgcgaaccattagacatctttgcgcctgccagccacgccgacgaaccaagtcgcaagcggcctttcggcggtatcgcgggtgccgagctcgacgagccagacccgtcgcagccgacgacgtgggtatcggaaccgcgctcggcccagcttcaccaagcgccacccaacggcgacggtgctccctacacggccaacggactggcaccgcgtcctttgcccgagatcccagacgcgccctttcagcccccggcggcggtcgatgccgtccccatcgaaccgcgtcactcgggtccgactcgccaagtagacggagatgcctttgatgtctatctgaatgttgttcaccaatgcttcccgttgcttgcgcgtgacaggacgcgcatggatgccttgcttgcagcctgtccagccacgctgagagacgccttcatcgaggtattacacagcaccatgcagtctttcatctctgcaccgggcctgtacacaaatcgtgatatcggatcagctacccggctggtcgccgagtgggaatctgactcctcacctcgagattcgctgacgaaccttgtccatcttcagactcttgtcttgaccgccatcgcgactgacaatcacggcccctcctctttgcgcggagagcacggcggtccctcgaaggcctcggtgctgggacgtgccgtcggcttggcatattcgatgaggctccatctagccggcctcgagcaagctgacgacgcggacgaggaccctgactctgacaaaaacatggcggtccgtacgtggtgggtgctggtcatgttggaccgctggaacgcaatctcgaccgccagcccgacattcatccccaacggcagcgtggtactgctccccagcatgaacgggctgttgggcgagaatgtgtatcacctcacccggttgtcgaatattttgggtcattttgcccctgtctcgctggcgccaccacgtgctctctcactcgacacgggcgcccggcctatcttgaacacgtttttcaacctagctatagagctgtttcgtgaggtgctgccagcccatatcgcacccgctacacatcctctactgcacctggtatattggcattgccgtctgctttcctatttgttccagtcgaattctaggagcgccgacgtcctgtgggcgtgtcaggaatcggtcagtctcttgcttgccaacgcacaactcttgagtccactcaaccaccacttcttctgtctcgtgaccttgtcgcttctggggctggccagagtcgaaaggacgcgcgagcaagcgtcatctctactcaaggatctcttgcgacctgatcttgcgccatctacgtgggatggagtagcccgaggacgcatcactggtcaaacctcgccgacttctgcacatacgagcctgaacccgaatcggcctgcagccctggctacgggttccaatgcagacatcaattcgaccgagcacgtcaatggtacgcaggtcccatcgaaaattgcgcaagactatgcgaatctggggtttgatccgagctctatcctgcgtggaggttatctgaacatcattgtggatgctggacctggctctccaggggcgcagcatgccacttag

SEQ ID NO: 36468 - protein, 898 aa, Muscodor strobelii
  misc_feature: SGI Peptide ID NO. 572642
  misc_feature (275)..(817): NCBI GI: 261360765 Blast Desc: conserved [Verticillium albo-atrum VaMs.102]
  misc_feature (292)..(826): NCBI GI: 256733450 Blast Desc: NECHADRAFT_35283 [Nectria haematococca mpVI 77-13-4]
  misc_feature (173)..(826): NCBI GI: 46128029 Blast Desc: FG08392.1 [Gibberella zeae PH-1]
  misc_feature (264)..(861): NCBI GI: 164426065 Blast Desc: NCU04827 [Neurospora crassa OR74A] gi|157071185|gb|EAA31150.2| [Neurospora crassa OR74A]
  misc_feature (72)..(854): NCBI GI: 116202051 Blast Desc: CHGG_08910 [Chaetomium globosum CBS 148.51] gi|88177428|gb|EAQ84896.1| CHGG_08910 [Chaetomium globosum CBS 148.51]
  misc_feature (301)..(814): NCBI GI: 154293779 Blast Desc: BC1G_14110 [Botryotinia fuckeliana B05.10] gi|150845266|gb|EDN20459.1| BC1G_14110 [Botryotinia fuckeliana B05.10]
  misc_feature (204)..(881): NCBI GI: 145610737 Blast Desc: MGG_00934 [Magnaporthe grisea 70-15] gi|145018112|gb|EDK02391.1| MGG_00934 [Magnaporthe grisea 70-15]
  misc_feature (301)..(814): NCBI GI: 156047731 Blast Desc: SS1G_09555 [Sclerotinia sclerotiorum 1980] gi|154693950|gb|EDN93688.1| SS1G_09555 [Sclerotinia sclerotiorum 1980]
  misc_feature (465)..(792): NCBI GI: 19075226 Blast Desc: transcription factor () [Schizosaccharomyces pombe 972h-] gi|74654642|sp|O59780.1|YCN3_SCHPO RecName: Full=Uncharacterized transcriptional regulatory protein C320.03
  misc_feature (465)..(792): NCBI GI: 213404784 Blast Desc: conserved [Schizosaccharomyces japonicus yFS275] gi|212001211|gb|EEB06871.1| conserved [Schizosaccharomyces japonicus yFS275]
  misc_feature: Useful for introducing or modulating the production of volatile compounds
MPDTEPLIDDARLITKIEEDDGAPRYPLPVAAGTETTPAYTDQSEPESSAAEQSAEQSSHAHESEASVSHHESPHPQPHPDIANAEELQLAAQLSRDLAQDVTVLLNVNGSGEQGHDLDAAVASHAQRQDIAPHEQRPTTQAGQQNGHQYLPRVEEPTTQLEHPVAHLERPSERTQQLQGEGQPHQDRYHTAREQQQQQQQPQQHQHQHVHSPSHSRSRSHSQFLPSDQLHQQAQLQVFLPASHQHQQPQSHPAPPSHPRPPPLQPHGALNQLAQHFGSHPHPHPHPHPHPHAVHGDVPPRKRSKVSRACDECLFSRIPQKRGPSKGYIKELADRIHSIEGKLASEGGNLDSLTELLGGANRREPLDIFAPASHADEPSRKRPFGGIAGAELDEPDPSQPTTWVSEPRSAQLHQAPPNGDGAPYTANGLAPRPLPEIPDAPFQPPAAVDAVPIEPRHSGPTRQVDGDAFDVYLNVVHQCFPLLARDRTRMDALLAACPATLRDAFIEVLHSTMQSFISAPGLYTNRDIGSATRLVAEWESDSSPRDSLTNLVHLQTLVLTAIATDNHGPSSLRGEHGGPSKASVLGRAVGLAYSMRLHLAGLEQADDADEDPDSDKNMAVRTWWVLVMLDRWNAISTASPTFIPNGSVVLLPSMNGLLGENVYHLTRLSNILGHFAPVSLAPPRALSLDTGARPILNTFFNLAIELFREVLPAHIAPATHPLLHLVYWHCRLLSYLFQSNSRSADVLWACQESVSLLLANAQLLSPLNHHFFCLVTLSLLGLARVERTREQASSLLKDLLRPDLAPSTWDGVARGRITGQTSPTSAHTSLNPNRPAALATGSNADINSTEHVNGTQVPSKIAQDYANLGFDPSSILRGGYLNIIVDAGPGSPGAQHAT

SEQ ID NO: 36469 - DNA, 5167 bp, Muscodor strobelii
  misc_feature: SGI EST ID NO. CUFF.87078.1
  misc_feature: Variant of the nucleotide sequence at SEQ ID NO 36467
cggacttcttgattttcgacccttagattatgaacatacggaatcatgtccaaagcagccacctcttagtcgcgacacatcccacaaaggtatatatgaccttgtggctaggccgatccgcgaactcgtcatgggtaaaggtgtaacgccgaagaactggccacagaatatcgtatatctcttacagccttcgttttcaccacacatcacccgaatacaatatgaaagtctgcgcagtcgctctcccgatctttgctctacgatcccagcacatttccctcgggggccctgtccctccgtcaaaatcacattgattcaagagacttcccattctgcccacggacaagctgggctctttgcagctcgtcatttagagcctggcactctgataatgccttactatggagtcgtccacacatccctaccgcctcgctgcgccgcccatgaatcatcagactacgacctctggttagatagggaggccaacgttgctattgacgctgcgcaggctgggaatgaggctcgatttgtgaatgactatcgtggggtgggttcccgaccaaacgcagaattcaatgaatgctgggacgccagaaccggacagaaatgtatggccgtatttgtcttgcctgcgggtaaaaatagcacgggagggattgcgaaaggagacgaaatacttgtcagctatggcaaaggcttctggtcaaaaaggagagacgaacatgaagcagaagttggccataaagcggcactgaagaccctatgacaatatcaaacggagtggtgcgcttgaaacaatgcgccattctgtcggtctggcagtgggtccgaagaccgatattgcaagcatggctcgagacgcagcaagcaatctatgcgcacgacgggcataagcgagacatgacgatgggatgtcgcattcggggccaaatcaatggccggattgcggaggggaaggcgagcgcaatataggtgccatgtgtcatgaccaacgaagtgcgagagagggccggaagctgaagggtcatagctccaagctgtagcctcaatagagaggtatatcaccatggcagcatgggtctccagtccggctcagcatagttcgtgccgcttccgagacccgagaaccattctggagcctgctgtagccaaagaaacagacgcaaaagaacatagacgttgtattactcgcggactctagactttgctcgctcggagacgagggtcgggtgttctttacgatggaagccaccggcgagggttgtgccgcatgtacagtaggtacctgtactaagcacgttgaccactaatagcttgatcgacgttgattggtaactgctgttcgtgtcgtctgtttcgctacagatctcagcatcagcagttccgcatacattgtacgcgggaatggatgcatgtatgcatggatgtagagacagctaaaatcgccgagccgtcgtcatggcgaatctcgtagtcgagccgccgtcaagcttatattggtggctccggatttggcaccggcgcaaacccgagcagggagggcgtggtttgtagctagcgatggggatccgtcagatcggatttcctcgtacgagacaggcagaaattcagtttcctttttcctctcgccaaccatcgcacccagatcctcggaccgagtgttgttcctcgtcgccagagcccgctctcgcgcctgtgccgccaccatcgcggccccatcctctcctctccgctcctcctcgcgccgtagagatgacataggcgcagacagatattttgtcagcacgccccgaatcgccggcgacctgcgcgcaggcatgccggacaccgagccgctgatagatgatgcaaggctcatcaccaagatcgaagaagacgacggcgcgcctcgataccccctgcctgtcgccgcaggcacagagacaacaccggcctacaccgaccagtccgagccggagtcgtccgcggccgagcagtcggcagagcagtccagccacgcccacgagtccgaagcctccgtgtcccatcacgagtcccctcaccctcagcctcacccggacatcgcaaacgccgaggagctgcagttggctgcgcagctgagccgcgacctcgcccaggatgtcaccgtgctgctgaacgtcaacggctccggggagcagggccacgatctggacgccgccgttgccagccatgcgcagcgtcaagacatcgccccgcacgagcaacgcccgactacgcaagccggccagcagaacgggcatcagtatctgcctcgcgttgaagagcccacgacgcagctcgagcacccggtggcgcacctcgaacgaccgtcagagcgaacgcagcagctgcaaggggaaggtcagccacatcaagaccgctaccatacagcgcgcgagcagcagcagcagcagcagcagccacagcaacatcaacatcaacatgtgcattctccttcgcattctcgttcacgttcccactcgcagtttctacccagcgaccaactgcaccagcaggcgcaattacaggtcttcctccctgcctcgcaccagcaccagcaaccgcaatcgcacccggcacccccatcacacccacgccctccgcctctccaaccacacggcgccctcaaccaactagcccagcacttcgggtctcatcctcaccctcaccctcacccccatccccatcctcatgccgtgcacggcgacgttccgccccgcaagcgctccaaggtgtcgcgggcctgtgacgaatgccgccgaaaaaaatcaaatgcgacgcatcgtccgaatccgccgacgagccatgctccaactgccgacgctctgcggccaggtgcttgttcagtaggatcccacagaagaggggccccagtaagggctatatcaaagagctcgccgatcgcatccacagcatcgaagggaagctcgcaagtgagggcggtaacctggactcgttgaccgagctcttgggcggagcgaaccgacgcgaaccattagacatctttgcgcctgccagccacgccgacgaaccaagtcgcaagcggcctttcggcggtatcgcgggtgccgagctcgacgagccagacccgtcgcagccgacgacgtgggtatcggaaccgcgctcggcccagcttcaccaagcgccacccaacggcgacggtgctccctacacggccaacggactggcaccgcgtcctttgcccgagatcccagacgcgccctttcagcccccggcggcggtcgatgccgtccccatcgaaccgcgtcactcgggtccgactcgccaagtagacggagatgcctttgatgtctatctgaatgttgttcaccaatgcttcccgttgcttgcgcgtgacaggacgcgcatggatgccttgcttgcagcctgtccagccacgctgagagacgccttcatcgaggtattacacagcaccatgcagtctttcatctctgcaccgggcctgtacacaaatcgtgatatcggatcagctacccggctggtcgccgagtgggaatctgactcctcacctcgagattcgctgacgaaccttgtccatcttcagactcttgtcttgaccgccatcgcgactgacaatcacggcccctcctctttgcgcggagagcacggcggtccctcgaaggcctcggtgctgggacgtgccgtcggcttggcatattcgatgaggctccatctagccggcctcgagcaagctgacgacgcggacgaggaccctgactctgacaaaaacatggcggtccgtacgtggtgggtgctggtcatgttggaccgctggaacgcaatctcgaccgccagcccgacattcatccccaacggcagcgtggtactgctccccagcatgaacgggctgttgggcgagaatgtgtatcacctcacccggttgtcgaatattttgggtcattttgcccctgtctcgctggcgccaccacgtgctctctcactcgacacgggcgcccggcctatcttgaacacgtttttcaacctagctatagagctgtttcgtgaggtgctgccagcccatatcgcacccgctacacatcctctactgcacctggtatattggcattgccgtctgctttcctatttgttccagtcgaattctaggagcgccgacgtcctgtgggcgtgtcaggaatcggtcagtctcttgcttgccaacgcacaactcttgagtccactcaaccaccacttcttctgtctcgtgaccttgtcgcttctggggctggccagagtcgaaaggacgcgcgagcaagcgtcatctctactcaaggatctcttgcgacctgatcttgcgccatctacgtgggatggagtagcccgaggacgcatcactggtcaaacctcgccgacttctgcacatacgagcctgaacccgaatcggcctgcagccctggctacgggttccaatgcagacatcaattcgaccgagcacgtcaatggtacgcaggtcccatcgaaaattgcgcaagactatgcgaatctggggtttgatccgagctctatcctgcgtggaggttatctgaacatcattgtggatgctggacctggctctccaggggcgcagcatgccacttagacggcgatgttcaatgcacgcttgaagaggcgatgagaacgaacagaacttgtatgatagtaatgcgtgatgatatgtacctggtagcgtgtgtgaccttacctttacaggcaggctataggaatgcctttatcccgctccaaagtactgcttgtttcaacgttaaatatagcagagctggaatggcaatcaagtacctgccatgaggggagaatacactcgtccggaaattcttggtatctattaatctatacccacttgtatatatgtcttattcgttagctatgctcggagaaacggccaataggcaatttgatcctagaagataggacgggtatgctgcggcatacttgcattcagccgccgagagcatgcatcgccagtgcgccaatcaagacgccccgaacgccccaaagaggaaggttcaatcgatgtaagtcggtatgcaaaatggctcatgaaccaaggactaaagtatgttgcgtcatgcacggtctcagccaggtattgtcttaaggcttcatatgctcgaccacggttccgcgtctgatgcgcgccactgcactctca

SEQ ID NO: 36470 - DNA, 636 bp, Muscodor strobelii
  misc_feature: SGI cDNA ID NO. 572643
  misc_feature: Encodes the peptide sequence at SEQ ID NO 36471
atgggtaaaggtgtaacgccgaagaactggccacagaatatcgtatatctcttacagccttcgttttcaccacacatcacccgaatacaatatgaaagtctgcgcagtcgctctcccgatctttgctctacgatcccagcacatttccctcgggggccctgtccctccgtcaaaatcacattgattcaagagacttcccattctgcccacggacaagctgggctctttgcagctcgtcatttagagcctggcactctgataatgccttactatggagtcgtccacacatccctaccgcctcgctgcgccgcccatgaatcatcagactacgacctctggttagatagggaggccaacgttgctattgacgctgcgcaggctgggaatgaggctcgatttgtgaatgactatcgtggggtgggttcccgaccaaacgcagaattcaatgaatgctgggacgccagaaccggacagaaatgtatggccgtatttgtcttgcctgcgggtaaaaatagcacgggagggattgcgaaaggagacgaaatacttgtcagctatggcaaaggcttctggtcaaaaaggagagacgaacatgaagcagaagttggccataaagcggcactgaagaccctatga

SEQ ID NO: 36471 - protein, 211 aa, Muscodor strobelii
  misc_feature: SGI Peptide ID NO. 572643
  misc_feature (7)..(194): NCBI GI: 261360764 Blast Desc: conserved [Verticillium albo-atrum VaMs.102]
  misc_feature (7)..(197): NCBI GI: 39973837 Blast Desc: MGG_00935 [Magnaporthe grisea 70-15] gi|145018111|gb|EDK02390.1| MGG_00935 [Magnaporthe grisea 70-15]
  misc_feature (7)..(201): NCBI GI: 171681884 Blast Desc: protein product [Podospora anserina] gi|170940901|emb|CAP66551.1| protein product [Podospora anserina]
  misc_feature (7)..(199): NCBI GI: 156047723 Blast Desc: SS1G_09551 [Sclerotinia sclerotiorum 1980] gi|154693946|gb|EDN93684.1| SS1G_09551 [Sclerotinia sclerotiorum 1980]
  misc_feature (4)..(199): NCBI GI: 189211209 Blast Desc: conserved [Pyrenophora tritici-repentis Pt-1C-BFP] gi|187978028|gb|EDU44654.1| conserved [Pyrenophora tritici-repentis Pt-1C-BFP]
  misc_feature (7)..(199): NCBI GI: 169625296 Blast Desc: SNOG_15918 [Phaeosphaeria nodorum SN15] gi|160705631|gb|EAT76756.2| SNOG_15918 [Phaeosphaeria nodorum SN15]
  misc_feature (7)..(191): NCBI GI: 256733459 Blast Desc: NECHADRAFT_105976 [Nectria haematococca mpVI 77-13-4]
  misc_feature (45)..(199): NCBI GI: 154288597 Blast Desc: BC1G_16424 [Botryotinia fuckeliana B05.10] gi|150854255|gb|EDN29447.1| BC1G_16424 [Botryotinia fuckeliana B05.10]
  misc_feature (105)..(199): NCBI GI: 85097115 Blast Desc: NCU04825 [Neurospora crassa OR74A] gi|28921874|gb|EAA31148.1| [Neurospora crassa OR74A]
  misc_feature (7)..(196): NCBI GI: 170084827 Blast Desc: SET domain protein [Laccaria bicolor S238N-H82] gi|164651189|gb|EDR15429.1| SET domain protein [Laccaria bicolor S238N-H82]
MGKGVTPKNWPQNIVYLLQPSFSPHITRIQYESLRSRSPDLCSTIPAHFPRGPCPSVKITLIQETSHSAHGQAGLFAARHLEPGTLIMPYYGVVHTSLPPRCAAHESSDYDLWLDREANVAIDAAQAGNEARFVNDYRGVGSRPNAEFNECWDARTGQKCMAVFVLPAGKNSTGGIAKGDEILVSYGKGFWSKRRDEHEAEVGHKAALKTL

SEQ ID NO: 36472 - DNA, 5167 bp, Muscodor strobelii; identical to SEQ ID NO: 36469
  misc_feature: SGI EST ID NO. CUFF.87078.1
  misc_feature: Variant of the nucleotide sequence at SEQ ID NO 36470

SEQ ID NO: 36473 - DNA, 4527 bp, Muscodor strobelii
  misc_feature: SGI cDNA ID NO. 572644
  misc_feature: Reduced expression when VOC is produced
  misc_feature: Encodes the peptide sequence at SEQ ID NO 36474
atgcagcctgacgacccgcccgccagctcgccgtcgcaagcacccgccgacaccaccactgacgcctcgcctctgccagccgagccggagcgccagccttcccacgagagcgacccagactcgaccacgccggtgcccagcgtccagactcggcctaccctgctgcccgtctctaccgacgaaatagcacgcgtggcattagtcgatggccagcatgaccgcgaatccagcgtcacctcttcgtggagcgctagctcggagcgccagctgggccatcccggaagcgtaacgagcaatgcggacttgtctgaccgcgtgtttcccatccggtctgtggtcagcgtcgaccactcccagccgggcccccgagcgctggcccggaaccccaccgacttcgaatacaacccacgctctgagagcacctggaatgggcgtcggaggcctagcaaccctcgtgttgccactgatctcccacagcgctccgataccgtaccggccccttcgtctccgccgcccagtggccccggtcctcgacggagcagaactcacaccatttccgaaaccgttggaagccccatgtccatcgacgaccgctacatgccgacagcaagcctgtctctctttgccgacgccgcttccgacgtctcggaccaggcaagcgtgagggacagtcgctcagccatgccggaaggaactagtagccaggccggggatgcgaagactcccggagaacccaacgagtctttcatgacagttcgatttcagcacaccatgacaggagacggtcatgccgttatcacgggccgcgacggcactttgcagcgctgtgaagacgagccaatccatgctcccggcgctgttcaggctttcggctgtctaattgccctgaaggaagagaccgacggccgactctctgttcgcatcgtgagcgaaaattcaaagaagatccttggctttacgccgcaggagctttttagactgcgcagcttcgccgatatattctcggaccagcagtcagataacctcctggatcatatagatttcatccgagacgaggataccgaccccgcagtaaatgggcccgatgtcttcagtatttctatccggccgcccaggatgaagcagatcaagctgtggtgcgcgctgcacgtcaatgagagccatcctgatctcattatttgcgaatttgaaccagaggatgatcaccatcatccgattcgcccgccggatgagctcgtacccgaagaacctgaagacactctgtaccaaaaccccacggccgaagagttctctgagagcacggagattagtagcaagcctctgagggtgctgaggagcgcacgcaaaaggagaggtgaagcgggagccatgcaagtctttgatatcatgtcccaggtacaagagcagttggcgtctgcacctaatctagacaagtttctcaagattcttgttggtatcgtgaaggagctgaccgggtttcatcgggtaatggtctaccagtttgatgccgagttcaacgggaaagtggtcaccgaagtggtggacccggcccaaacccgtgatttataccacggtttgcatttccctgcgtccgacattcctcgacaagctcgcgacctctataagctcaacaaagtgaggctgctctacgatcgcgacttagagtcggccaggttggtctgtcgaacgcttcaagatctggagcagccccttgatctgagtcacgcatatctacgagccatgtctcccattcatctgaaatatcttgctaatatggcagttcgttcgtctatgtccatatcgatcaacgccttcaacgagctgtggggcttgattgcctgtcacagttatggaccacatgggatgcgcgtaccattcccgatccgcaagatgtgtcgacttgttggagatactgcgtcccgcaatatagagcggttatcctacgcgtcacgtttgcaggccagaaaactcatcaacacgatgccaactgacaaaaatccttctggatacatcattgcctcttctgaggatttgctgaaattatttgacgctgactttggcatgctctctatccgcgatgagacgaaaatacttggcaaaatcgaacactcgcaagaggcacttgccatgctcgaatatcttcgccttagaagctttactgctgtgctaacaacgcaagacatcagccaggactttcccgatctccggtacccgccgggattctctgttattgcgggtctattgtatgtgccactcagcgttggtggcaatgacttcatcgtcttcttccgtaaaggtcaaattcgggaagtcaaatgggctggcaatccatacgataagattattaaagaaggcactgcgaatttcttggaaccacggtccagtttcaaggtatggcatgagacggtcattggcaaatgcagagaatggtccgaggaacaggttgagaccgctgctgtcttgtgcctagtctacggcaagtttatcgaggtctggagacagaaagaagctgcgctacagagtagccgtctcacccgcctgctgctggcaaattctgctcacgaagtccgtacccccctgaacgcaatcatcaactatctcgagatcgcgctagaaggatctcttgatcaagaaacgcgcgagaacctcgcaaggtcacattctgcctctaaatcgctcatatatgtgatcaatgaccttctggaccttaccaaaacagaagagggccaggccttggtgaagggagagatcatggatctaccggcatgcatcttggaggctacagagccattcaaagtagattcaaagcgcaagggtatttcctacgatgttgttgagcactcggggctgccacgttacgtatacggtgactatcgcagagtgcgacaggccgtcgcgaacctagccgccaatgccatgcaaaacacaacacaaggctctatccaagtcgaagcctttgtcacggaggtactagagtctaaggtatgtgtagaaataattgttcaggacacaggttgcggcatgagtagcgagaaacttgacaacctgttccaagacctggagcaagtcaccagcgcagacctcgatgagtccagatctgatgaggctgcgctagatccagcacaagaacaccgcgtattgggccttggtcttgccgttgtcgcgcggatggtgcgaaatatggatggtcagttgcgtctgaagtctgaggaaggcaaaggctctcggttcgtaattcaacttccgtttggattaccagataacgaggcactggaaaaaatggaatccggcgactcctctgcactatctccgccggcctctatgcggccttctgtaacgaagaccttgcccccaacagatgcaagcgaggtcttgctggttcaccgaggtggatccaatgcccccaactcgacaagcaggccgctagccgaaagacgaagctttgacgaaaccaatagcattagtagcataaaaagcggtgtcagcaacggtgccctaagtaacaagagcgatgcggatcggctcatcgacgccatccaaacgccattgtcactgggagacatcgacgatgaggtggtcggcattcagcgcaaaaattccaaaagacagcagcatcacatcaacactagtacatcttcgttacctggtgctttcactaccgctgagcctcccaagtcgcctgggggttccgccgagagaccgatcctgcgccgatcgacgacgaaccccgcggcggctgatgatacgcagccaggtgtccgctttgttcaagacagcaagacccccgtccgggctatcaaggttccggatgagtataccgaggcccccgctgcgccgcagacaggatcaaattccagagttctgttcgaaatccccgacaaaaaggcgccagcggcagaggcggcgaagcctgacacatcaccaccggaggggccgccccaattgcgagttcttgtagctgaagacgatcccgtgaatctgaaaatcctgaagaagagactcgagaaatctggccatgttgtccatcacgccgtcaacggtgaggattgtgcgactgtgtaccgagagaagtcgcaggagttcgatattgtcttgatggatatgcagatgccaatagtggacgggcttacaagcaccaaactcatcagggcatttgagaagacagaagactgccctgggatttctcccttggctagccctcacgggcacattccgattctggcagtatcggcatcgctcgtagagaaagacaagaacatctacacagacgcaggatttgacgggtggattctcaagccgatcgatttcaagcgtctcaaggttcttttggatggtatcactgatgagcaggtgcgagaacaatgtttctaccgaagtggagagtgggaacgcggagggtggtttaaacggactatccaagtgtcgcagccaacggggcccgatagcataaaggacggaaccacggatggaacgctggagtcagacgccacacctaagggagctgataccgatgatatgacagggtga

SEQ ID NO: 36474 - protein, 1508 aa, Muscodor strobelii
  misc_feature: SGI Peptide ID NO. 572644
  misc_feature (475)..(643): Pfam Id: PF01590 Pfam Desc: GAF domain
  misc_feature (956)..(1084): Pfam Id: PF02518 Pfam Desc: Histidine kinase-, DNA gyrase B-, and HSP90-like ATPase
  misc_feature (844)..(909): Pfam Id: PF00512 Pfam Desc: His Kinase A (phosphoacceptor) domain
  misc_feature (276)..(399): Pfam Id: PF08446 Pfam Desc: PAS fold
  misc_feature (1315)..(1444): Pfam Id: PF00072 Pfam Desc: Response regulator receiver domain
  misc_feature (276)..(324): Pfam Id: PF08446 Pfam Desc: PAS fold
  misc_feature (76)..(1468): NCBI GI: 171681854 Blast Desc: protein product [Podospora anserina] gi|170940886|emb|CAP66536.1| protein product [Podospora anserina]
  misc_feature (80)..(1468): NCBI GI: 256733452 Blast Desc: [Nectria haematococca mpVI 77-13-4]
  misc_feature (80)..(1470): NCBI GI: 85097151 Blast Desc: NCU04834 [Neurospora crassa OR74A] gi|28921883|gb|EAA31157.1| NCU04834 [Neurospora crassa OR74A] gi|71982796|gb|AAZ57422.1| phytochrome-1 [Neurospora crassa]
  misc_feature (80)..(1468): NCBI GI: 39726363 Blast Desc: phytochrome-like histidine kinase PHY1p [Gibberella moniliformis]
  misc_feature (80)..(1468): NCBI GI: 46128461 Blast Desc: FG08608.1 [Gibberella zeae PH-1]
  misc_feature (87)..(1485): NCBI GI: 145612557 Blast Desc: MGG_12377 [Magnaporthe grisea 70-15] gi|145019698|gb|EDK03926.1| MGG_12377 [Magnaporthe grisea 70-15]
  misc_feature (103)..(1388): NCBI GI: 39656355 Blast Desc: phytochrome-like histidine kinase PHY1p [Cochliobolus heterostrophus]
  misc_feature (243)..(1471): NCBI GI: 242764391 Blast Desc: sensor histidine kinase/response regulator, [Talaromyces stipitatus ATCC 10500] gi|218723958|gb|EED23375.1| sensor histidine kinase/response regulator, [Talaromyces ATCC
  misc_feature (101)..(1468): NCBI GI: 212529126 Blast Desc: sensor histidine kinase/response regulator, [Penicillium marneffei ATCC 18224] gi|210074118|gb|EEA28205.1| sensor histidine kinase/response regulator, [Penicillium ATCC
  misc_feature (103)..(1149): NCBI GI: 169618617 Blast Desc: SNOG_12501 [Phaeosphaeria nodorum SN15] gi|160703652|gb|EAT80314.2| SNOG_12501 [Phaeosphaeria nodorum SN15]
  misc_feature: Useful for introducing or modulating the production of volatile compounds
MQPDDPPASSPSQAPADTTTDASPLPAEPERQPSHESDPDSTTPVPSVQTRPTLLPVSTDEIARVALVDGQHDRESSVTSSWSASSERQLGHPGSVTSNADLSDRVFPIRSVVSVDHSQPGPRALARNPTDFEYNPRSESTWNGRRRPSNPRVATDLPQRSDTVPAPSSPPPSGPGPRRSRTHTISETVGSPMSIDDRYMPTASLSLFADAASDVSDQASVRDSRSAMPEGTSSQAGDAKTPGEPNESFMTVRFQHTMTGDGHAVITGRDGTLQRCEDEPIHAPGAVQAFGCLIALKEETDGRLSVRIVSENSKKILGFTPQELFRLRSFADIFSDQQSDNLLDHIDFIRDEDTDPAVNGPDVFSISIRPPRMKQIKLWCALHVNESHPDLIICEFEPEDDHHHPIRPPDELVPEEPEDTLYQNPTAEEFSESTEISSKPLRVLRSARKRRGEAGAMQVFDIMSQVQEQLASAPNLDKFLKILVGIVKELTGFHRVMVYQFDAEFNGKVVTEVVDPAQTRDLYHGLHFPASDIPRQARDLYKLNKVRLLYDRDLESARLVCRTLQDLEQPLDLSHAYLRAMSPIHLKYLANMAVRSSMSISINAFNELWGLIACHSYGPHGMRVPFPIRKMCRLVGDTASRNIERLSYASRLQARKLINTMPTDKNPSGYIIASSEDLLKLFDADFGMLSIRDETKILGKIEHSQEALAMLEYLRLRSFTAVLTTQDISQDFPDLRYPPGFSVIAGLLYVPLSVGGNDFIVFFRKGQIREVKWAGNPYDKIIKEGTANFLEPRSSFKVWHETVIGKCREWSEEQVETAAVLCLVYGKFIEVWRQKEAALQSSRLTRLLLANSAHEVRTPLNAIINYLEIALEGSLDQETRENLARSHSASKSLIYVINDLLDLTKTEEGQALVKGEIMDLPACILEATEPFKVDSKRKGISYDVVEHSGLPRYVYGDYRRVRQAVANLAANAMQNTTQGSIQVEAFVTEVLESKVCVEIIVQDTGCGMSSEKLDNLFQDLEQVTSADLDESRSDEAALDPAQEHRVLGLGLAVVARMVRNMDGQLRLKSEEGKGSRFVIQLPFGLPDNEALEKMESGDSSALSPPASMRPSVTKTLPPTDASEVLLVHRGGSNAPNSTSRPLAERRSFDETNSISSIKSGVSNGALSNKSDADRLIDAIQTPLSLGDIDDEVVGIQRKNSKRQQHHINTSTSSLPGAFTTAEPPKSPGGSAERPILRRSTTNPAAADDTQPGVRFVQDSKTPVRAIKVPDEYTEAPAAPQTGSNSRVLFEIPDKKAPAAEAAKPDTSPPEGPPQLRVLVAEDDPVNLKILKKRLEKSGHVVHHAVNGEDCATVYREKSQEFDIVLMDMQMPIVDGLTSTKLIRAFEKTEDCPGISPLASPHGHIPILAVSASLVEKDKNIYTDAGFDGWILKPIDFKRLKVLLDGITDEQVREQCFYRSGEWERGGWFKRTIQVSQPTGPDSIKDGTTDGTLESDATPKGADTDDMTG

SEQ ID NO: 36475 - DNA, 8486 bp, Muscodor strobelii
  misc_feature: SGI EST ID NO. CUFF.87084.1
  misc_feature: Variant of the nucleotide sequence at SEQ ID NO 36473
cagatgttgacaagaccctacttgtaaaaatctaagcgttaaaaacaccatggcttagcctgtggtcgcaatcaaaaaccgagtatcctggcgatgtgggctgcactgataccttgagcaacaattttgtcgtcttggtacatggggagaatgaggtctgcgagccgagattggcatatgctggaggttttgcatgtgttctaaacagtaggagttctcatactcgtcgtttttaacaattgcatttcatctgatcatctgccagagttgtccgcatctcagagtaccttctgagatgcggacaaccattactcatacaatcccccacagtatcatagtgtcgaatcggggcaaaacgacgccgttaccccgattcatggctcttgatagtgctgtatgcgaattgtaggtaatcgacgggaaggtcaaaaattagacataagcgacaaggtatgtatcaaacaccagataactatgcctgtagtacagtagatctggtgaaaacgtcgtgtgtccacatgttatgagtaagaggggttcgagatctgtacggtggatggctggaggcagatcagcagcaagactgggaaatgatcgtcgcctgtcctgccttgatggcaagttctttgggagactagaatcaggagatctgcgcatcacggtggcttgttgctccattcaccccgtccgcaccatacacaatccacaacataaaatcccatgtgtaaatgccatgtcctgtagacatgcgtgaggcacgatttgtgtgatgcgatactcaccagctcccacctcatcttctcgatatagccgtagggcagttcgtcagggtcgcaggtccgacatatgctcaattgcgtcatcccacattctgcgataccctgaaaccctgcacaggataataccgcaatacaatccacactgacaacattgtcgacgtctctgatccggccagcgccaggcgagccaggggtcgagagcgatcgacttgtatccatgtacatgcagaatcggattagctgatgaccgtgcagcggccgccgtgcacttgtcaagagccaacgaggagactactcgactagcagagctttgaaactccggaccgcagaaacagggatccagagggccaaagaggcccctcgcacttctcgctgggcaccacttccccctcctcgcgcctcccggggccgcgggacttggcggaagatcgaccagccctcgcccacccgagaagcaggaactcaacgaggcaagagcatacctactcgcctatcttccagggcactctctgcccgggcctggcaagtcggtgaaggcttcacggactagtactgaggtagcttgagggttggcagcaatctctcggccggttgactgcacttgcatgccaggtttccggtccccttgcccgtaagtactagctacctagacatcccacggggtctcgcatgtcgcctcgccacggctgagctgtggtggtccagtatacttcctgatccttcgattaccgcttgaattaccacttgacccatctgctcgccgcccgcctcacaccatctcggactagcttgctgcattttcttattgtcccctccttgttcacgcctcagtcctggcgtttggtcgtgtctctctcgacgtctcctctgccgttccagctcccagcaccttcaccagagcccacgcagcctggaaccgccagcagaccgccagccgctgcgagaggacacgctgcccgccgacatcgacacacacacgccgcacctagatacctgtagtattttgtagattgctccttgcccgcctgctggcactcgcccacgtctgcgtcgtagagtggcttctggcttctggctggctggatccccgaatagctgtactcccgtccaccacccctgctacgcccgcaacgccgccgcatctggctgtaacgctggcccgacatagactcgtcgagccaacctcgtgccgctcctgagctgtcgccatcgcccgagcgcggtgctgtcgctgtcgctgtcgctgtcggcacccacacgtgagccccgcgaagcaccggacagactctgccggaatgcaaacacgagacgagacttgcttccccggtagttgaaacagccgtaccgtggctcctctcgagctcacccgcacgtgcaccggcgcacgactactaggtcgttggccgtcgtcccgtacgacgcaagaggctcgccatgcagcctgacgacccgcccgccagctcgccgtcgcaagcacccgccgacaccaccactgacgcctcgcctctgccagccgagccggagcgccagccttcccacgagagcgacccagactcgaccacgccggtgcccagcgtccagactcggcctaccctgctgcccgtctctaccgacgaaatagcacgcgtggcattagtcgatggccagcatgaccgcgaatccagcgtcacctcttcgtggagcgctagctcggagcgccagctgggccatcccggaagcgtaacgagcaatgcggacttgtctgaccgcgtgtttcccatccggtctgtggtcagcgtcgaccactcccagccgggcccccgagcgctggcccggaaccccaccgacttcgaatacaacccacgctctgagagcacctggaatgggcgtcggaggcctagcaaccctcgtgttgccactgatctcccacagcgctccgataccgtaccggccccttcgtctccgccgcccagtggccccggtcctcgacggagcagaactcacaccatttccgaaaccgttggaagccccatgtccatcgacgaccgctacatgccgacagcaagcctgtctctctttgccgacgccgcttccgacgtctcggaccaggcaagcgtgagggacagtcgctcagccatgccggaaggaactagtagccaggccggggatgcgaagactcccggagaacccaacgagtctttcatgacagttcgatttcagcacaccatgacaggagacggtcatgccgttatcacgggccgcgacggcactttgcagcgctgtgaagacgagccaatccatgctcccggcgctgttcaggctttcggctgtctaattgccctgaaggaagagaccgacggccgactctctgttcgcatcgtgagcgaaaattcaaagaagatccttggctttacgccgcaggagctttttagactgcgcagcttcgccgatatattctcggaccagcagtcagataacctcctggatcatatagatttcatccgagacgaggataccgaccccgcagtaaatgggcccgatgtcttcagtatttctatccggccgcccaggatgaagcagatcaagctgtggtgcgcgctgcacgtcaatgagagccatcctgatctcattatttgcgaatttgaaccagaggatgatcaccatcatccgattcgcccgccggatgagctcgtacccgaagaacctgaagacactctgtaccaaaaccccacggccgaagagttctctgagagcacggagattagtagcaagcctctgagggtgctgaggagcgcacgcaaaaggagaggtgaagcgggagccatgcaagtctttgatatcatgtcccaggtacaagagcagttggcgtctgcacctaatctagacaagtttctcaagattcttgttggtatcgtgaaggagctgaccgggtttcatcgggtaatggtctaccagtttgatgccgagttcaacgggaaagtggtcaccgaagtggtggacccggcccaaacccgtgatttataccacggtttgcatttccctgcgtccgacattcctcgacaagctcgcgacctctataagctcaacaaagtgaggctgctctacgatcgcgacttagagtcggccaggttggtctgtcgaacgcttcaagatctggagcagccccttgatctgagtcacgcatatctacgagccatgtctcccattcatctgaaatatcttgctaatatggcagttcgttcgtctatgtccatatcgatcaacgccttcaacgagctgtggggcttgattgcctgtcacagttatggaccacatgggatgcgcgtaccattcccgatccgcaagatgtgtcgacttgttggagatactgcgtcccgcaatatagagcggttatcctacgcgtcacgtttgcaggccagaaaactcatcaacacgatgccaactgacaaaaatccttctggatacatcattgcctcttctgaggatttgctgaaattatttgacgctgactttggcatgctctctatccgcgatgagacgaaaatacttggcaaaatcgaacactcgcaagaggcacttgccatgctcgaatatcttcgccttagaagctttactgctgtgctaacaacgcaagacatcagccaggactttcccgatctccggtacccgccgggattctctgttattgcgggtctattgtatgtgccactcagcgttggtggcaatgacttcatcgtcttcttccgtaaaggtcaaattcgggaagtcaaatgggctggcaatccatacgataagattattaaagaaggcactgcgaatttcttggaaccacggtccagtttcaaggtatggcatgagacggtcattggcaaatgcagagaatggtccgaggaacaggttgagaccgctgctgtcttgtgcctagtctacggcaagtttatcgaggtctggagacagaaagaagctgcgctacagagtagccgtctcacccgcctgctgctggcaaattctgctcacgaagtccgtacccccctgaacgcaatcatcaactatctcgagatcgcgctagaaggatctcttgatcaagaaacgcgcgagaacctcgcaaggtcacattctgcctctaaatcgctcatatatgtgatcaatgaccttctggaccttaccaaaacagaagagggccaggccttggtgaagggagagatcatggatctaccggcatgcatcttggaggctacagagccattcaaagtagattcaaagcgcaagggtatttcctacgatgttgttgagcactcggggctgccacgttacgtatacggtgactatcgcagagtgcgacaggccgtcgcgaacctagccgccaatgccatgcaaaacacaacacaaggctctatccaagtcgaagcctttgtcacggaggtactagagtctaaggtatgtgtagaaataattgttcaggacacaggttgcggcatgagtagcgagaaacttgacaacctgttccaagacctggagcaagtcaccagcgcagacctcgatgagtccagatctgatgaggctgcgctagatccagcacaagaacaccgcgtattgggccttggtcttgccgttgtcgcgcggatggtgcgaaatatggatggtcagttgcgtctgaagtctgaggaaggcaaaggctctcggttcgtaattcaacttccgtttggattaccagataacgaggcactggaaaaaatggaatccggcgactcctctgcactatctccgccggcctctatgcggccttctgtaacgaagaccttgcccccaacagatgcaagcgaggtcttgctggttcaccgaggtggatccaatgcccccaactcgacaagcaggccgctagccgaaagacgaagctttgacgaaaccaatagcattagtagcataaaaagcggtgtcagcaacggtgccctaagtaacaagagcgatgcggatcggctcatcgacgccatccaaacgccattgtcactgggagacatcgacgatgaggtggtcggcattcagcgcaaaaattccaaaagacagcagcatcacatcaacactagtacatcttcgttacctggtgctttcactaccgctgagcctcccaagtcgcctgggggttccgccgagagaccgatcctgcgccgatcgacgacgaaccccgcggcggctgatgatacgcagccaggtgtccgctttgttcaagacagcaagacccccgtccgggctatcaaggttccggatgagtataccgaggcccccgctgcgccgcagacaggatcaaattccagagttctgttcgaaatccccgacaaaaaggcgccagcggcagaggcggcgaagcctgacacatcaccaccggaggggccgccccaattgcgagttcttgtagctgaagacgatcccgtgaatctgaaaatcctgaagaagagactcgagaaatctggccatgttgtccatcacgccgtcaacggtgaggattgtgcgactgtgtaccgagagaagtcgcaggagttcgatattgtcttgatggatatgcagatgccaatagtggacgggcttacaagcaccaaactcatcagggcatttgagaagacagaagactgccctgggatttctcccttggctagccctcacgggcacattccgattctggcagtatcggcatcgctcgtagagaaagacaagaacatctacacagacgcaggatttgacgggtggattctcaagccgatcgatttcaagcgtctcaaggttcttttggatggtatcactgatgagcaggtgcgagaacaatgtttctaccgaagtggagagtgggaacgcggagggtggtttaaacggactatccaagtgtcgcagccaacggggcccgatagcataaaggacggaaccacggatggaacgctggagtcagacgccacacctaagggagctgataccgatgatatgacagggtgatggattagacttggtcacgaggagctgctacgttcgctcttcagttgcagatgcccgcctgaatatcgattatagtatcggtggcgccggtcatttcgctgcggaaatgggtttattgtttgttcatctccctcctgcatagattgtgcatgggagctgaggcggagcacagtctttgactctctagaagggtcccattcagtacacgcattgggattttgggatatataggataggccaattgggggtgtaaccgtcatgtaaaagtacacgcattgcatgggagtttggtcaaaaggggagacaagacgttatccaggcgcgagtggcttgttttcagtgtgctaggcacgcatacctagacaactaaatacttagtataagagaggttgggagtcgatgagattggagggtaacactggattaggggggccgtggacctattcgccctctccgcgcccgagccatagtgccagggagtctaggctctggtcgcacagttgaacaatgagtgtatcccaatataaagtacctaatagaacgaataacttctctccagctagtggcgataacacgagtgtcacaaatagggagggccacgatgtctttctttccaatgctgtagaagtcgtgaatgtacaggacatcatgcggacttggatgggtatcatcggtcgaacggatcatatgttgaaaagtgtctggaacaattcatgtacattaggtggtttcctatctatctatcctatctatctaccgcagattgacatcatatgttcattccagattcataacattacatgatataaacgtttattcacccagcccagcggctaggctgataatcccccccccccagacccatgtcatcggcgtccctgggatgcatcatccccatcatttctctccctcgcgcagatgagatgggcgcgatgcttgattgtttgtttcgaaatcatatgccgctttcatgtaacaataaccccgcctggtccaatatgcaaccggtaaaatcaaaacgtaacgccgtggtggatagaacgccgtagtgggccgtgaggcccagcgccccgcaaaggggcagtgtggttgaaacgatccggccttgatagccggaaggaaatcttctttcctttatagtaggtagttttttgatggccagtgtagctgttacaggcttcgctacccatcggtggatccagagccgctttcactgtccgtcgttatagagccctggttgcgagctacgtgcacaaggcgatagataccgaatgctatgccggccagtacggcgaagagcaggatgatgatgatggcgataacgtcgttttctttgaccatggtcgcggtctttgatggtggatacgtgtgtggttatgcggccttcgatggcctagtatgtgcggtcgtaaggtagatagatggcttatagatgcactaggtagtatcttgatgcttgattgcgagagtgtgcggtatgatagagagaactagcagaggtagaataagccaggcaagtccaattagatcagaataatcgccaaattgatgagatacggatgagggtaatgtttgagacagacgtgaatcttttgaggagtaggaataggtcgggcaacatagataggataatgttggctgccagtaagacaatacggtacaagataggcaggttactcaaggaggaggggcaatgccttataactggttgggcccggttgccctgccatctggacccgagtaaat

SEQ ID NO: 36476 - DNA, 189 bp, Muscodor strobelii
  misc_feature: SGI cDNA ID NO. 572645
  misc_feature: Reduced expression when VOC is produced
  misc_feature: Encodes the peptide sequence at SEQ ID NO 36477
tgccacgacgagaactcgggcaagctcattgtctacctcacctggaagaacggccagaagacgcagcacgagaccaaggtcatctaccagcgctgtccccaaaagatgctgcagttctacgagcgacatgtgaaagtggttatggccgctggcgaatcgctcaaggacgagcacgacgcgcgatcttga

SEQ ID NO: 36477 - protein, 62 aa, Muscodor strobelii
  misc_feature: SGI Peptide ID NO. 572645
  misc_feature (5)..(48): Pfam Id: PF01393 Pfam Desc: Chromo shadow domain
  misc_feature (1)..(47): NCBI GI: 85086129 Blast Desc: NCU04017 [Neurospora crassa OR74A] gi|28918726|gb|EAA28396.1| NCU04017 [Neurospora crassa OR74A] gi|29150130|emb|CAD79690.1| conserved [Neurospora crassa] protein
  misc_feature (1)..(50): NCBI GI: 261359481 Blast Desc: heterochromatin protein one [Verticillium albo-atrum VaMs.102]
  misc_feature (1)..(60): NCBI GI: 256734025 Blast Desc: NECHADRAFT_77727 [Nectria haematococca mpVI 77-13-4]
  misc_feature (3)..(46): NCBI GI: 46128771 Blast Desc: FG08763.1 [Gibberella zeae PH-1]
  misc_feature (1)..(36): NCBI GI: 171682342 Blast Desc: protein product [Podospora anserina] gi|170941130|emb|CAP66780.1| protein product [Podospora anserina]
  misc_feature (6)..(44): NCBI GI: 156034290 Blast Desc: SS1G_13448 [Sclerotinia sclerotiorum 1980] gi|154698851|gb|EDN98589.1| SS1G_13448 [Sclerotinia sclerotiorum 1980]
  misc_feature (6)..(44): NCBI GI: 154310907 Blast Desc: BC1G_06432 [Botryotinia fuckeliana B05.10] gi|150851231|gb|EDN26424.1| BC1G_06432 [Botryotinia fuckeliana B05.10]
  misc_feature (1)..(44): NCBI GI: 238837960 Blast Desc: heterochromatin protein HP1 [Microsporum canis CBS 113480]
  misc_feature (3)..(60): NCBI GI: 169619836 Blast Desc: SNOG_13115 [Phaeosphaeria nodorum SN15] gi|160703909|gb|EAT79442.2| SNOG_13115 [Phaeosphaeria nodorum SN15]
  misc_feature (5)..(44): NCBI GI: 19114361 Blast Desc: chromodomain protein Swi6 [Schizosaccharomyces pombe] gi|730857|sp|P40381.1|SWI6_SCHPO RecName: Full=Chromatin-associated protein swi6 gi|510930|emb|CAA50668.1|
  misc_feature: Useful for introducing or modulating the production of volatile compounds
CHDENSGKLIVYLTWKNGQKTQHETKVIYQRCPQKMLQFYERHVKVVMAAGESLKDEHDARS

SEQ ID NO: 36478 - DNA, 732 bp, Muscodor strobelii
  misc_feature: SGI EST ID NO. CUFF.86978.0
  misc_feature: Variant of the nucleotide sequence at SEQ ID NO 36476
ccacgacgagaactcgggcaagctcattgtctacctcacctggaagaacggccagaagacgcagcacgagaccaaggtcatctaccagcgctgtccccaaaagatgctgcagttctacgagcgacatgtgaaagtggttatggccgctggcgaatcgctcaaggacgagcacgacgcgcgatcttgaattgggccgagggacggcgggctaggatacgcatgacacgagtcatcagattgtttggacatggcacgggagaaatggaagagactgtgacttgacaggtagtcgagcactctcgcttcttatttattgttttcgagggcgtcacggacaaacacgcagggtctcgttggcttctcgttactcatcaggcgttgctctacgagccataagcacatcagggagccgatgctcgagtgcgaagccaaggatccccaactgagggcagaaaatgtactgatactaaggctagtttgcacgtgggtggtagcaagactcgatgaagtgtacctataggagatcaagcccgcctggtcataacgaacacgatgcccagagaggactcgatcacacacatacacacaactgcaagtattaaatgaattcgttgttcatccactgggcttgtataagaattggccgtgacagtctatgagcccctgctagtccttgcggtggcagagaaggagggggattacgacatacatgtcccagtagaacggaatcca

SEQ ID NO: 36479 - DNA, 2646 bp, Muscodor strobelii
  misc_feature: SGI cDNA ID NO. 572646
  misc_feature: Encodes the peptide sequence at SEQ ID NO 36480
atgtctgcaccagggatcacctacgagggggtgctcgcacagagcgataccaacttgatcgagagacggaaaatcttcacgggtctcactttctggatatctgcctatatcggaactcaacgcgctatgtgcaaaggaatgatagaggaaaacggcggcaccgtcgtcaaacttgaaaagcaagccaatatacttctagttgacccggctaagcaagatccaccgcctggctcatattcatataagctcattgagaatgctataaaggaaggctccatggataaaaaagaagagtatctttgcaaaccgcctattggcgacaacatggttgcttctccaagtgctgcatccaagacgacaaggaataaattcaccgcagaagaggatagactcttgatgcaatttgtgacggaaaaggaacggcttggtgaacctatcggcggcaacgaaatttataaggagttcgcttctaatcatccgagtcatacttatcagtcatggcaagatcgctggagaaagaagttgaagctacttcctcgccctgcaatttttgtggacccctttcagcctcaacgaatccaacaggctcctcaagccgcttctcctacgaccaggaacgaacccgattcgtctaccaagagaagagcacggttcacagttgatgaagataagatcttacttgagaccatccaccaagcaattatagaccaagaggggtggaagggaaacaatgtgtacaagcgactatcagaagatttcccacaacgctcgtcccagtcctggagggagcgtgctatcagtcacgtagcggttcaacatgcagatcagatccagcaatgggaatcggaatttggaggcactttaagcgacgaagatgatgtcggaaaagtatctcgacgccgacatgcacaagagcgtcaagataaagctcgtgccaagtcgataggtaccccgtctccgagaaagaacaacagcccgaaaggcggtggcactcaaaatgttacaggtccagcgggaagacaagcggatcagaatggaaatcgcgatatgcattcttcacctagaggttccgtcgatcttagtggacggcctgagtcgggacgagggcaccggtctagcagtggtatctccaaagattctacctccacagccgcccagggcccaagctctgtagccgaaactacgacaagagagcagttcgtgaaagactacaatatctggttgggtaatacccagcgcgatataggggaagtgcccaagatcggaggcagaaagccaagcctctgggaactgtgggaagctgtgaggtcaaagaagatggatctcgcggaactcgactggcaacaagtcgcggaagatttggacttcgattggcctaagcatccatcactaccagatgaactccggaaatgctttgagtcacatcttctgcccttcgctgacgacatggctggtttcgacgcagatgccgacgatagcgatgatgttttgagcaacgaagatacgagtgaccgatattcacaggtagatatcgaaggcccgttttcatcatcgccaccaatgcgagcctctagaaaacgtcccatagatgccgaactgcccgtcccagaacagactccacagcagatctcgtcaaaacgcagaaaaactgacccgaaccatgaaattccgtctaccccggaatatgtcaatgggactgcaaatctgcgacatctcagtgacccggataagagccaatacactcctcatgaaacctttcacactccgggaaccgggaccatgcggacggaagaagacgaggaggctagagatcaacttgcgggtctcccagagctgccaaaaaatcgaaacattgtagagcctgagacacaggacttccatttcgacccaggtactcaagccaatgctcgtggtggcacgccaattgatgttgagaacgatacccaaatgactaatacgccttctcaacaactccaacgcgaatcagacgacgcaatttcaccagagagacaagcagagtctgcaactccactcggctcacgtcgcaagaccgtgcaatctacacccacgcccaaacgcaagacgcagctgccttttctaccggatgattccgacgatgatctgcttctagaaatggacagtggtgggaagcggaacgagtcagcacatcgtcatcggattttggctgcaactctgcgagcttcaaaggggcctcggttcccttctcctaacagacgttcgcccaagcctacaactcagagtttgtccgccgcgagacccaatcttgagtcaaagcagaaaactcttttagtagatgatcagccagatgatataattgaacgattcgtcatgctcggctaccctaaggccattgtcgtgcgctccttagcagctacatcctggatgatcggcaatgctggtgaagtcatggagatgctcaagcgaggcgaccccttgccccagaagaccaccgggatctggacgcaacgcgatgacgacgcactgaagttggtgtgttctgaagtagagccaggtaatgagaaagagaagaagaagcgagcgaaggaactcaagcgtctccaggcgaagcatggagatgagcagatcgatcgacggaaatggtatctactggagttagtagagtga

SEQ ID NO: 36480 - protein, 881 aa, Muscodor strobelii
  misc_feature: SGI Peptide ID NO. 572646
  misc_feature (120)..(183): Pfam Id: PF08914 Pfam Desc: Rap1 Myb domain
  misc_feature (150)..(173): Pfam Id: PF09197 Pfam Desc: Rap1, DNA-binding
  misc_feature (1)..(519): NCBI GI: 145610915 Blast Desc: MGG_00809 [Magnaporthe grisea 70-15] gi|145018255|gb|EDK02534.1| MGG_00809 [Magnaporthe grisea 70-15]
  misc_feature (25)..(182): NCBI GI: 119193825 Blast Desc: CIMG_01287 [Coccidioides immitis RS]
  misc_feature (1)..(230): NCBI GI: 225561227 Blast Desc: conserved [Ajellomyces capsulatus G186AR]
  misc_feature (25)..(175): NCBI GI: 154292606 Blast Desc: BC1G_14629 [Botryotinia fuckeliana B05.10] gi|150845843|gb|EDN21036.1| BC1G_14629 [Botryotinia fuckeliana B05.10]
  misc_feature (25)..(180): NCBI GI: 156060325 Blast Desc: SS1G_02301 [Sclerotinia sclerotiorum 1980] gi|154699709|gb|EDN99447.1| SS1G_02301 [Sclerotinia sclerotiorum 1980]
  misc_feature (25)..(182): NCBI GI: 240105556 Blast Desc: CPC735_051190 [Coccidioides posadasii C735 delta SOWgp]
  misc_feature (1)..(185): NCBI GI: 189201247 Blast Desc: conserved [Pyrenophora tritici-repentis Pt-1C-BFP] gi|187984059|gb|EDU49547.1| conserved [Pyrenophora tritici-repentis Pt-1C-BFP]
  misc_feature (25)..(182): NCBI GI: 242762905 Blast Desc: transcription factor Rap1, [Talaromyces stipitatus ATCC 10500] gi|218723668|gb|EED23085.1| transcription factor Rap1, [Talaromyces stipitatus ATCC 10500]
  misc_feature (5)..(176): NCBI GI: 256727132 Blast Desc: NECHADRAFT_76806 [Nectria haematococca mpVI 77-13-4]
  misc_feature (3)..(206): NCBI GI: 46135783 Blast Desc: FG09407.1 [Gibberella zeae PH-1]
MSAPGITYEGVLAQSDTNLIERRKIFTGLTFWISAYIGTQRAMCKGMIEENGGTVVKLEKQANILLVDPAKQDPPPGSYSYKLIENAIKEGSMDKKEEYLCKPPIGDNMVASPSAASKTTRNKFTAEEDRLLMQFVTEKERLGEPIGGNEIYKEFASNHPSHTYQSWQDRWRKKLKLLPRPAIFVDPFQPQRIQQAPQAASPTTRNEPDSSTKRRARFTVDEDKILLETIHQAIIDQEGWKGNNVYKRLSEDFPQRSSQSWRERAISHVAVQHADQIQQWESEFGGTLSDEDDVGKVSRRRHAQERQDKARAKSIGTPSPRKNNSPKGGGTQNVTGPAGRQADQNGNRDMHSSPRGSVDLSGRPESGRGHRSSSGISKDSTSTAAQGPSSVAETTTREQFVKDYNIWLGNTQRDIGEVPKIGGRKPSLWELWEAVRSKKMDLAELDWQQVAEDLDFDWPKHPSLPDELRKCFESHLLPFADDMAGFDADADDSDDVLSNEDTSDRYSQVDIEGPFSSSPPMRASRKRPIDAELPVPEQTPQQISSKRRKTDPNHEIPSTPEYVNGTANLRHLSDPDKSQYTPHETFHTPGTGTMRTEEDEEARDQLAGLPELPKNRNIVEPETQDFHFDPGTQANARGGTPIDVENDTQMTNTPSQQLQRESDDAISPERQAESATPLGSRRKTVQSTPTPKRKTQLPFLPDDSDDDLLLEMDSGGKRNESAHRHRILAATLRASKGPRFPSPNRRSPKPTTQSLSAARPNLESKQKTLLVDDQPDDIIERFVMLGYPKAIVVRSLAATSWMIGNAGEVMEMLKRGDPLPQKTTGIWTQRDDDALKLVCSEVEPGNEKEKKKRAKELKRLQAKHGDEQIDRRKWYLLELVE

SEQ ID NO: 36481 - DNA, 3452 bp, Muscodor strobelii
  misc_feature: SGI EST ID NO. CUFF.86975.0
  misc_feature: Variant of the nucleotide sequence at SEQ ID NO 36479
cgcgtctttgcgaaactctatccacgagactcccaagtaaacgagtgtgtcacagctttctctgcctgatcgttccttgctgtgagctatcataatgctataaaagcattgccatgtcacaacaggactaataataactgacatggatctccaaagtgcatgataacgccatttgattcattacagataatcacacacagccttctgattatcccttctaagtccgcgatccagtcgcgcagctattgctgaaactaccttgtcgccactcgcattcaattaccacttatttacaggaatccgctcaacggtccttgtggtttcgcgtgtattcgggaattttcacgaactttcatctcacaacaacccagcatacccaaatgcaacacctaatgcaacaatgtctgcaccagggatcacctacgagggggtgctcgcacagagcgataccaacttgatcgagagacggaaaatcttcacgggtctcactttctggatatctgcctatatcggaactcaacgcgctatgtgcaaaggaatgatagaggtaagatatttgatgtgtttatctgcatactccgaggctgaatataaacaggaaaacggcggcaccgtcgtcaaacttgaaaagcaagccaatatacttctagttgacccggctaagcaagatccaccgcctggctcatattcatataagctcattgagaatgctataaaggaaggctccatggataaaaaagaagagtatctttgcaaaccgcctattggcgacaacatggttgcttctccaagtgctgcatccaagacgacaaggaataaattcaccgcagaagaggatagactcttgatgcaatttgtgacggaaaaggaacggcttggtgaacctatcggcggcaacgaaatttataaggagttcgcttctaatcatccgagtcatacttatcagtcatggcaagatcgctggagaaagaagttgaagctacttcctcgccctgcaatttttgtggacccctttcagcctcaacgaatccaacaggctcctcaagccgcttctcctacgaccaggaacgaacccgattcgtctaccaagagaagagcacggttcacagttgatgaagataagatcttacttgagaccatccaccaagcaattatagaccaagaggggtggaagggaaacaatgtgtacaagcgactatcagaagatttcccacaacgctcgtcccagtcctggagggagcgtgctatcagtcacgtagcggttcaacatgcagatcagatccagcaatgggaatcggaatttggaggcactttaagcgacgaagatgatgtcggaaaagtatctcgacgccgacatgcacaagagcgtcaagataaagctcgtgccaagtcgataggtaccccgtctccgagaaagaacaacagcccgaaaggcggtggcactcaaaatgttacaggtccagcgggaagacaagcggatcagaatggaaatcgcgatatgcattcttcacctagaggttccgtcgatcttagtggacggcctgagtcgggacgagggcaccggtctagcagtggtatctccaaagattctacctccacagccgcccagggcccaagctctgtagccgaaactacgacaagagagcagttcgtgaaagactacaatatctggttgggtaatacccagcgcgatataggggaagtgcccaagatcggaggcagaaagccaagcctctgggaactgtgggaagctgtgaggtcaaagaagatggatctcgcggaactcgactggcaacaagtcgcggaagatttggacttcgattggcctaagcatccatcactaccagatgaactccggaaatgctttgagtcacatcttctgcccttcgctgacgacatggctggtttcgacgcagatgccgacgatagcgatgatgttttgagcaacgaagatacgagtgaccgatattcacaggtagatatcgaaggcccgttttcatcatcgccaccaatgcgagcctctagaaaacgtcccatagatgccgaactgcccgtcccagaacagactccacagcagatctcgtcaaaacgcagaaaaactgacccgaaccatgaaattccgtctaccccggaatatgtcaatgggactgcaaatctgcgacatctcagtgacccggataagagccaatacactcctcatgaaacctttcacactccgggaaccgggaccatgcggacggaagaagacgaggaggctagagatcaacttgcgggtctcccagagctgccaaaaaatcgaaacattgtagagcctgagacacaggacttccatttcgacccaggtactcaagccaatgctcgtggtggcacgccaattgatgttgagaacgatacccaaatgactaatacgccttctcaacaactccaacgcgaatcagacgacgcaatttcaccagagagacaagcagagtctgcaactccactcggctcacgtcgcaagaccgtgcaatctacacccacgcccaaacgcaagacgcagctgccttttctaccggatgattccgacgatgatctgcttctagaaatggacagtggtgggaagcggaacgagtcagcacatcgtcatcggattttggctgcaactctgcgagcttcaaaggggcctcggttcccttctcctaacagacgttcgcccaagcctacaactcagagtttgtccgccgcgagacccaatcttgagtcaaagcagaaaactcttttagtagatgatcagccagatgatataattgaacgattcgtcatgctcggctaccctaaggccattgtcgtgcgctccttagcagctacatcctggatgatcggcaatgctggtgaagtcatggagatgctcaagcgaggcgaccccttgccccagaagaccaccgggatctggacgcaacgcgatgacgacgcactgaagttggtgtgttctgaagtagagccaggtaatgagaaagagaagaagaagcgagcgaaggaactcaagcgtctccaggcgaagcatggagatgagcagatcgatcgacggaaatggtatctactggagttagtagagtgaagacctcacaaggatgacgtcggcgttgtccagggtcggcttgatgcaccacttttgtatgagattacttgttcggagttggagttggacttggagtcgggttgtttgattcggtgatacccattctactggtctaaatggcgtccagttgtgcttggctacctttggtggcttctatcgttgagatgtttcaggaccgtaaattttcttgcgaatatacccgaattctacatatgttttccgcgtcttgtttttttgtaattatgagagtccgtccatgcagttgataacatactgcaatagttggtatagagagcgggagggaggatcagcgcattgtctgcctactagtttt

SEQ ID NO: 36482 - DNA, 1269 bp, Muscodor strobelii
  misc_feature: SGI cDNA ID NO. 572647
  misc_feature: Encodes the peptide sequence at SEQ ID NO 36483
atggggctcttcgcaaaattggccattggcgttctcgtcatctctttcttcacattcgtagcctttttcggtcggctgcctgcgctaagacatacacccatcgcgtggcttcaccgagcaatatgggtatccataccaaacgccttcctctcacttgaccaatctctaacaggcggtcgaatcaccgccaacgccagctcattcggcaactcagtatggtacggcaagcatcccatcgtgctcatattcttcttcctcctactctctgtatcagaatacctctacctaccagaagcatggccgcgtctcagccgtactcaccaaatcttcggcttcatcgccatcatcctgccttacatattcctctacctggcctccttcacggacccaggtgaaatcaaccaaaccacgcatgagaaatacatgtcccaatacccctacgacttcacgttattccacccaggtcaaacatgtcgaacctgcaatctgctcaaaccccctcgctcaaaacactgcgtagtgtgtaagcgatgcgtcgcaaaaatggaccatcactgcgtcttcataaacaattgcgtcggctacaaaaaccagcactacttcctcctactcctcctcacgaccgccatcctaacgacctacggcggaatcctcggtctaggccttatctccgaaacagctaataaacacaatatcttcttctccctatggaaacatcccaagcttgcctggcgagactggttcatactcttctcatacggcatccagcaagacgtcggtatcggcgccgtaaccctcctcgtcctcatgacttccccgctagtctggggattactgggttaccacgtctatctaatctactgcggcaccacaacaaacgagagcatgaaatggcaagactggcaagccgagatgtcggacgggtttgcgtttcgtcgccgtctctccctgaatcggactcgtgagacaagtgaatctgcttatacgagatggcctgtagaacctattcaggtccttgtcaggactgaggatggcagtacaccgaatgatgagaggccgcctggtgagggaccctgggaacatgtctgggccttgagagacgtggagaatatatatgatgttgggttttgggataatatgtctgatgtgtttttaccgtaccatttggcgagtaaagcacatgatttggagaaagggaagagagggaagaataaaagtaggaaatctaaggcgcagaaaggtgctaaagtcgttgccgccgccacttag

SEQ ID NO: 36483 - protein, 422 aa, Muscodor strobelii
  misc_feature: SGI Peptide ID NO. 572647
  misc_feature (147)..(211): Pfam Id: PF01529 Pfam Desc: DHHC zinc finger domain
  misc_feature (1)..(393): NCBI GI: 85077904 Blast Desc: NCU04080 [Neurospora crassa OR74A] gi|74628362|sp|Q7RWM9.1|SWF1_NEUCR RecName: Full=Palmitoyltransferase SWF1 gi|28917121|gb|EAA26840.1| crassa
  misc_feature (1)..(404): NCBI GI: 171682568 Blast Desc: protein product [Podospora anserina] gi|170941243|emb|CAP66893.1| protein product [Podospora anserina]
  misc_feature (1)..(384): NCBI GI: 256727707 Blast Desc: NECHADRAFT_103554 [Nectria haematococca mpVI 77-13-4]
  misc_feature (1)..(394): NCBI GI: 39974087 Blast Desc: MGG_00810 [Magnaporthe grisea 70-15] gi|145018254|gb|EDK02533.1| MGG_00810 [Magnaporthe grisea 70-15]
  misc_feature (103)..(395): NCBI GI: 261359637 Blast Desc: palmitoyltransferase SWF1 [Verticillium albo-atrum VaMs.102]
  misc_feature (1)..(384): NCBI GI: 242762899 Blast Desc: DHHC zinc finger membrane protein [Talaromyces stipitatus ATCC 10500] gi|218723667|gb|EED23084.1| DHHC zinc finger membrane protein [Talaromyces stipitatus ATCC 10500]
  misc_feature (1)..(384): NCBI GI: 119468589 Blast Desc: DHHC zinc finger domain protein [Neosartorya fischeri NRRL 181] gi|119406027|gb|EAW15978.1| DHHC zinc finger domain protein [Neosartorya fischeri NRRL 181]
  misc_feature (81)..(385): NCBI GI: 156060323 Blast Desc: SS1G_02300 [Sclerotinia sclerotiorum 1980] gi|154699708|gb|EDN99446.1| SS1G_02300 [Sclerotinia sclerotiorum 1980]
  misc_feature (1)..(384): NCBI GI: 115399002 Blast Desc: conserved [Aspergillus terreus NIH2624] gi|114191973|gb|EAU33673.1| conserved [Aspergillus terreus NIH2624]
  misc_feature (1)..(384): NCBI GI: 255932371 Blast Desc: Pc12g09150 [Penicillium chrysogenum Wisconsin 54-1255] gi|211582361|emb|CAP80542.1| Pc12g09150 [Penicillium chrysogenum Wisconsin 54-1255]
MGLFAKLAIGVLVISFFTFVAFFGRLPALRHTPIAWLHRAIWVSIPNAFLSLDQSLTGGRITANASSFGNSVWYGKHPIVLIFFFLLLSVSEYLYLPEAWPRLSRTHQIFGFIAIILPYIFLYLASFTDPGEINQTTHEKYMSQYPYDFTLFHPGQTCRTCNLLKPPRSKHCVVCKRCVAKMDHHCVFINNCVGYKNQHYFLLLLLTTAILTTYGGILGLGLISETANKHNIFFSLWKHPKLAWRDWFILFSYGIQQDVGIGAVTLLVLMTSPLVWGLLGYHVYLIYCGTTTNESMKWQDWQAEMSDGFAFRRRLSLNRTRETSESAYTRWPVEPIQVLVRTEDGSTPNDERPPGEGPWEHVWALRDVENIYDVGFWDNMSDVFLPYHLASKAHDLEKGKRGKNKSRKSKAQKGAKVVAAAT

SEQ ID NO: 36484 - DNA, 5000 bp, Muscodor strobelii
  misc_feature: SGI EST ID NO. CUFF.87037.0
  misc_feature: Variant of the nucleotide sequence at SEQ ID NO 36482
ctcagctccatgcctcattctccagagcgtgtcacttccacaccctgactccaaagaagcctcaacttggctaaatggggctcttcgcaaaattggccattggcgttctcgtcatctctttcttcacattcgtagcctttttcggtcggctgcctgcgctaagacatacacccatcgcgtggcttcaccgagcaatatgggtatccataccaaacgccttcctctcacttgaccaatctctaacaggcggtcgaatcaccgccaacgccagctcattcggcaactcagtatggtacggcaagcatcccatcgtgctcatattcttcttcctcctactctctgtatcagaatacctctacctaccagaagcatggccgcgtctcagccgtactcaccaaatcttcggcttcatcgccatcatcctgccttacatattcctctacctggcctccttcacggacccaggtgaaatcaaccaaaccacgcatgagaaatacatgtcccaatacccctacgacttcacgttattccacccaggtcaaacatgtcgaacctgcaatctgctcaaaccccctcgctcaaaacactgcgtagtgtgtaagcgatgcgtcgcaaaaatggaccatcactgcgtcttcataaacaattgcgtcggctacaaaaaccagcactacttcctcctactcctcctcacgaccgccatcctaacgacctacggcggaatcctcggtctaggccttatctccgaaacagctaataaacacaatatcttcttctccctatggaaacatcccaagcttgcctggcgagactggttcatactcttctcatacggcatccagcaagacgtcggtatcggcgccgtaaccctcctcgtcctcatgacttccccgctagtctggggattactgggttaccacgtctatctaatctactgcggcaccacaacaaacgagagcatgaaatggcaagactggcaagccgagatgtcggacgggtttgcgtttcgtcgccgtctctccctgaatcggactcgtgagacaagtgaatctgcttatacgagatggcctgtagaacctattcaggtccttgtcaggactgaggatggcagtacaccgaatgatgagaggccgcctggtgagggaccctgggaacatgtctgggccttgagagacgtggagaatatatatgatgttgggttttgggataatatgtctgatgtgtttttaccgtaccatttggcgagtaaagcacatgatttggagaaagggaagagagggaagaataaaagtaggaaatctaaggcgcagaaaggtgctaaagtcgttgccgccgccacttagtagatgtttagataccaaaaataggttgacattattatgttgattagaggactaagaaagcattgtaaagacgcatggcgcaatgcgcttggactgttagggtattggattacgagtatatagcccagtggtggctgcatttatacaataatctacaaaaacctctaattatataatacaacgacaagagatgtcatcccctccaaaacgccggtatatgcagatatgctatgaatatacgccacctcctcgtgatgctaaatgttcaatcaccgtcctcatcctctttgacatccatttgcatcttcctcctcaaatcgaacatctcatcctcggaccacctctccttcgccaccctctcagacgacgcggccatctcagacgacttcctaaccgcgacgtcctccaagtatctcttcctcgccgactcatgtcgtcttaaattccttctcgacatttctttcaccgtgctctgtaacccggcctcatacctattccccagcatctgcctctccatgtcgtcctcttctactacattgtacctcttaagtctctcatggtacctatcaactccctcttccgcccccgctgtactttgaggctccacctgggccttccacttatccccaggcacctccttctccacctcaccatcctcttcttccggctccgtaatctcactgacccttggatcgaaataagcaaacccccttctctccacctcgctcctcgtgatctccttgtacgctttatgtctcatagccctcgtttctttccactttgtgctacgttcatgcgtacttatgcgatgggccctgaccttcaatatcctggcctccctaccggggaacctcttcgcattatactccatgcggcgttcccgcgcgcgggtgataggtttaacgtccgatgggccacgcgcagcccgtttttcgaacaagcgccggaggtcgtcgcggggcgtgtcggtagttagtgtagcacagaagttatcgagtaacacgcttagttcttcgcttgaaaatggtggcggtggtctcagtttctgcgtgggagtgctgttcttgggatgattgtggtaagcgcggcttcgcggccgggtgaaagtactgaaatttcgtcgacctagagaaggacgtttcgctccacgggcaggctgagtgttttcgggtaagacgtcaaaggcggggcttggaggcaaagcatgaacgctcgacatgtttttcaacgcgctttgctgtttggcggcgccctcgagttgtgcgaatgtagcatcgaaaggggtcgacaagagcgctgtgccttccggagtcccttgctgacgacttcgcttccgttctttcaatgctttgaatgctttcaatttgttacgttgattcttgcctttacgctttttctcaggaggtcctacgtttggaaaggcaaggtcgaacggtgatggagtggccgaaggttctggaggtactccgggcaacgaaggagtcttaaataccggtttggattgcgtggatcgggtcggctggcttagcttgagcagctttttacgttcttttgcgctggtcggaggttctacatgcgcaaaagcgaggtcaaattccgacatagctcctgacgctatcgaggggactccgggcaacgacgtagttgtcgatactggtctagattctaccggctggggtagctttgccaactgtttccgttctttggccgtctgtggtggttccacgtgcgagaaagccagatcaaatgccgataacgactctgatggttccaaggggactccgggcagcgaggcagatcgcgatacggggtggggttgcgccgagtgacttcgcttagccacatgtttccgtccgtcccgtctcgtatgtcgatccgctgatcgccgcgttttgattatctgagattctacttgtgcacaagcgcgacccaatcctgaaggaacccctgatgggactggagcgggagtaaaatgcacctgcgtcggctttgctcgtgacagagccttgcgtcctggaggaggtgcaccaggcgatcgtttcttagcttgtcgtctctttcgtcccgttggaggttcattgagttcaaaaatgccatcagtcaagaaatcgagcttcgaactgttaagggtgctcatgtcctcacgtggggcggcctgagtctgcggtttcttctgtggctgcgtcatggatcccaacttcttcagccatctcaggggatcgacctttggcagaggaacaatcttggagaggggaaccatctcggatagcagatcagcctctcggggtctatttagattcgtagtttgctcggtcgcctttgctgcatccacggcaggtttagtagcttccattgtcttcgtagctagctcaggcacttcggctgtctgtacagttggttgagggacttcgactgccgccgtagcttgctcgccagcttcagtgggagcccattgtagatcgtcaaaagaaaccatcttgccggtccatctctgatctctcgcaactttcgggcgattatctcgaatcaaaccggccagctgggccaccgcaagtctagccgtggtcgccgtcgactttctcacgatggcgtctttggcgcctgaagcagtgacaaagatgtccttctcccatgtccagttgccctctttgattttctgctctacgttatgtagagcgtcccacactttcttgcacgtatcttgcaggcctttgaggccacccttgactttatcggccttggtcaggatgatggcagtcttgagctggtactggctcagaagctcgagggcgtccagatcaccctgtttgggcccaacttcagcatcgatgagcaagacggcacccttgagcgcatctctcttgcctaggtagagggagatgtgcttgccccagtccttcatggagcggtggccgtaaccgggcaggtcgacgagctggaaggcgtgggaggggatgtcctccttgcccttgtactcggcagcctggccggccagctccttgagggtcggggcggggccgaagccgtacatgttgatggacttggtcttgccggccttggagctcaccttggccagggcgttctgggcgcggtcggcgacggcgttgacgagggaggacttgccgacgttggagcggccgaggatgcagacctcgggcatgcgcgtgttcctccgcagcttgtagaagtcggactgggcgtaggagaaggaggcagggttcgtggtgaacagcgtgcgcagaccatcctcgacaggcgtgtcgggcgccgagaggagcgagaaggacttgaacaggtcgtcgggggcgacctctctgatggacgaggttcggaactcggggatctggagggcggcggcaagggcgaggtgggctttggcggcggcatggctgagcgacgtcgagaatggtcgccggttcgtgtatggatgtaggaaagagtggtgtgtcgcggcggcggctcccagcaatacggggcgtcgtcgcagtgtcgcaggtatcgctgagagcgccttgagctggagggaagtcggaggcagcatcgacggtgggcgtctcagtcacatttcgcccgccgcttaagccatctgtcccgccggcaacgacagagtatgatggggttatattggattgtttcaaccttcagttggaacttcac

SEQ ID NO: 36485 - DNA, 2766 bp, Muscodor strobelii
  misc_feature: SGI cDNA ID NO. 572648
  misc_feature: Reduced expression when VOC is produced
  misc_feature: Encodes the peptide sequence at SEQ ID NO 36486
atgtacggcttcggccccgccccgaccctcaaggagctggccggccaggctgccgagtacaagggcaaggaggacatcccctcccacgccttccagctcgtcgacctgcccggttacggccaccgctccatgaaggactggggcaagcacatctccctctacctaggcaagagagatgcgctcaagggtgccgtcttgctcatcgatgctgaagttgggcccaaacagggtgatctggacgccctcgagcttctgagccagtaccagctcaagactgccatcatcctgaccaaggccgataaagtcaagggtggcctcaaaggcctgcaagatacgtgcaagaaagtgtgggacgctctacataacgtagagcagaaaatcaaagagggcaactggacatgggagaaggacatctttgtcactgcttcaggcgccaaagacgccatcgtgagaaagtcgacggcgaccacggctagacttgcggtggcccagctggccggtttgattcgagataatcgcccgaaagttgcgagagatcagagatggaccggcaagatggtttcttttgacgatctacaatgggctcccactgaagctggcgagcaagctacggcggcagtcgaagtccctcaaccaactgtacagacagccgaagtgcctgagctagctacgaagacaatggaagctactaaacctgccgtggatgcagcaaaggcgaccgagcaaactacgaatctaaatagaccccgagaggctgatctgctatccgagatggttcccctctccaagattgttcctctgccaaaggtcgatcccctgagatggctgaagaagttgggatccatgacgcagccacagaagaaaccgcagactcaggccgccccacgtgaggacatgagcacccttaacagttcgaagctcgatttcttgactgatggcatttttgaactcaatgaacctccaacgggacgaaagagacgacaagctaagaaacgatcgcctggtgcacctcctccaggacgcaaggctctgtcacgagcaaagccgacgcaggtgcattttactcccgctccagtcccatcaggggttccttcaggattgggtcgcgcttgtgcacaagtagaatctcagataatcaaaacgcggcgatcagcggatcgacatacgagacgggacggacggaaacatgtggctaagcgaagtcactcggcgcaaccccaccccgtatcgcgatctgcctcgctgcccggagtccccttggaaccatcagagtcgttatcggcatttgatctggctttctcgcacgtggaaccaccacagacggccaaagaacggaaacagttggcaaagctaccccagccggtagaatctagaccagtatcgacaactacgtcgttgcccggagtcccctcgatagcgtcaggagctatgtcggaatttgacctcgcttttgcgcatgtagaacctccgaccagcgcaaaagaacgtaaaaagctgctcaagctaagccagccgacccgatccacgcaatccaaaccggtatttaagactccttcgttgcccggagtacctccagaaccttcggccactccatcaccgttcgaccttgcctttccaaacgtaggacctcctgagaaaaagcgtaaaggcaagaatcaacgtaacaaattgaaagcattcaaagcattgaaagaacggaagcgaagtcgtcagcaagggactccggaaggcacagcgctcttgtcgacccctttcgatgctacattcgcacaactcgagggcgccgccaaacagcaaagcgcgttgaaaaacatgtcgagcgttcatgctttgcctccaagccccgcctttgacgtcttacccgaaaacactcagcctgcccgtggagcgaaacgtccttctctaggtcgacgaaatttcagtactttcacccggccgcgaagccgcgcttaccacaatcatcccaagaacagcactcccacgcagaaactgagaccaccgccaccattttcaagcgaagaactaagcgtgttactcgataacttctgtgctacactaactaccgacacgccccgcgacgacctccggcgcttgttcgaaaaacgggctgcgcgtggcccatcggacgttaaacctatcacccgcgcgcgggaacgccgcatggagtataatgcgaagaggttccccggtagggaggccaggatattgaaggtcagggcccatcgcataagtacgcatgaacgtagcacaaagtggaaagaaacgagggctatgagacataaagcgtacaaggagatcacgaggagcgaggtggagagaagggggtttgcttatttcgatccaagggtcagtgagattacggagccggaagaagaggatggtgaggtggagaaggaggtgcctggggataagtggaaggcccaggtggagcctcaaagtacagcgggggcggaagagggagttgataggtaccatgagagacttaagaggtacaatgtagtagaagaggacgacatggagaggcagatgctggggaataggtatgaggccgggttacagagcacggtgaaagaaatgtcgagaaggaatttaagacgacatgagtcggcgaggaagagatacttggaggacgtcgcggttaggaagtcgtctgagatggccgcgtcgtctgagagggtggcgaaggagaggtggtccgaggatgagatgttcgatttgaggaggaagatgcaaatggatgtcaaagaggatgaggacggtgattga

SEQ ID NO: 36486 - protein, 921 aa, Muscodor strobelii
  misc_feature: SGI Peptide ID NO. 572648
  misc_feature (1)..(218): NCBI GI: 39974085 Blast Desc: MGG_00811 [Magnaporthe grisea 70-15] gi|145018253|gb|EDK02532.1| MGG_00811 [Magnaporthe grisea 70-15]
  misc_feature (23)..(200): NCBI GI: 85077909 Blast Desc: NCU04081 [Neurospora crassa OR74A] gi|28917122|gb|EAA26841.1| [Neurospora crassa OR74A]
  misc_feature (2)..(147): NCBI GI: 116202801 Blast Desc: CHGG_09285 [Chaetomium globosum CBS 148.51] gi|88177803|gb|EAQ85271.1| CHGG_09285 [Chaetomium globosum CBS 148.51]
  misc_feature (2)..(194): NCBI GI: 256727763 Blast Desc: NECHADRAFT_76919 [Nectria haematococca mpVI 77-13-4]
  misc_feature (31)..(176): NCBI GI: 50729618 Blast Desc: [Gallus gallus]
  misc_feature (31)..(119): NCBI GI: 50549471 Blast Desc: YALI0C24013p [Yarrowia lipolytica] gi|49648073|emb|CAG82528.1| YALI0C24013p [Yarrowia lipolytica]
  misc_feature (31)..(176): NCBI GI: 224044065 Blast Desc: : similar to GTP-binding protein 8 [Taeniopygia guttata]
  misc_feature (30)..(102): NCBI GI: 47219183 Blast Desc: protein product [Tetraodon nigroviridis]
  misc_feature (30)..(111): NCBI GI: 226530446 Blast Desc: GTP-binding protein [Zea mays] gi|194700920|gb|ACF84544.1| [Zea mays] gi|195649961|gb|ACG44448.1| GTP-binding protein [Zea mays]
  misc_feature (28)..(111): NCBI GI: 242036437 Blast Desc: SORBIDRAFT_01g042170 [Sorghum bicolor] gi|241919467|gb|EER92611.1| SORBIDRAFT_01g042170 [Sorghum bicolor]
  misc_feature: Useful for introducing or modulating the production of volatile compounds
MYGFGPAPTLKELAGQAAEYKGKEDIPSHAFQLVDLPGYGHRSMKDWGKHISLYLGKRDALKGAVLLIDAEVGPKQGDLDALELLSQYQLKTAIILTKADKVKGGLKGLQDTCKKVWDALHNVEQKIKEGNWTWEKDIFVTASGAKDAIVRKSTATTARLAVAQLAGLIRDNRPKVARDQRWTGKMVSFDDLQWAPTEAGEQATAAVEVPQPTVQTAEVPELATKTMEATKPAVDAAKATEQTTNLNRPREADLLSEMVPLSKIVPLPKVDPLRWLKKLGSMTQPQKKPQTQAAPREDMSTLNSSKLDFLTDGIFELNEPPTGRKRRQAKKRSPGAPPPGRKALSRAKPTQVHFTPAPVPSGVPSGLGRACAQVESQIIKTRRSADRHTRRDGRKHVAKRSHSAQPHPVSRSASLPGVPLEPSESLSAFDLAFSHVEPPQTAKERKQLAKLPQPVESRPVSTTTSLPGVPSIASGAMSEFDLAFAHVEPPTSAKERKKLLKLSQPTRSTQSKPVFKTPSLPGVPPEPSATPSPFDLAFPNVGPPEKKRKGKNQRNKLKAFKALKERKRSRQQGTPEGTALLSTPFDATFAQLEGAAKQQSALKNMSSVHALPPSPAFDVLPENTQPARGAKRPSLGRRNFSTFTRPRSRAYHNHPKNSTPTQKLRPPPPFSSEELSVLLDNFCATLTTDTPRDDLRRLFEKRAARGPSDVKPITRARERRMEYNAKRFPGREARILKVRAHRISTHERSTKWKETRAMRHKAYKEITRSEVERRGFAYFDPRVSEITEPEEEDGEVEKEVPGDKWKAQVEPQSTAGAEEGVDRYHERLKRYNVVEEDDMERQMLGNRYEAGLQSTVKEMSRRNLRRHESARKRYLEDVAVRKSSEMAASSERVAKERWSEDEMFDLRRKMQMDVKEDEDGD

SEQ ID NO: 36487 - DNA, 3276 bp, Muscodor strobelii
  misc_feature: SGI cDNA ID NO. 572649
  misc_feature: Reduced expression when VOC is produced
  misc_feature: Encodes the peptide sequence at SEQ ID NO 36488
atgctgcctccgacttccctccagctcaaggcgctctcagcgatacctgcgacactgcgacgacgccccgtattgctgggagccgccgccgcgacacaccactctttcctacatccatacacgaaccggcgaccattctcgacgtcgctcagccatgccgccgccaaagcccacctcgcccttgccgccgccctccagatccccgagttccgaacctcgtccatcagagaggtcgcccccgacgacctgttcaagtccttctcgctcctctcggcgcccgacacgcctgtcgaggatggtctgcgcacgctgttcaccacgaaccctgcctccttctcctacgcccagtccgacttctacaagctgcggaggaacacgcgcatgcccgaggtctgcatcctcggccgctccaacgtcggcaagtcctccctcgtcaacgccgtcgccgaccgcgcccagaacgccctggccaaggtgagctccaaggccggcaagaccaagtccatcaacatgtacggcttcggccccgccccgaccctcaaggagctggccggccaggctgccgagtacaagggcaaggaggacatcccctcccacgccttccagctcgtcgacctgcccggttacggccaccgctccatgaaggactggggcaagcacatctccctctacctaggcaagagagatgcgctcaagggtgccgtcttgctcatcgatgctgaagttgggcccaaacagggtgatctggacgccctcgagcttctgagccagtaccagctcaagactgccatcatcctgaccaaggccgataaagtcaagggtggcctcaaaggcctgcaagatacgtgcaagaaagtgtgggacgctctacataacgtagagcagaaaatcaaagagggcaactggacatgggagaaggacatctttgtcactgcttcaggcgccaaagacgccatcgtgagaaagtcgacggcgaccacggctagacttgcggtggcccagctggccggtttgattcgagataatcgcccgaaagttgcgagagatcagagatggaccggcaagatggtttcttttgacgatctacaatgggctcccactgaagctggcgagcaagctacggcggcagtcgaagtccctcaaccaactgtacagacagccgaagtgcctgagctagctacgaagacaatggaagctactaaacctgccgtggatgcagcaaaggcgaccgagcaaactacgaatctaaatagaccccgagaggctgatctgctatccgagatggttcccctctccaagattgttcctctgccaaaggtcgatcccctgagatggctgaagaagttgggatccatgacgcagccacagaagaaaccgcagactcaggccgccccacgtgaggacatgagcacccttaacagttcgaagctcgatttcttgactgatggcatttttgaactcaatgaacctccaacgggacgaaagagacgacaagctaagaaacgatcgcctggtgcacctcctccaggacgcaaggctctgtcacgagcaaagccgacgcaggtgcattttactcccgctccagtcccatcaggggttccttcaggattgggtcgcgcttgtgcacaagtagaatctcagataatcaaaacgcggcgatcagcggatcgacatacgagacgggacggacggaaacatgtggctaagcgaagtcactcggcgcaaccccaccccgtatcgcgatctgcctcgctgcccggagtccccttggaaccatcagagtcgttatcggcatttgatctggctttctcgcacgtggaaccaccacagacggccaaagaacggaaacagttggcaaagctaccccagccggtagaatctagaccagtatcgacaactacgtcgttgcccggagtcccctcgatagcgtcaggagctatgtcggaatttgacctcgcttttgcgcatgtagaacctccgaccagcgcaaaagaacgtaaaaagctgctcaagctaagccagccgacccgatccacgcaatccaaaccggtatttaagactccttcgttgcccggagtacctccagaaccttcggccactccatcaccgttcgaccttgcctttccaaacgtaggacctcctgagaaaaagcgtaaaggcaagaatcaacgtaacaaattgaaagcattcaaagcattgaaagaacggaagcgaagtcgtcagcaagggactccggaaggcacagcgctcttgtcgacccctttcgatgctacattcgcacaactcgagggcgccgccaaacagcaaagcgcgttgaaaaacatgtcgagcgttcatgctttgcctccaagccccgcctttgacgtcttacccgaaaacactcagcctgcccgtggagcgaaacgtccttctctaggtcgacgaaatttcagtactttcacccggccgcgaagccgcgcttaccacaatcatcccaagaacagcactcccacgcagaaactgagaccaccgccaccattttcaagcgaagaactaagcgtgttactcgataacttctgtgctacactaactaccgacacgccccgcgacgacctccggcgcttgttcgaaaaacgggctgcgcgtggcccatcggacgttaaacctatcacccgcgcgcgggaacgccgcatggagtataatgcgaagaggttccccggtagggaggccaggatattgaaggtcagggcccatcgcataagtacgcatgaacgtagcacaaagtggaaagaaacgagggctatgagacataaagcgtacaaggagatcacgaggagcgaggtggagagaagggggtttgcttatttcgatccaagggtcagtgagattacggagccggaagaagaggatggtgaggtggagaaggaggtgcctggggataagtggaaggcccaggtggagcctcaaagtacagcgggggcggaagagggagttgataggtaccatgagagacttaagaggtacaatgtagtagaagaggacgacatggagaggcagatgctggggaataggtatgaggccgggttacagagcacggtgaaagaaatgtcgagaaggaatttaagacgacatgagtcggcgaggaagagatacttggaggacgtcgcggttaggaagtcgtctgagatggccgcgtcgtctgagagggtggcgaaggagaggtggtccgaggatgagatgttcgatttgaggaggaagatgcaaatggatgtcaaagaggatgaggacggtgattga

SEQ ID NO: 36488 - protein, 1091 aa, Muscodor strobelii
  misc_feature: SGI Peptide ID NO. 572649
  misc_feature (129)..(270): Pfam Id: PF01926 Pfam Desc: GTPase of function
  misc_feature (102)..(388): NCBI GI: 39974085 Blast Desc: MGG_00811 [Magnaporthe grisea 70-15] gi|145018253|gb|EDK02532.1| MGG_00811 [Magnaporthe grisea 70-15]
  misc_feature (104)..(370): NCBI GI: 85077909 Blast Desc: NCU04081 [Neurospora crassa OR74A] gi|28917122|gb|EAA26841.1| [Neurospora crassa OR74A]
  misc_feature (108)..(317): NCBI GI: 116202801 Blast Desc: CHGG_09285 [Chaetomium globosum CBS 148.51] gi|88177803|gb|EAQ85271.1| CHGG_09285 [Chaetomium globosum CBS 148.51]
  misc_feature (105)..(364): NCBI GI: 256727763 Blast Desc: NECHADRAFT_76919 [Nectria haematococca mpVI 77-13-4]
  misc_feature (128)..(346): NCBI GI: 50729618 Blast Desc: [Gallus gallus]
  misc_feature (126)..(272): NCBI GI: 226293347 Blast Desc: GTP-binding protein [Paracoccidioides brasiliensis Pb18]
  misc_feature (128)..(346): NCBI GI: 224044065 Blast Desc: : similar to GTP-binding protein 8 [Taeniopygia guttata]
  misc_feature (75)..(272): NCBI GI: 115390012 Blast Desc: conserved [Aspergillus terreus NIH2624] gi|114194907|gb|EAU36607.1| conserved [Aspergillus terreus NIH2624]
  misc_feature (128)..(272): NCBI GI: 169606740 Blast Desc: SNOG_06418 [Phaeosphaeria nodorum SN15] gi|160707069|gb|EAT86249.2| SNOG_06418 [Phaeosphaeria nodorum SN15]
  misc_feature (126)..(272): NCBI GI: 225683955 Blast Desc: conserved [Paracoccidioides brasiliensis Pb03]
  misc_feature: Useful for introducing or modulating the production of volatile compounds
MLPPTSLQLKALSAIPATLRRRPVLLGAAAATHHSFLHPYTNRRPFSTSLSHAAAKAHLALAAALQIPEFRTSSIREVAPDDLFKSFSLLSAPDTPVEDGLRTLFTTNPASFSYAQSDFYKLRRNTRMPEVCILGRSNVGKSSLVNAVADRAQNALAKVSSKAGKTKSINMYGFGPAPTLKELAGQAAEYKGKEDIPSHAFQLVDLPGYGHRSMKDWGKHISLYLGKRDALKGAVLLIDAEVGPKQGDLDALELLSQYQLKTAIILTKADKVKGGLKGLQDTCKKVWDALHNVEQKIKEGNWTWEKDIFVTASGAKDAIVRKSTATTARLAVAQLAGLIRDNRPKVARDQRWTGKMVSFDDLQWAPTEAGEQATAAVEVPQPTVQTAEVPELATKTMEATKPAVDAAKATEQTTNLNRPREADLLSEMVPLSKIVPLPKVDPLRWLKKLGSMTQPQKKPQTQAAPREDMSTLNSSKLDFLTDGIFELNEPPTGRKRRQAKKRSPGAPPPGRKALSRAKPTQVHFTPAPVPSGVPSGLGRACAQVESQIIKTRRSADRHTRRDGRKHVAKRSHSAQPHPVSRSASLPGVPLEPSESLSAFDLAFSHVEPPQTAKERKQLAKLPQPVESRPVSTTTSLPGVPSIASGAMSEFDLAFAHVEPPTSAKERKKLLKLSQPTRSTQSKPVFKTPSLPGVPPEPSATPSPFDLAFPNVGPPEKKRKGKNQRNKLKAFKALKERKRSRQQGTPEGTALLSTPFDATFAQLEGAAKQQSALKNMSSVHALPPSPAFDVLPENTQPARGAKRPSLGRRNFSTFTRPRSRAYHNHPKNSTPTQKLRPPPPFSSEELSVLLDNFCATLTTDTPRDDLRRLFEKRAARGPSDVKPITRARERRMEYNAKRFPGREARILKVRAHRISTHERSTKWKETRAMRHKAYKEITRSEVERRGFAYFDPRVSEITEPEEEDGEVEKEVPGDKWKAQVEPQSTAGAEEGVDRYHERLKRYNVVEEDDMERQMLGNRYEAGLQSTVKEMSRRNLRRHESARKRYLEDVAVRKSSEMAASSERVAKERWSEDEMFDLRRKMQMDVKEDEDGD

SEQ ID NO: 36489 - DNA, 303 bp, Muscodor strobelii
  misc_feature: SGI cDNA ID NO. 572650
  misc_feature: Reduced expression when VOC is produced
  misc_feature: Encodes the peptide sequence at SEQ ID NO 36490
atgtcgcaaccagcccagctacgctccgtataccgctctctactgcgggagctaccccctcggccactgaaagccgcccgcacaccactccacatcaaattacgcgagagcttctccaccggtagcgcaaacgaccacgccattgggcaagccgaccaactgctgcaatacgtaaaagcccagcgccaatatgcgacgctcttagaacgatacaaccccggaatgaatatggacgaggaagaaagagtcaggctatctgctaggagaattggcgtcgagctacccaaggaatacgagtcttga

SEQ ID NO: 36490 - protein, 100 aa, Muscodor strobelii
  misc_feature: SGI Peptide ID NO. 572650
  misc_feature (4)..(98): NCBI GI: 154322891 Blast Desc: BC1G_00788 [Botryotinia fuckeliana B05.10] gi|150848122|gb|EDN23315.1| BC1G_00788 [Botryotinia fuckeliana B05.10]
  misc_feature (4)..(98): NCBI GI: 156064675 Blast Desc: SS1G_00345 [Sclerotinia sclerotiorum 1980] gi|154691207|gb|EDN90945.1| SS1G_00345 [Sclerotinia sclerotiorum 1980]
  misc_feature (2)..(99): NCBI GI: 46136035 Blast Desc: FG09533.1 [Gibberella zeae PH-1]
  misc_feature (5)..(98): NCBI GI: 171682572 Blast Desc: protein product [Podospora anserina] gi|170941245|emb|CAP66895.1| protein product [Podospora anserina]
  misc_feature (2)..(98): NCBI GI: 256727130 Blast Desc: NECHADRAFT_76801 [Nectria haematococca mpVI 77-13-4]
  misc_feature (5)..(97): NCBI GI: 116202799 Blast Desc: CHGG_09284 [Chaetomium globosum CBS 148.51] gi|88177802|gb|EAQ85270.1| CHGG_09284 [Chaetomium globosum CBS 148.51]
  misc_feature (4)..(99): NCBI GI: 225563083 Blast Desc: conserved [Ajellomyces capsulatus G186AR]
  misc_feature (4)..(100): NCBI GI: 154281415 Blast Desc: [Ajellomyces capsulatus NAm1] gi|150411699|gb|EDN07087.1| [Ajellomyces capsulatus NAm1]
  misc_feature (6)..(99): NCBI GI: 238839697 Blast Desc: conserved [Microsporum canis CBS 113480]
  misc_feature (1)..(97): NCBI GI: 169771103 Blast Desc: [Aspergillus oryzae RIB40] gi|238486382|ref|XP_002374429.1| conserved [Aspergillus flavus NRRL3357] gi|83767880|dbj|BAE58019.1| protein product oryzae]
  misc_feature: Useful for introducing or modulating the production of volatile compounds
MSQPAQLRSVYRSLLRELPPRPLKAARTPLHIKLRESFSTGSANDHAIGQADQLLQYVKAQRQYATLLERYNPGMNMDEEERVRLSARRIGVELPKEYES

SEQ ID NO: 36491 - DNA, 1654 bp, Muscodor strobelii
  misc_feature: SGI EST ID NO. CUFF.87033.0
  misc_feature: Variant of the nucleotide sequence at SEQ ID NO 36489
gtcgcatgtgcccaaacatccctgtggcttaacgccaacgcgacctgcagcccgctaatcgacatcggcatcggcgtgcatcaggccgtcccaaaggcatccggcactccaccgaaactcccaaggtcaacccgagaatcttcaaactccatcgatcaccaccatcaccgcaattaccatgtcgcaaccagcccagctacgctccgtataccgctctctactgcgggagctaccccctcggccactgaaagccgcccgcacaccactccacatcaaattacgcgagagcttctccaccggtagcgcaaacgaccacgccattgggcaagccgaccaactgctgcaatacgtaaaagcccagcgccaatatgcgacgctcttagaacgatacaaccccggaatgaatatggacgaggaagaaagagtcaggctatctgctaggagaattggcgtcgagctacccaaggaatacgagtcttgaaggtgcctccttttatgcttgaatttcaaaagtcgacgatgcgtctcggaaaaagtgtcgcgcagcattcggtcgtcgcaccaccaacgcatgtttttaagctgcatgcgctcatcgggagcggtccgcgcttttgactacggagatacacgcccaccactatcatttctcgctccaccgcaaacgcccgccgttgcgtcgatggccatcgaacaagcattgttagcatcacgcatgcccgccgaggcgaatgacacatgaagcgagatcgctgaagactgcgaccatgagccctttgtataacaactgtacaagtaccattgtaccatacttgagaaaagaagagatatcctccataaaaatcacgaattggaaaactacgatacgctcatgccaaaatttgtgactctcattgctgctcttccagccgttcaatctagatggttaattcatcgcgatacatgaaaattacctgcctctttcccaaatacctaaacctctcataccctcccctcctgcccttcaaacaaaccaacatacccaacatcttccattttctctaccaagccatcctctacagaccccaaccaacatcaagaaaatcaaaaaaacacaagcaaagcataaactccaaacccaatgacaatctctcttatcaaaaagccacacgtaagtctcgacccatcactcatcttgtcaggatgacggcatctatccgtagcgcctggggccgggaatggatcgataccagcggaacaaattgtgcttgagttagcagatatagttgcgttcgtacgcatgggtgttggcgtgggcgtcgatggcatagaggttgatagcatagaggtcatgttcagtgcaacggacttcaggctcgcagttgaggtgggtgctggaagcgacgatatttggcgagcttgtagggttgagttggtgttggtgttcggcttgcattgcaaatcctcccctactgcgactatgcgtccagctaataggtggttagtcatgggtcgcgtagagaaaaggtgtgaagggaaaggggcatttacaataatgacttccagtccccttgacggtgcagtcatacgcaatctcattcacgttctctacagacgctaccgaacaaccgagatctccaatctggacactggcccacgcgtctctggtttctca

SEQ ID NO: 36492 - DNA, 405 bp, Muscodor strobelii
  misc_feature: SGI cDNA ID NO. 572651
  misc_feature: Encodes the peptide sequence at SEQ ID NO 36493
atgcccacacaagtatccttccctggcagtacatggctacttgctacttgcgataacaagaccgctctgatggatatgcgattctgcgtcgcggagtatcggcaagatgcactagacgcgtgggccagtgtccagattggagatctcggttgttcggtagcgtctgtagagaacgtgaatgagattgcctggacgcatagtcgcagtaggggaggatttgcaatgcaagccgaacaccaacaccaactcaaccctacaagctcgccaaatatcgtcgcttccagcacccacctcaactgcgagcctgaagtccgttgcactgaacatgacctctatgctatcaacctctatgccatcgacgcccacgccaacacccatgcgtacgaacgcaactatatctgctaa

SEQ ID NO: 36493 - protein, 134 aa, Muscodor strobelii
  misc_feature: SGI Peptide ID NO. 572651
MPTQVSFPGSTWLLATCDNKTALMDMRFCVAEYRQDALDAWASVQIGDLGCSVASVENVNEIAWTHSRSRGGFAMQAEHQHQLNPTSSPNIVASSTHLNCEPEVRCTEHDLYAINLYAIDAHANTHAYERNYIC

SEQ ID NO: 36494 - DNA, 822 bp, Muscodor strobelii
  misc_feature: SGI cDNA ID NO. 572652
  misc_feature: Reduced expression when VOC is produced
  misc_feature: Encodes the peptide sequence at SEQ ID NO 36495
atgtctacttccgacgccttacgtcatctcattctctatgccgatcctgagcacacggattattccggctgggaggagcttgaggagtctcccgaacaacttcagacgactgtcgagaaacctaccaatcaacctcagacttatgccgagaacattgactacgtctcggatggtacatatacgtacaccatgtcattctgccgcatcctctttctcaagctcgagggtgcggagcttctagacgctctcgcgagaatcgagcgagagaatttccagctaggctggggcctcgagcacagccgcaagtctgccgcagaatacctgagcaactatgcgccatacaatgctctcttccacgacaccacaaagccggttgcctcctcgactcagtccacctctatcatcaacgaggctcttactgcaacctctcctgctaaggaagctaccactcctgtcactctaaccaaaccggatgcttctatcacccctgagaagattgtcgctcctctcaatctcacccagaagactactcagaccacaccgactaagcgactcaacccggctgcccattctttccggcctaccgctccacctacgccctctcgcacaccctctccccccgtaacaggcctcacatatggcgaggctgaagttatcttgccatctgactccaacaacctgtcagagaaagagagagcagaccaggcggttcagttcttctgtggagagaaacgcaccatcaacttcgacctagtagagttccgtcgcgaggccgcggccaagggactcaagacgcttagagattctatttgggccaactag

SEQ ID NO: 36495 - protein, 273 aa, Muscodor strobelii
  misc_feature: SGI Peptide ID NO. 572652
  misc_feature: Useful for introducing or modulating the production of volatile compounds
MSTSDALRHLILYADPEHTDYSGWEELEESPEQLQTTVEKPTNQPQTYAENIDYVSDGTYTYTMSFCRILFLKLEGAELLDALARIERENFQLGWGLEHSRKSAAEYLSNYAPYNALFHDTTKPVASSTQSTSIINEALTATSPAKEATTPVTLTKPDASITPEKIVAPLNLTQKTTQTTPTKRLNPAAHSFRPTAPPTPSRTPSPPVTGLTYGEAEVILPSDSNNLSEKERADQAVQFFCGEKRTINFDLVEFRREAAAKGLKTLRDSIWAN

SEQ ID NO: 36496 - DNA, 1505 bp, Muscodor strobelii
  misc_feature: SGI EST ID NO. CUFF.87004.0
  misc_feature: Variant of the nucleotide sequence at SEQ ID NO 36494
ccggtttctgccactcctaattgtctatataaagatctattcccacctaccttcatccgaatttactctgcttctcctcacccacttcgaccaacatctcgatttcggatcctacactaccatcctgcctgttacacacagtaaagctcctgtatcctgtaccctgaatcctcaacatcaatctttcactattctctctcttgaccgaaacacaattcatcatgtctacttccgacgccttacgtcatctcattctctatgccgatcctgagcacacggattattccggctgggaggagcttgaggagtctcccgaacaacttcagacgactgtcgagaaacctaccaatcaacctcagacttatgccgagaacattgactacgtctcggatggtacatatacgtacaccatgtcattctgccgcatcctctttctcaagctcgagggtgcggagcttctagacgctctcgcgagaatcgagcgagagaatttccagctaggctggggcctcgagcacagccgcaagtctgccgcagaatacctgagcaactatgcgccatacaatgctctcttccacgacaccacaaagccggttgcctcctcgactcagtccacctctatcatcaacgaggctcttactgcaacctctcctgctaaggaagctaccactcctgtcactctaaccaaaccggatgcttctatcacccctgagaagattgtcgctcctctcaatctcacccagaagactactcagaccacaccgactaagcgactcaacccggctgcccattctttccggcctaccgctccacctacgccctctcgcacaccctctccccccgtaacaggcctcacatatggcgaggctgaagttatcttgccatctgactccaacaacctgtcagagaaagagagagcagaccaggcggttcagttcttctgtggagagaaacgcaccatcaacttcgacctagtagagttccgtcgcgaggccgcggccaagggactcaagacgcttagagattctatttgggccaactaggcgtaccagctgcagggagatactttttgagcgaacgacctcaagacacagcgaatttggaggatacacacaaaccagcatgattctcaccacaaatcaacaaatttggtacagcgagttaggatcgaaactctctagggaaacgatattgccacagcgaaagaatctggtatagcgagacttgggtttgattcacaggagcgcaagggaaattgtcacagcgaaggagacttgataaagggacatttgagatcatgtactgcatctttggcgtttggcgtaaaagggaaggatgataccctatggcgcagaatggataccaacaaatgaaaaagatcttgtcactataataacatttcctaatctctgatttgtatcttctgctattgctgtagtatgttgagatgatcgtctccgcaaagttcagcccgttgatgcactgcacctggactccgaatcaac

SEQ ID NO: 36497 - DNA, 1044 bp, Muscodor strobelii
  misc_feature: SGI cDNA ID NO. 572653
  misc_feature: Encodes the peptide sequence at SEQ ID NO 36498
atggcgaacatgcaggtacctaggattatgagggcctgggttgctactcgtcctggcaagcctcaagatatcctccaactaaagacagaccgaccaacgccgtccccgcctcaagccggagagatactggtaaaagtttcacacgttgctctcaatcccggagacgtgaagctcatggcgatgaacatcccattaaagaaaaattttatcccggtgatggacttcgccgggaaagtcgttcaggtcgggctacccagttcgcctccatcgcccacggaggttggcattggaaatgtagtggccggcactttgcctgcctcgcatatgtggtatggcaccggagcacttgctgaatatgttgtagtgccatcatacatgattgcaatcaagccagatcgtctgccggaatcggttgcagctggactattaggagttgcgggccagacaactgcagcattgttgcgcacggcaaatttgtcacctggagaccgagtctttgtcaacgggggaagtggtggcgtaggctctatcttagtccaggtgctccacggaatgggcgtacacgtcacagcgacctgctcgacgagaaacactgccctggtcagccggcttggtgctgatgatgtcgtggattacactgcgcacgagtctttatataacatcttgtcatcatcgagcacagcaaaaatcccatttgattgtgtttttgactgtgtaggcgatgacgtgttgtattaccgctcacccgagtatttgaaggacgatggacctttcattagcatcgcccggggtccattcggcattttcgcgcagactctgttcaactactggccgctgatcctcggaggaacaccaaggaaatatctcagcatcttcagcagccccagcggctcctctgcccagcaggttgtcgaatggtttgagaaagggtggattcgcgaagtccctgttgactcgacattcgagatgactgatgcgctaaaagtaagtccaatttgcttgacgttctggttcccgctcatcactctcttaggcattcgataa

SEQ ID NO: 36498 - protein, 347 aa, Muscodor strobelii
  misc_feature: SGI Peptide ID NO. 572653
  misc_feature (39)..(130): Pfam Id: PF08240 Pfam Desc: Alcohol dehydrogenase GroES-like domain
  misc_feature (161)..(309): Pfam Id: PF00107 Pfam Desc: Zinc-binding dehydrogenase
  misc_feature (161)..(213): Pfam Id: PF00107 Pfam Desc: Zinc-binding dehydrogenase
  misc_feature (1)..(340): NCBI GI: 256724289 Blast Desc: NECHADRAFT_87425 [Nectria haematococca mpVI 77-13-4]
  misc_feature (10)..(327): NCBI GI: 255936761 Blast Desc: Pc13g09840 [Penicillium chrysogenum Wisconsin 54-1255] gi|211584027|emb|CAP92053.1| Pc13g09840 [Penicillium chrysogenum Wisconsin 54-1255]
  misc_feature (10)..(328): NCBI GI: 85077988 Blast Desc: NCU08768 [Neurospora crassa OR74A] gi|28881216|emb|CAD70455.1| conserved [Neurospora crassa] gi|28917135|gb|EAA26853.1| [Neurospora crassa OR74A]
  misc_feature (1)..(328): NCBI GI: 255932089 Blast Desc: Pc12g07660 [Penicillium chrysogenum Wisconsin 54-1255] gi|211582220|emb|CAP80393.1| Pc12g07660 [Penicillium chrysogenum Wisconsin 54-1255]
  misc_feature (6)..(328): NCBI GI: 239611343 Blast Desc: zinc alcohol dehydrogenase [Ajellomyces dermatitidis ER-3]
  misc_feature (4)..(328): NCBI GI: 70991999 Blast Desc: zinc alcohol dehydrogenase [Aspergillus fumigatus Af293] gi|66848481|gb|EAL88810.1| zinc alcohol dehydrogenase, [Aspergillus fumigatus Af293]
  misc_feature (6)..(328): NCBI GI: 261205412 Blast Desc: zinc alcohol dehydrogenase [Ajellomyces dermatitidis SLH14081] gi|239592502|gb|EEQ75083.1| zinc alcohol dehydrogenase [Ajellomyces dermatitidis SLH14081]
  misc_feature (4)..(328): NCBI GI: 159124416 Blast Desc: zinc alcohol dehydrogenase, [Aspergillus fumigatus A1163]
  misc_feature (6)..(328): NCBI GI: 240278019 Blast Desc: alcohol dehydrogenase [Ajellomyces capsulatus H143]
  misc_feature (6)..(328): NCBI GI: 154274670 Blast Desc: [Ajellomyces capsulatus NAm1] gi|150414626|gb|EDN09988.1| [Ajellomyces capsulatus NAm1]
MANMQVPRIMRAWVATRPGKPQDILQLKTDRPTPSPPQAGEILVKVSHVALNPGDVKLMAMNIPLKKNFIPVMDFAGKVVQVGLPSSPPSPTEVGIGNVVAGTLPASHMWYGTGALAEYVVVPSYMIAIKPDRLPESVAAGLLGVAGQTTAALLRTANLSPGDRVFVNGGSGGVGSILVQVLHGMGVHVTATCSTRNTALVSRLGADDVVDYTAHESLYNILSSSSTAKIPFDCVFDCVGDDVLYYRSPEYLKDDGPFISIARGPFGIFAQTLFNYWPLILGGTPRKYLSIFSSPSGSSAQQVVEWFEKGWIREVPVDSTFEMTDALKVSPICLTFWFPLITLLGIR

SEQ ID NO: 36499 - DNA, 1494 bp, Muscodor strobelii
  misc_feature: SGI EST ID NO. CUFF.86995.0
  misc_feature: Variant of the nucleotide sequence at SEQ ID NO 36497
aaaagtttcacacgttgctctcaatcccggagacgtgaagctcatggcgatgaacatcccattaaagaaaaattttatcccggtgatggacttcgccgggaaagtcgttcaggtcgggctacccagttcgcctccatcgcccacggaggttggcattggaaatgtagtggccggcactttgcctgcctcgcatatgtggtatggcaccggagcacttgctgaatatgttgtagtgccatcatacatgattgcaatcaagccagatcgtctgccggaatcggttgcagctggactattaggagttgcgggccagacaactgcagcattgttgcgcacggcaaatttgtcacctggagaccgagtctttgtcaacgggggaagtggtggcgtaggctctatcttagtccaggtgctccacggaatgggcgtacacgtcacagcgacctgctcgacgagaaacactgccctggtcagccggcttggtgctgatgatgtcgtggattacactgcgcacgagtctttatataacatcttgtcatcatcgagcacagcaaaaatcccatttgattgtgtttttgactgtgtaggcgatgacgtgttgtattaccgctcacccgagtatttgaaggacgatggacctttcattagcatcgcccggggtccattcggcattttcgcgcagactctgttcaactactggccgctgatcctcggaggaacaccaaggaaatatctcagcatcttcagcagccccagcggctcctctgcccagcaggttgtcgaatggtttgagaaagggtggattcgcgaagtccctgttgactcgacattcgagatgactgatgcgctaaaagtaagtccaatttgcttgacgttctggttcccgctcatcactctcttaggcattcgataagttggcaacaggaagagcagctgggaagatttttatcaagttagattgagcgagttaccttcaagaatcggtgttgcaggaagctgaccacgactggcaactgagctttgagtttgcgccttgcggtcagccctcggtctgaagtggactgttcgtcgagagtttatcggcaagacgtggctggtgcagcagaccaaaacaacttgtagcctgtgatccataaccgatattgaatctcatgattattcgtgatcgcactgctattgtcctgttgcttgtcaattgacctcgatgcgcattcattcgtgctgtgtgtcaacaacagtttatctgccatttgcgatccaagaacaggccatcccaagacgattcgtgacgcgtttcaagcagccaggcatatcgccctacgtgtaaagggtccaatagatagacagcttgtcaaatgcacattccacagtgtaacacatcttctctcgaacgcgaatgatgcgactgttgatgagtactttaggtatctacagcgcatgtgatatgtcaaacgcgggactgagaatttgaactcttttgagcgacttgcccaa

SEQ ID NO: 36500 - DNA, 921 bp, Muscodor strobelii
  misc_feature: SGI cDNA ID NO. 572654
  misc_feature: Encodes the peptide sequence at SEQ ID NO 36501
atgtcgcccaccatctttgttattggaggaactggcgctctcggaaaggcagctgctctcgagctacttaagaacaactggaaggtcaagacgacaactagaaaccccgagtcgccggcatcgaaggagcttacgacggccggagccgaagtcatcaaaggtgactgggatgatgaggatgtgctatccgctgcactgaaaggttgctcaggcatgttcatgaatctgtcgccgagctttgaggatttctccgccgatgctcgacagggcaaggctattgttgccctagcgaaagccgcgggcattaagcatgttatccactccagtgttatcggtgcggacaagcctgagcgcttcgcggatttcgaccccaacactattttggcgttcatgttcaaaaacaagaagattgtcgaggacgcaactcgagacgccgggttcgagcactacactatcattcgacccggaagcttcatgtccaactggctttctcccaagtcagccatgtggggagactttccccagacaggtgtcttcacgacggcattccgcgagggagatttcatcgcacatattgacgagcatgatgtcggtgcttttgtcgtcgaggctttcaagaacccaactaagttcaatagagtcgagctcgagcttgcttccgaattgctgacaattgaaaagacacttgagattgtgtctaaggccgctggtcgatccattacgcctcgatatatgcctgacgaagaggtcgaagcagagagaaagcagaatcctttcattgatgggcaagtcgcgtctcgatcggtcagcagcgcagtcgacatggataagattaagtcttttggcatcccgctgaacacttttgaagcttatctagagagggagaagaaggccgttgcggagacttatggatctaagtag

SEQ ID NO: 36501 - protein, 306 aa, Muscodor strobelii
  misc_feature: SGI Peptide ID NO. 572654
  misc_feature (5)..(246): Pfam Id: PF05368 Pfam Desc: NmrA-like family
  misc_feature (5)..(250): Pfam Id: PF05368 Pfam Desc: NmrA-like family
  misc_feature (5)..(303): NCBI GI: 256733617 Blast Desc: NECHADRAFT_35638 [Nectria haematococca mpVI 77-13-4]
  misc_feature (4)..(303): NCBI GI: 238841491 Blast Desc: NmrA family protein [Microsporum canis CBS 113480]
  misc_feature (4)..(303): NCBI GI: 145242084 Blast Desc: An09g03720 [Aspergillus niger] gi|134078233|emb|CAK96814.1| protein product [Aspergillus niger]
  misc_feature (2)..(303): NCBI GI: 67522725 Blast Desc: AN1819.2 [Aspergillus nidulans FGSC A4] gi|40745828|gb|EAA64984.1| AN1819.2 [Aspergillus nidulans FGSC A4] gi|259487166|tpe|CBF85622.1| TPA: conserved [Aspergillus FGSC
  misc_feature (2)..(303): NCBI GI: 46128321 Blast Desc: FG08538.1 [Gibberella zeae PH-1]
  misc_feature (4)..(303): NCBI GI: 39970787 Blast Desc: MGG_02860 [Magnaporthe grisea 70-15] gi|149210281|ref|XP_001522515.1| MGCH7_ch7g618 [Magnaporthe grisea 70-15] gi|86196573|gb|EAQ71211.1| MGCH7_ch7g618 grisea
  misc_feature (9)..(303): NCBI GI: 46115758 Blast Desc: FG03721.1 [Gibberella zeae PH-1]
  misc_feature (2)..(305): NCBI GI: 116206022 Blast Desc: CHGG_02304 [Chaetomium globosum CBS 148.51] gi|88182901|gb|EAQ90369.1| CHGG_02304 [Chaetomium globosum CBS 148.51]
  misc_feature (4)..(303): NCBI GI: 212536967 Blast Desc: conserved [Penicillium marneffei ATCC 18224] gi|210068381|gb|EEA22472.1| conserved [Penicillium marneffei ATCC 18224]
  misc_feature (2)..(303): NCBI GI: 171691080 Blast Desc: protein product [Podospora anserina] gi|170945488|emb|CAP71600.1| protein product [Podospora anserina]
MSPTIFVIGGTGALGKAAALELLKNNWKVKTTTRNPESPASKELTTAGAEVIKGDWDDEDVLSAALKGCSGMFMNLSPSFEDFSADARQGKAIVALAKAAGIKHVIHSSVIGADKPERFADFDPNTILAFMFKNKKIVEDATRDAGFEHYTIIRPGSFMSNWLSPKSAMWGDFPQTGVFTTAFREGDFIAHIDEHDVGAFVVEAFKNPTKFNRVELELASELLTIEKTLEIVSKAAGRSITPRYMPDEEVEAERKQNPFIDGQVASRSVSSAVDMDKIKSFGIPLNTFEAYLEREKKAVAETYGSK

SEQ ID NO: 36502 - DNA, 1491 bp, Muscodor strobelii
  misc_feature: SGI cDNA ID NO. 572655
  misc_feature: Reduced expression when VOC is produced
  misc_feature: Encodes the peptide sequence at SEQ ID NO 36503
atgccgccgtctctatcccaaacagagcggagcaatccgccgccacgtcggaaatcctgtgctgcttgtatcaaagctaagcgtcgctgtgatctgggtcagccatcatgctctcgctgttcgcaaagaatgcttgaatgcacatatccttcacacatcgaagcttcagatcgaaaagaatgcagttcaacaccaagtttcggaaacgtatcatcacatatttctccacaagtgctgacttcagcaccgatcgttgaggtacacccttgggatgatggctttgactttaataatatcatattgagtccatcgcatcagactcattgttccttgggcccgaatcggcttttcagcgaaccgattgctgaaccaattgccgaaggatttggacctccaagtgaggatttcaatttcaatgttcctacaccaaaaacgacaatagcagattctccgatgccgatgatcttgcgcggacgcggacctgcaatggccagcgtcacgaggatacagttgctccgcgcctcagcagagcttgtggagaaacgcttccgatatactattgatgcgctcaaactcatacctggaaaggtagtatgtgaaggcgggacaccatggactcactcaagggtctttcagaattccatgcctacttttctagaagatgcaattgcagcatgtagtatgtacgaccacttagggtctctgaacgaaatgatggtccaacgactcatagaaacacgatatgaccgtcttctttctgctcctacgcctacttcgggacgggaactactagctcggacccacgcactacttttatatcaaataatgctcttcttcagtccgttgcatggagcacgggtcttagctcatgagacactacccgctctcgaagatgctgccatgttacttgcagagtacatacaagacgacagcgacgagcacgaggacgcaatgcagccccagaactcccggactcttcctctctatccattaactcaagcgcaagccttttttgaggattgggtactccaggaatccataaggcggaccatgctgctggccttattctttgcacaaatgcagcggtttatgtgtgccgatatgacagccgaggccctttttgaacctaccacggaatcgcctggcaatgagggggatcctgatgggcggaatctcgagacaataaaccgtgtccttagcgagacggggtcggcgaaaacaaccgcatgcgataatcgaatgatgctttgcaaaggtgtgacactatcggcacacctttggaacgcacgggaccccgtcacattcgccttagcatggaatgacagaaaccatctctactccaagccatggaatatatggcagaagtttcttatcgcgaaagcagatgatgtcgatactcttggtaaaatactgatgagcgccggcatgggcatggatgaagcgaaaggatggttcgctgcgaaaggtaatccacgaggtctagaggtataa

SEQ ID NO: 36503 - protein, 496 aa, Muscodor strobelii
  misc_feature: SGI Peptide ID NO. 572655
  misc_feature (18)..(56): Pfam Id: PF00172 Pfam Desc: Fungal Zn(2)-Cys(6) binuclear cluster domain
  misc_feature (18)..(50): Pfam Id: PF00172 Pfam Desc: Fungal Zn(2)-Cys(6) binuclear cluster domain
  misc_feature (4)..(489): NCBI GI: 171691082 Blast Desc: protein product [Podospora anserina] gi|170945489|emb|CAP71601.1| protein product [Podospora anserina]
  misc_feature (9)..(489): NCBI GI: 169763852 Blast Desc: [Aspergillus oryzae RIB40] gi|238489827|ref|XP_002376151.1| conserved [Aspergillus flavus NRRL3357] gi|83770854|dbj|BAE60987.1| protein product oryzae]
  misc_feature (18)..(490): NCBI GI: 256734117 Blast Desc: NECHADRAFT_92012 [Nectria haematococca mpVI 77-13-4]
  misc_feature (1)..(489): NCBI GI: 169609855 Blast Desc: SNOG_08019 [Phaeosphaeria nodorum SN15] gi|111063175|gb|EAT84295.1| SNOG_08019 [Phaeosphaeria nodorum SN15]
  misc_feature (138)..(489): NCBI GI: 145242082 Blast Desc: An09g03710 [Aspergillus niger] gi|134078232|emb|CAK96813.1| protein product [Aspergillus niger]
  misc_feature (176)..(489): NCBI GI: 189205228 Blast Desc: conserved [Pyrenophora tritici-repentis Pt-1C-BFP] gi|187986048|gb|EDU51536.1| conserved [Pyrenophora tritici-repentis Pt-1C-BFP]
  misc_feature (161)..(490): NCBI GI: 39940578 Blast Desc: MGG_04951 [Magnaporthe grisea 70-15] gi|145010814|gb|EDJ95470.1| MGG_04951 [Magnaporthe grisea 70-15]
  misc_feature (182)..(489): NCBI GI: 242810539 Blast Desc: conserved [Talaromyces stipitatus ATCC 10500] gi|218716226|gb|EED15648.1| conserved [Talaromyces stipitatus ATCC 10500]
  misc_feature (5)..(489): NCBI GI: 212536969 Blast Desc: C6 finger domain protein, [Penicillium marneffei ATCC 18224] gi|210068382|gb|EEA22473.1| C6 finger domain protein, [Penicillium marneffei ATCC 18224]
  misc_feature (176)..(445): NCBI GI: 67522727 Blast Desc: AN1820.2 [Aspergillus nidulans FGSC A4] gi|40745829|gb|EAA64985.1| AN1820.2 [Aspergillus nidulans FGSC A4] gi|259487167|tpe|CBF85624.1| TPA: Zn(II)2Cys6 transcription
  misc_feature: Useful for introducing or modulating the production of volatile compounds
MPPSLSQTERSNPPPRRKSCAACIKAKRRCDLGQPSCSRCSQRMLECTYPSHIEASDRKECSSTPSFGNVSSHISPQVLTSAPIVEVHPWDDGFDFNNIILSPSHQTHCSLGPNRLFSEPIAEPIAEGFGPPSEDFNFNVPTPKTTIADSPMPMILRGRGPAMASVTRIQLLRASAELVEKRFRYTIDALKLIPGKVVCEGGTPWTHSRVFQNSMPTFLEDAIAACSMYDHLGSLNEMMVQRLIETRYDRLLSAPTPTSGRELLARTHALLLYQIMLFFSPLHGARVLAHETLPALEDAAMLLAEYIQDDSDEHEDAMQPQNSRTLPLYPLTQAQAFFEDWVLQESIRRTMLLALFFAQMQRFMCADMTAEALFEPTTESPGNEGDPDGRNLETINRVLSETGSAKTTACDNRMMLCKGVTLSAHLWNARDPVTFALAWNDRNHLYSKPWNIWQKFLIAKADDVDTLGKILMSAGMGMDEAKGWFAAKGNPRGLEV

SEQ ID NO: 36504 - DNA, 2107 bp, Muscodor strobelii
  misc_feature: SGI EST ID NO. CUFF.87028.0
  misc_feature: Variant of the nucleotide sequence at SEQ ID NO 36502
ttgatactaggagaaaacagttctttaactcctatcgtgaatattgattagctatatatctcgtgcgaccagtatgccgccgtctctatcccaaacagagcggagcaatccgccgccacgtcggaaatcctgtgctgcttgtatcaaagctaagcgtcgctgtgatctgggtcagccatcatgctctcgctgttcgcaaagaatgcttgaatgcacatatccttcacacatcgaagcttcagatcgaaaagaatgcagttcaacaccaagtttcggaaacgtatcatcacatatttctccacaagtgctgacttcagcaccgatcgttgaggtacacccttgggatgatggctttgactttaataatatcatattgagtccatcgcatcagactcattgttccttgggcccgaatcggcttttcagcgaaccgattgctgaaccaattgccgaaggatttggacctccaagtgaggatttcaatttcaatgttcctacaccaaaaacgacaatagcagattctccgatgccgatgatcttgcgcggacgcggacctgcaatggccagcgtcacgaggatacagttgctccgcgcctcagcagagcttgtggagaaacgcttccgatatactattgatgcgctcaaactcatacctggaaaggtagtatgtgaaggcgggacaccatggactcactcaagggtctttcagaattccatgcctacttttctagaagatgcaattgcagcatgtagtatgtacgaccacttagggtctctgaacgaaatgatggtccaacgactcatagaaacacgatatgaccgtcttctttctgctcctacgcctacttcgggacgggaactactagctcggacccacgcactacttttatatcaaataatgctcttcttcagtccgttgcatggagcacgggtcttagctcatgagacactacccgctctcgaagatgctgccatgttacttgcagagtacatacaagacgacagcgacgagcacgaggacgcaatgcagccccagaactcccggactcttcctctctatccattaactcaagcgcaagccttttttgaggattgggtactccaggaatccataaggcggaccatgctgctggccttattctttgcacaaatgcagcggtttatgtgtgccgatatgacagccgaggccctttttgaacctaccacggaatcgcctggcaatgagggggatcctgatgggcggaatctcgagacaataaaccgtgtccttagcgagacggggtcggcgaaaacaaccgcatgcgataatcgaatgatgctttgcaaaggtgtgacactatcggcacacctttggaacgcacgggaccccgtcacattcgccttagcatggaatgacagaaaccatctctactccaagccatggaatatatggcagaagtttcttatcgcgaaagcagatgatgtcgatactcttggtaaaatactgatgagcgccggcatgggcatggatgaagcgaaaggatggttcgctgcgaaaggtaatccacgaggtctagaggtataatctgcccttttagagagatgaagatcacaacccctatcggtcactcgaattcaagtgtagaaatcgcgtctgcagttgtcatacagccggacgcgtctatctcctagaatgagctctttccgcctttgtccagggccgccccggtccttcctcagcactcagcttctgtgcacatatttttgctttcataccaaaactgtagatcaggtaatcattgtatatattatatagagagactatatcagggctttcgttagctagaagccgccttactgcgtgcagcatgaattgcaaaaatgggggccacgagggtgcctcgaacttgctacgcgtcaccgacccaaattcaaaaaaactaaaaaagggtatcgaaaggggaagtagcttgctgtcgctacctgcatacgctcttaccactcggccacagcaacgagggtcatggacacttacaccacaatggaggcccctttcgatgggagctggtaacatatcgtaccttatatactgcaatctcgtgcacatgtggaccccaccagtatttgg

SEQ ID NO: 36505 - DNA, 3564 bp, Muscodor strobelii
  misc_feature: SGI cDNA ID NO. 572656
  misc_feature: Encodes the peptide sequence at SEQ ID NO 36506
atgactagcactcgtgatatatcttcgcgacttcgccagaatctgaaccctatactgacttcgacgccggggtataccaatcagctcaacacgcctcaatctgctgtgtcggcgagttctcatcatacattcggccctgttacgccggccagctcgatacagcgatacaatccgcaagaatggataccctcaccagctgtagagaggacacatcagttccctcctccgcaatccaacttccgtgatgcgccagtcgctggagcagctccgccgcctccatattctccaccacgaagtcaaagaccggccggtatgaactatgagacaccgccagccaacatatctgccgctcgagcaccgccctcaaatatgcataggccgtcaccggaaccagtagctcctcaaaacttccctccgccaccaggttcgaatgatcgaagaacttctcgagagaggcggtttggcctccattcgcttacacggcggcgagaacgcgaacatacggagaatatcagtagcccggatacccgctcaataccatcgattccaaggccacagacgctgatgatttcaatacctcccgctgtggatcccgcggaaaatccaatgccggtcgcgccaccgagtgctcggagagctgcctctgcgagtgctatagagacacccgtgtcggcccgatcgcgggcgacctcacaaactagatgggacccagcgatgccggtaccaccacctccaccaggtccgcctccgtcatcgcagtcccggtcccagagtttaaaccggccaaataatgtgaacccgccgatcctctctcctcccacgcggcggcctccgccggaaggagtgacagctctggggccagtaccacccacaccagcgaactgggcggaagagaacccccaatcgcaagctacagtgtctagtcagcccgaattgagtttgaatacctcgaacttagatagtacgcccgctcaaaacgttccaatctctgccgtagattctagtcccaatagtggcggcttgagcagaacgggtgccgttcgaggcgagaagacgttgcgagaaagacgaaatgagagtcggactagacatgagaggggcgaatcaagtgcaaatgctcagcagctttcagatatcgtagttccggaaggatccaacctctcacgccgattttccgtccgtcgaggcacaccgcgaagcggaggcaagatggtgctcgaaatggctcggacggctgatgaaaatgcagattcaaggaattcgacgccgcgtgcctccgcgggccttccgtcagaaacagcaacgcctcccttttcccctcgcccagggaaaggtgttgctggaacagaaaccgggcacgcaattgctccgaaagctttaccgacacctcccccgcagagtcgatcagcctcaaggtcatcaaacaatcgagccgatattttcggctcactgagcagcgttgcgtcaacaccctatgcctcacagccattgacgaagcaattagtcgtgagccaaaccgcccagcagttctgccaagggactattgagcgtttccaagcatttgctgaaaaggagtcatctgcaaagactgatgctgatcgcgtgaaactatttgctgattttatagtcagtgagtcgaggctgagacgcgaaagatattcgtcggcgattggcgccatgggatcggaaatttttgatctcacaagagaccttttccgtcctatgaaagttcgccgtgactcgagcagttcgcaggccagcgaatggacgcctcaaatgtcggaaacgaggtcaaatcgaaattcgatgggatctgttttccgtgagccgcaacaaactgcatcagcaccaagttcttccaagctgcccatgtctcccagtgggccacctcccatcaatactcacttcaacacaagtggttatatgccatcactgtcgccaattctaagcatgagcgtcaggtcgcgcgacgaggcagattctcgtggacgaccagccagccgatggtgggaaggtgactcggtaggagatggaagcaagatggaacgatcgaagcgagaatcaaaatacatgggtgttccaaaagaagcgagagaagcactgcagtggcaggatgcatcaggcagtccctcggcgccgcctggctctgccgatggctaccttgcggatgaatacccaccagaaaaggtcggctggcacgagccaacaccaacgaaagcgccacaccctttccgacagtcgcttttatccctaccgtcgtcgctaccaaacacaccaagcccgtctcatcttgatgtttcacggctggttactctaccgcctccttatccgcgccatcatcctgctgtgaataacaaccatcccgaactgacttccatccgaacacttgtgcgatctgtaagcgatcttcaagagattgcaacaacaaagtcacaattcttgcaggatagccaaaagattcgcgccgaagccgaagaagctgcggtcgcaagacgacaagcctttcgcgttaatctgcagcaagaagtcagtagcgggaacatgtcttatgccgaggcggcagccatcgaagcggacacgcaggaatctgaaaaagcttggacgaaggatttagagcggaaggaattcgagcgattccagaacgccgtggtcatgcctatcaacgagcttctaactggccgcatcgcccaagctacatcattattcgatgagctagtctcacagttgttcgttgagacacaggccccgaatccgaatacgccgcaggaagaaggtgatgagcagcccgaattactcgaaaagcttactttgctcaagtggattttcgaggctcgtgaagtgctccatcgtgagatatatgatctactcagcgatcgtaatgaccgatatcgtgagatggttttgatgccctatcgtctatctggcaatcaagagaagctccagcacgcagaggctttctttgccgaggacgcaagcaagcggcaagcggcctttgctaccgaagtgctacaacgcactagcgaattccgggccgttgtagaagaaaacgtgacccgcggcgtcgatatgcagctcaatgccttctgggacattgcacctccgttgaagcgtctacttgacaagatcccacaggtcatcgatacacacttccgtacacagatcccaccagccgagtttgaagagaaccccgcctatcaccaacatccgctgcagtatctgtacagcttgttgcttcatgcggagaagagcacctaccagttcatcgagtcgcagacaaaccttctgtgcctgctacatgaagtcaaagaagcagtggtcagtgcgcgggccaaagtcagcgaatcagagggccgcgatgctcgcgttgttgaggaagagcgcaaaggagaacgagaccagttaaccgaggacttgaaggagaaagtacgcgtggtacaggatcagtgggaaggcgcactgggcgagggcatgcggggcgtcaaagagagagtcggcgaatggctgttgtccactggtggctgggacgagagtctagaggacggcggtgttggtggtgttatttga

SEQ ID NO: 36506 - protein, 1187 aa, Muscodor strobelii
  misc_feature: SGI Peptide ID NO. 572656
  misc_feature (1)..(1186): NCBI GI: 164426743 Blast Desc: NCU04088 [Neurospora crassa OR74A] gi|157071458|gb|EAA26848.2| conserved [Neurospora crassa OR74A]
  misc_feature (1)..(1184): NCBI GI: 145610913 Blast Desc: MGG_11489 [Magnaporthe grisea 70-15] gi|145018251|gb|EDK02530.1| MGG_11489 [Magnaporthe grisea 70-15]
  misc_feature (1)..(1186): NCBI GI: 171682574 Blast Desc: protein product [Podospora anserina] gi|170941246|emb|CAP66896.1| protein product [Podospora anserina]
  misc_feature (9)..(1186): NCBI GI: 256727705 Blast Desc: NECHADRAFT_91304 [Nectria haematococca mpVI 77-13-4]
  misc_feature (9)..(1185): NCBI GI: 46136037 Blast Desc: FG09534.1 [Gibberella zeae PH-1]
  misc_feature (1)..(1183): NCBI GI: 261359639 Blast Desc: conserved [Verticillium albo-atrum VaMs.102]
  misc_feature (1)..(1117): NCBI GI: 116202797 Blast Desc: CHGG_09283 [Chaetomium globosum CBS 148.51] gi|88177801|gb|EAQ85269.1| CHGG_09283 [Chaetomium globosum CBS 148.51]
  misc_feature (347)..(1173): NCBI GI: 154322887 Blast Desc: BC1G_00786 [Botryotinia fuckeliana B05.10] gi|150848120|gb|EDN23313.1| BC1G_00786 [Botryotinia fuckeliana B05.10]
  misc_feature (98)..(1173): NCBI GI: 156064677 Blast Desc: SS1G_00346 [Sclerotinia sclerotiorum 1980] gi|154691208|gb|EDN90946.1| SS1G_00346 [Sclerotinia sclerotiorum 1980]
  misc_feature (343)..(1180): NCBI GI: 189190888 Blast Desc: conserved [Pyrenophora tritici-repentis Pt-1C-BFP] gi|187973389|gb|EDU40888.1| conserved [Pyrenophora tritici-repentis Pt-1C-BFP]
MTSTRDISSRLRQNLNPILTSTPGYTNQLNTPQSAVSASSHHTFGPVTPASSIQRYNPQEWIPSPAVERTHQFPPPQSNFRDAPVAGAAPPPPYSPPRSQRPAGMNYETPPANISAARAPPSNMHRPSPEPVAPQNFPPPPGSNDRRTSRERRFGLHSLTRRREREHTENISSPDTRSIPSIPRPQTLMISIPPAVDPAENPMPVAPPSARRAASASAIETPVSARSRATSQTRWDPAMPVPPPPPGPPPSSQSRSQSLNRPNNVNPPILSPPTRRPPPEGVTALGPVPPTPANWAEENPQSQATVSSQPELSLNTSNLDSTPAQNVPISAVDSSPNSGGLSRTGAVRGEKTLRERRNESRTRHERGESSANAQQLSDIVVPEGSNLSRRFSVRRGTPRSGGKMVLEMARTADENADSRNSTPRASAGLPSETATPPFSPRPGKGVAGTETGHAIAPKALPTPPPQSRSASRSSNNRADIFGSLSSVASTPYASQPLTKQLVVSQTAQQFCQGTIERFQAFAEKESSAKTDADRVKLFADFIVSESRLRRERYSSAIGAMGSEIFDLTRDLFRPMKVRRDSSSSQASEWTPQMSETRSNRNSMGSVFREPQQTASAPSSSKLPMSPSGPPPINTHFNTSGYMPSLSPILSMSVRSRDEADSRGRPASRWWEGDSVGDGSKMERSKRESKYMGVPKEAREALQWQDASGSPSAPPGSADGYLADEYPPEKVGWHEPTPTKAPHPFRQSLLSLPSSLPNTPSPSHLDVSRLVTLPPPYPRHHPAVNNNHPELTSIRTLVRSVSDLQEIATTKSQFLQDSQKIRAEAEEAAVARRQAFRVNLQQEVSSGNMSYAEAAAIEADTQESEKAWTKDLERKEFERFQNAVVMPINELLTGRIAQATSLFDELVSQLFVETQAPNPNTPQEEGDEQPELLEKLTLLKWIFEAREVLHREIYDLLSDRNDRYREMVLMPYRLSGNQEKLQHAEAFFAEDASKRQAAFATEVLQRTSEFRAVVEENVTRGVDMQLNAFWDIAPPLKRLLDKIPQVIDTHFRTQIPPAEFEENPAYHQHPLQYLYSLLLHAEKSTYQFIESQTNLLCLLHEVKEAVVSARAKVSESEGRDARVVEEERKGERDQLTEDLKEKVRVVQDQWEGALGEGMRGVKERVGEWLLSTGGWDESLEDGGVGGVI

SEQ ID NO: 36507 - DNA, 4407 bp, Muscodor strobelii
  misc_feature: SGI EST ID NO. CUFF.87074.1
  misc_feature: Variant of the nucleotide sequence at SEQ ID NO 36505
gtccctgcgtgcgtggttcccatcaatgcgtgctttttctggtaaccgtatcttcgtacttggttaacggtcacgaatcagttgcggccattcgcggtcattttcgcctgcaacacccctggtataccctgctctcgccaagagaccccatcccccactccagcatcacacccagctaataacggtcatcctccttttcgtgcttgatctttctcttttgcctctgaagtcagcgtcggcaataaatttcgcaagcatacgtacgtaggacagtcgccgtcatttgccgtccgtggctcatacgattgcccctcgttcgccatactcacgatatcaagctcgattgggtcatggggcgtacttcacggcgggattaacatctgtctttcggctagggggaactgtgaatggcgttcgggacacaacgaaggatacggaaaggcagtctaaagaacttggattcctgaagaagaagacgacgacaacacgggcttgtatgactataggtatatgtgtctcggcctgccatcttcgcgttactgcaacccgaacctttttgttgcttgctgcttagttgctaaggcacgacattagccagcaattatgactagcactcgtgatatatcttcgcgacttcgccagaatctgaaccctatactgacttcgacgccggggtataccaatcagctcaacacgcctcaatctgctgtgtcggcgagttctcatcatacattcggccctgttacgccggccagctcgatacagcgatacaatccgcaagaatggataccctcaccagctgtagagaggacacatcagttccctcctccgcaatccaacttccgtgatgcgccagtcgctggagcagctccgccgcctccatattctccaccacgaagtcaaagaccggccggtatgaactatgagacaccgccagccaacatatctgccgctcgagcaccgccctcaaatatgcataggccgtcaccggaaccagtagctcctcaaaacttccctccgccaccaggttcgaatgatcgaagaacttctcgagagaggcggtttggcctccattcgcttacacggcggcgagaacgcgaacatacggagaatatcagtagcccggatacccgctcaataccatcgattccaaggccacagacgctgatgatttcaatacctcccgctgtggatcccgcggaaaatccaatgccggtcgcgccaccgagtgctcggagagctgcctctgcgagtgctatagagacacccgtgtcggcccgatcgcgggcgacctcacaaactagatgggacccagcgatgccggtaccaccacctccaccaggtccgcctccgtcatcgcagtcccggtcccagagtttaaaccggccaaataatgtgaacccgccgatcctctctcctcccacgcggcggcctccgccggaaggagtgacagctctggggccagtaccacccacaccagcgaactgggcggaagagaacccccaatcgcaagctacagtgtctagtcagcccgaattgagtttgaatacctcgaacttagatagtacgcccgctcaaaacgttccaatctctgccgtagattctagtcccaatagtggcggcttgagcagaacgggtgccgttcgaggcgagaagacgttgcgagaaagacgaaatgagagtcggactagacatgagaggggcgaatcaagtgcaaatgctcagcagctttcagatatcgtagttccggaaggatccaacctctcacgccgattttccgtccgtcgaggcacaccgcgaagcggaggcaagatggtgctcgaaatggctcggacggctgatgaaaatgcagattcaaggaattcgacgccgcgtgcctccgcgggccttccgtcagaaacagcaacgcctcccttttcccctcgcccagggaaaggtgttgctggaacagaaaccgggcacgcaattgctccgaaagctttaccgacacctcccccgcagagtcgatcagcctcaaggtcatcaaacaatcgagccgatattttcggctcactgagcagcgttgcgtcaacaccctatgcctcacagccattgacgaagcaattagtcgtgagccaaaccgcccagcagttctgccaagggactattgagcgtttccaagcatttgctgaaaaggagtcatctgcaaagactgatgctgatcgcgtgaaactatttgctgattttatagtcagtgagtcgaggctgagacgcgaaagatattcgtcggcgattggcgccatgggatcggaaatttttgatctcacaagagaccttttccgtcctatgaaagttcgccgtgactcgagcagttcgcaggccagcgaatggacgcctcaaatgtcggaaacgaggtcaaatcgaaattcgatgggatctgttttccgtgagccgcaacaaactgcatcagcaccaagttcttccaagctgcccatgtctcccagtgggccacctcccatcaatactcacttcaacacaagtggttatatgccatcactgtcgccaattctaagcatgagcgtcaggtcgcgcgacgaggcagattctcgtggacgaccagccagccgatggtgggaaggtgactcggtaggagatggaagcaagatggaacgatcgaagcgagaatcaaaatacatgggtgttccaaaagaagcgagagaagcactgcagtggcaggatgcatcaggcagtccctcggcgccgcctggctctgccgatggctaccttgcggatgaatacccaccagaaaaggtcggctggcacgagccaacaccaacgaaagcgccacaccctttccgacagtcgcttttatccctaccgtcgtcgctaccaaacacaccaagcccgtctcatcttgatgtttcacggctggttactctaccgcctccttatccgcgccatcatcctgctgtgaataacaaccatcccgaactgacttccatccgaacacttgtgcgatctgtaagcgatcttcaagagattgcaacaacaaagtcacaattcttgcaggatagccaaaagattcgcgccgaagccgaagaagctgcggtcgcaagacgacaagcctttcgcgttaatctgcagcaagaagtcagtagcgggaacatgtcttatgccgaggcggcagccatcgaagcggacacgcaggaatctgaaaaagcttggacgaaggatttagagcggaaggaattcgagcgattccagaacgccgtggtcatgcctatcaacgagcttctaactggccgcatcgcccaagctacatcattattcgatgagctagtctcacagttgttcgttgagacacaggccccgaatccgaatacgccgcaggaagaaggtgatgagcagcccgaattactcgaaaagcttactttgctcaagtggattttcgaggctcgtgaagtgctccatcgtgagatatatgatctactcagcgatcgtaatgaccgatatcgtgagatggttttgatgccctatcgtctatctggcaatcaagagaagctccagcacgcagaggctttctttgccgaggacgcaagcaagcggcaagcggcctttgctaccgaagtgctacaacgcactagcgaattccgggccgttgtagaagaaaacgtgacccgcggcgtcgatatgcagctcaatgccttctgggacattgcacctccgttgaagcgtctacttgacaagatcccacaggtcatcgatacacacttccgtacacagatcccaccagccgagtttgaagagaaccccgcctatcaccaacatccgctgcagtatctgtacagcttgttgcttcatgcggagaagagcacctaccagttcatcgagtcgcagacaaaccttctgtgcctgctacatgaagtcaaagaagcagtggtcagtgcgcgggccaaagtcagcgaatcagagggccgcgatgctcgcgttgttgaggaagagcgcaaaggagaacgagaccagttaaccgaggacttgaaggagaaagtacgcgtggtacaggatcagtgggaaggcgcactgggcgagggcatgcggggcgtcaaagagagagtcggcgaatggctgttgtccactggtggctgggacgagagtctagaggacggcggtgttggtggtgttatttgagctgttgttttcgaagtgtagtagaagttgcctgtcgctgagtttcgctgtcgtggcctcttggatggcctgcattcatgagatacccctaaagttcttgcacatagcatttttgcacggttggatttgttattttggtagatgagtcttggaatctggttatagcagatgccattagttggtgattgcagcgatgcacagatgagataccacgaacaatatgaaggaatgataggaagc

SEQ ID NO: 36508 - DNA, 5850 bp, Muscodor strobelii
  misc_feature: SGI cDNA ID NO. 572657
  misc_feature: Encodes the peptide sequence at SEQ ID NO 36509
atgggtgtccaaccaagtgcggtcatcggccactcatcaggcgagatcgctgctgcatatgctgctggggctatttctcgacaggcagctgtgaaacttgcgtacttcaggggtttattgtcgagcgcgatggccgagatgccggctgattcgaaaagaggcggcatgatcgctgttggtgcttccgcaacggttgtgtgtcaatacatacaggaaacgctctctgaagcgggcgacggtgtactagtcgtcgcttgcatcaatagtcccacaagtacaacggtatcaggggatcgctctttgatcacaatacttgaacacaagttgcagcataaggacatcttctgtcgagcactcaagattcccgtcgcctatcatagcccacacatggcattaatagaagacgcatactgcaaaatcatcggcgtcatagatcctgggaaaactatgcggtatcacgctacaatgatatcaactgttactgggaagagagttttggcctcggaacttcaagatcccagatactggacccggaatctcatctccaccgtccgcttctcggatgcaatccgaagattaaatgaaagtagttgtgaaagaagagtcaagaagctagatttaagtcacagaaatgcggtccaggtgactgacatcatcgagatcgggccgcactcgacgctacaaggcccaattcgcgatactctggagacagatacatcattcaagaaactaccctatcgttctaccttagtgagaggtcaatccgccatcaacacagttctggagttgcttggctacctttattgcaccggattcgaagttgacgtagcaaaggctagtcgaataagagataaagatgagaaaagcaatagcaagatgctcacaaccctaccccgatatcctttcaatcacgcgaagaggtattgggacgagccaagggtatccaagcgcatgcggctggcaccagaatctcataacgaattcataggacttccagtctcagattggaacccacatgagccaagatggcgaaatcagctttgcatatcatctatgccttggttagaagatcacatgattggcgaaaaaatcgtgtaccccgctgcaggcatgatagttatggcaatggaagcccttgcacagatacactctgaccgcacgataaatgcctatgagatacgggatctggccattaactcaaatcttgttatccctcgagatgatattggcaccgaggtacatatttgtctcaaaccaaacactgatgtaacgagcaagcaagcttcatgggcctctttctccatctacgaagctggtgagaatttcgttgagatttgtcgaggatctatcaaacctgactttgcgatcaatacaccctcccagtgtaaccaaagcctttctaatcaggctgcttgggtgggagactcgatgcgctcgatgacttcaaccacaatgtccgagtacagcagcgaggagctttacggcatgtttcgcgcgaacggctacgcatatggagcttcgtttcagaatgtacaaagtgcgaaaaagaaccgctcaggccaggcattgggtcttgtctcgcaatttccttctgcaaactcaactgctaagctccatatgcatccctctattctggacagtattttccaattggtcgtgctggctggtcatctggatcgggacagtcctcttgcaacatgggtgcccacctatgttaggagcctctgggtgtcaaattctggtttccaatacaaacccaaaggaggcccgtcgaaagttttggctcgcgtagaatcacgcagtgctcggctgagcaccaactcattgagggttctagacagtgacggaaacaacttaattatgactggcgaaggcctcgagacaacacttgtgacagatacgcttcaagtcaatgatgataaacagcaacgacaaacgatcaggaagctaggctacgaaatggtctacaaacccgacctctctagtatgagctcacacgctactgcacagttcctccaagagcaggcaacgatctacactcgcgacataacccctacctacagcattttgaggatctacatcctggtatcttgggcgaagatgatgcagaagattcccctatcgacaattccacatcatcagccccatttgcaaagccagctaacgtggattgcgtcccaaatttcctctgctcggaagagcctgccatacggcataccaccggactggttaagcttgaccgaagacgccaaatacaatgaactctgctcacataccgaattgtcgggatccatcggcaggttctatgtctcgttctacaaaagcatgatcagggatatagacgagagctctggatttcctgagattgccgccggagaaacagcgccgcaagagtttcagcaagcatggctagatgaagttcctctaatgaatgctttgtacgcttttattgactcttcggcacacaagtcgtcggctatgcgggtgctacaaatcggagatgccggcggccctgtcacaaaatgtgccatggcggctctcactatgcagacctccacaggtgtcttttgccgtttttctcgctatgattgtaccgatctttgcgtgtactcaacagaacttatgtcaaaaatactcgaaatgtcttcaaagatacagtttcgtgctctcgataccgaaagaaatcctattgatcaaggcttcgaagagaatagttacgatttagttcttatgacaggcaacttctatacggatatcaatatggaggctgcgctcaagaatatacggaaactcattcgagaggacggaaatctattaatgctcgatatcactaatccgcactcaattttcggacgagccgtcgtgggatatttccccgaatggtggcaaggtcttcaacttccccaagaaaacaacaaaggctttccagtcactggggcatatcatacacagactctgcgtacatcgggctttaccgagccagatatcatgcttcatgattctccaattgaagaacaccaagtaatgagcttaataatctcatcgccagcttcatcaccacacacccctctgccatctccagtctgtcctcgccggacagctataataatcaatgctctttacgaaccttctaccacgcccctaagcgacagactagaaacgcaactgcggaacctagggcatattgatatacggatgctcagtctccgccaagctgctgatgagtcagatctcgcaaatatgcttgtgcatgtcgtccacagccaggaatggttgccattagcgagactcagccaagaagagtacgatctattccatggtacactgatgaagtgcagacatgtgttctggatctcttcagaaggcattacgaacgacctgtctgcccccgacggcgccatccttggtcttgcccgtacattgcgaatggagtaccacgattacgtatttgtcacacttagaactgatgagcgtcgaccccaaagcgtccctactatacttcgttcagcactgaccaatttccttcatggcgtcaaatctcaagcgtacgagccagaacttgtgcaagccggaagttctcttcaagtaccaagagtctacgagtctgacggcttaaatcgagatattcatgccctctcttcgaattctatcgttcgacgacagaaatttggagaaaataatgtgaaactgaaaatagggcagctagggctcctagacacgcttcactgggaagcagttggagttacgcagcacgctttaggtgcaggggagattgaaatcgatgttaaagccgttggtgtcaatttcaaagactgtctcacggcattggggcgcgttgcagaagacacaataggatctgagtgcgctggtgttgtcctctcagtcggccgtgactgccaactagtgcctggcgatcgtgtgcttgtgagcgctcttgacacattcacgggtcgttatcgttgtccagagcagttggccgcaaaggtccccgatggtatgacatttgccgaggctggtggtattgcgacaaatttcgtcactgcgtatcactctctatcagtcgtggcgagacttcaagaaggcgagtctgtcctcattcattcgggggcaggcggaactgggcaggctgccattcagatagcgcagagtcttggcgcagaagtattcacaactgttggttcagaccagaaaaagcagttgctcatcagtctttacaacatctcacctgataggatactcaatagcagagatctgtctttccgtgaggatatcatgcggctcaccaacggcaagggagtcgatgttgtactaaactcattgtcagggaatgctctcatcgcatcgtgggagtgcgtggccgcctatggtcgatttgtcgagatcgggaagaaagacattttctcccataacaggctgcctatgtaccaattcgcaagaaatgtgtcattcagtgccgtcgacatcgcagcaatgactagagagcggcccgcgctcgtgaagaaagcactcgcctttgtggtcgatatgtttaagcggaagaaattacagatgatttcaccgatcaaggtttttcctgcgtccgagacagaagctgccttccgttatttgcaaagcggcgcaaacgcgggaaaggttgttgtggcgatcaacccagatgacagagtcacggtctccgttaatacaaggctatcgtggaggcttcctgcagattgcacgtatgttattgcagggggctttgggggacaagggatgtccgttgccaagtggatggtttccaaaggcgccagacacctggtattactatcacgatctggtccccgaggacaaaagcaaatgaacttggtgcgggagctgcaagagagtggctcagagatttactgccctccctgtgatattgctgatccagaagatctgaaaagtgtattagactattgcagagcgcacatgcccgcgatcaaagggtgcgtccaagcggccatggtgattcaggattctatgttcgacaacatgtcgtacgagctatggaacaattgcttgaagcccaaaatacatggatcatggaatttacaccaacagctcccagatgaccttgacttcttcgttatgttctcctccacggcaggcatcatcgggtcacagggccaatccaactacgctgcaggcaatactttcaaagacgagctcgcaagatatcgcgcagcacgtggtcaaacagctatctcactaaatctgagcttcttggagaacgaagggtatatggctgaaaatcgggagatgctaatgcgttacgccaacgtcaagcatatgcttctgatgtcacagagtgaagtactagcgctactagagcattactgcgacccatctatctcaaggattgtcaacccagcacattcacagctggtcttgggtcttactctgcccgcagatgtttctaatcgggggatggagctctcaagctggatgcatgagccgatgttcaccaatcttctacaaatggaccccacacatgcgggctcgtcgtctgcgcaggctgccgaatcccaaaataacggtccgtctctaattgcgcaggtttcagccgcgccctcggtccaggaagccggaacaatcttggcgaaaggtcttgctactaaattgataagtattttgtctctcggaagcgatcagtatagtctggatttaccattgcatacttatggcgttgattcattgattgcagttgagttgcgtaattggttcgttaaggttctcaaggtcgatatggctatttttgagatcttaggtggtgcaacggcaaattcgctcggtagggctgccgcagagaaaatgcggagtcaggcgtctcattga

SEQ ID NO: 36509 - protein, 1949 aa, Muscodor strobelii
  misc_feature: SGI Peptide ID NO. 572657
  misc_feature (1)..(274): Pfam Id: PF00698 Pfam Desc: Acyl transferase domain
  misc_feature (1255)..(1329): Pfam Id: PF08240 Pfam Desc: Alcohol dehydrogenase GroES-like domain
  misc_feature (1571)..(1737): Pfam Id: PF00106 Pfam Desc: short chain dehydrogenase
  misc_feature (1360)..(1508): Pfam Id: PF00107 Pfam Desc: Zinc-binding dehydrogenase
  misc_feature (1571)..(1750): Pfam Id: PF08659 Pfam Desc: KR domain
  misc_feature (1)..(193): Pfam Id: PF00698 Pfam Desc: Acyl transferase domain
  misc_feature (1255)..(1309): Pfam Id: PF08240 Pfam Desc: Alcohol dehydrogenase GroES-like domain
  misc_feature (885)..(938): Pfam Id: PF08242 Pfam Desc: Methyltransferase domain
  misc_feature (3)..(1945): NCBI GI: 242810825 Blast Desc: polyketide synthase, [Talaromyces stipitatus ATCC 10500] gi|218716287|gb|EED15709.1| polyketide synthase, [Talaromyces stipitatus ATCC 10500]
  misc_feature (2)..(1938): NCBI GI: 119497865 Blast Desc: polyketide synthase, [Neosartorya fischeri NRRL 181] gi|119413854|gb|EAW23793.1| polyketide synthase, [Neosartorya fischeri NRRL 181]
  misc_feature (2)..(1938): NCBI GI: 146322741 Blast Desc: polyketide synthase [Aspergillus fumigatus Af293] gi|129556779|gb|EAL87227.2| polyketide synthase, [Aspergillus fumigatus Af293]
  misc_feature (2)..(1938): NCBI GI: 159128679 Blast Desc: polyketide synthase, [Aspergillus fumigatus A1163]
  misc_feature (2)..(1948): NCBI GI: 121711140 Blast Desc: polyketide synthase, [Aspergillus clavatus NRRL 1] gi|119401336|gb|EAW11760.1| polyketide synthase, [Aspergillus clavatus NRRL 1]
  misc_feature (3)..(1942): NCBI GI: 156060435 Blast Desc: SS1G_02356 [Sclerotinia sclerotiorum 1980] gi|154699764|gb|EDN99502.1| SS1G_02356 [Sclerotinia sclerotiorum 1980]
  misc_feature (3)..(1944): NCBI GI: 169769096 Blast Desc: [Aspergillus oryzae RIB40] gi|83766876|dbj|BAE57016.1| protein product [Aspergillus oryzae]
  misc_feature (3)..(1944): NCBI GI: 238501530 Blast Desc: polyketide synthase, [Aspergillus flavus NRRL3357] gi|220692236|gb|EED48583.1| polyketide synthase, [Aspergillus flavus NRRL3357]
  misc_feature (2)..(1949): NCBI GI: 169781204 Blast Desc: [Aspergillus oryzae RIB40] gi|83773807|dbj|BAE63932.1| protein product [Aspergillus oryzae]
  misc_feature (2)..(1922): NCBI GI: 154295000 Blast Desc: BC1G_13366 [Botryotinia fuckeliana B05.10] gi|150844495|gb|EDN19688.1| BC1G_13366 [Botryotinia fuckeliana B05.10]
  misc_feature (6)..(965): SWISSPROT Homolog: EC 2.3.1.161 Lovastatin nonaketide synthase
  misc_feature: Useful for fungicidal and/or biocontrol applications
MGVQPSAVIGHSSGEIAAAYAAGAISRQAAVKLAYFRGLLSSAMAEMPADSKRGGMIAVGASATVVCQYIQETLSEAGDGVLVVACINSPTSTTVSGDRSLITILEHKLQHKDIFCRALKIPVAYHSPHMALIEDAYCKIIGVIDPGKTMRYHATMISTVTGKRVLASELQDPRYWTRNLISTVRFSDAIRRLNESSCERRVKKLDLSHRNAVQVTDIIEIGPHSTLQGPIRDTLETDTSFKKLPYRSTLVRGQSAINTVLELLGYLYCTGFEVDVAKASRIRDKDEKSNSKMLTTLPRYPFNHAKRYWDEPRVSKRMRLAPESHNEFIGLPVSDWNPHEPRWRNQLCISSMPWLEDHMIGEKIVYPAAGMIVMAMEALAQIHSDRTINAYEIRDLAINSNLVIPRDDIGTEVHICLKPNTDVTSKQASWASFSIYEAGENFVEICRGSIKPDFAINTPSQCNQSLSNQAAWVGDSMRSMTSTTMSEYSSEELYGMFRANGYAYGASFQNVQSAKKNRSGQALGLVSQFPSANSTAKLHMHPSILDSIFQLVVLAGHLDRDSPLATWVPTYVRSLWVSNSGFQYKPKGGPSKVLARVESRSARLSTNSLRVLDSDGNNLIMTGEGLETTLVTDTLQVNDDKQQRQTIRKLGYEMVYKPDLSSMSSHATAQFLQEQATIYTRDITPTYSILRIYILVSWAKMMQKIPLSTIPHHQPHLQSQLTWIASQISSARKSLPYGIPPDWLSLTEDAKYNELCSHTELSGSIGRFYVSFYKSMIRDIDESSGFPEIAAGETAPQEFQQAWLDEVPLMNALYAFIDSSAHKSSAMRVLQIGDAGGPVTKCAMAALTMQTSTGVFCRFSRYDCTDLCVYSTELMSKILEMSSKIQFRALDTERNPIDQGFEENSYDLVLMTGNFYTDINMEAALKNIRKLIREDGNLLMLDITNPHSIFGRAVVGYFPEWWQGLQLPQENNKGFPVTGAYHTQTLRTSGFTEPDIMLHDSPIEEHQVMSLIISSPASSPHTPLPSPVCPRRTAIIINALYEPSTTPLSDRLETQLRNLGHIDIRMLSLRQAADESDLANMLVHVVHSQEWLPLARLSQEEYDLFHGTLMKCRHVFWISSEGITNDLSAPDGAILGLARTLRMEYHDYVFVTLRTDERRPQSVPTILRSALTNFLHGVKSQAYEPELVQAGSSLQVPRVYESDGLNRDIHALSSNSIVRRQKFGENNVKLKIGQLGLLDTLHWEAVGVTQHALGAGEIEIDVKAVGVNFKDCLTALGRVAEDTIGSECAGVVLSVGRDCQLVPGDRVLVSALDTFTGRYRCPEQLAAKVPDGMTFAEAGGIATNFVTAYHSLSVVARLQEGESVLIHSGAGGTGQAAIQIAQSLGAEVFTTVGSDQKKQLLISLYNISPDRILNSRDLSFREDIMRLTNGKGVDVVLNSLSGNALIASWECVAAYGRFVEIGKKDIFSHNRLPMYQFARNVSFSAVDIAAMTRERPALVKKALAFVVDMFKRKKLQMISPIKVFPASETEAAFRYLQSGANAGKVVVAINPDDRVTVSVNTRLSWRLPADCTYVIAGGFGGQGMSVAKWMVSKGARHLVLLSRSGPRGQKQMNLVRELQESGSEIYCPPCDIADPEDLKSVLDYCRAHMPAIKGCVQAAMVIQDSMFDNMSYELWNNCLKPKIHGSWNLHQQLPDDLDFFVMFSSTAGIIGSQGQSNYAAGNTFKDELARYRAARGQTAISLNLSFLENEGYMAENREMLMRYANVKHMLLMSQSEVLALLEHYCDPSISRIVNPAHSQLVLGLTLPADVSNRGMELSSWMHEPMFTNLLQMDPTHAGSSSAQAAESQNNGPSLIAQVSAAPSVQEAGTILAKGLATKLISILSLGSDQYSLDLPLHTYGVDSLIAVELRNWFVKVLKVDMAIFEILGGATANSLGRAAAEKMRSQASH

SEQ ID NO: 36510 - DNA, 2886 bp, Muscodor strobelii
  misc_feature: SGI EST ID NO. CUFF.87041.2
  misc_feature: Variant of the nucleotide sequence at SEQ ID NO 36508
cgacagactagaaacgcaactgcggaacctagggcatattgatatacggatgctcagtctccgccaagctgctgatgagtcagatctcgcaaatatgcttgtgcatgtcgtccacagccaggaatggttgccattagcgagactcagccaagaagagtacgatctattccatggtacactgatgaagtgcagacatgtgttctggatctcttcagaaggcattacgaacgacctgtctgcccccgacggcgccatccttggtcttgcccgtacattgcgaatggagtaccacgattacgtatttgtcacacttagaactgatgagcgtcgaccccaaagcgtccctactatacttcgttcagcactgaccaatttccttcatggcgtcaaatctcaagcgtacgagccagaacttgtgcaagccggaagttctcttcaagtaccaagagtctacgagtctgacggcttaaatcgagatattcatgccctctcttcgaattctatcgttcgacgacagaaatttggagaaaataatgtgaaactgaaaatagggcagctagggctcctagacacgcttcactgggaagcagttggagttacgcagcacgctttaggtgcaggggagattgaaatcgatgttaaagccgttggtgtcaatttcaaagactgtctcacggcattggggcgcgttgcagaagacacaataggatctgagtgcgctggtgttgtcctctcagtcggccgtgactgccaactagtgcctggcgatcgtgtgcttgtgagcgctcttgacacattcacgggtcgttatcgttgtccagagcagttggccgcaaaggtccccgatggtatgacatttgccgaggctggtggtattgcgacaaatttcgtcactgcgtatcactctctatcagtcgtggcgagacttcaagaaggcgagtctgtcctcattcattcgggggcaggcggaactgggcaggctgccattcagatagcgcagagtcttggcgcagaagtattcacaactgttggttcagaccagaaaaagcagttgctcatcagtctttacaacatctcacctgataggatactcaatagcagagatctgtctttccgtgaggatatcatgcggctcaccaacggcaagggagtcgatgttgtactaaactcattgtcagggaatgctctcatcgcatcgtgggagtgcgtggccgcctatggtcgatttgtcgagatcgggaagaaagacattttctcccataacaggctgcctatgtaccaattcgcaagaaatgtgtcattcagtgccgtcgacatcgcagcaatgactagagagcggcccgcgctcgtgaagaaagcactcgcctttgtggtcgatatgtttaagcggaagaaattacagatgatttcaccgatcaaggtttttcctgcgtccgagacagaagctgccttccgttatttgcaaagcggcgcaaacgcgggaaaggttgttgtggcgatcaacccagatgacagagtcacggtctccgttaatacaaggctatcgtggaggcttcctgcagattgcacgtatgttattgcagggggctttgggggacaagggatgtccgttgccaagtggatggtttccaaaggcgccagacacctggtattactatcacgatctggtccccgaggacaaaagcaaatgaacttggtgcgggagctgcaagagagtggctcagagatttactgccctccctgtgatattgctgatccagaagatctgaaaagtgtattagactattgcagagcgcacatgcccgcgatcaaagggtgcgtccaagcggccatggtgattcaggattctatgttcgacaacatgtcgtacgagctatggaacaattgcttgaagcccaaaatacatggatcatggaatttacaccaacagctcccagatgaccttgacttcttcgttatgttctcctccacggcaggcatcatcgggtcacagggccaatccaactacgctgcaggcaatactttcaaagacgagctcgcaagatatcgcgcagcacgtggtcaaacagctatctcactaaatctgagcttcttggagaacgaagggtatatggctgaaaatcgggagatgctaatgcgttacgccaacgtcaagcatatgcttctgatgtcacagagtgaagtactagcgctactagagcattactgcgacccatctatctcaaggattgtcaacccagcacattcacagctggtcttgggtcttactctgcccgcagatgtttctaatcgggggatggagctctcaagctggatgcatgagccgatgttcaccaatcttctacaaatggaccccacacatgcgggctcgtcgtctgcgcaggctgccgaatcccaaaataacggtccgtctctaattgcgcaggtttcagccgcgccctcggtccaggaagccggaacaatcttggcgaaaggtcttgctactaaattgataagtattttgtctctcggaagcgatcagtatagtctggatttaccattgcatacttatggcgttgattcattgattgcagttgagttgcgtaattggttcgttaaggttctcaaggtcgatatggctatttttgagatcttaggtggtgcaacggcaaattcgctcggtagggctgccgcagagaaaatgcggagtcaggcgtctcattgagcattgtaactttatgatcggatagaatgggtactctaatgttatgacataacgatacgtgtctctggtcacattcgtccgctgtcatttttaccactcgaattctatgagcagggtcaccttggtgcagccacggacagtattaaggtccttctagtctaagtcatttgttagctcagaac

SEQ ID NO: 36511 - DNA, 1953 bp, Muscodor strobelii
  misc_feature: SGI cDNA ID NO. 572658
  misc_feature: Encodes the peptide sequence at SEQ ID NO 36512
atgctaatatcgatagaggatcattgccggattcagtccggtcaagagagtcctccggtggccgagtgcttgaggccgagtagtgatgcatgcagcaaaaatgacattgctatcatcggcttttctttcgagttcccgcatgcaagctccgaggaatccctctggcgcgtcatagtaaatggcgagagcacagccaggaagttcccaccggacaggctgagcggtaccaggtatcatgatccaaatcgaacgcggccaggaaccatctgcactgaccatgcgtctttccttgagagagacatcggtgcctttgacgccaagttttttggcatgactgccgaagaagcatcgggagccgacccgcagcagcgcatacttcttgagacaacctatcatgccttcgaaaatgctgggatcccggtggaaagcatacggggttccaatacatctgtgcatacagggtattttactgccgattatttcaccgcctccgccaaggatccttccctcgcacccaagtatgctgtcgctggcatggccggcagcatgctgtccaataagatcagttcattctttgatatcactggtcctagtgtgaccatcgacactgcttgttccagtagtcttgtcgctctagacttggcatgccagtctattcggcaaggcaactcaactattggagttgtagccggctgcaaccttctcatgagcccagacctgttcataactctttcaagccttggattcttgtcgccagatggtgtatgccatagttttgatagccgcgcaaacggctacggaagaggcgaaggtattggtgttcttattgtaaaagacttaaacgaggctgtcaaagatggaaatacaattcgtgccgtcattcgcgctacgggaacaaatcaaaatggacgtaccaacttggctcagccaagcaaagagcatcagatgcaactcattgagagcacatatcgcaaagctggcttggacatggcgatgacgcggtttttcgaagcccacggtaccggtacagcaattggtgacccaatcgaagctatggccattggaaatgcttttgccccaaatcgaggttctgatgacccccttttcattggctcgattaaagccaatattggccatttggagggcgctgcaggcattgcaggcatcatcaaggctattttagtgctggaaagaggaacgatacctcctatcgcaaacctgcataaattgaacgacaatattgatgccagcttccttaatcttgagttcccaacaactccaatcccctggccacggaatgggcttcgtcgagcaagtgtcaacagcttcggtttcgggggcaccaactcgcacgccatcctcgacgatgcataccactatctcaatacacgcaacatgaatgcaagacattgcacgaaggctcatgcattaatagcaacagacaaagacacagatggacatcagaatctagcgtcatcgtacttgccgcgtttattggtttggtcggcgcatcagcgcgactcgacgacccaaacgatcgaggcatatcggcgacactttgacgcgaaactaaagaatagtcagaatgcaaataaagtatttgacgctttaatacacactctatcctctgggcgcagtctccatgcttggcggacattttccatttcaagctcattggacgacttaggagacgcgcttgcaaaagtcaaggccccggttgaagccaaggttggtcggaaagcggcgttcgtcttcacgggacaaggcgcgcagtggtcagggatgggcaaggatttaactcatttcgaatgctttcgagaaagtattgaaagttccgatcgtgtactgactagtctaggatgcccatggaaagctctgggtaagttttctcatagtataatcagagcatttgctgactaccgcagacttgctcacaggacatacggaaaatga

SEQ ID NO: 36512 - protein, 650 aa, Muscodor strobelii
  misc_feature: SGI Peptide ID NO. 572658
  misc_feature (34)..(283): Pfam Id: PF00109 Pfam Desc: Beta-ketoacyl synthase, N-terminal domain
  misc_feature (291)..(408): Pfam Id: PF02801 Pfam Desc: Beta-ketoacyl synthase, C-terminal domain
  misc_feature (582)..(616): Pfam Id: PF00698 Pfam Desc: Acyl transferase domain
  misc_feature (197)..(232): Pfam Id: PF00108 Pfam Desc: Thiolase, N-terminal domain
  misc_feature (50)..(624): NCBI GI: 242810825 Blast Desc: polyketide synthase, [Talaromyces stipitatus ATCC 10500] gi|218716287|gb|EED15709.1| polyketide synthase, [Talaromyces stipitatus ATCC 10500]
  misc_feature (36)..(623): NCBI GI: 121700450 Blast Desc: polyketide synthase, [Aspergillus clavatus NRRL 1] gi|119396632|gb|EAW07064.1| polyketide synthase, [Aspergillus clavatus NRRL 1]
  misc_feature (36)..(633): NCBI GI: 119497865 Blast Desc: polyketide synthase, [Neosartorya fischeri NRRL 181] gi|119413854|gb|EAW23793.1| polyketide synthase, [Neosartorya fischeri NRRL 181]
  misc_feature (36)..(623): NCBI GI: 238502997 Blast Desc: polyketide synthase, [Aspergillus flavus NRRL3357] gi|220691542|gb|EED47890.1| polyketide synthase, [Aspergillus flavus NRRL3357]
  misc_feature (20)..(623): NCBI GI: 189206211 Blast Desc: lovastatin nonaketide synthase [Pyrenophora tritici-repentis Pt-1C-BFP] gi|187975533|gb|EDU42159.1| lovastatin nonaketide synthase [Pyrenophora tritici-repentis
  misc_feature (26)..(632): NCBI GI: 242821073 Blast Desc: polyketide synthase, [Talaromyces stipitatus ATCC 10500] gi|218712528|gb|EED11953.1| polyketide synthase, [Talaromyces stipitatus ATCC 10500]
  misc_feature (26)..(626): NCBI GI: 145250477 Blast Desc: An15g02130 [Aspergillus niger] gi|134082272|emb|CAK42316.1| protein product [Aspergillus niger]
  misc_feature (36)..(632): NCBI GI: 146322741 Blast Desc: polyketide synthase [Aspergillus fumigatus Af293] gi|129556779|gb|EAL87227.2| polyketide synthase, [Aspergillus fumigatus Af293]
  misc_feature (36)..(632): NCBI GI: 159128679 Blast Desc: polyketide synthase, [Aspergillus fumigatus A1163]
  misc_feature (36)..(629): NCBI GI: 238501530 Blast Desc: polyketide synthase, [Aspergillus flavus NRRL3357] gi|220692236|gb|EED48583.1| polyketide synthase, [Aspergillus flavus NRRL3357]
  misc_feature (36)..(629): SWISSPROT Homolog: EC 2.3.1.161 Lovastatin nonaketide synthase
  misc_feature: Useful for fungicidal and/or biocontrol applications
MLISIEDHCRIQSGQESPPVAECLRPSSDACSKNDIAIIGFSFEFPHASSEESLWRVIVNGESTARKFPPDRLSGTRYHDPNRTRPGTICTDHASFLERDIGAFDAKFFGMTAEEASGADPQQRILLETTYHAFENAGIPVESIRGSNTSVHTGYFTADYFTASAKDPSLAPKYAVAGMAGSMLSNKISSFFDITGPSVTIDTACSSSLVALDLACQSIRQGNSTIGVVAGCNLLMSPDLFITLSSLGFLSPDGVCHSFDSRANGYGRGEGIGVLIVKDLNEAVKDGNTIRAVIRATGTNQNGRTNLAQPSKEHQMQLIESTYRKAGLDMAMTRFFEAHGTGTAIGDPIEAMAIGNAFAPNRGSDDPLFIGSIKANIGHLEGAAGIAGIIKAILVLERGTIPPIANLHKLNDNIDASFLNLEFPTTPIPWPRNGLRRASVNSFGFGGTNSHAILDDAYHYLNTRNMNARHCTKAHALIATDKDTDGHQNLASSYLPRLLVWSAHQRDSTTQTIEAYRRHFDAKLKNSQNANKVFDALIHTLSSGRSLHAWRTFSISSSLDDLGDALAKVKAPVEAKVGRKAAFVFTGQGAQWSGMGKDLTHFECFRESIESSDRVLTSLGCPWKALGKFSHSIIRAFADYRRLAHRTYGK

SEQ ID NO: 36513 - DNA, 1799 bp, Muscodor strobelii
  misc_feature: SGI EST ID NO. CUFF.87066.1
  misc_feature: Variant of the nucleotide sequence at SEQ ID NO 36511
gacctgttcataactctttcaagccttggattcttgtcgccagatggtgtatgccatagttttgatagccgcgcaaacggctacggaagaggcgaaggtattggtgttcttattgtaaaagacttaaacgaggctgtcaaagatggaaatacaattcgtgccgtcattcgcgctacgggaacaaatcaaaatggacgtaccaacttggctcagccaagcaaagagcatcagatgcaactcattgagagcacatatcgcaaagctggcttggacatggcgatgacgcggtttttcgaagcccacggtaccggtacagcaattggtgacccaatcgaagctatggccattggaaatgcttttgccccaaatcgaggttctgatgacccccttttcattggctcgattaaagccaatattggccatttggagggcgctgcaggcattgcaggcatcatcaaggctattttagtgctggaaagaggaacgatacctcctatcgcaaacctgcataaattgaacgacaatattgatgccagcttccttaatcttgagttcccaacaactccaatcccctggccacggaatgggcttcgtcgagcaagtgtcaacagcttcggtttcgggggcaccaactcgcacgccatcctcgacgatgcataccactatctcaatacacgcaacatgaatgcaagacattgcacgaaggctcatgcattaatagcaacagacaaagacacagatggacatcagaatctagcgtcatcgtacttgccgcgtttattggtttggtcggcgcatcagcgcgactcgacgacccaaacgatcgaggcatatcggcgacactttgacgcgaaactaaagaatagtcagaatgcaaataaagtatttgacgctttaatacacactctatcctctgggcgcagtctccatgcttggcggacattttccatttcaagctcattggacgacttaggagacgcgcttgcaaaagtcaaggccccggttgaagccaaggttggtcggaaagcggcgttcgtcttcacgggacaaggcgcgcagtggtcagggatgggcaaggatttaactcatttcgaatgctttcgagaaagtattgaaagttccgatcgtgtactgactagtctaggatgcccatggaaagctctggacttgctcacaggacatacggaaaatgaagacatcaacgaacctcgctattcgcagccgctctgtacagtcttgcagatcggattggtcgatcttttgacaacaatgggtgtccaaccaagtgcggtcatcggccactcatcaggcgagatcgctgctgcatatgctgctggggctatttctcgacaggcagctgtgaaacttgcgtacttcaggggtttattgtcgagcgcgatggccgagatgccggctgattcgaaaagaggcggcatgatcgctgttggtgcttccgcaacggttgtgtgtcaatacatacaggaaacgctctctgaagcgggcgacggtgtactagtcgtcgcttgcatcaatagtcccacaagtacaacggtatcaggggatcgctctttgatcacaatacttgaacacaagttgcagcataaggacatcttctgtcgagcactcaagattcccgtcgcctatcatagcccacacatggcattaatagaagacgcatactgcaaaatcatcggcgtcatagatcctgggaaaactatgcggtatcacgctacaatgatatcaactgttactgggaagagagttttggcctcggaacttcaagatcccagatactggac

SEQ ID NO: 36514 - DNA, 687 bp, Muscodor strobelii
  misc_feature: SGI cDNA ID NO. 572659
  misc_feature: Encodes the peptide sequence at SEQ ID NO 36515
atgcatttcttatgtatgcacggcgcaggctccaatgcccaaacatttgaaacgcaaactgctgcactgcgttacgagttaggcgatcatcatacgtacgagttcgttgagggtgtattaccatgcccgatggcccctgaactcgaaggaatcgcctctcctgatgatcaggaatactaccagtacatcaataaaaatgaagtagagacatgcatcgcggccatgcataatctagatgcctatattgctgctgaggggccatttgacggcatattggcattttctgaaggcgccatggtagcagcgacttacattagctggaaggccaaacaaggcaatcccgttgcattgaaatgtgccatactattctcagcgtggaatgctgttgatccggtgtcgttgatggagggaggcaagattgagatcctgacaccggacgcacatcttgatcctgtagtaatgccaacggctcacatatgggggaagcaagatgtgtctgcccccaattcatctcgggtcagtgagattttctcggcagatctgaaagaaattcatgaacatattggagcccatgagattccggggtcgcgcatgaccgccgatgtcaagagtagcgtgcgcattatccgaaggacaatcgcgcgaggtagtataatgaccccgatgaatggattagtggcttcatga

SEQ ID NO: 36515 - protein, 228 aa, Muscodor strobelii
  misc_feature: SGI Peptide ID NO. 572659
  misc_feature (1)..(217): NCBI GI: 242810819 Blast Desc: DUF341 domain protein [Talaromyces stipitatus ATCC 10500] gi|218716286|gb|EED15708.1| DUF341 domain protein [Talaromyces stipitatus ATCC 10500]
  misc_feature (1)..(217): NCBI GI: 145235491 Blast Desc: An03g05130 [Aspergillus niger] gi|134058079|emb|CAK49165.1| protein product [Aspergillus niger]
  misc_feature (1)..(213): NCBI GI: 238501528 Blast Desc: conserved [Aspergillus flavus NRRL3357] gi|220692235|gb|EED48582.1| conserved [Aspergillus flavus NRRL3357]
  misc_feature (1)..(217): NCBI GI: 242821117 Blast Desc: conserved [Talaromyces stipitatus ATCC 10500] gi|218712537|gb|EED11962.1| conserved [Talaromyces stipitatus ATCC 10500]
  misc_feature (1)..(202): NCBI GI: 145250479 Blast Desc: An15g02140 [Aspergillus niger] gi|134082273|emb|CAK42317.1| protein product [Aspergillus niger]
  misc_feature (11)..(215): NCBI GI: 212532261 Blast Desc: conserved [Penicillium marneffei ATCC 18224] gi|210071651|gb|EEA25740.1| conserved [Penicillium marneffei ATCC 18224]
  misc_feature (13)..(204): NCBI GI: 145243752 Blast Desc: An11g03930 [Aspergillus niger] gi|134079069|emb|CAK48378.1| protein product [Aspergillus niger]
  misc_feature (1)..(215): NCBI GI: 145259393 Blast Desc: An04g10020 [Aspergillus niger] gi|134074981|emb|CAK39061.1| protein product [Aspergillus niger]
  misc_feature (1)..(216): NCBI GI: 261353179 Blast Desc: DUF341 domain-containing protein [Verticillium albo-atrum VaMs.102]
  misc_feature (1)..(213): NCBI GI: 145244152 Blast Desc: An11g05950 [Aspergillus niger] gi|134079269|emb|CAK40751.1| protein product [Aspergillus niger]
MHFLCMHGAGSNAQTFETQTAALRYELGDHHTYEFVEGVLPCPMAPELEGIASPDDQEYYQYINKNEVETCIAAMHNLDAYIAAEGPFDGILAFSEGAMVAATYISWKAKQGNPVALKCAILFSAWNAVDPVSLMEGGKIEILTPDAHLDPVVMPTAHIWGKQDVSAPNSSRVSEIFSADLKEIHEHIGAHEIPGSRMTADVKSSVRIIRRTIARGSIMTPMNGLVAS

SEQ ID NO: 36516 - DNA, 3346 bp, Muscodor strobelii
  misc_feature: SGI EST ID NO. CUFF.87069.1
  misc_feature: Variant of the nucleotide sequence at SEQ ID NO 36514
gctcagcctgtccggtgggaacttcctggctgtgctctcgccatttactatgacgcgccagagggattcctcggagcttgcatgcgggaactcgaaagaaaagccgatgatagcaatgtcatttttgctgcatgcatcactactcggcctcaagcactcggccaccggaggactctcttgaccggactgaatccggcaatgatcctctatcgatattagcatggcaggctgtagcctgcgcctgagcacagcgcaatgtcagacacagtccttcgattgctaagccgtgggcggttgtgtgatgggtggatataaagtttgggtcagaggagtggcaggttggtgccagaatacgactttacgtacattcgacagctcgccaatgcatctcgaccagcaaatcagcatcctgcgggcaccttgcgtagcatcctaggatttaaggacccgaaatcaaatacgtacgcaatcctgacttgcaccagcgtggaaagctgagaaagttggtgcgaggagaagaccattatttgttcggttcgagaaacttgcatgggtgtatgatctacggtgtatggcgacatggatgctacgtaaggggcccagacctggtcaagaaatgcgattggtgttgcatctgcattcttcaacgatctctcttaaccttatcacacttatacagtatttcccacgcatctcgaccacttgcagtgtctctcgcacacactcgcacgcaggtttgttggttccagcgtattgggttgccaatacccctctctttattaactcgcttgtgcagctccagtccatctattgaatcctcccgacgtctctagggcgccccacgtcagactatgggccgaacatggagtccaagatggggtatccggccggaaccaattctcaagtagccttaacagcaaccagctccgagatgcaaggatcacatcatgcctctcattgggacttttaatctagtcggctagtctcgtccgtcgagtatgaagcctctctcgctatcagttataaagacccttgctgcttgattggcaaacacgtgtgtatcatcacttttccaagcaataagagacaagttgtaggtgagtcgtacccagatttccgagtgtcagatccaatccttcgagtcatcaacctaccaaaaccatatcgggtacgccgatacacaacaatgcatttcttatgtatgcacggcgcaggctccaatgcccaaacatttgaaacgcaaactgctgcactgcgttacgagttaggcgatcatcatacgtacgagttcgttgagggtgtattaccatgcccgatggcccctgaactcgaaggaatcgcctctcctgatgatcaggaatactaccagtacatcaataaaaatgaagtagagacatgcatcgcggccatgcataatctagatgcctatattgctgctgaggggccatttgacggcatattggcattttctgaaggcgccatggtagcagcgacttacattagctggaaggccaaacaaggcaatcccgttgcattgaaatgtgccatactattctcagcgtggaatgctgttgatccggtgtcgttgatggagggaggcaagattgagatcctgacaccggacgcacatcttgatcctgtagtaatgccaacggctcacatatgggggaagcaagatgtgtctgcccccaattcatctcgggtcagtgagattttctcggcagatctgaaagaaattcatgaacatattggagcccatgagattccggggtcgcgcatgaccgccgatgtcaagagtagcgtgcgcattatccgaaggacaatcgcgcgaggtagtataatgaccccgatgaatggattagtggcttcatgatgtagcgaggcatagattgggttatgagttatatgattattagattttctcttctttcgtccttagatagtgttgtcttagtcgactctgatttggttcttcctccacaagagcgctatactgaacacggcagcgaccgcgaaaccgaggacgatgtgcatctcgagattgaagcttgtcacaaagtctcttcggacctcttgctccaaatcggctggcagatccttaatggtagatgttgatctgaagattccctggatctgcgctgacgtcaaagtatcagaaagtgtatccctaatccacccattcccgacagcggtggtcaaagataccactattgcactcccgagaaaacgaaactgtgttcccgctgccgaagccaccgcttgatagtagttagcaaatacggcatgtttaacgaaggatacagttctcacccaaatcccgtcgttcaacaacgaaaggggtcaaaagcgcaaccaacccgatattgcatcccatgcccaatccgacaatgacctgaagaccatataaaggcttccaatccggcgtgtctcgcggtgccatcgagagaaacactagtccgacaatttggataaggacaccgaaaagtccaacatacaaaggaggcagacgccgctttccacacagaacggctatcaaaattgcgccgaagggcccaaaaaagctgaatgcaagaagccgaacaccagcctcgaagggattggctcctatggtggtttgataacgaatcgggaactgaatgatgcacgtgatactcacagctcctgtgaaaaaagagttgctgcatgttcaattagcaagctggaccgatctagtgggaaagtggagatgatgggtagagtacgcacagtaaaagaccagttatcatccggctctgcgcaaatcgccagggaaatatagggtgcacgaccgtctggcggttcgtgaaccaccattggctaataaagaacaacacccaaacgaaggcagataccaccactaatgcgatgaagtccgcagtggtccacgatagttgggaggcggcgttttcaaatccagcaatcagaagtgcgaaagccagaagcatcaagaaggcaccagtgaaatcgatctctttaagctgggtgcgcggtctttgcttgtgcggatcgaggccttggtacggaaaattcccaggaaccgtgaacacgacgagcgcagcaatcaaggcactggctggaatactgtcttcctgttagttcccgctctccgaaatcgtaggcttaacagacggacttcagtaagaacacccatctccatgttgttccatcggcaattagaccgccgaaaatgggaccaagagcgtttcccagtgccacaaggcaggttgagatggctgtgtatagcggatatttagtttttggcaccagctcgtagagcattacaagagccacagcatacacgccacctccaccaagtccttggaaggca

SEQ ID NO: 36517 - DNA, 1719 bp, Muscodor strobelii
  misc_feature: SGI cDNA ID NO. 572660
  misc_feature: Encodes the peptide sequence at SEQ ID NO 36518
atggcttcccttgaggctacaacaactcctgagctcactcagaatgggaagatgcattcgtcagagaaactcaccgagtcagagtcaggagatgcactgcagatgaaaaagctggaagatgggtctttggagaagggcgctactgccgtacctggaggcccatctcaggtcgatgaagagttccactacatccacggctggcggcttcacgctgcaacaatatcattgggacttgcattgtttttagtgaactttgagatcaccattgtcagcacggcattggtgtccatcgccgatgaccttcacgggtacagcaaggaaagctgggttgtaacagcatatctcatcacatatacagccggacttgttattctcgcgaagttgagtgatcattttggaagaaaaaatgtatatcttgcaacactactattcttcgccgcattttcgggcggctgtggcggtgcccagacaatggtgcaactcatcattttccgtgccttccaaggacttggtggaggtggcgtgtatgctgtggctcttgtaatgctctacgagctggtgccaaaaactaaatatccgctatacacagccatctcaacctgccttgtggcactgggaaacgctcttggtcccattttcggcggtctaattgccgatggaacaacatggagatgggtgttcttactgaatattccagccagtgccttgattgctgcgctcgtcgtgttcacggttcctgggaattttccgtaccaaggcctcgatccgcacaagcaaagaccgcgcacccagcttaaagagatcgatttcactggtgccttcttgatgcttctggctttcgcacttctgattgctggatttgaaaacgccgcctcccaactatcgtggaccactgcggacttcatcgcattagtggtggtatctgccttcgtttgggtgttgttctttattagccaatggtggttcacgaaccgccagacggtcgtgcaccctatatttccctggcgatttgcgcagagccggatgataactggtcttttactcaactcttttttcacaggagctgtgagtatcacgtgcatcattcagttcccgattcgttatcaaaccaccataggagccaatcccttcgaggctggtgttcggcttcttgcattcagcttttttgggcccttcggcgcaattttgatagccgttctgtgtggaaagcggcgtctgcctcctttgtatgttggacttttcggtgtccttatccaaattgtcggactagtgtttctctcgatggcaccgcgagacacgccggattggaagcctttatatggtcttcaggtcattgtcggattgggcatgggatgcaatatcgggttggttgcgcttttgacccctttcgttgttgaacgacgggatttggcggtggcttcggcagcgggaacacagtttcgttttctcgggagtgcaatagtggtatctttgaccaccgctgtcgggaatgggtggattagggatacactttctgatactttgacgtcagcgcagatccagggaatcttcagatcaacatctaccattaaggatctgccagccgatttggagcaagaggtccgaagagactttgtgacaagcttcaatctcgagatgcacatcgtcctcggtttcgcggtcgctgccgtgttcagtatagcgctcttgtggaggaagaaccaaatcagagtcgactaa

SEQ ID NO: 36518 - protein, 572 aa, Muscodor strobelii
  misc_feature: SGI Peptide ID NO. 572660
  misc_feature (76)..(489): Pfam Id: PF07690 Pfam Desc: Major Facilitator Superfamily
  misc_feature (76)..(287): Pfam Id: PF07690 Pfam Desc: Major Facilitator Superfamily
  misc_feature (295)..(489): Pfam Id: PF07690 Pfam Desc: Major Facilitator Superfamily
  misc_feature (108)..(179): Pfam Id: PF00083 Pfam Desc: Sugar (and other) transporter
  misc_feature (75)..(572): NCBI GI: 212533541 Blast Desc: multidrug resistance protein fnx1, [Penicillium marneffei ATCC 18224] gi|210072291|gb|EEA26380.1| multidrug resistance protein fnx1, [Penicillium marneffei ATCC 18224]
  misc_feature (128)..(571): NCBI GI: 242810792 Blast Desc: efflux pump antibiotic resistance protein, [Talaromyces stipitatus ATCC 10500] gi|218716280|gb|EED15702.1| efflux pump antibiotic resistance protein, [Talaromyces ATCC
  misc_feature (11)..(473): NCBI GI: 240278164 Blast Desc: MFS multidrug transporter [Ajellomyces capsulatus H143]
  misc_feature (11)..(481): NCBI GI: 225557520 Blast Desc: drug resistance transporter [Ajellomyces capsulatus G186AR]
  misc_feature (21)..(566): NCBI GI: 242773497 Blast Desc: efflux pump antibiotic resistance protein, [Talaromyces stipitatus ATCC 10500] gi|218721871|gb|EED21289.1| efflux pump antibiotic resistance protein, [Talaromyces ATCC
  misc_feature (40)..(570): NCBI GI: 169769094 Blast Desc: [Aspergillus oryzae RIB40] gi|83766875|dbj|BAE57015.1| protein product [Aspergillus oryzae]
  misc_feature (15)..(568): NCBI GI: 255932603 Blast Desc: Pc12g10360 [Penicillium chrysogenum Wisconsin 54-1255] gi|211582477|emb|CAP80663.1| Pc12g10360 [Penicillium chrysogenum Wisconsin 54-1255]
  misc_feature (24)..(571): NCBI GI: 156060439 Blast Desc: SS1G_02358 [Sclerotinia sclerotiorum 1980] gi|154699766|gb|EDN99504.1| SS1G_02358 [Sclerotinia sclerotiorum 1980]
  misc_feature (35)..(566): NCBI GI: 169772129 Blast Desc: [Aspergillus oryzae RIB40] gi|83768393|dbj|BAE58532.1| protein product [Aspergillus oryzae]
  misc_feature (63)..(571): NCBI GI: 145259389 Blast Desc: An04g10000 [Aspergillus niger] gi|134074979|emb|CAK39059.1| protein product [Aspergillus niger]
MASLEATTTPELTQNGKMHSSEKLTESESGDALQMKKLEDGSLEKGATAVPGGPSQVDEEFHYIHGWRLHAATISLGLALFLVNFEITIVSTALVSIADDLHGYSKESWVVTAYLITYTAGLVILAKLSDHFGRKNVYLATLLFFAAFSGGCGGAQTMVQLIIFRAFQGLGGGGVYAVALVMLYELVPKTKYPLYTAISTCLVALGNALGPIFGGLIADGTTWRWVFLLNIPASALIAALVVFTVPGNFPYQGLDPHKQRPRTQLKEIDFTGAFLMLLAFALLIAGFENAASQLSWTTADFIALVVVSAFVWVLFFISQWWFTNRQTVVHPIFPWRFAQSRMITGLLLNSFFTGAVSITCIIQFPIRYQTTIGANPFEAGVRLLAFSFFGPFGAILIAVLCGKRRLPPLYVGLFGVLIQIVGLVFLSMAPRDTPDWKPLYGLQVIVGLGMGCNIGLVALLTPFVVERRDLAVASAAGTQFRFLGSAIVVSLTTAVGNGWIRDTLSDTLTSAQIQGIFRSTSTIKDLPADLEQEVRRDFVTSFNLEMHIVLGFAVAAVFSIALLWRKNQIRVD

SEQ ID NO: 36519 - DNA, 1207 bp, Muscodor strobelii
  misc_feature: SGI EST ID NO. CUFF.87070.2
  misc_feature: Variant of the nucleotide sequence at SEQ ID NO 36517
ttggcatacctaacaatggcgatcttcaacattccctcactagcaaggtgaattaccgggcgtgcagcgtgtagatctgtaacgcaatgtcagcagttggcatatcttcgtatatttgatttgcacatatcggggggtgatcatcaattgccattctagattgcgggtaggatacctaacttatctgctcttaagagcaaaatccgaaaatcgcaacgtaacagtcgaggctggcgctcgacgcttcgcgatttcatgatggcttcccttgaggctacaacaactcctgagctcactcagaatgggaagatgcattcgtcagagaaactcaccgagtcagagtcaggagatgcactgcagatgaaaaagctggaagatgggtctttggagaagggcgctactgccgtacctggaggcccatctcaggtcgatgaagagttccactacatccacggctggcggcttcacgctgcaacaatatcattgggacttgcattgtttttagtgaactttgagatcaccattgtcagcacggcattggtgtccatcgccgatgaccttcacgggtacagcaaggaaagctgggttgtaacagcatatctcatcacatatacagccggacttgttattctcgcgaagttgagtgatcattttggaagaaaaaatgtatatcttgcaacactactattcttcgccgcattttcgggcggctgtggcggtgcccagacaatggtgcaactcatcattttccgtgccttccaaggacttggtggaggtggcgtgtatgctgtggctcttgtaatgctctacgagctggtgccaaaaactaaatatccgctatacacagccatctcaacctgccttgtggcactgggaaacgctcttggtcccattttcggcggtctaattgccgatggaacaacatggagatgggtgttcttactgaatattccagccagtgccttgattgctgcgctcgtcgtgttcacggttcctgggaattttccgtaccaaggcctcgatccgcacaagcaaagaccgcgcacccagcttaaagagatcgatttcactggtgccttcttgatgcttctggctttcgcacttctgattgctggatttgaaaacgccgcctcccaactatcgtggaccactgcggacttcatcgcattagtggtggtatctgccttcgtttgggtgttgttcttta

SEQ ID NO: 36520 - DNA, 1260 bp, Muscodor strobelii
  misc_feature: SGI cDNA ID NO. 572661
  misc_feature: Encodes the peptide sequence at SEQ ID NO 36521
atgtccgacctcgatttctcccatttatcgccagaagaacttcagaacgcacttgcagccccggcactcacaccgcccgacggtgtgacaccgaacttcgatgatccgccgaacttgaacggcgtctcactcgccgggctccttgtgtgtttgatactggctaccgtattcttgttcatcaggatatatgtcaaattctggaagttgagacaatggcatattgccgactttttaatgatcgttgcatatgcattttatttagtagtcttaataggatcagtccttcgtgtgataccaggctccgacattgggcttttcgttcaccaatggaacgtccgaggcgaagctatccacgtctatctctttaaaatctttattggaatcgaattttggctaggcgcaattctcctcgtcaaagccgcgatccttcttgaatggcttcgcatttttgccccgacgcgcagccagccgttcactctaagctgcaaacttctgatcgctatcagtgttgttttctactctgcagcaatcataactttgaacgttacttgtcgacctttccaaaagacttgggacaagacgctggatggacaatgcatagatattaagaagattcatttcggcgcagtaatcgtcaacctccttctcgatttcgctatcctcattctaccccaaccggtaatatggaacttacaaatgacaaccgcgaagaagattggggtgtcaacggtcttcgcgatcggtattctagccatcatcgcagcaggctttctcatacagtccgtcgcggactggatacagacggacgatatggtctattactactctgctgtagctttgtggggcattgcagagatcacctgcggtattttagtgttttgtgtaccctttaccccaaggttgtttcgcggcctgggcttgtccagttggcttgttagcaacattcctgagcaactatcgtcgattcgcgcaccggaatggctccaaaagacgatagatagcgatcgacagtcgcgttcaagaatcacacgagactaccatgaacttgatgaagctggaaatctgagaggatatggttcaccaagacctacggatcggcaatacgggattgcagttaccacagacatcgtagtaacggagacgttcgagccgccttacgacaaattagaagacagtcaacatccgtggattgcacaggcggcgcaacatcagaaaccccaatggcgaacaggtgcatcagaaacgacaccaccggcctga

SEQ ID NO: 36521 - protein, 419 aa, Muscodor strobelii
  misc_feature: SGI Peptide ID NO. 572661
  misc_feature (18)..(396): NCBI GI: 46118221 Blast Desc: FG04693.1 [Gibberella zeae PH-1]
  misc_feature (9)..(379): NCBI GI: 256731204 Blast Desc: NECHADRAFT_85215 [Nectria haematococca mpVI 77-13-4]
  misc_feature (18)..(381): NCBI GI: 256727941 Blast Desc: NECHADRAFT_26479 [Nectria haematococca mpVI 77-13-4]
  misc_feature (9)..(396): NCBI GI: 169781106 Blast Desc: [Aspergillus oryzae RIB40] gi|83773758|dbj|BAE63883.1| protein product [Aspergillus oryzae]
  misc_feature (9)..(396): NCBI GI: 238500906 Blast Desc: conserved [Aspergillus flavus NRRL3357] gi|220691924|gb|EED48271.1| conserved [Aspergillus flavus NRRL3357]
  misc_feature (11)..(411): NCBI GI: 145607555 Blast Desc: MGG_04339 [Magnaporthe grisea 70-15] gi|145015080|gb|EDJ99648.1| MGG_04339 [Magnaporthe grisea 70-15]
  misc_feature (18)..(351): NCBI GI: 212534224 Blast Desc: conserved [Penicillium marneffei ATCC 18224] gi|210069667|gb|EEA23757.1| conserved [Penicillium marneffei ATCC 18224]
  misc_feature (104)..(399): NCBI GI: 238505010 Blast Desc: conserved [Aspergillus flavus NRRL3357] gi|220689848|gb|EED46198.1| conserved [Aspergillus flavus NRRL3357]
  misc_feature (79)..(307): NCBI GI: 145248463 Blast Desc: An13g03450 [Aspergillus niger] gi|134081233|emb|CAK41741.1| protein product [Aspergillus niger]
  misc_feature (53)..(359): NCBI GI: 67541837 Blast Desc: AN7082.2 [Aspergillus nidulans FGSC A4] gi|40742021|gb|EAA61211.1| AN7082.2 [Aspergillus nidulans FGSC A4]
MSDLDFSHLSPEELQNALAAPALTPPDGVTPNFDDPPNLNGVSLAGLLVCLILATVFLFIRIYVKFWKLRQWHIADFLMIVAYAFYLVVLIGSVLRVIPGSDIGLFVHQWNVRGEAIHVYLFKIFIGIEFWLGAILLVKAAILLEWLRIFAPTRSQPFTLSCKLLIAISVVFYSAAIITLNVTCRPFQKTWDKTLDGQCIDIKKIHFGAVIVNLLLDFAILILPQPVIWNLQMTTAKKIGVSTVFAIGILAIIAAGFLIQSVADWIQTDDMVYYYSAVALWGIAEITCGILVFCVPFTPRLFRGLGLSSWLVSNIPEQLSSIRAPEWLQKTIDSDRQSRSRITRDYHELDEAGNLRGYGSPRPTDRQYGIAVTTDIVVTETFEPPYDKLEDSQHPWIAQAAQHQKPQWRTGASETTPPA

SEQ ID NO: 36522 - DNA, 1279 bp, Muscodor strobelii
  misc_feature: SGI EST ID NO. CUFF.87060.0
  misc_feature: Variant of the nucleotide sequence at SEQ ID NO 36520
tccgaggcgaagctatccacgtctatctctttgttcgtagaagtattcctgaactaatggtatatgttctaacttgttcttagaaaatctttattggaatcgaattttggctaggcgcaattctcctcgtcaaagccgcgatccttcttgaatggcttcgcatttttgccccgacgcgcagccagccgttcactctaagctgcaaacttctgatcgctatcagtgttgttttctactctgcagcaatcataactttgaacgttacttgtcgacctttccaaaagacttgggacaagacgctggatggacaatgcatagatattaagaagattcatttcggcgcagtaatcgtcaacctccttctcgatttcgctatcctcattctaccccaaccggtaatatggaacttacaaatgacaaccgcgaagaagattggggtgtcaacggtcttcgcgatcggtattctagccatcatcgcagcaggctttctcatacagtccgtcgcggactggatacagacggacgatatggtctattactactctgctgtagctttgtggggcattgcagagatcacctgcggtattttagtgttttgtgtaccctttaccccaaggttgtttcgcggcctgggcttgtccagttggcttgttagcaacattcctgagcaactatcgtcgattcgcgcaccggaatggctccaaaagacgatagatagcgatcgacagtcgcgttcaagaatcacacgagactaccatgaacttgatgaagctggaaatctgagaggatatggttcaccaagacctacggatcggcaatacgggattgcagttaccacagacatcgtagtaacggagacgttcgagccgccttacgacaaattagaagacagtcaacatccgtggattgcacaggcggcgcaacatcagaaaccccaatggcgaacaggtgcatcagaaacgacaccaccggcctgagacggttgcagtcttaatcactgtatatacacatttcaccgagtagaaagaagaaaaaaacttatcaaacaagattgatgcagcatccgaatcagcagcaatcttgaccaacgaagcgaaacatctcagcgttgcacgtaagttcattgcatatgttgtgtattaacttcccacagcttcgtagaatcttacgctaagagcattttaccgcacgatcattcctggcaacccggccaaataaattaatgggttgtgccgcctgtttaaaatgattagagaacaacagtcaagcccaaatttcg

SEQ ID NO: 36523 - DNA, 471 bp, Muscodor strobelii
  misc_feature: SGI cDNA ID NO. 572662
  misc_feature: Encodes the peptide sequence at SEQ ID NO 36524
atgtactttgactttacggccaatcgcctaggcgagcctaccgacgcagtttttgatgactgggacggcgtcgaggaatccaccactatgcccgacgaggcatcccatcgtaatgtcgatgagatcgtattcgaatgcggcaaaaagcctgctcactctgtgcgtgcggtgttggtctacccgcctactatttatgtctatatctacgatctgtcacaggcatatctactgttggccgacgccgctgcatcaaagaatccgttgcccgagatttggggtacgcgagaccgctactttacggagaacgaagagcacgtctggtggcttcgaacgcacatgaaatgggccttctataaagagagggaagggagacccaaggatgtaaaactcggcagaaaagaggccctcaaatattctggaggagataccggagaatctctcgaggtggaggcgaagagcttcggtctgtaa

SEQ ID NO: 36524 - protein, 156 aa, Muscodor strobelii
  misc_feature: SGI Peptide ID NO. 572662
  misc_feature (2)..(107): NCBI GI: 145250967 Blast Desc: An15g04620 [Aspergillus niger] gi|134082524|emb|CAK42440.1| protein product [Aspergillus niger]
  misc_feature (2)..(107): NCBI GI: 242783706 Blast Desc: nucleoside-diphosphate-sugar epimerase, [Talaromyces stipitatus ATCC 10500] gi|218720387|gb|EED19806.1| nucleoside-diphosphate-sugar epimerase, [Talaromyces stipitatus
  misc_feature (2)..(107): NCBI GI: 169786355 Blast Desc: [Aspergillus oryzae RIB40] gi|238507361|ref|XP_002384882.1| conserved [Aspergillus flavus NRRL3357] gi|83776386|dbj|BAE66505.1| protein product oryzae]
  misc_feature (10)..(107): NCBI GI: 115401594 Blast Desc: conserved [Aspergillus terreus NIH2624] gi|114190326|gb|EAU32026.1| conserved [Aspergillus terreus NIH2624]
  misc_feature (2)..(107): NCBI GI: 67904002 Blast Desc: AN8988.2 [Aspergillus nidulans FGSC A4] gi|40745164|gb|EAA64320.1| AN8988.2 [Aspergillus nidulans FGSC A4] gi|259486562|tpe|CBF84510.1| TPA: conserved [Aspergillus FGSC
  misc_feature (8)..(107): NCBI GI: 169597447 Blast Desc: SNOG_01509 [Phaeosphaeria nodorum SN15] gi|160707523|gb|EAT91158.2| SNOG_01509 [Phaeosphaeria nodorum SN15]
  misc_feature (4)..(107): NCBI GI: 226278304 Blast Desc: conserved [Paracoccidioides brasiliensis Pb01]
  misc_feature (2)..(107): NCBI GI: 145230710 Blast Desc: An01g12110 [Aspergillus niger] gi|134055738|emb|CAK44111.1| protein product [Aspergillus niger]
  misc_feature (4)..(107): NCBI GI: 226291132 Blast Desc: conserved [Paracoccidioides brasiliensis Pb18]
  misc_feature (4)..(107): NCBI GI: 225679407 Blast Desc: conserved [Paracoccidioides brasiliensis Pb03]
MYFDFTANRLGEPTDAVFDDWDGVEESTTMPDEASHRNVDEIVFECGKKPAHSVRAVLVYPPTIYVYIYDLSQAYLLLADAAASKNPLPEIWGTRDRYFTENEEHVWWLRTHMKWAFYKEREGRPKDVKLGRKEALKYSGGDTGESLEVEAKSFGL

SEQ ID NO: 36525 - DNA, 984 bp, Muscodor strobelii
  misc_feature: SGI cDNA ID NO. 572663
  misc_feature: Reduced expression when VOC is produced
  misc_feature: Encodes the peptide sequence at SEQ ID NO 36526
atggctctccacaaccccaacaactggcattgggtcaccaagaacgccggacagtgggcccaggactggttcgaggagaacctgatcaagctgtctgccgaagatggagacgttactgcaaaggtcagcaaggtgcgcagcatggacggcgacgtggatgtaagccaacggaaaggaaaagtcatcaccatcttcgacgtgaagctggtcctcgaatactctggatccgcacccgaggctgaggatgtgacggggaccatcacggtgcccgaggtagcccatgataccgaggaagacgaatatgtcttcgacatcgatatccactccgagtcgaaagagaagcagcccgtgaaagacttggttcgggccaagcttgtaccacaactgcgagccgagttccagaagctcgctcctgccctgatcaaggagcatggcaaggacatccaacacgctgccggttcgaacccatcttccggtttctctactccaaagtatcacacaccttccggagctcaacccaacaaggccgctccggctgccagcactcagaataacgccggcagcactgtcaataccactaccctgtccgagcaggaagaattccggactaccgctgccgagctctaccagacttttaccgacccgcaaagactggctgccttcacccgcgcaccgcctaagaaattcgacggtgcgaaggtaggcggtgcctgggagctcttcgatggcaacgtggctggtgaatacaaggaactcagcgaacccaccaagattgtccagagctggcgcttgaagcagtggcccgcgggtcacttctcccagcaggtgatcaacttcgaccaaaacgacgtcgatggcgtaacagtcatgcgcgtcgaatggactggtgttcccactggtcaagaagaagttaccaagcgcaactgggacgagtactatatcagatctatcaagaagactttcggatttggcacaatcctatag

SEQ ID NO: 36526 - protein, 327 aa, Muscodor strobelii
  misc_feature: SGI Peptide ID NO. 572663
  misc_feature (13)..(146): Pfam Id: PF09229 Pfam Desc: Activator of Hsp90 ATPase, N-terminal
  misc_feature (202)..(262): Pfam Id: PF08327 Pfam Desc: Activator of Hsp90 ATPase homolog 1-like protein
  misc_feature (1)..(327): NCBI GI: 261359638 Blast Desc: Hsp90 co-chaperone AHA1 [Verticillium albo-atrum VaMs.102]
  misc_feature (1)..(327): NCBI GI: 145610911 Blast Desc: MGG_00814 [Magnaporthe grisea 70-15] gi|145018249|gb|EDK02528.1| MGG_00814 [Magnaporthe grisea 70-15]
  misc_feature (1)..(327): NCBI GI: 256727131 Blast Desc: [Nectria haematococca mpVI 77-13-4]
  misc_feature (1)..(327): NCBI GI: 46136039 Blast Desc: FG09535.1 [Gibberella zeae PH-1]
  misc_feature (1)..(327): NCBI GI: 171682576 Blast Desc: protein product [Podospora anserina] gi|170941247|emb|CAP66897.1| protein product [Podospora anserina]
  misc_feature (1)..(327): NCBI GI: 85077937 Blast Desc: NCU04087 [Neurospora crassa OR74A] gi|28917128|gb|EAA26847.1| NCU04087 [Neurospora crassa OR74A]
  misc_feature (1)..(327): NCBI GI: 169771433 Blast Desc: [Aspergillus oryzae RIB40] gi|83768045|dbj|BAE58184.1| protein product [Aspergillus oryzae]
  misc_feature (1)..(327): NCBI GI: 156042195 Blast Desc: SS1G_11648 [Sclerotinia sclerotiorum 1980] gi|154696031|gb|EDN95769.1| SS1G_11648 [Sclerotinia sclerotiorum 1980]
  misc_feature (1)..(323): NCBI GI: 238486012 Blast Desc: Aha1 domain family [Aspergillus flavus NRRL3357] gi|220699123|gb|EED55462.1| Aha1 domain family [Aspergillus flavus NRRL3357]
  misc_feature (1)..(327): NCBI GI: 154298539 Blast Desc: BC1G_11454 [Botryotinia fuckeliana B05.10] gi|150858050|gb|EDN33242.1| BC1G_11454 [Botryotinia fuckeliana B05.10]
  misc_feature: Useful for introducing or modulating the production of volatile compounds
MALHNPNNWHWVTKNAGQWAQDWFEENLIKLSAEDGDVTAKVSKVRSMDGDVDVSQRKGKVITIFDVKLVLEYSGSAPEAEDVTGTITVPEVAHDTEEDEYVFDIDIHSESKEKQPVKDLVRAKLVPQLRAEFQKLAPALIKEHGKDIQHAAGSNPSSGFSTPKYHTPSGAQPNKAAPAASTQNNAGSTVNTTTLSEQEEFRTTAAELYQTFTDPQRLAAFTRAPPKKFDGAKVGGAWELFDGNVAGEYKELSEPTKIVQSWRLKQWPAGHFSQQVINFDQNDVDGVTVMRVEWTGVPTGQEEVTKRNWDEYYIRSIKKTFGFGTIL

SEQ ID NO: 36527 - DNA, 2069 bp, Muscodor strobelii
  misc_feature: SGI EST ID NO. CUFF.87181.0
  misc_feature: Variant of the nucleotide sequence at SEQ ID NO 36525
tagcggggcagggcaaagagaggggcgcggtgggaaggtgcaggaaaagttcaccttggaatttctagagctttcggtggttcattcctcgcctttttcatcagcaacgggagacgtccggcttgccatgcggacagccctctctccaacctccgtcaccacgctcgcgttcggatgatcattgaatagcagctccgtaccacctcgtcccgtccatctgtcattaattgcattgcatcctctcagagtatctctccaccaacatcgtcatagctcccccaacgtcgcgatggctctccacaaccccaacaactggcattgggtcaccaagaacgccggacagtgggcccaggactggttcgaggagaacctgatcaagctgtctgccgaagatggagacgttactgcaaaggtcagcaaggtgcgcagcatggacggcgacgtggatgtaagccaacggaaaggaaaagtcatcaccatcttcgacgtgaagctggtcctcgaatactctggatccgcacccgaggctgaggatgtgacggggaccatcacggtgcccgaggtagcccatgataccgaggaagacgaatatgtcttcgacatcgatatccactccgagtcgaaagagaagcagcccgtgaaagacttggttcgggccaagcttgtaccacaactgcgagccgagttccagaagctcgctcctgccctgatcaaggagcatggcaaggacatccaacacgctgccggttcgaacccatcttccggtttctctactccaaagtatcacacaccttccggagctcaacccaacaaggccgctccggctgccagcactcagaataacgccggcagcactgtcaataccactaccctgtccgagcaggaagaattccggactaccgctgccgagctctaccagacttttaccgacccgcaaagactggctgccttcacccgcgcaccgcctaagaaattcgacggtgcgaaggtaggcggtgcctgggagctcttcgatggcaacgtggctggtgaatacaaggaactcagcgaacccaccaagattgtccagagctggcgcttgaagcagtggcccgcgggtcacttctcccagcaggtgatcaacttcgaccaaaacgacgtcgatggcgtaacagtcatgcgcgtcgaatggactggtgttcccactggtcaagaagaagttaccaagcgcaactgggacgagtactatatcagatctatcaagaagactttcggatttggcacaatcctatagaggcttactgatctggtgcatcgcggcgtttttgggcttccggcgcatttgaagaggcatctggaagaactggcttcgttgggcgttttcgttccgagagtgataaaacaccaatatgagatataggatacagcgtgtttagcgcgagctttaagtgaccacgaagagatagcctgaatgaatgaataaatgaatgcacaatgaaccacgcttcgctgatcatcccttgctggtctaagttattcattgatattggatgttctatcgatgtttgttgcgaatgatcgatgcagacaatgtcacgagagccacataataccgtctcaagtttcacccatcaagattccaaagtcgcctcatcggagttatccagacagacacgagccacgagtggtggatttagacctctatagagagctgatctaccttcggctatatataggccgtagtatctccctcccataacatttgtgtgaaacaaccatcccattttctactttctaccgagcttgaatcgacgctaccagagttcccatatgatcaatccgcctctcacatacaagcgagatcgatctaacgactactgtgcaggtctatctcaaacttctttctcatcgtgtataccgacgacttgtccactactggtgacctcgaccttaacctttgtcgtgctagccttgcgtgggttaggagcctcgaagatctcgctgagctcttctaaagtctttccggcggtctcgacgaagaagaaatatatcaggacgatctcgatgacgatccagatgatgtatacgat

SEQ ID NO: 36528 - DNA, 1548 bp, Muscodor strobelii
  misc_feature: SGI cDNA ID NO. 572664
  misc_feature: Elevated expression when VOC is produced
  misc_feature: Encodes the peptide sequence at SEQ ID NO 36529
atggcggacagcaaagacgaggggctcaaaccctccatttccgtacacgatgaggtcaaaggcgacacgcacgagatttcaacggcatcggctgccttggcttctgctgtcctcgagcagaagccgaaactcctgtctcctaacatgctcaggctgtatgccattatggctgttagctatcttgtgtccaccatgaacggatttgacagttccctaatgggtgcaattaacgcgatggaaccgtatcagaaaacgttcgggctgagcggagcaggttcaagtaccggcgtcgttttcatcatatatcagatcggtcaaattgcgagctttcctttctgtggcttcttcgcagacggctacggtcgacgatggtgcatcttcatcggttgtctgattgtattagtcggcactgctattcagacgaccgccaacgaacttccccagtttatcagcggccgcttcgtacttggctttggcgcctctattgcttctgcggcaggacctgcctatacagtcgagttagctcatcccgcatatcgagggaccatggctggcatgtacaacaatttctggtggttaggaaatatccttgcaggttggacgacttatggaacgaatctgaacatcaaatcgtcatgggcatggcgtgctccaacagtggtgcaagctggtctgccagctgttgttctcgtcgtcgttctgttcctacctgaaagccctagatggctcatctacaatgatagagcagaggaagccctcgctattttcgccaagtatcacggagatggggatgcgaattcccctctagtccagctgcaatatcgcgaggttgttgaggaataccaagcgacaaagagtgagaacccctggtggaacttcaaggagcttgtccacactcgagctgctcgctatcgattggcgatggtgatcggaatgtcgttcttcggtcaatggagtggcaacaatgtcgtatcttacttcttgcccgagatggtaaaagccgccggaataaccaacacaaacacacaacttctcatcaacgccatcaacccaatcttctccatcatcgcggccgtatacggcgcaacttgtctcgacaaactaggtcgacgacccatgatgttagccggtctagcaggctcactcctcttctacatcctcctgacaatcttcacggcgcaaactgcgtaccatccaaatctctcttatggcaccatcgtgtctatttatctgtttggtattgcctttgcttggggattcacacccctacagacgctgtatgccgtcgagtgtcttgagaatcgtacgagggcaaagggctctggtctgaattatctgttcttgaatgtcgctattattgtcaatacgtatggtattagcgttggtattggggttattgggtggagattatatgtacgtaccttacacacgccgaaaaactatctgccgcttcatccctcctgcgctccttactatctcatttcaattcatgctaaccagattcctagatcgtatacatcatctggatcgtcatcgagatcgtcctga

SEQ ID NO: 36529 - protein, 515 aa, Muscodor strobelii
  misc_feature: SGI Peptide ID NO. 572664
  misc_feature (52)..(456): Pfam Id: PF07690 Pfam Desc: Major Facilitator Superfamily
  misc_feature (55)..(481): Pfam Id: PF00083 Pfam Desc: Sugar (and other) transporter
  misc_feature (55)..(445): Pfam Id: PF00083 Pfam Desc: Sugar (and other) transporter
  misc_feature (17)..(472): NCBI GI: 261360005 Blast Desc: lactose permease [Verticillium albo-atrum VaMs.102]
  misc_feature (17)..(472): NCBI GI: 154313647 Blast Desc: BC1G_05673 [Botryotinia fuckeliana B05.10] gi|150849255|gb|EDN24448.1| BC1G_05673 [Botryotinia fuckeliana B05.10]
  misc_feature (1)..(472): NCBI GI: 189193921 Blast Desc: lactose permease [Pyrenophora tritici-repentis Pt-1C-BFP] gi|187978863|gb|EDU45489.1| lactose permease [Pyrenophora tritici-repentis Pt-1C-BFP]
  misc_feature (10)..(472): NCBI GI: 39975537 Blast Desc: MGG_00085 [Magnaporthe grisea 70-15] gi|145019077|gb|EDK03356.1| MGG_00085 [Magnaporthe grisea 70-15]
  misc_feature (1)..(472): NCBI GI: 169601370 Blast Desc: SNOG_03549 [Phaeosphaeria nodorum SN15] gi|111067634|gb|EAT88754.1| SNOG_03549 [Phaeosphaeria nodorum SN15]
  misc_feature (16)..(472): NCBI GI: 256730163 Blast Desc: NECHADRAFT_82878 [Nectria haematococca mpVI 77-13-4]
  misc_feature (1)..(471): NCBI GI: 238503738 Blast Desc: MFS lactose permease, [Aspergillus flavus NRRL3357] gi|220690572|gb|EED46921.1| MFS lactose permease, [Aspergillus flavus NRRL3357]
  misc_feature (22)..(472): NCBI GI: 70984769 Blast Desc: MFS lactose permease [Aspergillus fumigatus Af293] gi|66845518|gb|EAL85853.1| MFS lactose permease, [Aspergillus fumigatus Af293]
  misc_feature (22)..(472): NCBI GI: 159122675 Blast Desc: MFS lactose permease, [Aspergillus fumigatus A1163]
  misc_feature (22)..(471): NCBI GI: 121704172 Blast Desc: MFS lactose permease, [Aspergillus clavatus NRRL 1] gi|119398494|gb|EAW08924.1| MFS lactose permease, [Aspergillus clavatus NRRL 1]
  misc_feature: Useful for introducing or modulating the production of volatile compounds
MADSKDEGLKPSISVHDEVKGDTHEISTASAALASAVLEQKPKLLSPNMLRLYAIMAVSYLVSTMNGFDSSLMGAINAMEPYQKTFGLSGAGSSTGVVFIIYQIGQIASFPFCGFFADGYGRRWCIFIGCLIVLVGTAIQTTANELPQFISGRFVLGFGASIASAAGPAYTVELAHPAYRGTMAGMYNNFWWLGNILAGWTTYGTNLNIKSSWAWRAPTVVQAGLPAVVLVVVLFLPESPRWLIYNDRAEEALAIFAKYHGDGDANSPLVQLQYREVVEEYQATKSENPWWNFKELVHTRAARYRLAMVIGMSFFGQWSGNNVVSYFLPEMVKAAGITNTNTQLLINAINPIFSIIAAVYGATCLDKLGRRPMMLAGLAGSLLFYILLTIFTAQTAYHPNLSYGTIVSIYLFGIAFAWGFTPLQTLYAVECLENRTRAKGSGLNYLFLNVAIIVNTYGISVGIGVIGWRLYVRTLHTPKNYLPLHPSCAPYYLISIHANQIPRSYTSSGSSSRSS

SEQ ID NO: 36530 - DNA, 742 bp, Muscodor strobelii
  misc_feature: SGI EST ID NO. CUFF.87185.1
  misc_feature: Variant of the nucleotide sequence at SEQ ID NO 36528
aagctggtctgccagctgttgttctcgtcgtcgttctgttcctacctgaaagccctagatggctcatctacaatgatagagcagaggaagccctcgctattttcgccaagtatcacggagatggggatgcgaattcccctctagtccagctgcaatatcgcgaggttgttgaggaataccaagcgacaaagagtgagaacccctggtggaacttcaaggagcttgtccacactcgagctgctcgctatcgattggcgatggtgatcggaatgtcgttcttcggtcaatggagtggcaacaatgtcgtatcttacttcttgcccgagatggtaaaagccgccggaataaccaacacaaacacacaacttctcatcaacgccatcaacccaatcttctccatcatcgcggccgtatacggcgcaacttgtctcgacaaactaggtcgacgacccatgatgttagccggtctagcaggctcactcctcttctacatcctcctgacaatcttcacggcgcaaactgcgtaccatccaaatctctcttatggcaccatcgtgtctatttatctgtttggtattgcctttgcttggggattcacacccctacagacgctgtatgccgtcgagtgtcttgagaatcgtacgagggcaaagggctctggtctgaattatctgttcttgaatgtcgctattattgtcaatacgtatggtattagcgttggtattggggttattgggtggag

SEQ ID NO: 36531 - DNA, 3195 bp, Muscodor strobelii
  misc_feature: SGI cDNA ID NO. 572665
  misc_feature: Encodes the peptide sequence at SEQ ID NO 36532
atgtcggaatatacaaagcgagctaatatgaccggccaagaggcgaaagatatggtcatccgccagaacgcaagactccgtatgaacttagagatcactgcctctgatctgtgcacagagtcgtcgaaaggagctgttgtggctgccagcgaagtccaaccggatcacttaccagactggagtaatctccaggtcctccatcgtaacactcttccgcctcgtagtcactttcatctttatgattccgaagccctcgccttatccggagatgtcgccaaatcccgagctgccctactgtcaggcacttggggatttcatatatctccaagccctttttcaggtcccactgatttctatgagcccgaatttgactactgcaagtggaagttgattgacgttccggggatgtggcagcgccagggctttggaaaaggcccacaatacactaatgtcgactacccatttcccgtgaacccacctcatgttccgtacgatgacaatgaatgtgggcggtacgtgagcaacttcgttgtccccgatagcttgaaagatgggagccaatggagacttcggttcgaaggtgttgacgctgctttcacggtatggatcaacggtcaagaggtcggttactcgcaaggctcgcgaaaccccagcgaattcgatgtatcgaaattcctacggttagatgatgaaaacactctgtgcgtggaagtctatcagcgctgtgacggaagttacattgaggatcaagaccaatggtggctaagtggaatattcagagatgtctggctgcactcatttccatcagtccatgtagaagactttcacatacagaccctcctagatgatgactatcaagatgccgatcttgtggtgaagatgaagcttagtagctcggatgtggcagtcgcagtcactctactcgacatggaaggcaacgttgtcattaagaaatctcaaaagttcaatggagactcaggagagttcaaggaccatgtgactaagcctgagaaatggacagcagagacaccttatctatatacgctgattctctgcgtagaaggtgttttcatcgcacagaaagtcgggtttcgccggacagcgctcataaaaggtgttttctgtgtgaacggaaatccaatcaagatccggggagtcaatcggcacgaacatagcgccgagtccggaagagctgtgccgtacacgttgctccgacaagatcttgcaacgatgaaagtgtttggaattaacgcgatccgtacctgccattacatcaacgatgcgaggttctatgacttagcagatgcgatgggattctgggtcttagatgaagctgacctggaatgccatgggtttgagaaagtcggcggcgaccctgcgagctacacttcggataatcccgagtggcgagaggcatacattgatcgtgcacgacagatggttatgcgtgataaaaaccatccttcagtgattatctggtcactcgggaacgaggcattctacgggcagaatcatcaggctatgtatgatgaaattaagaaggttgactcaacgcgactcattcactacgagccagatcagaaggcacaaacggtagacatgttcagtcggatgtacgccccggttgatcaaatgatcaaatatgccgaggaaaaagaatgggacaagccatttgtcatgtgcgagttcatacatgccatgggtaatggcccagggaacatccaagagtacatcgaagcattctacaaatatccaagactgatgggcggcttcgtttgggaatgggcgaatcatggtctcctcacagagaccaaagacggagagaagtactttggctatggcggagacttcggtgacgagccgaatgactacaatttcgtcatggatggactttgcgactctcggcacattccaggacccggcctgaatgagtacagcaaagcgattgagcctgtacaagtactcggcttcgatgggtctacggtgcggattgtcaatcgatatgactttctcacattagatcatctacaatttcattgggatgtcatactcgatcgcgagcagcacgttggacgaattatgcccatgccagcgggcattaagcctcattgcgaagcgactattgttcttccaggaatgccgaaaactttctcagccggggcatggttgcagctgaatttcagttcacgtcgtgattccaaatggacagtcccaggtcggatgatcgcaaggggccaagtccagctcactccaccaagatctctactcgatatcaaaagtctggcagctccggatttgaagggcccgcatatttctcgcaaagacgactttatatatgccacgatagctagtgggacgacatttggtttcgacaccagcgtgggaacattgtcctctgtcacacatgtcctgaatcctcaaataaatctcatcacactcccttttacgcttgacttttaccgagcacttacggacaacgaccggggcgggcccttcggaaaacaatggattgacggtcgggttcaccagactcggcagcacttcaagcaaattcgcatcacagagacagaatcccaatgcaagatcgaggtcgagagtcgtgtggctcctccggtgttagcatggtccgtggagacaacgacaacctactcaatcacgtcaacacactgcagcgtgagagtccgcgcgaaaccgcagggtcttctcctgccagagacttttgcccgttttggacttacttttggaatgcgcaacattagaatcgtagagtggtttggccgcgggcccgaagaatcgtacgtggacaaaaaacggtcccaattcatcaacacatggggttgggcagaaggcggtatgttccacgaatacgagtttcctcaagatgctggaaatcgaacggatgtatcttgggttgagcttaggaatcgctggggtggcgaagaagacggtcggctgctacgagcacagttcggggatcacaagggtgcgagcttcagcatcatgccgtatactacaaaggatgtggacgaatgcacccatccgcatgaattacgtgctcgaaaacgtgatgatcggatcgtacgtttggattggtatcaccatggcttgggaacgggcagctgcggtcccgcaacattgcctcagtgtcagttgaggaccgaccgtgaattcgatgttgagctgctactagactaa

SEQ ID NO: 36532 - protein, 1064 aa, Muscodor strobelii
  misc_feature: SGI Peptide ID NO. 572665
  misc_feature (781)..(1062): Pfam Id: PF02929 Pfam Desc: Beta galactosidase small chain
  misc_feature (270)..(365): Pfam Id: PF00703 Pfam Desc: Glycosyl hydrolases family 2, immunoglobulin-like beta-sandwich domain
  misc_feature (367)..(654): Pfam Id: PF02836 Pfam Desc: Glycosyl hydrolases family 2, TIM barrel domain
  misc_feature (93)..(268): Pfam Id: PF02837 Pfam Desc: Glycosyl hydrolases family 2, sugar binding domain
  misc_feature (59)..(1063): NCBI GI: 261405050 Blast Desc: Beta-galactosidase [Geobacillus sp. Y412MC10] gi|261281513|gb|ACX63484.1| Beta-galactosidase [Geobacillus sp. Y412MC10]
  misc_feature (81)..(1056): NCBI GI: 50428021 Blast Desc: DEHA0G26345g [Debaryomyces hansenii CBS767]
  misc_feature (81)..(1056): NCBI GI: 199434517 Blast Desc: DEHA2G24860p [Debaryomyces hansenii]
  misc_feature (57)..(1061): NCBI GI: 119477043 Blast Desc: beta-galactosidase [Neosartorya fischeri NRRL 181] gi|119407378|gb|EAW17327.1| beta-galactosidase [Neosartorya fischeri NRRL 181]
  misc_feature (49)..(1064): NCBI GI: 171695598 Blast Desc: protein product [Podospora anserina] gi|170948041|emb|CAP60205.1| protein product [Podospora anserina]
  misc_feature (59)..(1051): NCBI GI: 67525487 Blast Desc: AN3201.2 [Aspergillus nidulans FGSC A4] gi|40743739|gb|EAA62926.1| AN3201.2 [Aspergillus nidulans FGSC A4] gi|259485839|tpe|CBF83201.1| TPA: beta-galactosidase nidulans
  misc_feature (58)..(1061): NCBI GI: 115449377 Blast Desc: conserved [Aspergillus terreus NIH2624] gi|114187540|gb|EAU29240.1| conserved [Aspergillus terreus NIH2624]
  misc_feature (58)..(1054): NCBI GI: 261357940 Blast Desc: beta-galactosidase [Verticillium albo-atrum VaMs.102]
  misc_feature (50)..(1064): NCBI GI: 256724883 Blast Desc: NECHADRAFT_123301 [Nectria haematococca mpVI 77-13-4]
  misc_feature (47)..(1064): NCBI GI: 145611212 Blast Desc: MGG_00583 [Magnaporthe grisea 70-15] gi|145018515|gb|EDK02794.1| MGG_00583 [Magnaporthe grisea 70-15]
  misc_feature (60)..(1046): SWISSPROT Homolog: EC 3.2.1.23 Beta-galactosidase
MSEYTKRANMTGQEAKDMVIRQNARLRMNLEITASDLCTESSKGAVVAASEVQPDHLPDWSNLQVLHRNTLPPRSHFHLYDSEALALSGDVAKSRAALLSGTWGFHISPSPFSGPTDFYEPEFDYCKWKLIDVPGMWQRQGFGKGPQYTNVDYPFPVNPPHVPYDDNECGRYVSNFVVPDSLKDGSQWRLRFEGVDAAFTVWINGQEVGYSQGSRNPSEFDVSKFLRLDDENTLCVEVYQRCDGSYIEDQDQWWLSGIFRDVWLHSFPSVHVEDFHIQTLLDDDYQDADLVVKMKLSSSDVAVAVTLLDMEGNVVIKKSQKFNGDSGEFKDHVTKPEKWTAETPYLYTLILCVEGVFIAQKVGFRRTALIKGVFCVNGNPIKIRGVNRHEHSAESGRAVPYTLLRQDLATMKVFGINAIRTCHYINDARFYDLADAMGFWVLDEADLECHGFEKVGGDPASYTSDNPEWREAYIDRARQMVMRDKNHPSVIIWSLGNEAFYGQNHQAMYDEIKKVDSTRLIHYEPDQKAQTVDMFSRMYAPVDQMIKYAEEKEWDKPFVMCEFIHAMGNGPGNIQEYIEAFYKYPRLMGGFVWEWANHGLLTETKDGEKYFGYGGDFGDEPNDYNFVMDGLCDSRHIPGPGLNEYSKAIEPVQVLGFDGSTVRIVNRYDFLTLDHLQFHWDVILDREQHVGRIMPMPAGIKPHCEATIVLPGMPKTFSAGAWLQLNFSSRRDSKWTVPGRMIARGQVQLTPPRSLLDIKSLAAPDLKGPHISRKDDFIYATIASGTTFGFDTSVGTLSSVTHVLNPQINLITLPFTLDFYRALTDNDRGGPFGKQWIDGRVHQTRQHFKQIRITETESQCKIEVESRVAPPVLAWSVETTTTYSITSTHCSVRVRAKPQGLLLPETFARFGLTFGMRNIRIVEWFGRGPEESYVDKKRSQFINTWGWAEGGMFHEYEFPQDAGNRTDVSWVELRNRWGGEEDGRLLRAQFGDHKGASFSIMPYTTKDVDECTHPHELRARKRDDRIVRLDWYHHGLGTGSCGPATLPQCQLRTDREFDVELLLD

SEQ ID NO: 36533 - DNA, 5221 bp, Muscodor strobelii
  misc_feature: SGI EST ID NO. CUFF.87162.0
  misc_feature: Variant of the nucleotide sequence at SEQ ID NO 36531
gtgacggcgagcggataaccttgctgggaatggcttcggaaagcagggtgcaatgtaaccatttccgaggtcgattgattatgtctgcaattttgttgttggtacgcgaaaatctagaccagtcatgcagaagcgcaaagcttttgactggtcaacgatcttggatgtgtcgatgcaatcgaggactcagatcccggtgagatctagagaggctcaagacactgaaactttttcaaagttcctttgcaagaagtgttcgcccacagcaaagtactgttgtctcaagggatgacccgattgttgactgctccggagtgatttcaccattagtctccctatttgtttactgctagtcagggcactataaacagggacttacgcacgactcgagaacgcacctcaggtaagcggaccaatcatcgccaactcttgcagtgaccaatagcactagcccagtatcttcggggtcccaacctccacattccatcatctcgagacgtcacacacctgaacactgatacaaccagcaataggtcgaaagcactgtccggtcgctcttgtgttgtcgattgaagaattccaggaacggcgaacagtctcaatgggatacatctagatttatgtgatcctgtgttcctggccgcgtcgtattcgctagcggactcgtctcgattcggacagcttggccacattgcgttgcacatttcatcgcttctaatagttgtccatcatttttcgatatagatcttcgtcccaagcaatggaataaaatcgtatttggttctgcagaaattccactcgcttgcatcatcaacgtcttatgccgcgttcatctatcaccatgtcggaatatacaaagcgagctaatatgaccggccaagaggcgaaagatatggtcatccgccagaacgcaagactccgtatgaacttagagatcactgcctctgatctgtgcacagagtcgtcgaaaggagctgttgtggctgccagcgaagtccaaccggatcacttaccagactggagtaatctccaggtcctccatcgtaacactcttccgcctcgtagtcactttcatctttatgattccgaagccctcgccttatccggagatgtcgccaaatcccgagctgccctactgtcaggcacttggggatttcatatatctccaagccctttttcaggtcccactgatttctatgagcccgaatttgactactgcaagtggaagttgattgacgttccggggatgtggcagcgccagggctttggaaaaggcccacaatacactaatgtcgactacccatttcccgtgaacccacctcatgttccgtacgatgacaatgaatgtgggcggtacgtgagcaacttcgttgtccccgatagcttgaaagatgggagccaatggagacttcggttcgaaggtgttgacgctgctttcacggtatggatcaacggtcaagaggtcggttactcgcaaggctcgcgaaaccccagcgaattcgatgtatcgaaattcctacggttagatgatgaaaacactctgtgcgtggaagtctatcagcgctgtgacggaagttacattgaggatcaagaccaatggtggctaagtggaatattcagagatgtctggctgcactcatttccatcagtccatgtagaagactttcacatacagaccctcctagatgatgactatcaagatgccgatcttgtggtgaagatgaagcttagtagctcggatgtggcagtcgcagtcactctactcgacatggaaggcaacgttgtcattaagaaatctcaaaagttcaatggagactcaggagagttcaaggaccatgtgactaagcctgagaaatggacagcagagacaccttatctatatacgctgattctctgcgtagaaggtgttttcatcgcacagaaagtcgggtttcgccggacagcgctcataaaaggtgttttctgtgtgaacggaaatccaatcaagatccggggagtcaatcggcacgaacatagcgccgagtccggaagagctgtgccgtacacgttgctccgacaagatcttgcaacgatgaaagtgtttggaattaacgcgatccgtacctgccattacatcaacgatgcgaggttctatgacttagcagatgcgatgggattctgggtcttagatgaagctgacctggaatgccatgggtttgagaaagtcggcggcgaccctgcgagctacacttcggataatcccgagtggcgagaggcatacattgatcgtgcacgacagatggttatgcgtgataaaaaccatccttcagtgattatctggtcactcgggaacgaggcattctacgggcagaatcatcaggctatgtatgatgaaattaagaaggttgactcaacgcgactcattcactacgagccagatcagaaggcacaaacggtagacatgttcagtcggatgtacgccccggttgatcaaatgatcaaatatgccgaggaaaaagaatgggacaagccatttgtcatgtgcgagttcatacatgccatgggtaatggcccagggaacatccaagagtacatcgaagcattctacaaatatccaagactgatgggcggcttcgtttgggaatgggcgaatcatggtctcctcacagagaccaaagacggagagaagtactttggctatggcggagacttcggtgacgagccgaatgactacaatttcgtcatggatggactttgcgactctcggcacattccaggacccggcctgaatgagtacagcaaagcgattgagcctgtacaagtactcggcttcgatgggtctacggtgcggattgtcaatcgatatgactttctcacattagatcatctacaatttcattgggatgtcatactcgatcgcgagcagcacgttggacgaattatgcccatgccagcgggcattaagcctcattgcgaagcgactattgttcttccaggaatgccgaaaactttctcagccggggcatggttgcagctgaatttcagttcacgtcgtgattccaaatggacagtcccaggtcggatgatcgcaaggggccaagtccagctcactccaccaagatctctactcgatatcaaaagtctggcagctccggatttgaagggcccgcatatttctcgcaaagacgactttatatatgccacgatagctagtgggacgacatttggtttcgacaccagcgtgggaacattgtcctctgtcacacatgtcctgaatcctcaaataaatctcatcacactcccttttacgcttgacttttaccgagcacttacggacaacgaccggggcgggcccttcggaaaacaatggattgacggtcgggttcaccagactcggcagcacttcaagcaaattcgcatcacagagacagaatcccaatgcaagatcgaggtcgagagtcgtgtggctcctccggtgttagcatggtccgtggagacaacgacaacctactcaatcacgtcaacacactgcagcgtgagagtccgcgcgaaaccgcagggtcttctcctgccagagacttttgcccgttttggacttacttttggaatgcgcaacattagaatcgtagagtggtttggccgcgggcccgaagaatcgtacgtggacaaaaaacggtcccaattcatcaacacatggggttgggcagaaggcggtatgttccacgaatacgagtttcctcaagatgctggaaatcgaacggatgtatcttgggttgagcttaggaatcgctggggtggcgaagaagacggtcggctgctacgagcacagttcggggatcacaagggtgcgagcttcagcatcatgccgtatactacaaaggatgtggacgaatgcacccatccgcatgaattacgtgctcgaaaacgtgatgatcggatcgtacgtttggattggtatcaccatggcttgggaacgggcagctgcggtcccgcaacattgcctcagtgtcagttgaggaccgaccgtgaattcgatgttgagctgctactagactaagcgaatacaaatatgttgcgccctgaagaggcagtacaaaattgtgtgtagttggatgatgtttccaccaaagtctcaagaaaactccgtcgacatcagcacgaactattagtctcaaaaacctagcatcaagaagattgaagtgcagaacgaaccatcaaacctcccaggtgaacattattaaatcagcctttgtttgttcacgtgtactcccaagcaccgtactgaaattccgtgtcagtaagaatcaatcccacaatgtcaatgcaacccgtcaaattgaaagctttggttttgacgtagaccgaaaactgtgctccgctgctttcgagaaaaggggggacattggggcacagcgtcacgccgccatcgcttgaaccgtcatggggtagaaagtcagccacgactacgtccgctgcacaattggacacaactgtcttgaggaaccagccttccagaaatgagccaagcgggatatttgctgaatgaggttccgtgaacttgatttgcccgtctgcttggacgtagatttgctgacccccgggcacttcagtctatgatatgatcgtcagaagtgttcaaaagaaagtgtggctagtatgatgggcacttacagccattgctcccaagagaccgacaacaagtgttccacgaacagctgggcattgggcagggtcgagagggcaataggttccagggccagtgagtccggtgaagaagccgtatgcttcggcattgatcacagctccatcgacctgggtgccaggggcaaagacagtgatagtgcttgataagcctgctgacgatgcgaggctggcgaaggccaggcacaggagtgacagcatggtaagttgtgacatctgagatctccgatcaagggtgtcaagaggatgtcaaaggtgaacttcaggctggaaggtcagatgataatatgacggagtccaagaggtcaaaggagagcggtgtcaaaaagattggcaaaaaggcgaccaaatgaccaagatctgaggtccaattgaagcaatcaagacttttctagttggggatgagcaggaagagaagaatgaaatgagttcaccagattgcagatttgacatgatatgctctactttccttcgcttcttcgttgcttccattttcgagtatcatacggcatgaaccttcttgtcgtcagttggacccggc

SEQ ID NO: 36534 - DNA, 585 bp, Muscodor strobelii
  misc_feature: SGI cDNA ID NO. 572666
  misc_feature: Encodes the peptide sequence at SEQ ID NO 36535
atgctgtcactcctgtgcctggccttcgccagcctcgcatcgtcagcaggcttatcaagcactatcactgtctttgcccctggcacccaggtcgatggagctgtgatcaatgccgaagcatacggcttcttcaccggactcactggccctggaacctattgccctctcgaccctgcccaatgcccagctgttcgtggaacacttgttgtcggtctcttgggagcaatggctactgaagtgcccgggggtcagcaaatctacgtccaagcagacgggcaaatcaagttcacggaacctcattcagcaaatatcccgcttggctcatttctggaaggctggttcctcaagacagttgtgtccaattgtgcagcggacgtagtcgtggctgactttctaccccatgacggttcaagcgatggcggcgtgacgctgtgccccaatgtccccccttttctcgaaagcagcggagcacagttttcggtctacgtcaaaaccaaagctttcaatttgacgggttgcattgacattgtgggattgattcttactgacacggaatttcagtacggtgcttgggagtacacgtga

SEQ ID NO: 36535 - protein, 194 aa, Muscodor strobelii
  misc_feature: SGI Peptide ID NO. 572666
  misc_feature (21)..(194): NCBI GI: 46110617 Blast Desc: FG02190.1 [Gibberella zeae PH-1]
  misc_feature (21)..(194): NCBI GI: 256724991 Blast Desc: NECHADRAFT_105934 [Nectria haematococca mpVI 77-13-4]
  misc_feature (1)..(108): NCBI GI: 70990198 Blast Desc: IgE binding protein [Aspergillus fumigatus Af293] gi|66847580|gb|EAL87910.1| IgE binding protein, [Aspergillus fumigatus Af293]
  misc_feature (22)..(194): NCBI GI: 238840600 Blast Desc: IgE-binding protein [Microsporum canis CBS 113480]
  misc_feature (1)..(108): NCBI GI: 159130428 Blast Desc: IgE binding protein, [Aspergillus fumigatus A1163]
  misc_feature (52)..(110): NCBI GI: 67516161 Blast Desc: AN0362.2 [Aspergillus nidulans FGSC A4] gi|40746612|gb|EAA65768.1| AN0362.2 [Aspergillus nidulans FGSC A4] gi|259489399|tpe|CBF89639.1| TPA: IgE-binding protein, FGSC
  misc_feature (36)..(108): NCBI GI: 145229487 Blast Desc: An01g06280 [Aspergillus niger] gi|134055158|emb|CAK37103.1| protein product [Aspergillus niger]
  misc_feature (28)..(194): NCBI GI: 189211269 Blast Desc: conserved [Pyrenophora tritici-repentis Pt-1C-BFP] gi|187978058|gb|EDU44684.1| conserved [Pyrenophora tritici-repentis Pt-1C-BFP]
  misc_feature (21)..(110): NCBI GI: 212526362 Blast Desc: IgE-binding protein [Penicillium marneffei ATCC 18224] gi|210072736|gb|EEA26823.1| IgE-binding protein [Penicillium marneffei ATCC 18224]
  misc_feature (36)..(108): NCBI GI: 223974759 Blast Desc: [Zea mays]
MLSLLCLAFASLASSAGLSSTITVFAPGTQVDGAVINAEAYGFFTGLTGPGTYCPLDPAQCPAVRGTLVVGLLGAMATEVPGGQQIYVQADGQIKFTEPHSANIPLGSFLEGWFLKTVVSNCAADVVVADFLPHDGSSDGGVTLCPNVPPFLESSGAQFSVYVKTKAFNLTGCIDIVGLILTDTEFQYGAWEYT

SEQ ID NO: 36536 - DNA, 993 bp, Muscodor strobelii
  misc_feature: SGI cDNA ID NO. 572667
  misc_feature: Encodes the peptide sequence at SEQ ID NO 36537
atgaagttcgtgtcagctgccgtcgccctgctagcggccaccgtgagcgccgctccgaccccgacagtcgatgaggctcttgatgttcgtgccgttgagaaaagagctacgattaccgacgcagccaaccttggttacgctacacagaatggaggcactacaggtggtaagggcggcaccaccacgaccgtctcaactcttgcacagttcactgctgctgccgggtcatccagcgcggctgttatcgtcgtcaaaggcgccatctctggcgctgcaaaggtgaaggtgacttcgaacaagtctatcattggcgcgtctggctctagcttgactggtatcggcctcacaatcaacggagtgtccaacgtcatcgttcgtaatatgaagatttcgaaggtcctcgcagactacggtgacgccatcacagtccaggccgcgaagaatgtctgggtagatagctgcgatttatcatccgatatggatcacgacaaggactactatgatggtcttctcgacgtgacgcacgcttccgactgggtcactatttcgaacaactaccttcacgatcactggaagggctcgcttgttggccacagtgacagtaatggcgacgaggacaccggtcatctcaccgtcacatacgccaacaactatttcagcaacatcaacagccgtggaccctctttcagatttggcactggccatatctacaacaactactattacaacatgggaactggtatcaacacgagggagggagcccagctgcttattcagagcaccgtgttcgagagctgcggaaccaaggccatctacttcgcggacagcgatgtcaccggatatgccgtagtgagtgatgtagccctcggtggtagcgcaaacactgcacccaccggaactctcaagagtgtcccttacagctactcgcttcttggctctggaagcgtcaagagctcagtcacgtctagtgctggtcagaagctatctttctaa

SEQ ID NO: 36537 - protein, 330 aa, Muscodor strobelii
  misc_feature: SGI Peptide ID NO. 572667
  misc_feature (77)..(263): Pfam Id: PF00544 Pfam Desc: Pectate lyase
  misc_feature (10)..(330): NCBI GI: 256728451 Blast Desc: polysaccharide lyase family 1 [Nectria haematococca mpVI 77-13-4]
  misc_feature (1)..(330): NCBI GI: 256727718 Blast Desc: NECHADRAFT_58553 [Nectria haematococca mpVI 77-13-4]
  misc_feature (1)..(330): NCBI GI: 261360945 Blast Desc: pectate lyase B [Verticillium albo-atrum VaMs.102]
  misc_feature (8)..(330): NCBI GI: 46139297 Blast Desc: FG11163.1 [Gibberella zeae PH-1]
  misc_feature (19)..(330): NCBI GI: 5453416 Blast Desc: AF156985_1 pectate lyase 2 [Colletotrichum gloeosporioides f. sp. malvae]
  misc_feature (7)..(328): NCBI GI: 169783612 Blast Desc: [Aspergillus oryzae RIB40] gi|238493445|ref|XP_002377959.1| pectate lyase precursor, [Aspergillus flavus NRRL3357] gi|83775012|dbj|BAE65135.1| protein
  misc_feature (1)..(330): NCBI GI: 145256261 Blast Desc: pectate lyase plyA-Aspergillus niger [Aspergillus niger CBS 513.88] gi|134078650|emb|CAK40523.1| pectate lyase plyA-Aspergillus niger
  misc_feature (1)..(330): NCBI GI: 13171023 Blast Desc: pectate lyase A [Aspergillus niger]
  misc_feature (1)..(330): NCBI GI: 159128627 Blast Desc: pectate lyase A [Aspergillus fumigatus A1163]
  misc_feature (1)..(330): NCBI GI: 119497755 Blast Desc: pectate lyase, [Neosartorya fischeri NRRL 181] gi|119413799|gb|EAW23738.1| pectate lyase, [Neosartorya fischeri NRRL 181]
  misc_feature (27)..(301): SWISSPROT Homolog: EC 4.2.2.2 Pectate lyase
MKFVSAAVALLAATVSAAPTPTVDEALDVRAVEKRATITDAANLGYATQNGGTTGGKGGTTTTVSTLAQFTAAAGSSSAAVIVVKGAISGAAKVKVTSNKSIIGASGSSLTGIGLTINGVSNVIVRNMKISKVLADYGDAITVQAAKNVWVDSCDLSSDMDHDKDYYDGLLDVTHASDWVTISNNYLHDHWKGSLVGHSDSNGDEDTGHLTVTYANNYFSNINSRGPSFRFGTGHIYNNYYYNMGTGINTREGAQLLIQSTVFESCGTKAIYFADSDVTGYAVVSDVALGGSANTAPTGTLKSVPYSYSLLGSGSVKSSVTSSAGQKLSF

SEQ ID NO: 36538 - DNA, 1290 bp, Muscodor strobelii
  misc_feature: SGI cDNA ID NO. 572668
  misc_feature: Encodes the peptide sequence at SEQ ID NO 36539
atggcgactcgaagcacccatacctgctctgttgttccgccttatctccttgcagcacttgcagagagtgatcagaaccctgagcacatccgtgcgtctgctcgccatgcccttgatttccataagatatactgcgataaacgtcagcgcagattcgctgaactcaccgcacctcgaggatctggatctcgtggtgcggctgccccccatagccgtgtgcaaggcatcgtccctggtacgctgctgaaacacatttccgactcccaagacgttgatgaggaaacgcgtgcccgagccttgaaggatctcgaacatcttcagactttacaggacaagtatcagaaacaaggggcttgggcttccggagaacagaaaactcttaaagcatccacgagcaaggtcactgataccacataccgtgccgtatacgacgcccaaaacgatcagaacgaagaggatctgccaggcaagatcctccgcgttgagggccagggaccagtcaaagacgaagctgctaatcaggcatacgacaatgcgggctctgtactgagcttctatctagacatctttaattggaagtcgattgacaacaacaatgagaatgtcatcagctcagtgcacttcggcaaaaactatgagaacgcgttctgggatcccgaaattgcgcagatggtttacggcgatggacacgatttcctcggaaactttaccaacgccgttgacgtgattggtcatgaactcacacatgctgtgacagagcatacctcaccccttgactacattggccaatccggcgcgctcaacgagcacgtctcggatgtatttggtattatggtcaagcaacgcgttcagaacgagactgccgacgctgcagattggctaataggtgaagactgtctcatgcccggtgtcaaaggcgttgcactgcgcagcatgaaagccccaggttccgcttacaatgatcctcgtttcggcaaagatcctcagcctgataacttcaaagactacaaggctatccaagacgataatggcggcgtgcatacctactctggcatcccgaacaaagccttctatctgtgttcagttgcctttggaggctactcgtgggagaaggctggaaagatctggtgggagacgatgaacagcggtcaaattcctgcgagagctaccttcctccagtttgccgacgtgactgtcgacaaggccgaagaactcttcggtgatgatgcagctgctatcgtacgtaaggcttggaatgaagtcggcgttgttcgtaagcagcacgtctag

SEQ ID NO: 36539 - protein, 429 aa, Muscodor strobelii
  misc_feature: SGI Peptide ID NO. 572668
  misc_feature (111)..(254): Pfam Id: PF01447 Pfam Desc: Thermolysin metallopeptidase, catalytic domain
  misc_feature (256)..(423): Pfam Id: PF02868 Pfam Desc: Thermolysin metallopeptidase, alpha-helical domain
  misc_feature (169)..(254): Pfam Id: PF01447 Pfam Desc: Thermolysin metallopeptidase, catalytic domain
  misc_feature (256)..(359): Pfam Id: PF02868 Pfam Desc: Thermolysin metallopeptidase, alpha-helical domain
  misc_feature (9)..(424): NCBI GI: 256727142 Blast Desc: NECHADRAFT_32824 [Nectria haematococca mpVI 77-13-4]
  misc_feature (12)..(424): NCBI GI: 46134305 Blast Desc: FG09292.1 [Gibberella zeae PH-1]
  misc_feature (69)..(426): NCBI GI: 86740328 Blast Desc: peptidase M4, thermolysin [Frankia sp. CcI3] gi|86567190|gb|ABD10999.1| peptidase M4, thermolysin [Frankia sp. CcI3]
  misc_feature (140)..(424): NCBI GI: 75909157 Blast Desc: peptidase M4, thermolysin [Anabaena variabilis ATCC 29413] gi|75702882|gb|ABA22558.1| Peptidase M4, thermolysin [Anabaena variabilis ATCC 29413]
  misc_feature (69)..(425): NCBI GI: 84497189 Blast Desc: metalloprotease [Janibacter sp. HTCC2649] gi|84382077|gb|EAP97959.1| metalloprotease [Janibacter sp. HTCC2649]
  misc_feature (140)..(424): NCBI GI: 17228478 Blast Desc: all0983 [Nostoc sp. PCC 7120] gi|17130329|dbj|BAB72940.1| all0983 [Nostoc sp. PCC 7120]
  misc_feature (147)..(423): NCBI GI: 280963335 Blast Desc: peptidase M4 thermolysin [Frankia sp. EuI1c] gi|270732664|gb|EFA60882.1| peptidase M4 thermolysin [Frankia sp. EuI1c]
  misc_feature (70)..(424): NCBI GI: 272533590 Blast Desc: peptidase, M4 (thermolysin) family [Burkholderia sp. CCGE1002] gi|270350141|gb|EFA53428.1| peptidase, M4 (thermolysin) family [Burkholderia sp. CCGE1002]
  misc_feature (77)..(423): NCBI GI: 158313880 Blast Desc: peptidase M4 thermolysin [Frankia sp. EAN1pec] gi|158109285|gb|ABW11482.1| peptidase M4 thermolysin [Frankia sp. EAN1pec]
  misc_feature (71)..(424): NCBI GI: 78045631 Blast Desc: Zinc metalloprotease [Xanthomonas campestris pv. vesicatoria str. 85-10] gi|78034061|emb|CAJ21706.1| Zinc metalloprotease [Xanthomonas campestris pv. vesicatoria str.
  misc_feature (169)..(423): SWISSPROT Homolog: EC 3.4.24.27 Thermolysin
MATRSTHTCSVVPPYLLAALAESDQNPEHIRASARHALDFHKIYCDKRQRRFAELTAPRGSGSRGAAAPHSRVQGIVPGTLLKHISDSQDVDEETRARALKDLEHLQTLQDKYQKQGAWASGEQKTLKASTSKVTDTTYRAVYDAQNDQNEEDLPGKILRVEGQGPVKDEAANQAYDNAGSVLSFYLDIFNWKSIDNNNENVISSVHFGKNYENAFWDPEIAQMVYGDGHDFLGNFTNAVDVIGHELTHAVTEHTSPLDYIGQSGALNEHVSDVFGIMVKQRVQNETADAADWLIGEDCLMPGVKGVALRSMKAPGSAYNDPRFGKDPQPDNFKDYKAIQDDNGGVHTYSGIPNKAFYLCSVAFGGYSWEKAGKIWWETMNSGQIPARATFLQFADVTVDKAEELFGDDAAAIVRKAWNEVGVVRKQHV

SEQ ID NO: 36540 - DNA, 3199 bp, Muscodor strobelii
  misc_feature: SGI EST ID NO. CUFF.87171.0
  misc_feature: Variant of the nucleotide sequence at SEQ ID NO 36538
tgtaggtaaggcgccctaagataggcattaagggtccctgacaggccatttaccaggttctccccacgtacgtaagcctctccaccacccacaagacacaatcaagcttaaagcagttcccactcaattccattttcgttctcctgtttccatgtgttatccctagacgtagcattagacggcgaacagcaacaggtctcgcttgcttgaggcttgcctcgtgggctgtctcactttgccgagtaaacgagacaagctgacaaaacagcccctcccgaccctacctcacgaccgcctacagcgagtggatgcctcagaagttgagatccccttagggtttctaatgatatgagttgttgctcttgctgtccatacgtagccagctactcaactaggctaccattagcaacaaagtgatcttcccacattcgttaggctacctatcaagtagccacggatcgggtcgtacaatgttgttccgaacaggtgcccacccaccttggataccggcatgctgacacgcgtaccaatatcatgtcatgcatagttcagccctgctctgagaagcctcttgatccccgcgatcgtgtagctgccggtgtactacctgagtagaaccaatagtctgtcatcccggcttcaaattgggcagccttggaccttgcaaacgccatgccaagcgctgcttggacaagctagacacgtcgaaacgggattttccaacccccaatgtcccatcattgtcacattctttgatatattgagattctgacgtatggcggttgcatgtctttccgacaaacacgacatgtacctgacctgtgtagctaggctgtgcctgtacacggcggtcacgcattcccaggcacgatggagacactttgtatccattcagcaggcaccacttgccctgtattgagaagtttgtgcgaggtcattacccagaccggaacaaagtaatgtggcaatgttactacagttgtacagtgccagcccccttcattccctgcttggtgatctcataacagtgagtattgccagatgtccaggtccatccggtgctcaggcgatagccacattcttgtttcatggaggctacccacctgacttcctattataccgtcacaactgacacaaggtttcctatccgatacacgtgactcacatgcttttgagagtgaggcaggtcttgtataaagagttctgctccggccatctttggcggcattctgatccgtactttgacagaccttcggcaatctcatcacttctagcatcacgttcctattgcgtatctacacatcaatacctagaattatcgttcctcgatccggtctcttgaccctgcctcgatccagtctgttgtctctgcctcgatccggcctgttgtctttgcctcgatccggtctgttgtctctacctcgatccggtcaaacgatggcgactcgaagcacccatacctgctctgttgttccgccttatctccttgcagcacttgcagagagtgatcagaaccctgagcacatccgtgcgtctgctcgccatgcccttgatttccataagatatactgcgataaacgtcagcgcagattcgctgaactcaccgcacctcgaggatctggatctcgtggtgcggctgccccccatagccgtgtgcaaggcatcgtccctggtacgctgctgaaacacatttccgactcccaagacgttgatgaggaaacgcgtgcccgagccttgaaggatctcgaacatcttcagactttacaggacaagtatcagaaacaaggggcttgggcttccggagaacagaaaactcttaaagcatccacgagcaaggtcactgataccacataccgtgccgtatacgacgcccaaaacgatcagaacgaagaggatctgccaggcaagatcctccgcgttgagggccagggaccagtcaaagacgaagctgctaatcaggcatacgacaatgcgggctctgtactgagcttctatctagacatctttaattggaagtcgattgacaacaacaatgagaatgtcatcagctcagtgcacttcggcaaaaactatgagaacgcgttctgggatcccgaaattgcgcagatggtttacggcgatggacacgatttcctcggaaactttaccaacgccgttgacgtgattggtcatgaactcacacatgctgtgacagagcatacctcaccccttgactacattggccaatccggcgcgctcaacgagcacgtctcggatgtatttggtattatggtcaagcaacgcgttcagaacgagactgccgacgctgcagattggctaataggtgaagactgtctcatgcccggtgtcaaaggcgttgcactgcgcagcatgaaagccccaggttccgcttacaatgatcctcgtttcggcaaagatcctcagcctgataacttcaaagactacaaggctatccaagacgataatggcggcgtgcatacctactctggcatcccgaacaaagccttctatctgtgttcagttgcctttggaggctactcgtgggagaaggctggaaagatctggtgggagacgatgaacagcggtcaaattcctgcgagagctaccttcctccagtttgccgacgtgactgtcgacaaggccgaagaactcttcggtgatgatgcagctgctatcgtacgtaaggcttggaatgaagtcggcgttgttcgtaagcagcacgtctagagcggcgtgacattaccatgggctcagcgcactagtccagacacaacaacgcgggaatgtgaacgtacaaacgaggatgaagtggcatctttaatagacaaaatacggtcgcgaagaatggctcatgaatgcggacctgcacatgaccttctccaacagtttggcggtgatgatcgagaagaggaggcaacagaatcttctcaggaggcagcgcagggcatcagaacacactggggacgggacgggggttatgttcctatgtgatgaacatgtatgctacatctcttctcacaggactctcgatacagtaccattagattgtgaacaacttattaccagtctacaatgcatgctctcacggaggtgagcctggtgattgtggaagcttacggaagtgctgtagtcccttatgtggggggagtgatgatcggatcactttctaaccatttttcagataaaccggcgaataacg

SEQ ID NO: 36541 - DNA, 4386 bp, Muscodor strobelii
  misc_feature: SGI cDNA ID NO. 572669
  misc_feature: Encodes the peptide sequence at SEQ ID NO 36542
atgccagccatcactttagaccgttcgaagtcagagatccatatcgcatctctccgttccaaggcgttctacgccaacatgacaatgctcatgattccagccggccctcctcgatccaaagaccccttttttacgaagaccacaccgtctatatactcttcatcgactaccagttcgccgccaactgctggccagtcaagccctttgtcacgcgtcagacccaagccacatcaatcagctgtcgggagtagaccctcatcaatccccaaatggggccagaatattcaattagatcttgatcatgcgcctcaactacctccgatcatcaataatacacgtctcgtggaccctcgccaagctttgcctgataaatttcgtgccatctttccttataagctgttcaatgcagtgcaatccagatgcttcccgttggtatacggtaccgatgacaatgttgtcatctctgcccctacaggctctggcaagactgcaatcttggagatggccatttgcaaactcgtggctggccaaggagatggagaatccaagattgtctaccaggctccgacgaaatcgctgtgctcagagcgagcaagagattgggagaagaaattcagtcacatgaatatgaaatgcgtagagctcaccggcgacacttctcaaagtgaagctcgccgtgtcggcagcgcatccatcattgttacaacccccgagaaatgggactctatcacaaggaagtggaaagatcaccgcagattgctggaactggttcggctcgtcctcattgacgaggttcacattttgaaggactcgcgcggcgcaactctggaagctgtcgtgtcccggatgaagacgattggggtaggcatccgcttcgttgctctgagcgcaacagttccgaacattgacgatgttgcacgttggcttggccgtaatcacaagacccaacatgaaccagccaaattcgaagtattcggggaagagctgcggcctgtcaaattgcagagatacgtgtatggatatgatgccacagggaatgatttcatattcgacaagatgatggacggaaagcttgcaatgttgctatcgaagcattccgagagaaagccaatcatagtgttctgttctacgaggaagtcgtgcgagcgcactgcaaagatccttgcagagtggtggtcaacctgtcgcgcggacaacaaagcttggccgcagccgtccagtcgcattcctgttgtctctcaggtccttcaagaaattgttggttgtggtgtcgcttaccaccacgcgggtcttgacgctcaagataggagcgcaatcgaaacgaactatctcaacggacaacttcatgtcatctgttgtaccacaactttggctgttggcgtgaatctaccgtgtcatacggtggtgctgaagggtacatggggctactctgacaatggtcctcaagaatattccgaccttgaaattatgcaaatgctaggtcgcgccggtcgtccacaatttgacagcagtgctgtagcagtcatcatgacaagactcggtaatgtcaaacgatatgagcggctcatttcaggcgaagaggtgcttgaaagcactctgcatatgaacttggtagagcatatcaattcggaaattagccttggaacaatccaagatctgcagacggctaagcaatggatcaatggcacattcctcagcgtcagggtgtgcaaatctccagctttatatcatttggacaacgttcgaaacgcggcggatgcgaacgaacgaatgaaggagtggtgtgagcgagatgtcagattgttacaagactatggactaataagcaaacaaacaccgttcgtctgcactgaatatgggcaggctatgtccagatacatgatgccatttgagacgatgaaggtgctactctcgattccccgcgcagcgcaggtgcaagaaatgctcacgactatttgccaggcaccagtcttcaaagacataaagtttaagcccgtggaacgcgcacttttccgagaactgaataagtcgcccctgatcttacacccggtccgagatacggtcactctaccttggcacaaagtctttctgattattcagatcttcattggaggtgtggagataccaacagataaagatgcaagttatgttcgcgttgatctattacgagagaaaagagtggtgtttgagcgtctcaatcgacttctgcgctgcgcaacggactgcaaagctagcgataatgacggcctagggaccaaggcggcgctagaacttgtcaggtctgttgctgcgaatgcttgggaagacaggcctgcgcagctctcacagatacctggctttggaccagtcagcgttcgaaaatggattggacacggagtgcatacggtcctgggcattgcggataaaagtactgctgacatcgagcgacttgcgagtagaaacccaccgtttggccgcgatctcttgaaaacattggagaacttcccgcgactgacattaaagaccgatattgttgagtctcgtgcaccaagtccaggctctcaagagtctgtttcggtgacagtcagagctcacttaggtcactgtaatactaaagatgtaccttgctggaatgggaagatcccagggctaactttcatggcaatgacctctgatggggttctctcgtatttatggcgtgggagtatcaagcgaattactcaatcgcctggcttggatctgaaattcccagtggctcttacagctccaaatcagaccgtagtctgttacttaagctgcgaagaagtagtcggcacccaggtcacaaacatcttagagcccaatataccagccgtggcttttgatagcatccgtcgtcccacaaatatccaacctacctctcgagtagagatgcccgaagaagaggaatattacggctatatttctgatgaagctatgctcaaggttccggatcccatgagcgctaatgatggtagtgacgatcaagtgccttcgtctgagtatccaggaccattagatgacctcgacgaagagcaataccccgacattgatgaggttctgtctcaagaagacatagaagatgctcttgaaccaggcaagatggataacggaaaatggatgtgcaatcaccattgtcgaaacggcgggcagacgaagtctgggaagccttgccatcatagatgttgtcgggacggtgtcgatacatatcgaaaacccccgacccataaagcacgaaaggaccctagcaaaaaggaccagaacatgcatagagcgctagaggcttccaataactcccatggtccccgaaattccgctcgagatacagaaagaagtgggaatactgcaaaagcgcggcagacagctaagataagtggcaagaggaagcattctggatctactctcactgtttcacaaggctctaagcgcagaagaatgaacgaacgagagagcctgggcgacatcaatggaaattcgtctcacaaaagatctcaatcagaaccctataactcctcagatgagagagaacatgaatgggtcgacttcgtggacctttccaacgaaaaggatgacacaaatctcgcacgaagataccccagtgccaatattccgaaaaggcgaccaggactgctcgtcgctcacgaagaagttcctgaccgcgaagctcatatgtcaagctcgttaaaatcttacaagtcaagattcgactcggtagatcctgagaaccagacttataaccctcgtgaagttaactcaaaactgaaatcaagacctttgaaaactgacagtgggttaaatgacgttgaagatagcgatgctaacagcgagacgtctgatttactcggctttgagaagatgatccgcagaaacaagaatcaagagagggagaacggtagtgcgtctggactttcggagcaccctttgagtaccgatgagaccctctaccccggtgtaatgcatacattggaagagagcactgactacggcttggaacacaatcttagcttcacgacagtcagtgaattgtctaaagcatcccggcgattagatctgtctttggccggtgatgcgcctgcatacacttcgtcaccacccctgcaactcacaaaaagcccggattatatgtccggattgagttctccattactcgacatggatgataatgagaccaccacccagcctagagagagtataatgccacgaattaatgatggcgaaaattcacttgtgtccagtcgcaactcgtcctccccgttccagtcagctgaaacagcgcagcccacctcgcagtctgagaatggtccagcgcagaatgagccggcatggctgtcggagtttgattctgagttgatcgatagcttacggggtatagtcgagttcgttgactaa

SEQ ID NO: 36542 - protein, 1461 aa, Muscodor strobelii
  misc_feature: SGI Peptide ID NO. 572669
  misc_feature (135)..(305): Pfam Id: PF00270 Pfam Desc: DEAD/DEAH box helicase
  misc_feature (416)..(500): Pfam Id: PF00271 Pfam Desc: Helicase conserved C-terminal domain
  misc_feature (33)..(1122): NCBI GI: 219963257 Blast Desc: meiotic helicase [Sordaria macrospora]
  misc_feature (107)..(1117): NCBI GI: 171682840 Blast Desc: protein product [Podospora anserina] gi|170941379|emb|CAP67029.1| protein product [Podospora anserina]
  misc_feature (106)..(1086): NCBI GI: 156042175 Blast Desc: SS1G_11638 [Sclerotinia sclerotiorum 1980] gi|154696021|gb|EDN95759.1| SS1G_11638 [Sclerotinia sclerotiorum 1980]
  misc_feature (144)..(1067): NCBI GI: 85096049 Blast Desc: NCU09793 [Neurospora crassa OR74A] gi|28921672|gb|EAA30955.1| NCU09793 [Neurospora crassa OR74A]
  misc_feature (63)..(1080): NCBI GI: 116203115 Blast Desc: CHGG_09442 [Chaetomium globosum CBS 148.51] gi|88177960|gb|EAQ85428.1| CHGG_09442 [Chaetomium globosum CBS 148.51]
  misc_feature (83)..(1084): NCBI GI: 145603673 Blast Desc: MGG_05900 [Magnaporthe grisea 70-15] gi|145011854|gb|EDJ96510.1| MGG_05900 [Magnaporthe grisea 70-15]
  misc_feature (57)..(1114): NCBI GI: 212534272 Blast Desc: DEAD/DEAH box DNA helicase (Mer3), [Penicillium marneffei ATCC 18224] gi|210069691|gb|EEA23781.1| DEAD/DEAH box DNA helicase (Mer3), [Penicillium marneffei ATCC 18224]
  misc_feature (44)..(1073): NCBI GI: 240105240 Blast Desc: DEAD/DEAH box helicase family protein [Coccidioides posadasii C735 delta SOWgp]
  misc_feature (57)..(1073): NCBI GI: 242789720 Blast Desc: DEAD/DEAH box DNA helicase (Mer3), [Talaromyces stipitatus ATCC 10500] gi|218718009|gb|EED17429.1| DEAD/DEAH box DNA helicase (Mer3), [Talaromyces stipitatus ATCC 10500]
  misc_feature (121)..(1082): NCBI GI: 121700190 Blast Desc: DEAD/DEAH box DNA helicase (Mer3), [Aspergillus clavatus NRRL 1] gi|119396502|gb|EAW06934.1| DEAD/DEAH box DNA helicase (Mer3), [Aspergillus clavatus NRRL 1]
MPAITLDRSKSEIHIASLRSKAFYANMTMLMIPAGPPRSKDPFFTKTTPSIYSSSTTSSPPTAGQSSPLSRVRPKPHQSAVGSRPSSIPKWGQNIQLDLDHAPQLPPIINNTRLVDPRQALPDKFRAIFPYKLFNAVQSRCFPLVYGTDDNVVISAPTGSGKTAILEMAICKLVAGQGDGESKIVYQAPTKSLCSERARDWEKKFSHMNMKCVELTGDTSQSEARRVGSASIIVTTPEKWDSITRKWKDHRRLLELVRLVLIDEVHILKDSRGATLEAVVSRMKTIGVGIRFVALSATVPNIDDVARWLGRNHKTQHEPAKFEVFGEELRPVKLQRYVYGYDATGNDFIFDKMMDGKLAMLLSKHSERKPIIVFCSTRKSCERTAKILAEWWSTCRADNKAWPQPSSRIPVVSQVLQEIVGCGVAYHHAGLDAQDRSAIETNYLNGQLHVICCTTTLAVGVNLPCHTVVLKGTWGYSDNGPQEYSDLEIMQMLGRAGRPQFDSSAVAVIMTRLGNVKRYERLISGEEVLESTLHMNLVEHINSEISLGTIQDLQTAKQWINGTFLSVRVCKSPALYHLDNVRNAADANERMKEWCERDVRLLQDYGLISKQTPFVCTEYGQAMSRYMMPFETMKVLLSIPRAAQVQEMLTTICQAPVFKDIKFKPVERALFRELNKSPLILHPVRDTVTLPWHKVFLIIQIFIGGVEIPTDKDASYVRVDLLREKRVVFERLNRLLRCATDCKASDNDGLGTKAALELVRSVAANAWEDRPAQLSQIPGFGPVSVRKWIGHGVHTVLGIADKSTADIERLASRNPPFGRDLLKTLENFPRLTLKTDIVESRAPSPGSQESVSVTVRAHLGHCNTKDVPCWNGKIPGLTFMAMTSDGVLSYLWRGSIKRITQSPGLDLKFPVALTAPNQTVVCYLSCEEVVGTQVTNILEPNIPAVAFDSIRRPTNIQPTSRVEMPEEEEYYGYISDEAMLKVPDPMSANDGSDDQVPSSEYPGPLDDLDEEQYPDIDEVLSQEDIEDALEPGKMDNGKWMCNHHCRNGGQTKSGKPCHHRCCRDGVDTYRKPPTHKARKDPSKKDQNMHRALEASNNSHGPRNSARDTERSGNTAKARQTAKISGKRKHSGSTLTVSQGSKRRRMNERESLGDINGNSSHKRSQSEPYNSSDEREHEWVDFVDLSNEKDDTNLARRYPSANIPKRRPGLLVAHEEVPDREAHMSSSLKSYKSRFDSVDPENQTYNPREVNSKLKSRPLKTDSGLNDVEDSDANSETSDLLGFEKMIRRNKNQERENGSASGLSEHPLSTDETLYPGVMHTLEESTDYGLEHNLSFTTVSELSKASRRLDLSLAGDAPAYTSSPPLQLTKSPDYMSGLSSPLLDMDDNETTTQPRESIMPRINDGENSLVSSRNSSSPFQSAETAQPTSQSENGPAQNEPAWLSEFDSELIDSLRGIVEFVD

SEQ ID NO: 36543 - DNA, 318 bp, Muscodor strobelii
  misc_feature: SGI EST ID NO. CUFF.87115.0
  misc_feature: Variant of the nucleotide sequence at SEQ ID NO 36541
aatggcacattcctcagcgtcagggtgtgcaaatctccagctttatatcatttggacaacgttcgaaacgcggcggatgcgaacgaacgaatgaaggagtggtgtgagcgagatgtcagattgttacaagactatggactaataagcaaacaaacaccgttcgtctgcactgaatatgggcaggctatgtccagatacatgatgccatttgagacgatgaaggtgctactctcgattccccgcgcagcgcaggtgcaagaaatgctcacgactatttgccaggcaccagtcttcaaagacataaagtttaagcccgtg

SEQ ID NO: 36544 - DNA, 1314 bp, Muscodor strobelii
  misc_feature: SGI cDNA ID NO. 572670
  misc_feature: Reduced expression when VOC is produced
  misc_feature: Encodes the peptide sequence at SEQ ID NO 36545
atggcacttctcgacaatgggctcggcccgccgcagactatgcgcggacccaggctgttgggcatgccaatgatgcaggtctcccttattacactgactttccagaattccgcattgatcttgatcatgcattatagtcgaatgatgccgcccagcggcgatcaccgatacttcacatccaccgctgtcttcctgaccgaacttatcaaactcgccatctccttgacatttgccatttatgaagtttcaagaggagacggttggaagcttgcgctacccgccactctctacactttgcagaacactcttcagtatgtggcagtcggtaatttggatcccatacattaccaagtactctatcagttaaagatacttgccacggctgtcttcaccgtcacgatgctaggacgatcattatcatctaagaaatggatatctatcgtcattctgactcttggtgtttcgatcgtttcgattccgggatcaaattctggagacagctcattcatgatccatgacatgacagaccattattttccccgatcaatgcacgagctcggccagctagcgggcagtgttggagaagttgcgcacgagttgacaaaaagatccgccacatacgaagggattcaggaggatgttcacagcgcacctatcatgaactattctattggcctatctgctgcattggtggtggccgcgctttcgagtttcaccggggttttcttcgagaaaatcctcaagcattcagattcatcggcttctgtgtggattcggaatattcaactctctttctattcgctgtttcctgcgtttcttatcggcgtagtgttcaatgaaggcacggaaatctctaaacacggatttttcgacggatacaattgggtcgtttgggtattgattgtcctacaggctttcggtggtgtgcttgcttctctatgcatcaactatgccgataatattgccaagaacttcgctactagtattagcatagtcatcagctttttgttcagcgtgtggtttttcgagtgcaaggttacatttacgttcttgcttggtacaatactcgtccttgttgcgacgtttctgtacaccggtccggatcgccgggcaagaccacctccgatcagcatcgtcagttttgaaaagacaactatcgacccgatgaacacgccgaaatcaaatgacagattagaggtaccaaatcccatggggaatcctcagaatctaggtctatcaacttccagaccgtcatcaccactgcgccatcacgtccggaagccttcagctagaggcaaggctagagatgattga

SEQ ID NO: 36545 - protein, 437 aa, Muscodor strobelii
  misc_feature: SGI Peptide ID NO. 572670
  misc_feature (70)..(357): Pfam Id: PF04142 Pfam Desc: Nucleotide-sugar transporter
  misc_feature (37)..(372): Pfam Id: PF08449 Pfam Desc: UAA transporter family
  misc_feature (216)..(357): Pfam Id: PF04142 Pfam Desc: Nucleotide-sugar transporter
  misc_feature (70)..(157): Pfam Id: PF04142 Pfam Desc: Nucleotide-sugar transporter
  misc_feature (333)..(372): Pfam Id: PF08449 Pfam Desc: UAA transporter family
  misc_feature (11)..(437): NCBI GI: 171682842 Blast Desc: protein product [Podospora anserina] gi|170941380|emb|CAP67030.1| protein product [Podospora anserina]
  misc_feature (16)..(433): NCBI GI: 116203127 Blast Desc: CHGG_09448 [Chaetomium globosum CBS 148.51] gi|88177966|gb|EAQ85434.1| CHGG_09448 [Chaetomium globosum CBS 148.51]
  misc_feature (10)..(437): NCBI GI: 85096045 Blast Desc: NCU09792 [Neurospora crassa OR74A] gi|28921671|gb|EAA30954.1| conserved [Neurospora crassa OR74A]
  misc_feature (14)..(437): NCBI GI: 145603675 Blast Desc: MGG_05899 [Magnaporthe grisea 70-15] gi|145011855|gb|EDJ96511.1| MGG_05899 [Magnaporthe grisea 70-15]
  misc_feature (20)..(437): NCBI GI: 256724952 Blast Desc: NECHADRAFT_34471 [Nectria haematococca mpVI 77-13-4]
  misc_feature (19)..(394): NCBI GI: 46121937 Blast Desc: FG05346.1 [Gibberella zeae PH-1]
  misc_feature (45)..(437): NCBI GI: 156042177 Blast Desc: SS1G_11639 [Sclerotinia sclerotiorum 1980] gi|154696022|gb|EDN95760.1| SS1G_11639 [Sclerotinia sclerotiorum 1980]
  misc_feature (20)..(420): NCBI GI: 121700188 Blast Desc: udp-galactose transporter [Aspergillus clavatus NRRL 1] gi|119396501|gb|EAW06933.1| udp-galactose transporter [Aspergillus clavatus NRRL 1]
  misc_feature (28)..(431): NCBI GI: 238487320 Blast Desc: UDP-galactose transporter, [Aspergillus flavus NRRL3357] gi|220699777|gb|EED56116.1| UDP-galactose transporter, [Aspergillus flavus NRRL3357]
  misc_feature (49)..(420): NCBI GI: 119472919 Blast Desc: udp-galactose transporter [Neosartorya fischeri NRRL 181] gi|119406597|gb|EAW16548.1| udp-galactose transporter [Neosartorya fischeri NRRL 181]
  misc_feature: Useful for introducing or modulating the production of volatile compounds
MALLDNGLGPPQTMRGPRLLGMPMMQVSLITLTFQNSALILIMHYSRMMPPSGDHRYFTSTAVFLTELIKLAISLTFAIYEVSRGDGWKLALPATLYTLQNTLQYVAVGNLDPIHYQVLYQLKILATAVFTVTMLGRSLSSKKWISIVILTLGVSIVSIPGSNSGDSSFMIHDMTDHYFPRSMHELGQLAGSVGEVAHELTKRSATYEGIQEDVHSAPIMNYSIGLSAALVVAALSSFTGVFFEKILKHSDSSASVWIRNIQLSFYSLFPAFLIGVVFNEGTEISKHGFFDGYNWVVWVLIVLQAFGGVLASLCINYADNIAKNFATSISIVISFLFSVWFFECKVTFTFLLGTILVLVATFLYTGPDRRARPPPISIVSFEKTTIDPMNTPKSNDRLEVPNPMGNPQNLGLSTSRPSSPLRHHVRKPSARGKARDD

SEQ ID NO: 36546 - DNA, 2183 bp, Muscodor strobelii
  misc_feature: SGI EST ID NO. CUFF.87166.0
  misc_feature: Variant of the nucleotide sequence at SEQ ID NO 36544
accagaccctagctccctcgacacctgcaacaactctatttcaacaaatctacaatgctgtgttcttaggagacggttggaagcttgcgctacccgccactctctacactttgcagaacactcttcagtatgtggcagtcggtaatttggatcccatacattaccaagtactctatcagttaaagatacttgccacggctgtcttcaccgtcacgatgctaggacgatcattatcatctaagaaatggatatctatcgtcattctgactcttggtgtttcgatcgtttcgattccgggatcaaattctggagacagctcattcatgatccatgacatgacagaccattattttccccgatcaatgcacgagctcggccagctagcgggcagtgttggagaagttgcgcacgagttgacaaaaagatccgccacatacgaagggattcaggaggatgttcacagcgcacctatcatgaactattctattggcctatctgctgcattggtggtggccgcgctttcgagtttcaccggggttttcttcgagaaaatcctcaagcattcagattcatcggcttctgtgtggattcggaatattcaactctctttctattcgctgtttcctgcgtttcttatcggcgtagtgttcaatgaaggcacggaaatctctaaacacggatttttcgacggatacaattgggtcgtttgggtattgattgtcctacaggctttcggtggtgtgcttgcttctctatgcatcaactatgccgataatattgccaagaacttcgctactagtattagcatagtcatcagctttttgttcagcgtgtggtttttcgagtgcaaggttacatttacgttcttgcttggtacaatactcgtccttgttgcgacgtttctgtacaccggtccggatcgccgggcaagaccacctccgatcagcatcgtcagttttgaaaagacaactatcgacccgatgaacacgccgaaatcaaatgacagattagaggtaccaaatcccatggggaatcctcagaatctaggtctatcaacttccagaccgtcatcaccactgcgccatcacgtccggaagccttcagctagaggcaaggctagagatgattgatctccactacgatccgtagacaagaaaccggacaagagataccactgaggacgactaattattatcacggtacctcgaaacaaacaaacacatcattgatctgtcgagagcaacgctgcgctgacgtgtgctataatctcgtaatcggacacgcgttggtgtcgtagcggtcgcctatgaacgaatgccaccacaaagagcatggttaggcattgaggctaagctagatggcagtgcggaattgatctggatacagggaatgattcagtataaacgagggccagttcgactcctggggtctatattggcaacgacatgatgcacgaaacagtaacgtgcgatcctggaataagacaaataagcgtcccttcgcttttaagcatcctggattttctctaaagacactagtggcttgactttttgttgtgtatgccaatctcatctgcatcccaagcatgacatattatatacgtatcagaaagattcgatatcaaagttcgttattaggtgccttgactcttgatttcgactagaacaaaccacatgataaccctacagcacaaacaatgctaagctggtcatcatggagcaagtcagcattgacacttgcgatccatgattgtcatctcaaaaggccaggtttcaaattgagggcatacggtagtcatgtgaccgaagttgcgagtggatgaggaaatttggtatcaggaaggggcgactctttccatgccgcgacgtcctcaagaggacataatgcgaaacgccaacacatcaggaggcaggtgcgtcttgacgttcttcccgagggctattctgataccagtgccctaatttcccaccgtccatattctgccacttggcgcctcaccccttttccatatccgcgtaaccgtggtcatgcatctatcaacatttctatgcgctcccaaatagtgtctcgatgcgacagaatcagatgtagtgcctaacatcccttgtgaaatatgtatcgcaacatataagccttgttcgcatcaatcctatcctacgcacctcgaatattggcctattttc

SEQ ID NO: 36547 - DNA, 2973 bp, Muscodor strobelii
  misc_feature: SGI cDNA ID NO. 572671
  misc_feature: Reduced expression when VOC is produced
  misc_feature: Encodes the peptide sequence at SEQ ID NO 36548
atggccggcaaaacgaaatcgaaattcacgtttcctgtaccgggctggccgaataaaaagaaagacgtggaaaagaacaaggcgccgtcgagtcccctatcaaaggcgcaaaaaatactaggcgcagacggaataaacaccggatcatcaagactgcgagtggaaacaggtcgaggttgggagaccagctcaaatggcggcatcagtatctccgtgtccgagagcagtgccagtcaggcaacaaatgataccgggttcgacagggcagacggcaatgggtcagggacgacaagcttcggtcagacgctctgggagcaagagtctgcgataataccccgacagcttcgtagtgctcatgggcctcaacggacaggtctgacgacaaagcgatcagcgcgcactgttggtggtggatctacagatatttccgccagtcgtaggcgaaattctacgtcgaccatcgactcagaaagacattacgattctacgaagatgccactctacatatcgcaacaaacgtcgagctcggccatggcgaaggggattccatcaaagatcaatatgattcttgatattgacggcactttggctggccctcagcctaagaaaaagggcaaacctgcaaagctcgatctctcgcgtttgcggcctaagtctcgcaaagagcgcaaccaaggtttggctcacggcgaaccaatactggggaataactatgtgatgaaatcgccgtctttcatgtcgacggtatcgcccgccatcctgtcgtcggccaccgatgattcgagaagatctcaacgtaagcttatgaagcagcaaccatccaacgaaagccaaatttcagcaccaacatcgtctcggtcaagaggtatctctgatacttctgggctacatcagctgtataatcattatgaacagacctctttcagagacgagcccggcttcgaaaacgaggaagacggcaacagcgatgatgaagatttggctaatgatacgcagtcagataactacggagagtccgacttacgtgaccaagagcgttcgaatgtcatcacttttgatcttgtggcaccacacccctcatcatcggcgcgcgggcttgcgatagccgggaaacactctcgcaatgattcacatgacagcagaatgagtacttccgctcatgaaaaccagatggtactttcagccacaagacacgactatgctgggagtatctcaagtcgccacacacgcacgtcaaaagcatctccgtcaattaagagcacattagataatgatcgcttgcaaaacagtgttctttcgctctctgattcttcagacgatgaagctatcgaatcgtttccggtgccacctctgcatcgcccagaaagtggtatacaaaatgcaacaacagaccatccagaatttccgggccaggcaagcgcgaatcaaccccaggcaatgaatggcaccaagagattcgtaccgtcgctagatcagctcaatgagcatttcgagtctactctggcacccaacacacacattactcattctcgatcaaacaataccctgcactctagtcactcatctatgagcacgttaacgccaaaccagttcatgtatgcgtcggcttctgattctagattgtcaatgagatcgacagaaacacttgatacactaggttcttcacgccaagcggaattcagtgttcaacaagcgagagcggtctcttttggacgacttgcatcgaccgccgaggctgcctccggagttgcaatgcctgatggcgttgagagtctcaaggcaatgcgaaggctatctcgtcagaatagcagccgaagccgtatatcaaacatgtcacacgcgtcagatcagcccacgcctccactctcccctaatagtgtagaattctatgtgaagtctcgggaatcgcttcagcgagatgcagccgcggctgggaattccgaggccaataatgcacggctgatggcagtgacgcgacaggaggaaatgctattagctgcgttgcgaaagaaaagagccaagatgcatgaaagtgctggtttaggggaaaaggaagatgcagaaagccggcctagcattggagtcggtagcagggaaccatccgcgaagcctgaagtgccggcccaccactcagcgtcgaaaacacgaagttggcccaagaggacatcttcgcttttcattggcgcatctcaagaagatctccctcagaacaagcatccagataactctcacagcaatcggttcgatactgccatgacctcatcagtaagtcgcagtgaaacaacaatgagcaagtcgactaaggcaactaaatctgcgcatgtcatgactgaacctcgccacgagcgcgttctattttacttacatcggcccgttgaggatgtcaagacgtctgaattgccggaaacaagtccagtcagcgattacatggatgatagcgacggccaagaccttgtggttaacgagcgacgtacaagtcgtatgcaagctcgacgcgaaagtgctagcccaggtcttgctcgcgagagtaacgttgaaaacaccatctcaccgagacagagcgttaggtacagcaatccgcgtacgaaagacatcgttcccctgagccccctcagcgcaccgacacagagatatcggttacaagatgtgcctgaagtcgaactcgaacccgacatcaatgaagatattgacgcggatgatattgacgacgaatatcatggtgatgcttttgctcaacctgcgatgccaccaatgccaccaccatcaggcccactgccttcagtgccaaagaaccgtacttctcaaataaatacctcgccctcatctgagttcttccttcatccgtccagtgccgtcggccgtaaatcgcccgagtctaaacccgggcatatcaaaagcaagaggtctatggtgcggctaagtgcagtaggctttgtaaacacgccttcaccacactggggtgacgaggattga

SEQ ID NO: 36548 - protein, 990 aa, Muscodor strobelii
  misc_feature: SGI Peptide ID NO. 572671
  misc_feature (7)..(678): NCBI GI: 256727140 Blast Desc: NECHADRAFT_91322 [Nectria haematococca mpVI 77-13-4]
  misc_feature (7)..(686): NCBI GI: 116203129 Blast Desc: CHGG_09449 [Chaetomium globosum CBS 148.51] gi|88177967|gb|EAQ85435.1| CHGG_09449 [Chaetomium globosum CBS 148.51]
  misc_feature (3)..(443): NCBI GI: 261361522 Blast Desc: conserved [Verticillium albo-atrum VaMs.102]
  misc_feature (7)..(450): NCBI GI: 171682866 Blast Desc: protein product [Podospora anserina] gi|170941392|emb|CAP67042.1| protein product [Podospora anserina]
  misc_feature (15)..(428): NCBI GI: 46134373 Blast Desc: FG09296.1 [Gibberella zeae PH-1]
  misc_feature (8)..(308): NCBI GI: 145603665 Blast Desc: MGG_05904 [Magnaporthe grisea 70-15] gi|145011849|gb|EDJ96505.1| MGG_05904 [Magnaporthe grisea 70-15]
  misc_feature (595)..(688): NCBI GI: 145603665 Blast Desc: MGG_05904 [Magnaporthe grisea 70-15] gi|145011849|gb|EDJ96505.1| MGG_05904 [Magnaporthe grisea 70-15]
  misc_feature (619)..(677): NCBI GI: 85095681 Blast Desc: NCU09787 [Neurospora crassa OR74A] gi|28921598|gb|EAA30890.1| [Neurospora crassa OR74A]
  misc_feature (3)..(195): NCBI GI: 156042179 Blast Desc: [Sclerotinia sclerotiorum 1980] gi|154696023|gb|EDN95761.1| [Sclerotinia sclerotiorum 1980]
  misc_feature (1)..(250): NCBI GI: 189193295 Blast Desc: [Pyrenophora tritici-repentis Pt-1C-BFP] gi|187978550|gb|EDU45176.1| [Pyrenophora tritici-repentis Pt-1C-BFP]
  misc_feature: Useful for introducing or modulating the production of volatile compounds
MAGKTKSKFTFPVPGWPNKKKDVEKNKAPSSPLSKAQKILGADGINTGSSRLRVETGRGWETSSNGGISISVSESSASQATNDTGFDRADGNGSGTTSFGQTLWEQESAIIPRQLRSAHGPQRTGLTTKRSARTVGGGSTDISASRRRNSTSTIDSERHYDSTKMPLYISQQTSSSAMAKGIPSKINMILDIDGTLAGPQPKKKGKPAKLDLSRLRPKSRKERNQGLAHGEPILGNNYVMKSPSFMSTVSPAILSSATDDSRRSQRKLMKQQPSNESQISAPTSSRSRGISDTSGLHQLYNHYEQTSFRDEPGFENEEDGNSDDEDLANDTQSDNYGESDLRDQERSNVITFDLVAPHPSSSARGLAIAGKHSRNDSHDSRMSTSAHENQMVLSATRHDYAGSISSRHTRTSKASPSIKSTLDNDRLQNSVLSLSDSSDDEAIESFPVPPLHRPESGIQNATTDHPEFPGQASANQPQAMNGTKRFVPSLDQLNEHFESTLAPNTHITHSRSNNTLHSSHSSMSTLTPNQFMYASASDSRLSMRSTETLDTLGSSRQAEFSVQQARAVSFGRLASTAEAASGVAMPDGVESLKAMRRLSRQNSSRSRISNMSHASDQPTPPLSPNSVEFYVKSRESLQRDAAAAGNSEANNARLMAVTRQEEMLLAALRKKRAKMHESAGLGEKEDAESRPSIGVGSREPSAKPEVPAHHSASKTRSWPKRTSSLFIGASQEDLPQNKHPDNSHSNRFDTAMTSSVSRSETTMSKSTKATKSAHVMTEPRHERVLFYLHRPVEDVKTSELPETSPVSDYMDDSDGQDLVVNERRTSRMQARRESASPGLARESNVENTISPRQSVRYSNPRTKDIVPLSPLSAPTQRYRLQDVPEVELEPDINEDIDADDIDDEYHGDAFAQPAMPPMPPPSGPLPSVPKNRTSQINTSPSSEFFLHPSSAVGRKSPESKPGHIKSKRSMVRLSAVGFVNTPSPHWGDED

SEQ ID NO: 36549 - DNA, 5037 bp, Muscodor strobelii
  misc_feature: SGI EST ID NO. CUFF.87156.0
  misc_feature: Variant of the nucleotide sequence at SEQ ID NO 36547
gtttgggtcatgatcgcgcaccgaaagtggtatactagacagggttaggtgctttcaacttaaaatgaaatgtagtcacatagttgtacacgcggtatctagcggatccctcctttgcatgcatggtgcggattgcatacccagtttttcatattgcggcagatccctactctccagccccatcgtccctgtctgctttgcagagaagactgcttttctctcaccattcttttctctaacgaaacattccgcttgcggttccggcagttcatgccagattccgtttcatcgacaattatattcgtgaggctgcgtctctcacgtcaagcgagtcaggcaagcgacaagtctcggaacccctaacttcaaagtgtggatcacttggagaatacagtcaatacttggaaattcagctcatatatagggcctcatatatggagagtacaggaccgtttgttctcttttgctctcggcggttggggttgtccagcaccgacagaataaacgtttttggaggagggacggtcgcgccaacacaattccgagcaaacgccacttcaccttaaccatgtccgagacgaattgaaggtttaacggcgccgaatgagtaacctttcctgagatgctcagaagatcgataccgacatccaatcatcactctctcaacctccctgggcgtatcctgcacagattgtggattttgctcggttccgttttgatgactggcagcgcgtcggaagcctctgataaacatatatcacgttgtccgccacggattccagccgtttcgccccgaactttaaggctcaagcgcccggactgacgccccataaactgtaacgtggaagtttttgaggcacaatacttataaaatcctgtgcaggagaatcgtcgcccgatgatagaaagcgcgtatcattaaagacatgacttatggctagggaaatggccggcaaaacgaaatcgaaattcacgtttcctgtaccgggctggccgaataaaaagaaagacgtggaaaagaacaaggcgccgtcgagtcccctatcaaaggcgcaaaaaatactaggcgcagacggaataaacaccggatcatcaagactgcgagtggaaacaggtcgaggttgggagaccagctcaaatggcggcatcagtatctccgtgtccgagagcagtgccagtcaggcaacaaatgataccgggttcgacagggcagacggcaatgggtcagggacgacaagcttcggtcagacgctctgggagcaagagtctgcgataataccccgacagcttcgtagtgctcatgggcctcaacggacaggtctgacgacaaagcgatcagcgcgcactgttggtggtggatctacagatatttccgccagtcgtaggcgaaattctacgtcgaccatcgactcagaaagacattacgattctacgaagatgccactctacatatcgcaacaaacgtcgagctcggccatggcgaaggggattccatcaaagatcaatatgattcttgatattgacggcactttggctggccctcagcctaagaaaaagggcaaacctgcaaagctcgatctctcgcgtttgcggcctaagtctcgcaaagagcgcaaccaaggtttggctcacggcgaaccaatactggggaataactatgtgatgaaatcgccgtctttcatgtcgacggtatcgcccgccatcctgtcgtcggccaccgatgattcgagaagatctcaacgtaagcttatgaagcagcaaccatccaacgaaagccaaatttcagcaccaacatcgtctcggtcaagaggtatctctgatacttctgggctacatcagctgtataatcattatgaacagacctctttcagagacgagcccggcttcgaaaacgaggaagacggcaacagcgatgatgaagatttggctaatgatacgcagtcagataactacggagagtccgacttacgtgaccaagagcgttcgaatgtcatcacttttgatcttgtggcaccacacccctcatcatcggcgcgcgggcttgcgatagccgggaaacactctcgcaatgattcacatgacagcagaatgagtacttccgctcatgaaaaccagatggtactttcagccacaagacacgactatgctgggagtatctcaagtcgccacacacgcacgtcaaaagcatctccgtcaattaagagcacattagataatgatcgcttgcaaaacagtgttctttcgctctctgattcttcagacgatgaagctatcgaatcgtttccggtgccacctctgcatcgcccagaaagtggtatacaaaatgcaacaacagaccatccagaatttccgggccaggcaagcgcgaatcaaccccaggcaatgaatggcaccaagagattcgtaccgtcgctagatcagctcaatgagcatttcgagtctactctggcacccaacacacacattactcattctcgatcaaacaataccctgcactctagtcactcatctatgagcacgttaacgccaaaccagttcatgtatgcgtcggcttctgattctagattgtcaatgagatcgacagaaacacttgatacactaggttcttcacgccaagcggaattcagtgttcaacaagcgagagcggtctcttttggacgacttgcatcgaccgccgaggctgcctccggagttgcaatgcctgatggcgttgagagtctcaaggcaatgcgaaggctatctcgtcagaatagcagccgaagccgtatatcaaacatgtcacacgcgtcagatcagcccacgcctccactctcccctaatagtgtagaattctatgtgaagtctcgggaatcgcttcagcgagatgcagccgcggctgggaattccgaggccaataatgcacggctgatggcagtgacgcgacaggaggaaatgctattagctgcgttgcgaaagaaaagagccaagatgcatgaaagtgctggtttaggggaaaaggaagatgcagaaagccggcctagcattggagtcggtagcagggaaccatccgcgaagcctgaagtgccggcccaccactcagcgtcgaaaacacgaagttggcccaagaggacatcttcgcttttcattggcgcatctcaagaagatctccctcagaacaagcatccagataactctcacagcaatcggttcgatactgccatgacctcatcagtaagtcgcagtgaaacaacaatgagcaagtcgactaaggcaactaaatctgcgcatgtcatgactgaacctcgccacgagcgcgttctattttacttacatcggcccgttgaggatgtcaagacgtctgaattgccggaaacaagtccagtcagcgattacatggatgatagcgacggccaagaccttgtggttaacgagcgacgtacaagtcgtatgcaagctcgacgcgaaagtgctagcccaggtcttgctcgcgagagtaacgttgaaaacaccatctcaccgagacagagcgttaggtacagcaatccgcgtacgaaagacatcgttcccctgagccccctcagcgcaccgacacagagatatcggttacaagatgtgcctgaagtcgaactcgaacccgacatcaatgaagatattgacgcggatgatattgacgacgaatatcatggtgatgcttttgctcaacctgcgatgccaccaatgccaccaccatcaggcccactgccttcagtgccaaagaaccgtacttctcaaataaatacctcgccctcatctgagttcttccttcatccgtccagtgccgtcggccgtaaatcgcccgagtctaaacccgggcatatcaaaagcaagaggtctatggtgcggctaagtgcagtaggctttgtaaacacgccttcaccacactggggtgacgaggattgaaccctgatacacagccaaagctctttatattctaccaaggaaggagctcgagacacaaacctaatacctacacccacattccgagtttgatttattttaccacgaaaacatcttctgggatatggggaccccaacacagatacatatcagcgctttgcatgcccctttgatacacaccgtgcttatagcaatactctagctcatcgacgttatttatcttttttctagtgtacatcatattggattcaggggcatgagatcggacatgcatattcatattttggattggtcaaaagcggtgttatacaggtacatggacgatactatgattccccactatagtaatgactgacggagagcattggagagaaggaaggccatgatagagacagcttaatgtatgctccttttgcctaattctgtttgtcttaaagatatggaggacaaaattgatttccatctgccgagtgtctacctcatctacgtgtatctaggagcattgaggtcttccccgggagtgctcagtgaagaattgagaagctcaatggaaaaaaacatttcaacacgaacctcaatacatcaatgttaagtggctggtccaacatttctggtcagtttgtaaagcaacacatgaccttcatattgtactttagaactgtatgttaatcatatctgggtagcgtcgctacccacgcgcatgtagctttcaaggcatacttagtccacccacatcgttgactacatgtaagtattcacacttggctgtgaatcattgggcaaatcaggagcttccagatactaatgactcatctaactaataccgattaaaggacagtgttctatccgcctccaatgctcaccgccgcttcttcaatgcactcaattatgcgccacattgggcatgaataagatagtgtgagattaaatacagggcatcgcttggctggtccttcaagattaatgattaatgccggcgcgatgctactatgtggatgtacctaggtttcatgcatgcaagccataagctatctatgtgtgtgatgcgccattcaaaaatgcagagaaaagatgatgtgccggaagtggaggcgttggaattggggaagtgcaggactttgc

SEQ ID NO: 36550 - DNA, 1341 bp, Muscodor strobelii
  misc_feature: SGI cDNA ID NO. 572672
  misc_feature: Encodes the peptide sequence at SEQ ID NO 36551
atgccgctgacagtgtattatgacaagccgatcccatcgttgatctacgtattctgcctgtggaaaacaattcttctcgcgattgtgatgggtagtggagttgggcctgcatatgacacatctagcactttgctttctccagaacgaagcacctcatccgaatcatttttggacctagcctcaaaattgacaagatgggatgcaatatacttcattcagtcctcccgtcgtggctatgtatatgaacaggaatgggcctttgctcgcgggctgccattcctcgttgctttcattgcgaaagcttcttcctggctaggtgtcagtaatgaaaactcagttgagcctctcgttgcagtcttcgtcgccagtgtatcgcatctgctttcgacactggtcctctacaagctcggccaggcggtgtgggagaacagacgggtgtcgttcatcgcagctgtgctccatatagtatcgcccgctggtgtttttctttcagcgccctattcagagagtccctttgctcttttcacatttctcgggcatctattcttcgctagggccgtgctgagaaccaagtcaactattactcatgatataggtttagtggcatcgggcttatggtttggtgtcgcggtgaactttcgcagcaatggtatccttagcggcttgtattttgctgtcgagctctgccgtgagatgacacaggctattactaccgagagcatacgaagacggcttgctctggtgattggcgggtccgctctcgctgtcggacttgtggtaccgcagttcattgcttaccatacgtattgtaacggttctctaggctctgagttgagaccgtggtgtacaaagagacttccaagcatctataccttcgttcaggagcattactggttagtctattgtgcttggtttctgacacttgctgacaaggtgactaggaacgttggcttcttacggtactggactctcccaaacatacctttgtttctactcgctagtcctgttttatatctcatggttacctcggggctcgacttcatctcccgaccagagcagataagaggaccaacgaaaggactatcgggggcgcagaatcacgtgatcctgattcgctccatggcagcagttcaggtcgtgctgactgtcctggccattacgaactatcacattcaaataattacaagactgtcatctgcatatcctgtaatgtattggtggcttgctgatctgatatctcgcaagaactcagtaaagttcacgcaaggtgttgtcgcattcatggttatgtatgcaagcattcaaggtgccctatttgcatcctttctacctccagcctga

SEQ ID NO: 36551 - protein, 446 aa, Muscodor strobelii
  misc_feature: SGI Peptide ID NO. 572672
  misc_feature (10)..(446): Pfam Id: PF04188 Pfam Desc: Mannosyltransferase (PIG-V))
  misc_feature (62)..(352): Pfam Id: PF04188 Pfam Desc: Mannosyltransferase (PIG-V))
  misc_feature (1)..(446): NCBI GI: 46134231 Blast Desc: FG09255.1 [Gibberella zeae PH-1] gi|110808266|sp|Q4I0K3.1|GPI18_GIBZE RecName: Full=GPI mannosyltransferase 2; AltName: Full=GPI mannosyltransferase II;
  misc_feature (12)..(446): NCBI GI: 261359305 Blast Desc: GPI mannosyltransferase [Verticillium albo-atrum VaMs.102]
  misc_feature (7)..(446): NCBI GI: 116202367 Blast Desc: CHGG_09068 [Chaetomium globosum CBS 148.51] gi|110808265|sp|Q2GSI6.1|GPI18_CHAGB RecName: Full=GPI mannosyltransferase 2; AltName: Full=GPI mannosyltransferase II;
  misc_feature (9)..(446): NCBI GI: 171682264 Blast Desc: protein product [Podospora anserina] gi|170941091|emb|CAP66741.1| protein product [Podospora anserina]
  misc_feature (1)..(446): NCBI GI: 256727159 Blast Desc: NECHADRAFT_33109 [Nectria haematococca mpVI 77-13-4]
  misc_feature (8)..(446): NCBI GI: 119495098 Blast Desc: NFIA_011280 [Neosartorya fischeri NRRL 181] gi|119412504|gb|EAW22445.1| conserved [Neosartorya fischeri NRRL 181]
  misc_feature (9)..(446): NCBI GI: 119194333 Blast Desc: CIMG_01541 [Coccidioides immitis RS]
  misc_feature (9)..(446): NCBI GI: 240105352 Blast Desc: CPC735_049150 [Coccidioides posadasii C735 delta SOWgp]
  misc_feature (3)..(446): NCBI GI: 169778143 Blast Desc: [Aspergillus oryzae RIB40] gi|238495412|ref|XP_002378942.1| DUF409 domain protein [Aspergillus flavus NRRL3357] gi|83772274|dbj|BAE62404.1| protein
  misc_feature (37)..(446): NCBI GI: 85090765 Blast Desc: NCU05960 [Neurospora crassa OR74A] gi|28919947|gb|EAA29338.1| [Neurospora crassa OR74A]
MPLTVYYDKPIPSLIYVFCLWKTILLAIVMGSGVGPAYDTSSTLLSPERSTSSESFLDLASKLTRWDAIYFIQSSRRGYVYEQEWAFARGLPFLVAFIAKASSWLGVSNENSVEPLVAVFVASVSHLLSTLVLYKLGQAVWENRRVSFIAAVLHIVSPAGVFLSAPYSESPFALFTFLGHLFFARAVLRTKSTITHDIGLVASGLWFGVAVNFRSNGILSGLYFAVELCREMTQAITTESIRRRLALVIGGSALAVGLVVPQFIAYHTYCNGSLGSELRPWCTKRLPSIYTFVQEHYWLVYCAWFLTLADKVTRNVGFLRYWTLPNIPLFLLASPVLYLMVTSGLDFISRPEQIRGPTKGLSGAQNHVILIRSMAAVQVVLTVLAITNYHIQIITRLSSAYPVMYWWLADLISRKNSVKFTQGVVAFMVMYASIQGALFASFLPPA

SEQ ID NO: 36552 - DNA, 2288 bp, Muscodor strobelii
  misc_feature: SGI EST ID NO. CUFF.87178.1
  misc_feature: Variant of the nucleotide sequence at SEQ ID NO 36550
ctatttataagttctatgctgcgtcgctagaatattgcatcgaaacaattcagtattgccttgggccaagtttcatgtgttttgttgaatctgaaatgagttaaagtggatgcgcgccagagggtttcagtggacccagcacctaccctgcgcacagccacggccgggccgtacctgtgaatacctcctactagaaaactcgcgattgatgcacctaaaaagggcaaacaccttcgagctcggcattctttgtcttcgaccaatatagcccaatgtgacagtcatcagtcgcttacgatgccgctgacagtgtattatgacaagccgatcccatcgttgatctacgtattctgcctgtggaaaacaattcttctcgcgattgtgatgggtagtggagttgggcctgcatatgacacatctagcactttgctttctccagaacgaagcacctcatccgaatcatttttggacctagcctcaaaattgacaagatgggatgcaatatacttcattcagtcctcccgtcgtggctatgtatatgaacaggaatgggcctttgctcgcgggctgccattcctcgttgctttcattgcgaaagcttcttcctggctaggtgtcagtaatgaaaactcagttgagcctctcgttgcagtcttcgtcgccagtgtatcgcatctgctttcgacactggtcctctacaagctcggccaggcggtgtgggagaacagacgggtgtcgttcatcgcagctgtgctccatatagtatcgcccgctggtgtttttctttcagcgccctattcagagagtccctttgctcttttcacatttctcgggcatctattcttcgctagggccgtgctgagaaccaagtcaactattactcatgatataggtttagtggcatcgggcttatggtttggtgtcgcggtgaactttcgcagcaatggtatccttagcggcttgtattttgctgtcgagctctgccgtgagatgacacaggctattactaccgagagcatacgaagacggcttgctctggtgattggcgggtccgctctcgctgtcggacttgtggtaccgcagttcattgcttaccatacgtattgtaacggttctctaggctctgagttgagaccgtggtgtacaaagagacttccaagcatctataccttcgttcaggagcattactggaacgttggcttcttacggtactggactctcccaaacatacctttgtttctactcgctagtcctgttttatatctcatggttacctcggggctcgacttcatctcccgaccagagcagataagaggaccaacgaaaggactatcgggggcgcagaatcacgtgatcctgattcgctccatggcagcagttcaggtcgtgctgactgtcctggccattacgaactatcacattcaaataattacaagactgtcatctgcatatcctgtaatgtattggtggcttgctgatctgatatctcgcaagaactcagtaaagttcacgcaaggtgttgtcgcattcatggttatgtatgcaagcattcaaggtgccctatttgcatcctttctacctccagcctgaggtagaaagaaagtactattcaccatataagacttggacgtggttccagtactcaaccgggcccaacctgggtgagcttggaatactacgtcattggttgtgtaacctctttcatctatatggagtaatgtcgaccttaaagctgaatgagactaaacgacgaatacttctctaaacatagtgttggagatctgcctctgacttgtaagaagactaaaacaagcccatccgaaatctatcgctccgccgatacttacttatactatcttgcaacaacggccttataacatcgggtctacttgacatgcgccttgttcgtcgactactttctcttcctttcaatgatcagctactatctaagattaatcagctgctagtattgtggcatgcccaatgcgttaagcaatatctcaacaccgtagcttagtatggatagatagcgccagatctctggcagtcattctgttttgaggatggtcatatagtcgtcgtagatctaggcgaatcaagaggccgacgacgctgcctacttttaaaaatattggtgttggcggtgtttatgagtcacgcatgtctctagctttaaagactattgcctaaatagttgtatgacaatatccagacggctcgtgagctgattagactaatggttccgcaagcttcctattcgtcttggcataatagcttgtatattcgaa

SEQ ID NO: 36553 - DNA, 939 bp, Muscodor strobelii
  misc_feature: SGI cDNA ID NO. 572673
  misc_feature: Encodes the peptide sequence at SEQ ID NO 36554
atgccggcctccacacttcgcaactcactgtcgagggatggcttcgtagtcatacgccagcttctcagttcagatgaactagagtccctccgtaccgccgcggcacgcacgactgatcgtgctcgcgccggaaattggcctgatgtgaggacagtcggaaagcagtttccaccgtggcatagcccatctcctggacagcctccagcggagggtatttggggcgttcagggtttactaaatccggcactgggagaggatgcgaacatatttgcagcttcgtacttcaatgacaaagttttgggcattgccaaggaacttttgacatatgagggcgaaggcgacgtcaatgacgatgacctagtcctcgaactctacaatatgcttgtgcgccccgaatcaaattttgaacttgagtggcatcgtgatgacattcctcgaaccgcttcggtcactgaagaggaagaaaagctaggtatatcggaactcaaagggaaggggaagaggtattggaacacgcaatggaatcttgcgctcttcgaggacgagtcgctgattgttgttccggggtcccacaaaagggcgcgaacagatgaagaacgaaatgcgccagtacacgagccaaatatgccaaatcagcttgttgtccaccttgagccgggcgatgttgcattttatgacaacaatattctacaccgcggagtctacgactcgaagaaggaacgaatgagtctccacggttctgttggtcataaaggtggcagtcgctttcgcgctcggaatgttttgcagcacggtatcggtaaatgggttgatcaatgtgacttcagtgccctagacaaagaaggtggaaatgtaaggcaacgcgcagagggcatgcggcaaaggcttgtcaaacttggacgtgagagcggcgatgtaggatactcacttacgggatga

SEQ ID NO: 36554 - protein, 312 aa, Muscodor strobelii
  misc_feature: SGI Peptide ID NO. 572673
  misc_feature (1)..(312): NCBI GI: 46128111 Blast Desc: FG08433.1 [Gibberella zeae PH-1] gi|82592995|sp|Q4I2X5.1|NNT1_GIBZE RecName: Full= nicotinamide N-methyltransferase
  misc_feature (4)..(312): NCBI GI: 85097198 Blast Desc: NCU04845 [Neurospora crassa OR74A] gi|28921894|gb|EAA31168.1| NCU04845 [Neurospora crassa OR74A]
  misc_feature (4)..(312): NCBI GI: 256734069 Blast Desc: [Nectria haematococca mpVI 77-13-4]
  misc_feature (1)..(312): NCBI GI: 261358672 Blast Desc: phytanoyl-CoA dioxygenase family protein [Verticillium albo-atrum VaMs.102]
  misc_feature (4)..(312): NCBI GI: 154323426 Blast Desc: BC1G_00112 [Botryotinia fuckeliana B05.10] gi|150842341|gb|EDN17534.1| BC1G_00112 [Botryotinia fuckeliana B05.10]
  misc_feature (2)..(312): NCBI GI: 39974381 Blast Desc: MGG_00663 [Magnaporthe grisea 70-15] gi|145018422|gb|EDK02701.1| MGG_00663 [Magnaporthe grisea 70-15]
  misc_feature (4)..(312): NCBI GI: 156057859 Blast Desc: SS1G_04661 [Sclerotinia sclerotiorum 1980] gi|154702446|gb|EDO02185.1| SS1G_04661 [Sclerotinia sclerotiorum 1980]
  misc_feature (10)..(312): NCBI GI: 170674520 Blast Desc: phytanoyl-CoA dioxygenase [Epichloe festucae]
  misc_feature (2)..(308): NCBI GI: 189208959 Blast Desc: phytanoyl-CoA dioxygenase family protein [Pyrenophora tritici-repentis Pt-1C-BFP] gi|187976905|gb|EDU43531.1| phytanoyl-CoA dioxygenase family protein [Pyrenophora Pt-1C-BFP]
  misc_feature (3)..(312): NCBI GI: 119482039 Blast Desc: phytanoyl-CoA dioxygenase family protein [Neosartorya fischeri NRRL 181] gi|119409202|gb|EAW19151.1| phytanoyl-CoA dioxygenase family protein [Neosartorya fischeri NRRL 181]
  misc_feature (1)..(312): SWISSPROT Homolog: EC 2.1.1.1 Nicotinamide N-methyltransferase
MPASTLRNSLSRDGFVVIRQLLSSDELESLRTAAARTTDRARAGNWPDVRTVGKQFPPWHSPSPGQPPAEGIWGVQGLLNPALGEDANIFAASYFNDKVLGIAKELLTYEGEGDVNDDDLVLELYNMLVRPESNFELEWHRDDIPRTASVTEEEEKLGISELKGKGKRYWNTQWNLALFEDESLIVVPGSHKRARTDEERNAPVHEPNMPNQLVVHLEPGDVAFYDNNILHRGVYDSKKERMSLHGSVGHKGGSRFRARNVLQHGIGKWVDQCDFSALDKEGGNVRQRAEGMRQRLVKLGRESGDVGYSLTG

SEQ ID NO: 36555 - DNA, 1339 bp, Muscodor strobelii
  misc_feature: SGI EST ID NO. CUFF.87160.0
  misc_feature: Variant of the nucleotide sequence at SEQ ID NO 36553
ataattggagatgaagagggtactgcggggttctatgttaggtacattacccgcttcttgccacacccacgtgcgaactcccaattttcatggctcagttatcatagataattcgtggatatatgtagttcacgcaagttggcgagagccaaacactatttgctatcacgggcacacgaaaccaccatcaggtataatatctcaaaattaagacgctgtctcattctcgcgcagaggtcgaaccatgccggcctccacacttcgcaactcactgtcgagggatggcttcgtagtcatacgccagcttctcagttcagatgaactagagtccctccgtaccgccgcggcacgcacgactgatcgtgctcgcgccggaaattggcctgatgtgaggacagtcggaaagcagtttccaccgtggcatagcccatctcctggacagcctccagcggagggtatttggggcgttcagggtttactaaatccggcactgggagaggatgcgaacatatttgcagcttcgtacttcaatgacaaagttttgggcattgccaaggaacttttgacatatgagggcgaaggcgacgtcaatgacgatgacctagtcctcgaactctacaatatgcttgtgcgccccgaatcaaattttgaacttgagtggcatcgtgatgacattcctcgaaccgcttcggtcactgaagaggaagaaaagctaggtatatcggaactcaaagggaaggggaagaggtattggaacacgcaatggaatcttgcgctcttcgaggacgagtcgctgattgttgttccggggtcccacaaaagggcgcgaacagatgaagaacgaaatgcgccagtacacgagccaaatatgccaaatcagcttgttgtccaccttgagccgggcgatgttgcattttatgacaacaatattctacaccgcggagtctacgactcgaagaaggaacgaatgagtctccacggttctgttggtcataaaggtggcagtcgctttcgcgctcggaatgttttgcagcacggtatcggtaaatgggttgatcaatgtgacttcagtgccctagacaaagaaggtggaaatgtaaggcaacgcgcagagggcatgcggcaaaggcttgtcaaacttggacgtgagagcggcgatgtaggatactcacttacgggatgattaatctcgaaggatctcacgacgcatgtactttaatcgcgtcttgtgaactttttgcttgcccacgtgcgagaaaaacgaactagtaagtagcaaagccattctctattggtttgcaaaaggggtgaagtctcgttgtagtagctgcgcctgaag

SEQ ID NO: 36556 - DNA, 2298 bp, Muscodor strobelii
  misc_feature: SGI cDNA ID NO. 572674
  misc_feature: Elevated expression when VOC is produced
  misc_feature: Encodes the peptide sequence at SEQ ID NO 36557
atgcgtttctcgtcattcctttcggctgtcgccaccctcgccgtcggcatcaacgcctactggctcgaagatgttcaacaccagggccttgcgccctttggcggtgatgggtataaggtctttcgcaatgtgaaagattacggtgccaaaggtgacggcaccactgacgatactgctgctattcaagccgcgctggacgacggcaacaaccgctgtcttcaaggctgtgcctccacgactacaacgccggccgtcgtttacttccctgcgggaacttaccttctttccaagtctctcattcccccttatttcacgcacttcattggcgacccgaccaacgtccctacattgaaggccagcgcggcctttgcaggctttggtgtggttgacgccaaccactatttcaccgatgttttgaactgggtctctgttaatgttttcttcatgtcgatgaggaacttcatcattgatagtactagcgtcgctcccgccactgcttggacaggtatacactggcccgtgtcacaggcgacctcgctcaacaacatcgtgttcaacatgccaacggaccccagcactgtccacgttggtctgttcgtcgaatctggctccggtggctttatgagcaacctggtcttcaatggtggtgccactggtgcttctctcggtaaccaacagtataccatgcgcaacctcactttcaacaattgccagactgctattattactctctggaattggggttggacctacgctgacatgaatatcaacaactgcggagttggtattgatatgaccgccggaaacagcagctctatccaaactggctcggttactgttattgacagcaagatctcaaacaccccagtcggtattaagaccatctataccgctgatagcatgccagcgacggctggtagtcttattttggagaacgttgttctagatggtgtcagcaccgccgctgttcaaggtgccgacggtactctcctcgaaggtggatcatccactatcgctgcttggggccaaggaaaccagtacacacccgcatctggcgcactcgatggcactttcgatgcaaacacccgcccggctgccctaacaactgatggcggcaagtacctcgcaatttcaaagccccagtttgagggcttgtcagcatccgacattgtcagcgcccgtgcatccggagcaaagggcgatgccaccactgatgataccgcggctctccaagatgccatcaacaccgctgcatcgggcgggaagctccttttcattgattttggtctctataagatcaccgacaccctttctatccctgatggtgccaagatcatgggcgaaggtttccctgtgcttatggcctctggcgctgctttcagtgatatgagtgcccccaagcctctgctccaagttggcgctgcttcaggagatgccggcactgttcagcttgtcgacttcgttgtcggtgttcagggtgcggcccctggcgctaccttgatcgagtacaatctcgccagctctggaactcccagtggtctgtgggatgtacatgcccgagtcggtggccacaaaggctctaacttacaagttgccgattgcccaacaaaccctggcaaccctgcggtcaatgacgcctgcattggtgcatatatgttgttccacgctactgagaaatcttccaatgtctacctcgagaacacctggttctgggttgctgaccatgatattgaggactcgacaaacacacaagtcaccatcttttctggacgcggtgttttcattgagtctactgtgggcactttctggatgtacggaaccgctgctgagcacagtgaactatacaactaccagttcgcgaacaccaagaatatcttcgctagcatgttccagtcggagaccccttactaccaaccatcgcccatgtcccctacaccatttaccgtagaggcatctctcaacgatcctgacttcgcggcgtcgtgcagtggtgttgacggtaattgtgccgagtcctggggactccgaatcgttaagtcgagcgacatgttcgtctacggcgctggacactactcattcttcaataactacgacagcaagacttgcccaaccttcgccggtggcaacaactgccagtcccgtatggtgtctatcgagaactctagcaacattaacatattcgcactcaacactatcggctcagttgcaatggtgactgttgatggcaaagatattgccatggccactgacaacgagaacgtattcgcatctaacatcattctcttgaggagtggttaa

SEQ ID NO: 36557 - protein, 765 aa, Muscodor strobelii
  misc_feature: SGI Peptide ID NO. 572674
  misc_feature (1)..(734): NCBI GI: 85097220 Blast Desc: NCU04850 [Neurospora crassa OR74A] gi|28921899|gb|EAA31173.1| NCU04850 [Neurospora crassa OR74A]
  misc_feature (25)..(764): NCBI GI: 116202035 Blast Desc: CHGG_08902 [Chaetomium globosum CBS 148.51] gi|88177420|gb|EAQ84888.1| CHGG_08902 [Chaetomium globosum CBS 148.51]
  misc_feature (4)..(764): NCBI GI: 39974389 Blast Desc: MGG_00659 [Magnaporthe grisea 70-15] gi|145018426|gb|EDK02705.1| MGG_00659 [Magnaporthe grisea 70-15]
  misc_feature (1)..(764): NCBI GI: 171681846 Blast Desc: protein product [Podospora anserina] gi|170940882|emb|CAP66532.1| protein product [Podospora anserina]
  misc_feature (19)..(763): NCBI GI: 162707730 Blast Desc: beta 1,3 exoglucanase [Trichoderma asperellum]
  misc_feature (19)..(763): NCBI GI: 30575680 Blast Desc: beta-1,3-exoglucanase [Trichoderma hamatum]
  misc_feature (19)..(763): NCBI GI: 2924313 Blast Desc: beta-1,3 exoglucanase [Hypocrea lixii]
  misc_feature (52)..(765): NCBI GI: 154314548 Blast Desc: BC1G_03983 [Botryotinia fuckeliana B05.10] gi|150848605|gb|EDN23798.1| BC1G_03983 [Botryotinia fuckeliana B05.10]
  misc_feature (20)..(764): NCBI GI: 119472314 Blast Desc: NFIA_057650 [Neosartorya fischeri NRRL 181] gi|119406464|gb|EAW16415.1| conserved [Neosartorya fischeri NRRL 181]
  misc_feature (20)..(764): NCBI GI: 159124647 Blast Desc: exo-beta-1,3-glucanase, [Aspergillus fumigatus A1163]
  misc_feature (17)..(765): SWISSPROT Homolog: EC 3.2.1.58 Glucan 1,3-beta-glucosidase
  misc_feature: Useful for introducing or modulating the production of volatile compounds
MRFSSFLSAVATLAVGINAYWLEDVQHQGLAPFGGDGYKVFRNVKDYGAKGDGTTDDTAAIQAALDDGNNRCLQGCASTTTTPAVVYFPAGTYLLSKSLIPPYFTHFIGDPTNVPTLKASAAFAGFGVVDANHYFTDVLNWVSVNVFFMSMRNFIIDSTSVAPATAWTGIHWPVSQATSLNNIVFNMPTDPSTVHVGLFVESGSGGFMSNLVFNGGATGASLGNQQYTMRNLTFNNCQTAIITLWNWGWTYADMNINNCGVGIDMTAGNSSSIQTGSVTVIDSKISNTPVGIKTIYTADSMPATAGSLILENVVLDGVSTAAVQGADGTLLEGGSSTIAAWGQGNQYTPASGALDGTFDANTRPAALTTDGGKYLAISKPQFEGLSASDIVSARASGAKGDATTDDTAALQDAINTAASGGKLLFIDFGLYKITDTLSIPDGAKIMGEGFPVLMASGAAFSDMSAPKPLLQVGAASGDAGTVQLVDFVVGVQGAAPGATLIEYNLASSGTPSGLWDVHARVGGHKGSNLQVADCPTNPGNPAVNDACIGAYMLFHATEKSSNVYLENTWFWVADHDIEDSTNTQVTIFSGRGVFIESTVGTFWMYGTAAEHSELYNYQFANTKNIFASMFQSETPYYQPSPMSPTPFTVEASLNDPDFAASCSGVDGNCAESWGLRIVKSSDMFVYGAGHYSFFNNYDSKTCPTFAGGNNCQSRMVSIENSSNINIFALNTIGSVAMVTVDGKDIAMATDNENVFASNIILLRSG

SEQ ID NO: 36558 - DNA, 2604 bp, Muscodor strobelii
  misc_feature: SGI EST ID NO. CUFF.87264.0
  misc_feature: Variant of the nucleotide sequence at SEQ ID NO 36556
taactaaggccccggcctatgagacttgatcccctttcttctattcccaagccagtcagcagtgccgtccttgagcttcagaatcaagatgcgtttctcgtcattcctttcggctgtcgccaccctcgccgtcggcatcaacgcctactggctcgaagatgttcaacaccagggccttgcgccctttggcggtgatgggtataaggtctttcgcaatgtgaaagattacggtgccaaaggtgacggcaccactgacgatactgctgctattcaagccgcgctggacgacggcaacaaccgctgtcttcaaggctgtgcctccacgactacaacgccggccgtcgtttacttccctgcgggaacttaccttctttccaagtctctcattcccccttatttcacgcacttcattggcgacccgaccaacgtccctacattgaaggccagcgcggcctttgcaggctttggtgtggttgacgccaaccactatttcaccgatgttttgaactgggtctctgttaatgttttcttcatgtcgatgaggaacttcatcattgatagtactagcgtcgctcccgccactgcttggacaggtatacactggcccgtgtcacaggcgacctcgctcaacaacatcgtgttcaacatgccaacggaccccagcactgtccacgttggtctgttcgtcgaatctggctccggtggctttatgagcaacctggtcttcaatggtggtgccactggtgcttctctcggtaaccaacagtataccatgcgcaacctcactttcaacaattgccagactgctattattactctctggaattggggttggacctacgctgacatgaatatcaacaactgcggagttggtattgatatgaccgccggaaacagcagctctatccaaactggctcggttactgttattgacagcaagatctcaaacaccccagtcggtattaagaccatctataccgctgatagcatgccagcgacggctggtagtcttattttggagaacgttgttctagatggtgtcagcaccgccgctgttcaaggtgccgacggtactctcctcgaaggtggatcatccactatcgctgcttggggccaaggaaaccagtacacacccgcatctggcgcactcgatggcactttcgatgcaaacacccgcccggctgccctaacaactgatggcggcaagtacctcgcaatttcaaagccccagtttgagggcttgtcagcatccgacattgtcagcgcccgtgcatccggagcaaagggcgatgccaccactgatgataccgcggctctccaagatgccatcaacaccgctgcatcgggcgggaagctccttttcattgattttggtctctataagatcaccgacaccctttctatccctgatggtgccaagatcatgggcgaaggtttccctgtgcttatggcctctggcgctgctttcagtgatatgagtgcccccaagcctctgctccaagttggcgctgcttcaggagatgccggcactgttcagcttgtcgacttcgttgtcggtgttcagggtgcggcccctggcgctaccttgatcgagtacaatctcgccagctctggaactcccagtggtctgtgggatgtacatgcccgagtcggtggccacaaaggctctaacttacaagttgccgattgcccaacaaaccctggcaaccctgcggtcaatgacgcctgcattggtgcatatatgttgttccacgctactgagaaatcttccaatgtctacctcgagaacacctggttctgggttgctgaccatgatattgaggactcgacaaacacacaagtcaccatcttttctggacgcggtgttttcattgagtctactgtgggcactttctggatgtacggaaccgctgctgagcacagtgaactatacaactaccagttcgcgaacaccaagaatatcttcgctagcatgttccagtcggagaccccttactaccaaccatcgcccatgtcccctacaccatttaccgtagaggcatctctcaacgatcctgacttcgcggcgtcgtgcagtggtgttgacggtaattgtgccgagtcctggggactccgaatcgttaagtcgagcgacatgttcgtctacggcgctggacactactcattcttcaataactacgacagcaagacttgcccaaccttcgccggtggcaacaactgccagtcccgtatggtgtctatcgagaactctagcaacattaacatattcgcactcaacactatcggctcagttgcaatggtgactgttgatggcaaagatattgccatggccactgacaacgagaacgtattcgcatctaacatcattctcttgaggagtggttaagcaaatggttgccactctaaatatcggctgtgtccttcgcgctgcctggaattattattttcgcagacggagctcgccgcgagaaatggcaggctccagagaagagctcttgccatacattcaatgtacatactattatcatatatttcgcttactcaagtatatacttgttagttcagatgataccaaatagatctttgttatccagcagatgcaca

SEQ ID NO: 36559 - DNA, 2700 bp, Muscodor strobelii
  misc_feature: SGI cDNA ID NO. 572675
  misc_feature: Elevated expression when VOC is produced
  misc_feature: Encodes the peptide sequence at SEQ ID NO 36560
atgcagtcccggccgtctatagagggcgctggtgtcccccatattaatgatgaaaatggcgaagcaaagcaacagaagcctaaaacgctgccatgcaagttctgtgacaaacgcttcaggcgcgttgagcacgtccaacgacatgagcgaactcataccaaggagaagcccttttcttgtggctgggctcggtgtgggaagacttttggccgtagagaccttttagtccgccacgagaagctcgttcatttgaacgagggctctaacaaagatggcaaccggccgaggaaaccatcctcggccggcaccacgacccagccgccactcccgaatgagaaccacgttgatacggagatgatgggtatggcacgatctcatccacagcactaccacgcagaatctatgtcgtccaacatggccatacctcctctccagcccgatccgcgtgtacctgtccgagctgcagcatgcaatcttgatctcttatcagatgcagccacacaaattgcatctgcaagcgaagtcagctccttgcagcctatgataccagatcttgcccagccgccgaatcccatgccacgtatcaagtcttatgatgacggcatatcttacggtgatagaggtcgtgagtccaatgcagctcccatttcgatagggttgaatgagcaaaatggtccttcctcttcgtttgacgactacaacctgttcatggacgagcttgcaacctcgtcacactttcttcctcaggccttcgaggtggatcaaggcatcagtttatggtctcgtggtggcctctctaaaccctcatctcagtttccttctagattcccttctttagcgcccgatcttcgggatccagccgacagcaatggtaggatgcaggacgattccagattagctcctatgagagtgtctgcgatggatcatacggttatcaagaataaacttgatgagttctcgacggttctcccgaatgatttcgtgtttccttcgcgtcatactttaactcgctttctcgatgggtatgttggaggttttcacgagcatcttccgatccttcaccttcctacaatcgcggccgcagatatggcaccggaactgctcttagcggtccttgcagttggtgcgcagtacagatttgaaactcatcggtcgaatgccttgtggtacgccgcaagggccgtcgctctagagcaaattcgccgccgccatagccatgaagtccatggcttactcccaaccgcagcagcctatagtcctcattcgactagaccgtcccccagccatggcttcaggcattcttttagttctgtacaacaagaacggccaatgacgcaagacactcaccgagagccctactccccaaatacccctcaatctcgtatggagacgattcaatcacttctgctgctcttcgctgttggtttgtggggcgcaaaggcaatactgcacgaagcgatgtctttgcaaagtcttcttgcccttttggtgcgagaagaaggattcatgtccgagtcaactcaaacagctgactgggatgcttggatccgtatcgaaggggccaatcgcaccaaattgatcacatactgtttcttcaatctttgtagcatcgcatacaacatgccgcccctgctactgacgtcagagctcaatttgtatcttccccattcatcaaagctatggagagcggagaacgcctggcagtggcaggaagcgcgccactcattccctagcatggacatttcactgcaggacgcttttacgagattatttagcaggccttcccagggaccgcctgcttatatgtcctctcttggcaattacatactcattcatgcactcttacagcatatctttctgttaaaacaaacttccttctcgtctatatcttcattcgaggcgccccgtggactacgacccgacgacgtcgaggaatgccttcaagcactgcgtatctggcaaatgagctttgagcagcatcaattaagggttgcggaagtgaatccgcaaggttcgccggactctttccccggtgggccggtggcttacaattcaacagcgctttggaggctcgcctccatccgattatataccgatctaagtcctagtaggactctcgagacccgagatgctggccagatagcccagacgttttatgatgctccctacttgattcggagcgcacgatcgaatagggcggtccttcaggctatacatgcgctgtctatgctcgtcaagttgggtgtcaattatgttgcgagacgcaagtcctcagaatggagtatccaacactctctatgcaatttggagtgcgctattttgctctccaaatggttgatgacacttgcatctattggccctacagacccgccgcccacaccagatgaacgaagtctcctcgaaatgttgaggcatatgttggatgaaacagaattcgcggtgcctatcgacccctcgctctccggcgccggatcatctcatccttcgtcaggcatggacatggtcatgaatgatggtgcaaagctacgccagctagcggcagccgtgatccgtctatgggcagaaactttcaaggggtcacacatttttgacattgtgaaagtgatcggaactggattagaaggttatgctgacctgctcgagaaacctcgggaccgaactcctataggtagggttggtccaaacccaggactgggctag

SEQ ID NO: 36560 - protein, 899 aa, Muscodor strobelii
  misc_feature: SGI Peptide ID NO. 572675
  misc_feature (58)..(83): Pfam Id: PF00096 Pfam Desc: Zinc finger, C2H2 type
  misc_feature (30)..(52): Pfam Id: PF00096 Pfam Desc: Zinc finger, C2H2 type
  misc_feature (72)..(899): NCBI GI: 171681844 Blast Desc: protein product [Podospora anserina] gi|170940881|emb|CAP66531.1| protein product [Podospora anserina]
  misc_feature (44)..(888): NCBI GI: 256734068 Blast Desc: [Nectria haematococca mpVI 77-13-4]
  misc_feature (47)..(892): NCBI GI: 46128113 Blast Desc: FG08434.1 [Gibberella zeae PH-1]
  misc_feature (6)..(522): NCBI GI: 145611098 Blast Desc: MGG_00660 [Magnaporthe grisea 70-15] gi|145018425|gb|EDK02704.1| MGG_00660 [Magnaporthe grisea 70-15]
  misc_feature (72)..(895): NCBI GI: 164426074 Blast Desc: NCU04848 [Neurospora crassa OR74A] gi|157071188|gb|EAA31171.2| conserved [Neurospora crassa OR74A]
  misc_feature (28)..(881): NCBI GI: 255955987 Blast Desc: Pc21g17490 [Penicillium chrysogenum Wisconsin 54-1255] gi|211590457|emb|CAP96646.1| Pc21g17490 [Penicillium chrysogenum Wisconsin 54-1255]
  misc_feature (28)..(882): NCBI GI: 119498479 Blast Desc: C2H2 transcription factor (AmdA), [Neosartorya fischeri NRRL 181] gi|119414161|gb|EAW24100.1| C2H2 transcription factor (AmdA), [Neosartorya fischeri NRRL 181]
  misc_feature (28)..(881): NCBI GI: 67523629 Blast Desc: AN2270.2 [Aspergillus nidulans FGSC A4] gi|454103|gb|AAA97487.1| regulatory protein [Emericella nidulans] gi|40744687|gb|EAA63843.1| AN2270.2 [Aspergillus nidulans FGSC ;
  misc_feature (28)..(882): NCBI GI: 70998540 Blast Desc: C2H2 transcription factor (AmdA) [Aspergillus fumigatus Af293] gi|66851628|gb|EAL91954.1| C2H2 transcription factor (AmdA), [Aspergillus fumigatus Af293]
  misc_feature (28)..(882): NCBI GI: 159126273 Blast Desc: C2H2 transcription factor (AmdA), [Aspergillus fumigatus A1163]
  misc_feature: Useful for introducing or modulating the production of volatile compounds
MQSRPSIEGAGVPHINDENGEAKQQKPKTLPCKFCDKRFRRVEHVQRHERTHTKEKPFSCGWARCGKTFGRRDLLVRHEKLVHLNEGSNKDGNRPRKPSSAGTTTQPPLPNENHVDTEMMGMARSHPQHYHAESMSSNMAIPPLQPDPRVPVRAAACNLDLLSDAATQIASASEVSSLQPMIPDLAQPPNPMPRIKSYDDGISYGDRGRESNAAPISIGLNEQNGPSSSFDDYNLFMDELATSSHFLPQAFEVDQGISLWSRGGLSKPSSQFPSRFPSLAPDLRDPADSNGRMQDDSRLAPMRVSAMDHTVIKNKLDEFSTVLPNDFVFPSRHTLTRFLDGYVGGFHEHLPILHLPTIAAADMAPELLLAVLAVGAQYRFETHRSNALWYAARAVALEQIRRRHSHEVHGLLPTAAAYSPHSTRPSPSHGFRHSFSSVQQERPMTQDTHREPYSPNTPQSRMETIQSLLLLFAVGLWGAKAILHEAMSLQSLLALLVREEGFMSESTQTADWDAWIRIEGANRTKLITYCFFNLCSIAYNMPPLLLTSELNLYLPHSSKLWRAENAWQWQEARHSFPSMDISLQDAFTRLFSRPSQGPPAYMSSLGNYILIHALLQHIFLLKQTSFSSISSFEAPRGLRPDDVEECLQALRIWQMSFEQHQLRVAEVNPQGSPDSFPGGPVAYNSTALWRLASIRLYTDLSPSRTLETRDAGQIAQTFYDAPYLIRSARSNRAVLQAIHALSMLVKLGVNYVARRKSSEWSIQHSLCNLECAILLSKWLMTLASIGPTDPPPTPDERSLLEMLRHMLDETEFAVPIDPSLSGAGSSHPSSGMDMVMNDGAKLRQLAAAVIRLWAETFKGSHIFDIVKVIGTGLEGYADLLEKPRDRTPIGRVGPNPGLG

SEQ ID NO: 36561 - DNA, 4145 bp, Muscodor strobelii
  misc_feature: SGI EST ID NO. CUFF.87260.0
  misc_feature: Variant of the nucleotide sequence at SEQ ID NO 36559
cccgggtattttttgacagcctgctggtggtgcgcaaggtccattagaagctaggttgaaacccgtcagagcgccctgcccagacctctcgtagccaggccatcctgccgtgtcccccagattccccagttcgattcggatctgcccagtctctccgcatctcctctcctcactcctcactcctcacccacactcctcatctgaatctcactcaaccccgaaattcattcaaaccacgtcatactatctctgctcgcctttgggttgatcaatctcatgccacaatctcatcgcgcacccgcgttcatttgtaccagcgccatcgcaaactcacatatcgcttcccggctgcattgaacatattttctctttcctctttggccatcagactggcccgcacgttcacactgtcaattgtgcacaactccatctgtgtcgctttccccagacgagtcggagaaagcagactattgcatgcctatcaatccccacgtatgcctttttagtagtgcttctgttctcctgattacatctctgcatctgcctccaccaataatcgacgattctacctcccggataatcaccaacattgttcctggtgcatcaacgcctagcagtcggcttctcttcgaggcgtcgtagccttgcggttgcgctacgggcaaatcctgggcacggggtttcagccctgctattctctctgcgcacactcgcaactctcgtccagcctctgaccaccatcgctccagattttctcgcagcaggcagtacattgagctgcttggtcagggctagtgtccatacgtggtggatatagacatctgctgcgtgtcagttgccgaatacaccctgaaccgaagaatacatcctgaattctcctccactgctaccaccatctctattactaccctcctcatgaattcatccatcaatcgcccaccccgcaaggcattcctctttccggcataacttcctagtcattgctcgccaaaccgacccttctcaccccacttcttggttctgcgtgactcccccctctgcattacaaccatagtgatatacaagggctctttattctcgggccaatcttggtctcccggagtgcctcgtctccaatgcagtcccggccgtctatagagggcgctggtgtcccccatattaatgatgaaaatggcgaagcaaagcaacagaagcctaaaacgctgccatgcaagttctgtgacaaacgcttcaggcgcgttgagcacgtccaacgacatgagcgaactcataccaaggagaagcccttttcttgtggctgggctcggtgtgggaagacttttggccgtagagaccttttagtccgccacgagaagctcgttcatttgaacgagggctctaacaaagatggcaaccggccgaggaaaccatcctcggccggcaccacgacccagccgccactcccgaatgagaaccacgttgatacggagatgatgggtatggcacgatctcatccacagcactaccacgcagaatctatgtcgtccaacatggccatacctcctctccagcccgatccgcgtgtacctgtccgagctgcagcatgcaatcttgatctcttatcagatgcagccacacaaattgcatctgcaagcgaagtcagctccttgcagcctatgataccagatcttgcccagccgccgaatcccatgccacgtatcaagtcttatgatgacggcatatcttacggtgatagaggtcgtgagtccaatgcagctcccatttcgatagggttgaatgagcaaaatggtccttcctcttcgtttgacgactacaacctgttcatggacgagcttgcaacctcgtcacactttcttcctcaggccttcgaggtggatcaaggcatcagtttatggtctcgtggtggcctctctaaaccctcatctcagtttccttctagattcccttctttagcgcccgatcttcgggatccagccgacagcaatggtaggatgcaggacgattccagattagctcctatgagagtgtctgcgatggatcatacggttatcaagaataaacttgatgagttctcgacggttctcccgaatgatttcgtgtttccttcgcgtcatactttaactcgctttctcgatgggtatgttggaggttttcacgagcatcttccgatccttcaccttcctacaatcgcggccgcagatatggcaccggaactgctcttagcggtccttgcagttggtgcgcagtacagatttgaaactcatcggtcgaatgccttgtggtacgccgcaagggccgtcgctctagagcaaattcgccgccgccatagccatgaagtccatggcttactcccaaccgcagcagcctatagtcctcattcgactagaccgtcccccagccatggcttcaggcattcttttagttctgtacaacaagaacggccaatgacgcaagacactcaccgagagccctactccccaaatacccctcaatctcgtatggagacgattcaatcacttctgctgctcttcgctgttggtttgtggggcgcaaaggcaatactgcacgaagcgatgtctttgcaaagtcttcttgcccttttggtgcgagaagaaggattcatgtccgagtcaactcaaacagctgactgggatgcttggatccgtatcgaaggggccaatcgcaccaaattgatcacatactgtttcttcaatctttgtagcatcgcatacaacatgccgcccctgctactgacgtcagagctcaatttgtatcttccccattcatcaaagctatggagagcggagaacgcctggcagtggcaggaagcgcgccactcattccctagcatggacatttcactgcaggacgcttttacgagattatttagcaggccttcccagggaccgcctgcttatatgtcctctcttggcaattacatactcattcatgcactcttacagcatatctttctgttaaaacaaacttccttctcgtctatatcttcattcgaggcgccccgtggactacgacccgacgacgtcgaggaatgccttcaagcactgcgtatctggcaaatgagctttgagcagcatcaattaagggttgcggaagtgaatccgcaaggttcgccggactctttccccggtgggccggtggcttacaattcaacagcgctttggaggctcgcctccatccgattatataccgatctaagtcctagtaggactctcgagacccgagatgctggccagatagcccagacgttttatgatgctccctacttgattcggagcgcacgatcgaatagggcggtccttcaggctatacatgcgctgtctatgctcgtcaagttgggtgtcaattatgttgcgagacgcaagtcctcagaatggagtatccaacactctctatgcaatttggagtgcgctattttgctctccaaatggttgatgacacttgcatctattggccctacagacccgccgcccacaccagatgaacgaagtctcctcgaaatgttgaggcatatgttggatgaaacagaattcgcggtgcctatcgacccctcgctctccggcgccggatcatctcatccttcgtcaggcatggacatggtcatgaatgatggtgcaaagctacgccagctagcggcagccgtgatccgtctatgggcagaaactttcaaggggtcacacatttttgacattgtgaaagtgatcggaactggattagaaggttatgctgacctgctcgagaaacctcgggaccgaactcctataggtagggttggtccaaacccaggactgggctaggccgatctgtcaacttcgtatggtgctgtctatgattcaagggcaaaaagtaattaagcttctaagcaaggtgttgtaggcgtttatgggacgagaactagcttcggtaggagtatgtgctcgccacgacgaatctaatcaagacttaaattgtgacaaattcatcatacctgcattgacgatttgaggagtcgatttttgcacatctacgtatctctggattgcaatcaaccaagcctatcgatagcttctcctgggttatgggaattgtattgatataatcgtgtgtagaaatcatcaatttgatgagaatttgggcaaacttgatca

SEQ ID NO: 36562 - DNA, 1368 bp, Muscodor strobelii
  misc_feature: SGI cDNA ID NO. 572676
  misc_feature: Encodes the peptide sequence at SEQ ID NO 36563
atgcctcccaaaaagcgaacaattactgaggcggagactaggcagactactgaaagacgtcgttccggtcgcatcagctctacgagcaagaaaagctcgtattttgaagatgacgatgacagcattggcgaatctagcgacgatgtactcttaccgccgcgcaagatgacgaaatccaaattgaatgcgtcaagatcgccggggaaggtcgacgttgcagacgaagataatggggatcaatatgtggatgaggatgatgaggaagaagacaatggtgatgatgatgagtttgaagatgactctgccacaccacctcctccaccaaaaggcagcgcaaagaaaggcaaacgcggtcgacctcccaaaaacgcgcaaacgccttcatcgaacagcaagattctgagcattgagaggaagcgcccaatgaaaaatgcacaagggaatggaagtgctaagtctgaggaagaagacgaagacgatgactatgggcgagaagtgacgtacattcaattgccgaaactgcgagatgatggtggcgtagaatacgaagacacaaaaattcatccgaacaccatgcattttctaaaagatctcaaggccaataataagcgggactggttgaagatgcacgatcccgagttccggcggtcactgaaagattggcaatcctttgttgagacaatgactgaaaagatcattgaaattgacgagacaattcctgagttaccgacaaaagatgtcatatttcgcatctatcgcgatattcgtttcagtaaagatcctacgccttacaagccgcattactctgccgcatggtcacggacgggacgtaaagggccttacgcctgctactacgttcacgtagagcctggctcttgtttcttgggcggtgggctctggtaccccgaaaaagagtctctgaacaagctacgagcgagtattgacgaacgtcctcatcgcattcgtcgcgtcttgacgaatcccgagtttatacgcaccttcttcccggatgcagttggggccaaggaagagaagattctcaaagcgttcgcggagaggaacaaggaaaatgcattgaagattaagcctaacggctttcaccctgatcacagagatattcagctcttgaagctacgaaattacacaattggtcaaaagttgacagacgaagaatgtcttgctgatgacacccaggagaagataaccgatatcttcagggctttggtcccctttgtcaatttcttgaacagtgttgtcatgcctgatgatgacgacgatgacagtgaaagcgatcctgacgaggaagaacctgttgatagtgaacctgaggcaagcgaggaggatgaagcagatgaagatgagaattaa

SEQ ID NO: 36563 - protein, 455 aa, Muscodor strobelii
  misc_feature: SGI Peptide ID NO. 572676
  misc_feature (188)..(414): Pfam Id: PF09365 Pfam Desc: Conserved CHP02453
  misc_feature (165)..(422): NCBI GI: 256727101 Blast Desc: NECHADRAFT_16076 [Nectria haematococca mpVI 77-13-4]
  misc_feature (3)..(437): NCBI GI: 119181515 Blast Desc: CIMG_05858 [Coccidioides immitis RS]
  misc_feature (1)..(436): NCBI GI: 242781326 Blast Desc: conserved [Talaromyces stipitatus ATCC 10500] gi|218719925|gb|EED19344.1| conserved [Talaromyces stipitatus ATCC 10500]
  misc_feature (166)..(422): NCBI GI: 85097194 Blast Desc: NCU04844 [Neurospora crassa OR74A] gi|28921893|gb|EAA31167.1| conserved [Neurospora crassa OR74A]
  misc_feature (166)..(421): NCBI GI: 39974315 Blast Desc: MGG_00696 [Magnaporthe grisea 70-15] gi|145018371|gb|EDK02650.1| MGG_00696 [Magnaporthe grisea 70-15]
  misc_feature (163)..(422): NCBI GI: 261192833 Blast Desc: conserved [Ajellomyces dermatitidis SLH14081] gi|239589305|gb|EEQ71948.1| conserved [Ajellomyces dermatitidis SLH14081]
  misc_feature (163)..(422): NCBI GI: 239610160 Blast Desc: conserved [Ajellomyces dermatitidis ER-3]
  misc_feature (165)..(422): NCBI GI: 171681848 Blast Desc: protein product [Podospora anserina] gi|170940883|emb|CAP66533.1| protein product [Podospora anserina]
  misc_feature (1)..(413): NCBI GI: 242781331 Blast Desc: conserved [Talaromyces stipitatus ATCC 10500] gi|218719926|gb|EED19345.1| conserved [Talaromyces stipitatus ATCC 10500]
  misc_feature (25)..(413): NCBI GI: 119467228 Blast Desc: NFIA_048600 [Neosartorya fischeri NRRL 181] gi|119405572|gb|EAW15523.1| conserved [Neosartorya fischeri NRRL 181]
MPPKKRTITEAETRQTTERRRSGRISSTSKKSSYFEDDDDSIGESSDDVLLPPRKMTKSKLNASRSPGKVDVADEDNGDQYVDEDDEEEDNGDDDEFEDDSATPPPPPKGSAKKGKRGRPPKNAQTPSSNSKILSIERKRPMKNAQGNGSAKSEEEDEDDDYGREVTYIQLPKLRDDGGVEYEDTKIHPNTMHFLKDLKANNKRDWLKMHDPEFRRSLKDWQSFVETMTEKIIEIDETIPELPTKDVIFRIYRDIRFSKDPTPYKPHYSAAWSRTGRKGPYACYYVHVEPGSCFLGGGLWYPEKESLNKLRASIDERPHRIRRVLTNPEFIRTFFPDAVGAKEEKILKAFAERNKENALKIKPNGFHPDHRDIQLLKLRNYTIGQKLTDEECLADDTQEKITDIFRALVPFVNFLNSVVMPDDDDDDSESDPDEEEPVDSEPEASEEDEADEDEN

SEQ ID NO: 36564 - DNA, 4305 bp, Muscodor strobelii
  misc_feature: SGI EST ID NO. CUFF.87279.0
  misc_feature: Variant of the nucleotide sequence at SEQ ID NO 36562
gtttgttacgtgacttggttgactacatatgtacgttgtagaacgtagggcagacacacgtacggagcatctgcgagaagctaattaaatcggtcacgtgatgacgcgacggagaagcttacctagggtcgcgcaatctcggcgcgtcagacatgtttcgtcattaattgacccgcctatttcgcgaaccgaacaaaacttaaaatttgacgaaggccacttgctgtcattttgattatgcctcccaaaaagcgaacaattactgaggcggagactaggcagactactgaaagacgtcgttccggtcgcatcagctctacgagcaagaaaagctcgtattttgaagatgacgatgacagcattggcgaatctagcgacgatgtactcttaccgccgcgcaagatgacgaaatccaaattgaatgcgtcaagatcgccggggaaggtcgacgttgcagacgaagataatggggatcaatatgtggatgaggatgatgaggaagaagacaatggtgatgatgatgagtttgaagatgactctgccacaccacctcctccaccaaaaggcagcgcaaagaaaggcaaacgcggtcgacctcccaaaaacgcgcaaacgccttcatcgaacagcaagattctgagcattgagaggaagcgcccaatgaaaaatgcacaagggaatggaagtgctaagtctgaggaagaagacgaagacgatgactatgggcgagaagtgacgtacattcaattgccgaaactgcgagatgatggtggcgtagaatacgaagacacaaaaattcatccgaacaccatgcattttctaaaagatctcaaggccaataataagcgggactggttgaagatgcacgatcccgagttccggcggtcactgaaagattggcaatcctttgttgagacaatgactgaaaagatcattgaaattgacgagacaattcctgagttaccgacaaaagatgtcatatttcgcatctatcgcgatattcgtttcagtaaagatcctacgccttacaagccgcattactctgccgcatggtcacggacgggacgtaaagggccttacgcctgctactacgttcacgtagagcctggctcttgtttcttgggcggtgggctctggtaccccgaaaaagagtctctgaacaagctacgagcgagtattgacgaacgtcctcatcgcattcgtcgcgtcttgacgaatcccgagtttatacgcaccttcttcccggatgcagttggggccaaggaagagaagattctcaaagcgttcgcggagaggaacaaggaaaatgcattgaagattaagcctaacggctttcaccctgatcacagagatattcagctcttgaagctacgaaattacacaattggtcaaaagttgacagacgaagaatgtcttgctgatgacacccaggagaagataaccgatatcttcagggctttggtcccctttgtcaatttcttgaacagtgttgtcatgcctgatgatgacgacgatgacagtgaaagcgatcctgacgaggaagaacctgttgatagtgaacctgaggcaagcgaggaggatgaagcagatgaagatgagaattaagaagccctccctatttctgtctcgcggatttgagtattgggactttgcatccgctaggcactcaacgaattcgggcccactgggttagtgatacggatacgatagttcttgagttgacgtcggctgtgctagcatcattcagaaccaagatgttacgtttccatttgtaggattttagcgtcttgtattggtatttatataagcccaatggctgcaagtagtacttctaattgtgcataataacgtatactggtatcaaatatctaagtcatcaacctgccctgactctcaaggcatgcccaaattacttgccgtccgatagactggggggcaaatcctgttggtgagttccccattcgctctcctcaggccctagaacaaattccaatataccaccattggcgaagaaattatgcgagatccaattccggtgatacggcataccattcaacgtggcgctctgaatatagatattctgaaattccggatcaaagttcttgttgcgtaatgttgcccacccccggccatcaggagttcgaatactgacctcaggaaagaaaggtggcgtgagcaggtacacaatttggccagcgacagggaaaaatcccatgaaagcgaatgccgagaaagctcccattgcacaatcatcgttccccggtattccggctatcgacgcgttgaacagcgaagggatgtattgatggacccagtacgcgctgcgacctggacggcctgcatagtggaattgaaatgtgggcaggaaatttggttcgttgcccatgtaatttattccggacgcgtggaaataatccagtcggtcgacgaatttcgaagcgccacccatgacacttattaaggatgccatgtcttgtggcacgtagaagctgtataaccagggacttccttcgtaggttgagtagcccgtgtcaaagtaacatacgtgttgctcatataccggactacagagccgcgtctgttggtgtgtaaaggtgccattcttcatgcgtggttgcatgaagccgtggaatgccgtcccctgaagcgcaccagtctctttgtctctgtaatggtcgtcttgtttcccttgccaaatgttcctccaattgtgactccgttcaaggtattttgcctcgtctgctttgtgacctagctcgcgagccatgagcgcaatcacgaagtcatcatatgcgtactcgactgttcgagaaatagagcgacttcggggtccagtgccatttttatcatcgtcgtcgacaggaatatagccaagagtatgccagctctccaaaccgccacgtccagaagttgaccagtcttgtggttcttcttccgcgtcagatataactgccctgtatccgagtgcccagtcaattcctcgcgtcaagttcttgatcaaagcgtcggctagcaccacatcggcatttgatccaccttgagtaaaccctttgctgaaactcatcctgcagtccggaagcttcccctcatatttataagtatctataagagagcgcaccatatctgtttgtgtttctggatctataagcgtgagtagagggtgttgggcacgaaaagagtcccatatgcagtaaaagctatcgtaatagggttcattcgactcccataactgattttcaccagtgtagttttgtggtgatagcatcgtacggtataatccggaccaaaaggttgtgagcatttcgggcgagaggcccatattatcggccttgatcaccgagagcttttcccgccacgcgacctgagccgccgcttcaacgcgagagaagctgaaatctccaatttcttgttccgcgttcacgcaagcttgtgacgcggaaatgaaggataaacctacgcgtacgagcacctgattctttggtgtttgttcgaactgtacccatgtgccgacagatccatgcgggatttgaatactgcttcccaaactcgacagagtgtgtacctcacttgtcacattggtgtggacgaatgtgccagctcgccggatctttgcccctaggaaatctgcacagaaatgtgcagcgtaagatccttgaccgaatgacggacgaaacgtgccattacccatcatacgaccagtggtgctattcacttcgatatacccatttgtgcggctgttactgagatcgactagatctaggaggattaatgggctacttggaacctttgcagcatccccttcattgctatctggacggtatggatctggcacttccgcctcagatgggaaattgaatcgaaagagacttgtgcgcgccgtggcggtcatctctgcaaagatcgagttgtttagtccgatggcgaaatatcccggacgtgctgttgcagaaccgttgatacgagcgagagctcgctgtgacgtgatgtatttacactgagtgtaatcatcttcaggacagcctggatgagcgaacaatggaaaattgcctaatgaaggattctgtggcacgtttagacaaaagtcaatatgccaggacattagtgtaattcctagagactggactcactcccccagttcctacaagaagtcagtcacagagtatatgtaggtagagatacgccgacttaccggaatcatgaagctgagaaaagcctgtgatcagagagtcgtccgacacgaatcccgctgcgatttctccccagttatcacaatcggcacctggtttagccatgccataaggcaaa

SEQ ID NO: 36565 - DNA, 2511 bp, Muscodor strobelii
  misc_feature: SGI cDNA ID NO. 572677
  misc_feature: Elevated expression when VOC is produced
  misc_feature: Encodes the peptide sequence at SEQ ID NO 36566
atggcaggcccttttcttaccagcttccctcggcggcgtagattgcttccgctcactattttctccttgatcatatgggctttcatacctattgataattataatcctcctcgccaaatactcttcggcctcacaggcactatcgccgtgaaatccacaggtgaagatgtgttgcgtcatgtcgatcctttaattggcactgtgaacggaggccatgttttcccaggagctactttgccttatggcatggctaaaccaggtgccgattgtgataactggggagaaatcgcagcgggattcgtgtcggacgactctctgatcacaggcttttctcagcttcatgattccggaactgggggaaatccttcattaggcaattttccattgttcgctcatccaggctgtcctgaagatgattacactcagtgtaaatacatcacgtcacagcgagctctcgctcgtatcaacggttctgcaacagcacgtccgggatatttcgccatcggactaaacaactcgatctttgcagagatgaccgccacggcgcgcacaagtctctttcgattcaatttcccatctgaggcggaagtgccagatccataccgtccagatagcaatgaaggggatgctgcaaaggttccaagtagcccattaatcctcctagatctagtcgatctcagtaacagccgcacaaatgggtatatcgaagtgaatagcaccactggtcgtatgatgggtaatggcacgtttcgtccgtcattcggtcaaggatcttacgctgcacatttctgtgcagatttcctaggggcaaagatccggcgagctggcacattcgtccacaccaatgtgacaagtgaggtacacactctgtcgagtttgggaagcagtattcaaatcccgcatggatctgtcggcacatgggtacagttcgaacaaacaccaaagaatcaggtgctcgtacgcgtaggtttatccttcatttccgcgtcacaagcttgcgtgaacgcggaacaagaaattggagatttcagcttctctcgcgttgaagcggcggctcaggtcgcgtggcgggaaaagctctcggtgatcaaggccgataatatgggcctctcgcccgaaatgctcacaaccttttggtccggattataccgtacgatgctatcaccacaaaactacactggtgaaaatcagttatgggagtcgaatgaaccctattacgatagcttttactgcatatgggactcttttcgtgcccaacaccctctactcacgcttatagatccagaaacacaaacagatatggtgcgctctcttatagatacttataaatatgaggggaagcttccggactgcaggatgagtttcagcaaagggtttactcaaggtggatcaaatgccgatgtggtgctagccgacgctttgatcaagaacttgacgcgaggaattgactgggcactcggatacagggcagttatatctgacgcggaagaagaaccacaagactggtcaacttctggacgtggcggtttggagagctggcatactcttggctatattcctgtcgacgacgatgataaaaatggcactggaccccgaagtcgctctatttctcgaacagtcgagtacgcatatgatgacttcgtgattgcgctcatggctcgcgagctaggtcacaaagcagacgaggcaaaataccttgaacggagtcacaattggaggaacatttggcaagggaaacaagacgaccattacagagacaaagagactggtgcgcttcaggggacggcattccacggcttcatgcaaccacgcatgaagaatggcacctttacacaccaacagacgcggctctgtagtccggtatatgagcaacacgtatgttactttgacacgggctactcaacctacgaaggaagtccctggttatacagcttctacgtgccacaagacatggcatccttaataagtgtcatgggtggcgcttcgaaattcgtcgaccgactggattatttccacgcgtccggaataaattacatgggcaacgaaccaaatttcctgcccacatttcaattccactatgcaggccgtccaggtcgcagcgcgtactgggtccatcaatacatcccttcgctgttcaacgcgtcgatagccggaataccggggaacgatgattgtgcaatgggagctttctcggcattcgctttcatgggatttttccctgtcgctggccaaattgtgtacctgctcacgccacctttctttcctgaggtcagtattcgaactcctgatggccgggggtgggcaacattacgcaacaagaactttgatccggaatttcagaatatctatattcagagcgccacgttgaatggtatgccgtatcaccggaattggatctcgcataatttcttcgccaatggtggtatattggaatttgttctagggcctgaggagagcgaatggggaactcaccaacaggatttgccccccagtctatcggacggcaagtaa

SEQ ID NO: 36566 - protein, 836 aa, Muscodor strobelii
  misc_feature: SGI Peptide ID NO. 572677
  misc_feature (299)..(818): Pfam Id: PF07971 Pfam Desc: Glycosyl hydrolase family 92
  misc_feature (299)..(610): Pfam Id: PF07971 Pfam Desc: Glycosyl hydrolase family 92
  misc_feature (636)..(818): Pfam Id: PF07971 Pfam Desc: Glycosyl hydrolase family 92
  misc_feature (9)..(831): NCBI GI: 171681924 Blast Desc: protein product [Podospora anserina] gi|170940921|emb|CAP66571.1| protein product [Podospora anserina]
  misc_feature (5)..(831): NCBI GI: 85097324 Blast Desc: NCU04798 [Neurospora crassa OR74A] gi|28921915|gb|EAA31188.1| NCU04798 [Neurospora crassa OR74A]
  misc_feature (83)..(836): NCBI GI: 145611022 Blast Desc: MGG_00695 [Magnaporthe grisea 70-15] gi|145018372|gb|EDK02651.1| MGG_00695 [Magnaporthe grisea 70-15]
  misc_feature (37)..(832): NCBI GI: 70992807 Blast Desc: alpha-1,2-mannosidase subfamily [Aspergillus fumigatus Af293] gi|66848885|gb|EAL89214.1| alpha-1,2-mannosidase, subfamily [Aspergillus fumigatus Af293]
  misc_feature (37)..(832): NCBI GI: 159130294 Blast Desc: alpha-1,2-mannosidase, subfamily [Aspergillus fumigatus A1163]
  misc_feature (37)..(833): NCBI GI: 119473165 Blast Desc: alpha-1,2-mannosidase, subfamily [Neosartorya fischeri NRRL 181] gi|119406672|gb|EAW16623.1| alpha-1,2-mannosidase, subfamily [Neosartorya fischeri NRRL 181]
  misc_feature (56)..(836): NCBI GI: 121700336 Blast Desc: alpha-1,2-mannosidase, subfamily [Aspergillus clavatus NRRL 1] gi|119396575|gb|EAW07007.1| alpha-1,2-mannosidase, subfamily [Aspergillus clavatus NRRL 1]
  misc_feature (60)..(832): NCBI GI: 189209872 Blast Desc: conserved [Pyrenophora tritici-repentis Pt-1C-BFP] gi|187977361|gb|EDU43987.1| conserved [Pyrenophora tritici-repentis Pt-1C-BFP]
  misc_feature (45)..(834): NCBI GI: 255946688 Blast Desc: Pc22g00660 [Penicillium chrysogenum Wisconsin 54-1255] gi|211591128|emb|CAP97354.1| Pc22g00660 [Penicillium chrysogenum Wisconsin 54-1255]
  misc_feature (56)..(834): NCBI GI: 169778721 Blast Desc: [Aspergillus oryzae RIB40] gi|83772564|dbj|BAE62692.1| protein product [Aspergillus oryzae]
  misc_feature: Useful for introducing or modulating the production of volatile compounds
MAGPFLTSFPRRRRLLPLTIFSLIIWAFIPIDNYNPPRQILFGLTGTIAVKSTGEDVLRHVDPLIGTVNGGHVFPGATLPYGMAKPGADCDNWGEIAAGFVSDDSLITGFSQLHDSGTGGNPSLGNFPLFAHPGCPEDDYTQCKYITSQRALARINGSATARPGYFAIGLNNSIFAEMTATARTSLFRFNFPSEAEVPDPYRPDSNEGDAAKVPSSPLILLDLVDLSNSRTNGYIEVNSTTGRMMGNGTFRPSFGQGSYAAHFCADFLGAKIRRAGTFVHTNVTSEVHTLSSLGSSIQIPHGSVGTWVQFEQTPKNQVLVRVGLSFISASQACVNAEQEIGDFSFSRVEAAAQVAWREKLSVIKADNMGLSPEMLTTFWSGLYRTMLSPQNYTGENQLWESNEPYYDSFYCIWDSFRAQHPLLTLIDPETQTDMVRSLIDTYKYEGKLPDCRMSFSKGFTQGGSNADVVLADALIKNLTRGIDWALGYRAVISDAEEEPQDWSTSGRGGLESWHTLGYIPVDDDDKNGTGPRSRSISRTVEYAYDDFVIALMARELGHKADEAKYLERSHNWRNIWQGKQDDHYRDKETGALQGTAFHGFMQPRMKNGTFTHQQTRLCSPVYEQHVCYFDTGYSTYEGSPWLYSFYVPQDMASLISVMGGASKFVDRLDYFHASGINYMGNEPNFLPTFQFHYAGRPGRSAYWVHQYIPSLFNASIAGIPGNDDCAMGAFSAFAFMGFFPVAGQIVYLLTPPFFPEVSIRTPDGRGWATLRNKNFDPEFQNIYIQSATLNGMPYHRNWISHNFFANGGILEFVLGPEESEWGTHQQDLPPSLSDGK

SEQ ID NO: 36567 - DNA, 2603 bp, Muscodor strobelii
  misc_feature: SGI EST ID NO. CUFF.87280.2
  misc_feature: Variant of the nucleotide sequence at SEQ ID NO 36565
cttttctcagcttcatgattccggaactgggggaaatccttcattaggcaattttccattgttcgctcatccaggctgtcctgaagatgattacactcagtgtaaatacatcacgtcacagcgagctctcgctcgtatcaacggttctgcaacagcacgtccgggatatttcgccatcggactaaacaactcgatctttgcagagatgaccgccacggcgcgcacaagtctctttcgattcaatttcccatctgaggcggaagtgccagatccataccgtccagatagcaatgaaggggatgctgcaaaggttccaagtagcccattaatcctcctagatctagtcgatctcagtaacagccgcacaaatgggtatatcgaagtgaatagcaccactggtcgtatgatgggtaatggcacgtttcgtccgtcattcggtcaaggatcttacgctgcacatttctgtgcagatttcctaggggcaaagatccggcgagctggcacattcgtccacaccaatgtgacaagtgaggtacacactctgtcgagtttgggaagcagtattcaaatcccgcatggatctgtcggcacatgggtacagttcgaacaaacaccaaagaatcaggtgctcgtacgcgtaggtttatccttcatttccgcgtcacaagcttgcgtgaacgcggaacaagaaattggagatttcagcttctctcgcgttgaagcggcggctcaggtcgcgtggcgggaaaagctctcggtgatcaaggccgataatatgggcctctcgcccgaaatgctcacaaccttttggtccggattataccgtacgatgctatcaccacaaaactacactggtgaaaatcagttatgggagtcgaatgaaccctattacgatagcttttactgcatatgggactcttttcgtgcccaacaccctctactcacgcttatagatccagaaacacaaacagatatggtgcgctctcttatagatacttataaatatgaggggaagcttccggactgcaggatgagtttcagcaaagggtttactcaaggtggatcaaatgccgatgtggtgctagccgacgctttgatcaagaacttgacgcgaggaattgactgggcactcggatacagggcagttatatctgacgcggaagaagaaccacaagactggtcaacttctggacgtggcggtttggagagctggcatactcttggctatattcctgtcgacgacgatgataaaaatggcactggaccccgaagtcgctctatttctcgaacagtcgagtacgcatatgatgacttcgtgattgcgctcatggctcgcgagctaggtcacaaagcagacgaggcaaaataccttgaacggagtcacaattggaggaacatttggcaagggaaacaagacgaccattacagagacaaagagactggtgcgcttcaggggacggcattccacggcttcatgcaaccacgcatgaagaatggcacctttacacaccaacagacgcggctctgtagtccggtatatgagcaacacgtatgttactttgacacgggctactcaacctacgaaggaagtccctggttatacagcttctacgtgccacaagacatggcatccttaataagtgtcatgggtggcgcttcgaaattcgtcgaccgactggattatttccacgcgtccggaataaattacatgggcaacgaaccaaatttcctgcccacatttcaattccactatgcaggccgtccaggtcgcagcgcgtactgggtccatcaatacatcccttcgctgttcaacgcgtcgatagccggaataccggggaacgatgattgtgcaatgggagctttctcggcattcgctttcatgggatttttccctgtcgctggccaaattgtgtacctgctcacgccacctttctttcctgaggtcagtattcgaactcctgatggccgggggtgggcaacattacgcaacaagaactttgatccggaatttcagaatatctatattcagagcgccacgttgaatggtatgccgtatcaccggaattggatctcgcataatttcttcgccaatggtggtatattggaatttgttctagggcctgaggagagcgaatggggaactcaccaacaggatttgccccccagtctatcggacggcaagtaatttgggcatgccttgagagtcagggcaggttgatgacttagatatttgataccagtatacgttattatgcacaattagaagtactacttgcagccattgggcttatataaataccaatacaagacgctaaaatcctacaaatggaaacgtaacatcttggttctgaatgatgctagcacagccgacgtcaactcaagaactatcgtatccgtatcactaacccagtgggcccgaattcgttgagtgcctagcggatgcaaagtcccaatactcaaatccgcgagacagaaatagggagggcttcttaattctcatcttcatctgcttcatcctcctcgcttgcctcaggttcactatcaacaggttcttcctcgtcaggatcgctttcactgtcatcgtcgtcatcatcaggcatgac

SEQ ID NO: 36568 - DNA, 1086 bp, Muscodor strobelii
  misc_feature: SGI cDNA ID NO. 572678
  misc_feature: Encodes the peptide sequence at SEQ ID NO 36569
atggccagtgcctcgttcttacgaggcgctccgcgacacacgctctgcggttgtttgattagaattggagaagggaacgagcaacgcgtagtcacgcttggtggcttggttaccagtggtgatgtgacttgggcactaacagctggtcatctcccgaaagaaacgcggcggaaccagcacaactacagaaagctcactgagaatgacatcgatctatcaaatttcgacccagatacgaagcgtgcgttgatactagtcccgtcgagaagacttgtcgagcacgatgaaattcgattgaacgagccaagcgagccagacaatctagacattgtcaaacttggagatgtcactttgcgcggcaatgagtggtctttgattcggctgaggaatgaggcatttgacttgcctaattgcgcagtatatagcaataagcaaatcgtgtatttgcttgactaccatgctgacggcctgccattcagagacaatgattcgcaacaagtcgatgcgacggttctaggaggggtcactggcctttcccacgtgcgtctgctgagtgagccgacacctatgcggttgccagggggtcaatgggtcgacgtatgggtcgcagaaactaactccgaatctcctgtagccaaattttcggaaaattatttcgaggctgaacaccatgcggaagaggccatgcgagacgatgtcgtatatgcattcaagaagagagatatagagaatgcacataaggtcgatgattttatccaatgggcttcagacaacctcggtatggttttcaacgacaccaataggctgcccagcgggaaggacagcgcaccgatcattgtgccgggacccagtcaaattactttgaagaaatcgaggccaagcgtcaagtgggaagatcttgaacagaagaaatccaccggatcaccagagtcgaaagaagatagacacattgaccacagctgcggatcagaaggtcacttggacaattatttgttcctcaagcagctatcctcgtacaaatactttccagagcgaatcagctatatggaattagtaagtgcgccctcacgaacactaattggctga

SEQ ID NO: 36569 - protein, 361 aa, Muscodor strobelii
  misc_feature: SGI Peptide ID NO. 572678
MASASFLRGAPRHTLCGCLIRIGEGNEQRVVTLGGLVTSGDVTWALTAGHLPKETRRNQHNYRKLTENDIDLSNFDPDTKRALILVPSRRLVEHDEIRLNEPSEPDNLDIVKLGDVTLRGNEWSLIRLRNEAFDLPNCAVYSNKQIVYLLDYHADGLPFRDNDSQQVDATVLGGVTGLSHVRLLSEPTPMRLPGGQWVDVWVAETNSESPVAKFSENYFEAEHHAEEAMRDDVVYAFKKRDIENAHKVDDFIQWASDNLGMVFNDTNRLPSGKDSAPIIVPGPSQITLKKSRPSVKWEDLEQKKSTGSPESKEDRHIDHSCGSEGHLDNYLFLKQLSSYKYFPERISYMELVSAPSRTLIG

SEQ ID NO: 36570 - DNA, 911 bp, Muscodor strobelii
  misc_feature: SGI EST ID NO. CUFF.87240.0
  misc_feature: Variant of the nucleotide sequence at SEQ ID NO 36568
ggccagtgcctcgttcttacgaggcgctccgcgacacacgctctgcggttgtttgattagaattggagaagggaacgagcaacgcgtagtcacgcttggtggcttggttaccagtggtgatgtgacttgggcactaacagctggtcatctcccgaaagaaacgcggcggaaccagcacaactacagaaagctcactgagaatgacatcgatctatcaaatttcgacccagatacgaagcgtgcgttgatactagtcccgtcgagaagacttgtcgagcacgatgaaattcgattgaacgagccaagcgagccagacaatctagacattgtcaaacttggagatgtcactttgcgcggcaatgagtggtctttgattcggctgaggaatgaggcatttgacttgcctaattgcgcagtatatagcaataagcaaatcgtgtatttgcttgactaccatgctgacggcctgccattcagagacaatgattcgcaacaagtcgatgcgacggttctaggaggggtcactggcctttcccacgtgcgtctgctgagtgagccgacacctatgcggttgccagggggtcaatgggtcgacgtatgggtcgcagaaactaactccgaatctcaactcaagaggggcgattcaggttcttgggtggctgataccaagagtggaattgtatatggacatgttctttcagtttcgggaagcacggtctatattttgcctctggtagaaatatttcggcaaataagggagagaatacctacaattcggcttgaattaactcctccgtttgttgctctatcgcgcctagctgtagccaaattttcggaaaattatttcgaggctgaacaccatgcggaagaggccatgcgagacgatgtcgtatatgcattcaagaagagag

SEQ ID NO: 36571 - DNA, 690 bp, Muscodor strobelii
  misc_feature: SGI cDNA ID NO. 572679
  misc_feature: Encodes the peptide sequence at SEQ ID NO 36572
atgttgctggatcctatcaacactaccagccctattgatgtctctgagaacgccggagtcaatgggaatgccatcctcaccacgggctgggcgggcgctgcaatgagcaatagcgcaaacacgtattccaccgttgttgcaatcgttaaagtgcctctcccgtacaacagtggaaaaccaacctctgcttcgatctgggtaggcattgatggcattacctgcaagtctgcgactctttcaactggtcttctcatgaacgtcaacgcaagcggttgggcttcatattccgcctggtatagatggtaccccggggatataggtcattacgacggcattggaatgaaccctggcgatgagatcgtcatgagcgtgttcgcagatagtccgaactcaggaactactctgatcgaaaatctgacagcaaataccacggtgtatcacgaattccagaaccaatctccctccatttgtgggcaagacgcggaatggatcgtcgaggatcctcatttcgagactatgccgtttgccgacttcggccaagtcaactttacttttgcccaggcagacaaagacaagacttcgttctctctcgatggcgctacagtcttcaacattaaggaaaacaacaagacgttgaccaattgcgtcattgatagctcgaatgcttttcactgtgattatattccttaa

SEQ ID NO: 36572 - protein, 229 aa, Muscodor strobelii
  misc_feature: SGI Peptide ID NO. 572679
  misc_feature (27)..(228): Pfam Id: PF01828 Pfam Desc: Peptidase A4 family
  misc_feature (30)..(228): Pfam Id: PF01828 Pfam Desc: Peptidase A4 family
  misc_feature (30)..(214): NCBI GI: 212534108 Blast Desc: aspergillopepsin, [Penicillium marneffei ATCC 18224] gi|210069609|gb|EEA23699.1| aspergillopepsin, [Penicillium marneffei ATCC 18224]
  misc_feature (13)..(228): NCBI GI: 255940586 Blast Desc: Pc16g07360 [Penicillium chrysogenum Wisconsin 54-1255] gi|211585685|emb|CAP93406.1| Pc16g07360 [Penicillium chrysogenum Wisconsin 54-1255]
  misc_feature (30)..(214): NCBI GI: 238499183 Blast Desc: aspergillopepsin, [Aspergillus flavus NRRL3357] gi|220692579|gb|EED48925.1| aspergillopepsin, [Aspergillus flavus NRRL3357]
  misc_feature (21)..(213): NCBI GI: 212533183 Blast Desc: aspergillopepsin-2 precursor, [Penicillium marneffei ATCC 18224] gi|210072112|gb|EEA26201.1| aspergillopepsin-2 precursor, [Penicillium marneffei ATCC 18224]
  misc_feature (30)..(217): NCBI GI: 52547961 Blast Desc: AF439998_1 glutamic protease eqolisin [Talaromyces emersonii]
  misc_feature (30)..(228): NCBI GI: 154293948 Blast Desc: BC1G_14153 [Botryotinia fuckeliana B05.10] gi|150845125|gb|EDN20318.1| BC1G_14153 [Botryotinia fuckeliana B05.10]
  misc_feature (30)..(228): NCBI GI: 73543258 Blast Desc: acidic protease 1 [Botryotinia fuckeliana]
  misc_feature (15)..(228): NCBI GI: 70982568 Blast Desc: aspergillopepsin, putaitve [Aspergillus fumigatus Af293] gi|66844436|gb|EAL84774.1| aspergillopepsin, putaitve [Aspergillus fumigatus Af293] gi|159122948|gb|EDP48068.1| A1163]
  misc_feature (30)..(214): NCBI GI: 242789335 Blast Desc: aspergillopepsin, [Talaromyces stipitatus ATCC 10500] gi|218717927|gb|EED17347.1| aspergillopepsin, [Talaromyces stipitatus ATCC 10500]
  misc_feature (23)..(228): NCBI GI: 212526204 Blast Desc: aspergillopepsin-2 precursor, [Penicillium marneffei ATCC 18224] gi|210072657|gb|EEA26744.1| aspergillopepsin-2 precursor, [Penicillium marneffei ATCC 18224]
  misc_feature (23)..(228): SWISSPROT Homolog: EC 3.4.23.32 Scytalidopepsin B
MLLDPINTTSPIDVSENAGVNGNAILTTGWAGAAMSNSANTYSTVVAIVKVPLPYNSGKPTSASIWVGIDGITCKSATLSTGLLMNVNASGWASYSAWYRWYPGDIGHYDGIGMNPGDEIVMSVFADSPNSGTTLIENLTANTTVYHEFQNQSPSICGQDAEWIVEDPHFETMPFADFGQVNFTFAQADKDKTSFSLDGATVFNIKENNKTLTNCVIDSSNAFHCDYIP

SEQ ID NO: 36573 - DNA, 158 bp, Muscodor strobelii
  misc_feature: SGI EST ID NO. CUFF.87242.0
  misc_feature: Variant of the nucleotide sequence at SEQ ID NO 36571
cggggatataggtcattacgacggcattggaatgaaccctggcgatgagatcgtcatgagcgtgttcgcagatagtccgaactcaggaactactctgatcgaaaatctgacagcaaataccacggtgtatcacgaattccagaaccaatctccctcca

SEQ ID NO: 36574 - DNA, 849 bp, Muscodor strobelii
  misc_feature: SGI cDNA ID NO. 572680
  misc_feature: Encodes the peptide sequence at SEQ ID NO 36575
atgtcaaacaaatcggttttaatctcaggttgcagcgatggcggcatcggatcaaccctcgccaaagagtttgctagacgtggatatcgagtattcgcaacggttcgcaacatatcgaaagcatcgtttttgaaaggtatcgatgggatcgagatattggagctcgaggtcacatcagccgagtcgatagcgaagtgcgccgccgaagtacatcgctttacaaacggctcgctcaacgtgttagtgaataacgctggtgctgactttgttgtcccgttccttgatgtttcagttgacgaggcgaaacgcctttacgatgtcaacgttttcagtattctatctgtcactcaagcttttgcgcccatgcttatcaagagcaagggctgtgttgtcaacatgagctccatcgctggtgttatgccattgtcatggtctagtatctacagcagttccaaagcagccgccaagcagatgtcagaatgcatgcggacagagctggctccgcttggtgtgcgcgtgatcacgggtttgataggtgccgtgcacaccccgatccatcaacgcgctggcgatcttcatctatcgaacgattcgtattacggtaatctacgaggtcacatcaatgaggttcgtcagggtagtcataaacctggcgcagttgatccaactattctttgcaaggagctagccgaggacattgtcggtggtaaaacagggattgtctggcgcggcggcactgcgactggcgtacgttatctcagctggttgcttcctgaaagcatgtgggagaaagtcgtaaataaaggtcgtggcctagataaaattgtgaggcaggatattatacactga

SEQ ID NO: 36575 - protein, 282 aa, Muscodor strobelii
  misc_feature: SGI Peptide ID NO. 572680
  misc_feature (4)..(167): Pfam Id: PF00106 Pfam Desc: short chain dehydrogenase
  misc_feature (1)..(279): NCBI GI: 242774205 Blast Desc: short-chain dehydrogenase/reductase, [Talaromyces stipitatus ATCC 10500] gi|218722013|gb|EED21431.1| short-chain dehydrogenase/reductase, [Talaromyces stipitatus ATCC 10500]
  misc_feature (2)..(275): NCBI GI: 116204291 Blast Desc: CHGG_10029 [Chaetomium globosum CBS 148.51] gi|88176157|gb|EAQ83625.1| CHGG_10029 [Chaetomium globosum CBS 148.51]
  misc_feature (1)..(277): NCBI GI: 212531875 Blast Desc: short-chain dehydrogenase/reductase, [Penicillium marneffei ATCC 18224] gi|210071458|gb|EEA25547.1| short-chain dehydrogenase/reductase, [Penicillium marneffei ATCC 18224]
  misc_feature (4)..(262): NCBI GI: 121700480 Blast Desc: short-chain dehydrogenase/reductase, [Aspergillus clavatus NRRL 1] gi|119396647|gb|EAW07079.1| short-chain dehydrogenase/reductase, [Aspergillus clavatus NRRL 1]
  misc_feature (3)..(275): NCBI GI: 238492093 Blast Desc: short-chain dehydrogenases/reductase, [Aspergillus flavus NRRL3357] gi|220695777|gb|EED52119.1| short-chain dehydrogenases/reductase, [Aspergillus flavus NRRL3357]
  misc_feature (3)..(275): NCBI GI: 169782478 Blast Desc: [Aspergillus oryzae RIB40] gi|83774445|dbj|BAE64568.1| protein product [Aspergillus oryzae]
  misc_feature (4)..(258): NCBI GI: 39956189 Blast Desc: MGG_09068 [Magnaporthe grisea 70-15] gi|145016457|gb|EDK00887.1| MGG_09068 [Magnaporthe grisea 70-15]
  misc_feature (5)..(258): NCBI GI: 169768462 Blast Desc: [Aspergillus oryzae RIB40] gi|238497766|ref|XP_002380118.1| estradiol 17 beta-dehydrogenase, [Aspergillus flavus NRRL3357] gi|83766559|dbj|BAE56699.1| protein
  misc_feature (1)..(278): NCBI GI: 156049501 Blast Desc: SS1G_08457 [Sclerotinia sclerotiorum 1980] gi|154692856|gb|EDN92594.1| SS1G_08457 [Sclerotinia sclerotiorum 1980]
  misc_feature (1)..(263): NCBI GI: 154317593 Blast Desc: BC1G_03148 [Botryotinia fuckeliana B05.10] gi|150844322|gb|EDN19515.1| BC1G_03148 [Botryotinia fuckeliana B05.10]
  misc_feature (4)..(275): SWISSPROT Homolog: EC 1.1.1.101 Acylglycerone-phosphate reductase
MSNKSVLISGCSDGGIGSTLAKEFARRGYRVFATVRNISKASFLKGIDGIEILELEVTSAESIAKCAAEVHRFTNGSLNVLVNNAGADFVVPFLDVSVDEAKRLYDVNVFSILSVTQAFAPMLIKSKGCVVNMSSIAGVMPLSWSSIYSSSKAAAKQMSECMRTELAPLGVRVITGLIGAVHTPIHQRAGDLHLSNDSYYGNLRGHINEVRQGSHKPGAVDPTILCKELAEDIVGGKTGIVWRGGTATGVRYLSWLLPESMWEKVVNKGRGLDKIVRQDIIH

SEQ ID NO: 36576 - DNA, 1259 bp, Muscodor strobelii
  misc_feature: SGI EST ID NO. CUFF.87258.0
  misc_feature: Variant of the nucleotide sequence at SEQ ID NO 36574
gcaaagcaaacggcactctcaactctccgattcatgacaatagagtcggcgcattgtgtcatggtcacatctacgcattgaaattgagtaaacccaaacctcgatgatcgaaatgttatgctatattaatcccagatgcaagtacaacatggagaccgaattttcgcatcgaagcagctcttactcacatacgcaaatcgagcccgaataagattcctcatatctcagtatttaagaccacaaaagaggccctaaactcggagttttctcgggcatgtcaaacaaatcggttttaatctcaggttgcagcgatggcggcatcggatcaaccctcgccaaagagtttgctagacgtggatatcgagtattcgcaacggttcgcaacatatcgaaagcatcgtttttgaaaggtatcgatgggatcgagatattggagctcgaggtcacatcagccgagtcgatagcgaagtgcgccgccgaagtacatcgctttacaaacggctcgctcaacgtgttagtgaataacgctggtgctgactttgttgtcccgttccttgatgtttcagttgacgaggcgaaacgcctttacgatgtcaacgttttcagtattctatctgtcactcaagcttttgcgcccatgcttatcaagagcaagggctgtgttgtcaacatgagctccatcgctggtgttatgccattgtcatggtctagtatctacagcagttccaaagcagccgccaagcagatgtcagaatgcatgcggacagagctggctccgcttggtgtgcgcgtgatcacgggtttgataggtgccgtgcacaccccgatccatcaacgcgctggcgatcttcatctatcgaacgattcgtattacggtaatctacgaggtcacatcaatgaggttcgtcagggtagtcataaacctggcgcagttgatccaactattctttgcaaggagctagccgaggacattgtcggtggtaaaacagggattgtctggcgcggcggcactgcgactggcgtacgttatctcagctggttgcttcctgaaagcatgtgggagaaagtcgtaaataaaggtcgtggcctagataaaattgtgaggcaggatattatacactgatacagcctaagttccaacgaataagcatattcatatactaagttgttgctgtaattaccaggatgttttctaacgtagcttcggcatcatgatccttaagcaagtattgtaccgatgcagggacaactataccgcg

SEQ ID NO: 36577 - DNA, 921 bp, Muscodor strobelii
  misc_feature: SGI cDNA ID NO. 572681
  misc_feature: Encodes the peptide sequence at SEQ ID NO 36578
atgattgaggtgcaaacaacgcgagaggaagcgcttgctaaacgccgagctcagaaccgcgaagcccagcgcagatttcgattgaagcaaagccaacagaaagagaaagagaagccatcgattcaacgtccagcgaaggtgtctaggatcactcgacccaatgaatgtgtcttctcttcaacattcagtctttttggaagatatgatctcttagactcctttaatatgagcacagactctacatcttgctgcacgcacagcaacgcatctgtacggccggagtcctcagcgaggtcagagccgacaactattgaaacgtggctggacggcacggcacaagaacgaagcagcattgaaacacagcgcactacttatggcccgggaactgaaggccgtcttgcggacccgcgattggaagatcgaccatccgtgcaatcctcattcaccgaccttgattacctggccagcgatacagccgggggcgtggacaacaatccgggatcaagctggcagagctccttacacatagctgcccagcgcggtcacctttcaatagtgcgcatcctactcgaacaggatgccaactgcaacgagcgggatagtgatggcttgacgccgctctttcatgcttgcttgggcggccacgatcaggtcgtggcgttgctcctccgaaaaggcgctctaatcagcgaagaggaccaaatagggcgcaccgcaatccatcttgcagtcgtttatcagcaggaaactgtactgaggatgctgcttgagcactgcaaggacagacttgatctgatcaatgcctacgatactgcgggcatgaccccattgcatactgctgttgaccatggcttcgacgctggtgttcgggccttgctcgaacatggagcgagtttgaagtatagggcgaggaaggcttga

SEQ ID NO: 36578 - protein, 306 aa, Muscodor strobelii
  misc_feature: SGI Peptide ID NO. 572681
  misc_feature (169)..(201): Pfam Id: PF00023 Pfam Desc: Ankyrin repeat
  misc_feature (202)..(234): Pfam Id: PF00023 Pfam Desc: Ankyrin repeat
  misc_feature (272)..(304): Pfam Id: PF00023 Pfam Desc: Ankyrin repeat
  misc_feature (170)..(305): NCBI GI: 154315473 Blast Desc: BC1G_04309 [Botryotinia fuckeliana B05.10] gi|150847249|gb|EDN22442.1| BC1G_04309 [Botryotinia fuckeliana B05.10]
  misc_feature (171)..(302): NCBI GI: 167534507 Blast Desc: [Monosiga brevicollis MX1] gi|163772609|gb|EDQ86259.1| [Monosiga brevicollis MX1]
  misc_feature (169)..(297): NCBI GI: 28373837 Blast Desc: [Monosiga brevicollis MX1] gi|163772609|gb|EDQ86259.1| [Monosiga brevicollis MX1]
  misc_feature (159)..(304): NCBI GI: 28274852 Blast Desc: ankyrin repeat protein E4_2 [synthetic construct]
  misc_feature (163)..(297): NCBI GI: 229582572 Blast Desc: Ankyrin [Sulfolobus islandicus Y.N.15.51] gi|228013288|gb|ACP49049.1| Ankyrin [Sulfolobus islandicus Y.N.15.51]
  misc_feature (171)..(304): NCBI GI: 28274854 Blast Desc: ankyrin repeat protein E4_8 [synthetic construct]
  misc_feature (160)..(299): NCBI GI: 115433911 Blast Desc: conserved [Aspergillus terreus NIH2624] gi|114189944|gb|EAU31644.1| conserved [Aspergillus terreus NIH2624]
  misc_feature (172)..(299): NCBI GI: 242012886 Blast Desc: ankyrin repeat domain-containing protein, [Pediculus humanus corporis] gi|212511439|gb|EEB14418.1| ankyrin repeat domain-containing protein, [Pediculus humanus corporis]
  misc_feature (171)..(299): NCBI GI: 123503806 Blast Desc: ankyrin repeat protein [Trichomonas vaginalis G3] gi|121911551|gb|EAY16383.1| ankyrin repeat protein, [Trichomonas vaginalis G3]
  misc_feature (172)..(297): NCBI GI: 259485707 Blast Desc: TPA: conserved [Aspergillus nidulans FGSC A4]
  misc_feature (172)..(297): SWISSPROT Homolog: EC 2.7.11.1 Non-specific serine/threonine protein kinase
MIEVQTTREEALAKRRAQNREAQRRFRLKQSQQKEKEKPSIQRPAKVSRITRPNECVFSSTFSLFGRYDLLDSFNMSTDSTSCCTHSNASVRPESSARSEPTTIETWLDGTAQERSSIETQRTTYGPGTEGRLADPRLEDRPSVQSSFTDLDYLASDTAGGVDNNPGSSWQSSLHIAAQRGHLSIVRILLEQDANCNERDSDGLTPLFHACLGGHDQVVALLLRKGALISEEDQIGRTAIHLAVVYQQETVLRMLLEHCKDRLDLINAYDTAGMTPLHTAVDHGFDAGVRALLEHGASLKYRARKA

SEQ ID NO: 36579 - DNA, 2299 bp, Muscodor strobelii
  misc_feature: SGI EST ID NO. CUFF.87269.0
  misc_feature: Variant of the nucleotide sequence at SEQ ID NO 36577
caatcttgcatacgacggccccacctgttcgggttgctgggaatcggcgtgattatcaccccttggcgggtaatgggcgacagtcacataacaagcttgttagctattgtggcccagtctctaattgtgttttctcttattattcagaagctagtcggggcaatacacgtgttgattatctacgcgatcgctcacacggaataataaccatacctaccgaagccggtgccatgattgaggtgcaaacaacgcgagaggaagcgcttgctaaacgccgagctcagaaccgcgaagcccagcgcagatttcgattgaagcaaagccaacagaaagagaaagagaagccatcgattcaacgtccagcgaaggtgtctaggatcactcgacccaatgaatgtgtcttctcttcaacattcagtctttttggaagatatgatctcttagactcctttaatatgagcacagactctacatcttgctgcacgcacagcaacgcatctgtacggccggagtcctcagcgaggtcagagccgacaactattgaaacgtggctggacggcacggcacaagaacgaagcagcattgaaacacagcgcactacttatggcccgggaactgaaggccgtcttgcggacccgcgattggaagatcgaccatccgtgcaatcctcattcaccgaccttgattacctggccagcgatacagccgggggcgtggacaacaatccgggatcaagctggcagagctccttacacatagctgcccagcgcggtcacctttcaatagtgcgcatcctactcgaacaggatgccaactgcaacgagcgggatagtgatggcttgacgccgctctttcatgcttgcttgggcggccacgatcaggtcgtggcgttgctcctccgaaaaggcgctctaatcagcgaagaggaccaaatagggcgcaccgcaatccatcttgcagtcgtttatcagcaggaaactgtactgaggatgctgcttgagcactgcaaggacagacttgatctgatcaatgcctacgatactgcgggcatgaccccattgcatactgctgttgaccatggcttcgacgctggtgttcgggccttgctcgaacatggagcgagtttgaagtatagggcgaggaaggcttgatttaaacagtgcaacgcgggcattgcgatagactaagctaatttttagatttcaaattttcacgcgagtttggaaagtagaagccaaatatacccattttgattgcttatgccattctttgtctttggttgagtacaattatgatatttgacggtacatattttggaacgcctcgctgtgttggacatgatcaaagcaacaggaccaccataaaactctttcctcctaccatactccttcattaaagcccaggaatgttgcactagatcgtaagcgtgcgtatcttcttttcataccgtatattacagcgtgcgttctcgagtcggaatattgataggggtttgagcgtataactctagatgaccagtattgccactggtttgtatcttctgcctttgtgcattataaaactctcgcaaattgcactgagcccagagataacgtagcagagtctcaatgtaacctatttcggggtcataaaattcgccaaattggagattatacgactgtagcagagacatcgcaccaaaaaggtgaaatgacaaaacactctcgtaatcggtcgagtcgtcgcttcgcatatagcactccaaattgatgaaaaccgcggcgctcaagatagcgagctttgtcaactccctagatcgaggcgcatgcccaagtcgctcattaagcaggcgaattgctagattgtacttattggcaacatacgcccgggttgtggcacggtcgtgccatggcgtaagggggcaataactgttcctggccatcgtactaatggctagagacgcgtgatagatgcatggctctgtgtgtgcgtagcgcgcaaggagtgcatcccattccggaacttcacaaaagacagcaaattcagatgtacaaatgatgcggaagaattcccacttttcggagtctaaaacggtcgctaggttcgactcattcggagagtttgaaggctttggatatagtcttggagataaagtagacctcggcaggggtaggcgacgacgagcgacgattacttgctcttctttagttggagacttgctctttggctgctgctcaggcggcagactgaaatcacattttcggtctgtgctagtgcactgaacacaggcaggcttggtttcatcgcactttttgtgtcg

SEQ ID NO: 36580 - DNA, 1554 bp, Muscodor strobelii
  misc_feature: SGI cDNA ID NO. 572682
  misc_feature: Elevated expression when VOC is produced
  misc_feature: Encodes the peptide sequence at SEQ ID NO 36581
atgtggcaattttcgaccgccctttttctgggctcgcttgttgccgcttcgaaaggggctctcaccaagtatgccacgacatgtcctgactataccgactattacaagcaactccatgcgcctttctcttctggaaaatataacttgtcttacatgcgaccagaggaggactgcaggacgttcagattaccggagattgagtctgctattgcagatatgaaaaatgtcgtcaaagatcctgatctgttccgactgttcgaaaatacatatcccaacactttagatactactgtccaatggaagggctacgcgaacaacggctcaacagaagaacttgccttcgtcatcactggagacattgttgctatgtggctacgcgatagcgcaaatcagttgcggagttacaagtccttcctgaaagccaactcgtcaaatgcgtcgctggcctcgctgtatcgcggtgccattaaccttcaggctcgctatataatccagaatccgtactgtaattcattccaaccaccagttgaatcgggactcgctcctacgaaaaacggtgctgcttcagatgatacagttaagccgagctactcagaaagcattgtctttgaatgcaaatacgaacttgactcgttatccgcgtttttgcagctgtcgtatgactactacgagatgaccaaggacgctgacttttttggaaaattcaaatggccaaccgctattgacacgatcttgaatgtcaccaaaggcctgcaaatcggcacgtatgcagactctggagccgccaatgactcgccctataccttcactcgaagcacaactgccggcaccgaaacgctggccaacaagggcattggtaacccaacaaagtctggcactggtcttgttcggagtgccttccgaccttctgatgacgctactatctaccaacttttcattcctgcgaacatgatgttctctagcaaccttgctaaatgcgccgagatcatgaagtccattgacgaggatacggcgcaagtcatgacggatttggctaacgaggtgcgcgatggcgttaataaatacggcaaagtgaatcatcctgaattcggcgagatctatgcctacgagatcgatggattcggatcgtcgaacgtgatggatgatgccaatatgcctagtctactaggtgcgccgattctcgatttccttgatacgtcggacgagacctaccagaacacgcgcaaattcgtgttatcgacctggaatccttactatatgcatggtccagtcatttccggtactggcggtccacatgttgggccaggtaacgcttggccgatgtctatcatcgtgtcccttctcacttcagacaacgacaccgagatcacatcaggactcaagacgttggtatcttcaacggctcaactcggcttgatacatgagtctatcaatacgtttgatcagttcacatggtcgcgtcaatggtttgcgtgggccaacggtttgtttggcgagatgctacttggcttgaaggaccggaagccagacctgctgaatacgagcttccagtag

SEQ ID NO: 36581 - protein, 517 aa, Muscodor strobelii
  misc_feature: SGI Peptide ID NO. 572682
  misc_feature (79)..(503): Pfam Id: PF06824 Pfam Desc: Domain of function (DUF1237)
  misc_feature (13)..(517): NCBI GI: 156056843 Blast Desc: SS1G_04152 [Sclerotinia sclerotiorum 1980] gi|154701938|gb|EDO01677.1| SS1G_04152 [Sclerotinia sclerotiorum 1980]
  misc_feature (13)..(517): NCBI GI: 154323598 Blast Desc: BC1G_00198 [Botryotinia fuckeliana B05.10] gi|150842427|gb|EDN17620.1| BC1G_00198 [Botryotinia fuckeliana B05.10]
  misc_feature (28)..(517): NCBI GI: 169598258 Blast Desc: SNOG_01930 [Phaeosphaeria nodorum SN15] gi|111069022|gb|EAT90142.1| SNOG_01930 [Phaeosphaeria nodorum SN15]
  misc_feature (28)..(517): NCBI GI: 189208398 Blast Desc: conserved [Pyrenophora tritici-repentis Pt-1C-BFP] gi|187976625|gb|EDU43251.1| conserved [Pyrenophora tritici-repentis Pt-1C-BFP]
  misc_feature (20)..(517): NCBI GI: 256734062 Blast Desc: NECHADRAFT_36723 [Nectria haematococca mpVI 77-13-4]
  misc_feature (28)..(517): NCBI GI: 170674512 Blast Desc: secreted protein [Epichloe festucae]
  misc_feature (6)..(517): NCBI GI: 46128091 Blast Desc: FG08423.1 [Gibberella zeae PH-1]
  misc_feature (28)..(489): NCBI GI: 145612946 Blast Desc: MGG_08320 [Magnaporthe grisea 70-15] gi|145020032|gb|EDK04260.1| MGG_08320 [Magnaporthe grisea 70-15]
  misc_feature (28)..(517): NCBI GI: 85095398 Blast Desc: NCU05819 [Neurospora crassa OR74A] gi|28921538|gb|EAA30843.1| conserved [Neurospora crassa OR74A]
  misc_feature (28)..(517): NCBI GI: 189192248 Blast Desc: conserved [Pyrenophora tritici-repentis Pt-1C-BFP] gi|187974069|gb|EDU41568.1| conserved [Pyrenophora tritici-repentis Pt-1C-BFP]
  misc_feature: Useful for introducing or modulating the production of volatile compounds
MWQFSTALFLGSLVAASKGALTKYATTCPDYTDYYKQLHAPFSSGKYNLSYMRPEEDCRTFRLPEIESAIADMKNVVKDPDLFRLFENTYPNTLDTTVQWKGYANNGSTEELAFVITGDIVAMWLRDSANQLRSYKSFLKANSSNASLASLYRGAINLQARYIIQNPYCNSFQPPVESGLAPTKNGAASDDTVKPSYSESIVFECKYELDSLSAFLQLSYDYYEMTKDADFFGKFKWPTAIDTILNVTKGLQIGTYADSGAANDSPYTFTRSTTAGTETLANKGIGNPTKSGTGLVRSAFRPSDDATIYQLFIPANMMFSSNLAKCAEIMKSIDEDTAQVMTDLANEVRDGVNKYGKVNHPEFGEIYAYEIDGFGSSNVMDDANMPSLLGAPILDFLDTSDETYQNTRKFVLSTWNPYYMHGPVISGTGGPHVGPGNAWPMSIIVSLLTSDNDTEITSGLKTLVSSTAQLGLIHESINTFDQFTWSRQWFAWANGLFGEMLLGLKDRKPDLLNTSFQ

SEQ ID NO: 36582 - DNA, 1975 bp, Muscodor strobelii
  misc_feature: SGI EST ID NO. CUFF.87266.0
  misc_feature: Variant of the nucleotide sequence at SEQ ID NO 36580
ttttatgtcgacatcgatttgaatcaggtagttgtcaataggttttgactttcttttggttggcgatcctgtttcgcttcacgacttttttggactcctataacctacggacattatcaagaatgtggcaattttcgaccgccctttttctgggctcgcttgttgccgcttcgaaaggggctctcaccaagtatgccacgacatgtcctgactataccgactattacaagcaactccatgcgcctttctcttctggaaaatataacttgtcttacatgcgaccagaggaggactgcaggacgttcagattaccggagattgagtctgctattgcagatatgaaaaatgtcgtcaaagatcctgatctgttccgactgttcgaaaatacatatcccaacactttagatactactgtccaatggaagggctacgcgaacaacggctcaacagaagaacttgccttcgtcatcactggagacattgttgctatgtggctacgcgatagcgcaaatcagttgcggagttacaagtccttcctgaaagccaactcgtcaaatgcgtcgctggcctcgctgtatcgcggtgccattaaccttcaggctcgctatataatccagaatccgtactgtaattcattccaaccaccagttgaatcgggactcgctcctacgaaaaacggtgctgcttcagatgatacagttaagccgagctactcagaaagcattgtctttgaatgcaaatacgaacttgactcgttatccgcgtttttgcagctgtcgtatgactactacgagatgaccaaggacgctgacttttttggaaaattcaaatggccaaccgctattgacacgatcttgaatgtcaccaaaggcctgcaaatcggcacgtatgcagactctggagccgccaatgactcgccctataccttcactcgaagcacaactgccggcaccgaaacgctggccaacaagggcattggtaacccaacaaagtctggcactggtcttgttcggagtgccttccgaccttctgatgacgctactatctaccaacttttcattcctgcgaacatgatgttctctagcaaccttgctaaatgcgccgagatcatgaagtccattgacgaggatacggcgcaagtcatgacggatttggctaacgaggtgcgcgatggcgttaataaatacggcaaagtgaatcatcctgaattcggcgagatctatgcctacgagatcgatggattcggatcgtcgaacgtgatggatgatgccaatatgcctagtctactaggtgcgccgattctcgatttccttgatacgtcggacgagacctaccagaacacgcgcaaattcgtgttatcgacctggaatccttactatatgcatggtccagtcatttccggtactggcggtccacatgttgggccaggtaacgcttggccgatgtctatcatcgtgtcccttctcacttcagacaacgacaccgagatcacatcaggactcaagacgttggtatcttcaacggctcaactcggcttgatacatgagtctatcaatacgtttgatcagttcacatggtcgcgtcaatggtttgcgtgggccaacggtttgtttggcgagatgctacttggcttgaaggaccggaagccagacctgctgaatacgagcttccagtaggtctcgagcccttggattgtaggatacggtctggtcgatgatcaatttcccttgggccgagtaccaattaatctgaaatataacgcttcattctgagctgtcaacgcatgactcttcagtcctagaatgtgtcttctacgctggctcgacgtgacatgactcaggactaattctccacacacaatatatccccgctagtctatattctcaaagaataggacttttgaatgaagtgccaaagatgaattgatactaagtgcctggcatgtgagtgcagcctctaggaagtttctgtgagg

SEQ ID NO: 36583 - DNA, 2853 bp, Muscodor strobelii
  misc_feature: SGI cDNA ID NO. 572683
  misc_feature: Encodes the peptide sequence at SEQ ID NO 36584
atgcatcagacacctcgacccacacttcgtgccgccttcccacctccatccacatcgtcaaataccgccaggacgaggagaccgggcagtcctgccagtcctggcgcccagtcgccgctgtcaaccgaagccatgccgcacatgagctctccggacagagaagggccggcggcatctttgccagcccgcccagaaggccgcccgagccgcgagactatcaagaagcttgatcagattatacagaatgtatattcaaaagccgggacgatcattctacaggagcggatgcaggtaacacctgtgctcgtgggcaagtctcgcgagaaaaggacgagcagatggttccaaattgatacggatgatatcgatgatttcaaagaagaattccgagtttggaaaacatgcggtggttttgataatcgcccacctccactaataattgaaacatatctcgacacatcccggttaaaaagcggccagagtctggtagctctggacccagatgggcggcgctgggatgtcatagaagctatcaattcgtcagatcagtcgagcgacagcagttcagggcggtcaggtagacgcgttaatcatgtcgtgctagagcgatggcgaatcgaattgaaagtcacccggaccgacgatatcgaggaatttggacctctcttgccgacagtgtacaagaaagccattgtgttgatgcgatctatatatactacgacaggcttcttaccagcctggagaatggccaggaactccaagactaaaggggcgcaccctgccatgtcaatacgatgcagggtctccgctggagactcccgcagttttggagccgaaacactgcgtacgccgttatttgaggccagaggcgatgtgtctacggacttgatgtttggcgacctcgaagttcccgttggtcgcttttatgcttctgtctcatatcgaaaccagtgcaacttccaggtggtcgagactgagtcgctgctgagttcccgcataggaatggccatttccgatgatatgttcaagccatcattaccacatcggacccaaagtcggcgcgagcctcttggccatgagatcggctctgtaccataccagcgtgatcaacgacaagcacccgatatcacggaaaaccagcaacgctacggcagcttatccactttccacggggaagggcctgttggcacaagtcccatctccgcactacgagctgtcaaagcacctggctccgacacttcatcgcctcccgactcaaggcctgccagtagggaacaggtcccacattcattaccgatatcaaatttagctagacggccctctcttcgggtggcagcagaaggaacaagcaggcgcccatctgtgtctttccagtcgtcgccctttaagcacgggtcattatccggttcacctataccacgtatgcttgaccaggacgtgccgccatcgccgcggacaagcgctggattcagcacagctgcccacgtacgcaatcggtcatcgctcacagcaggaatgcctgcgtcgctacgcggaggccctgcgccgcaagctaccgcggatagtcctgtcgccagctcaccccggcctgccaatacgaatcgttttagtagcagttttactcatcgacggagccgtccatcatttggcggtacaagcaaaggagatgatgatcaagcaagcagtgggaaacagagtctgtcatcctcggtggcacagccaggatctggtctccttaatgaggctggcgccggaggcagctcaggctcgtttcaaaccgacgatgatagcattcaagaatttctcaaggcgcttgacagcaagcggacgcttcagagttttgagccgtcgaagaaaggggagtcggccactaagaggactactgctcagctatccaagttccacctcatgcgggaatcgaacaatgctctcaccgagtccatgaattcatccgtgcaattgcaaaggtcatcgagtacgtccagtcggcagctagctaatgtcccaggcatgtcggtctcgtcgtcgccaggaaagcctctgtcaccgcatacgcctcacacgcctgctataccatctcgtcttagtgagaattcgagcgtggactatgcggcacccacacgaacagtaccgcgatcacatcaaaatatcgacctcccggaagagccaccagcaagcgcgccggcagcaacgtttgaaaggaccacggctatcgatatacccatgtctccacgcccgcatccccatgccaggcggtcaagctctgtcgctcaccagcctcgcgtgctagccgaagacgaggccgacgaagctcagcgtagcctcagcctcggtgcggaggagcgtgatgtgcctagcctgagcgtattgcttggacgagcagctgctgaggatgccgaagcggcaagctcatctgcgctccagccaccagctgacatccgggcagcaggatcacccgatatggaaggacaggcatcgtcatctgtagaacgagaagcgcgaccacccaaaagcctgttcagcggtctttccagctcgccttacggcaggcgctacggtagcagtgcgggccgaggcatcacgccaccacagtcgggcagtggcagtctggtagggtccagtggtcggtacagccgcgggtactcacgtggcggcgccagcggtccagcaccgggtgctggctctacagaggagacggaagaggagccgttgcttttcgacatgtcagaaatcaaccgcgagcagtcgcgtcgcagtctggaggaaagccgagacccccgcggtggcggctttggcagcgatcgaggcagctacttttcgggccgtggcagcggtggtcgccgctggggatga

SEQ ID NO: 36584 - protein, 950 aa, Muscodor strobelii
  misc_feature: SGI Peptide ID NO. 572683
  misc_feature (1)..(949): NCBI GI: 46128227 Blast Desc: FG08491.1 [Gibberella zeae PH-1]
  misc_feature (1)..(949): NCBI GI: 256733944 Blast Desc: [Nectria haematococca mpVI 77-13-4]
  misc_feature (1)..(949): NCBI GI: 261360745 Blast Desc: conserved [Verticillium albo-atrum VaMs.102]
  misc_feature (1)..(931): NCBI GI: 171681838 Blast Desc: protein product [Podospora anserina] gi|170940878|emb|CAP66528.1| protein product [Podospora anserina]
  misc_feature (1)..(949): NCBI GI: 39974799 Blast Desc: MGG_00454 [Magnaporthe grisea 70-15] gi|145018654|gb|EDK02933.1| MGG_00454 [Magnaporthe grisea 70-15]
  misc_feature (45)..(929): NCBI GI: 156034378 Blast Desc: SS1G_13492 [Sclerotinia sclerotiorum 1980] gi|166989492|sp|A7F7B2.1|ATG13_SCLS1 RecName: Full=Autophagy-related protein 13 gi|154698895|gb|EDN98633.1|
  misc_feature (68)..(809): NCBI GI: 116202021 Blast Desc: CHGG_08895 [Chaetomium globosum CBS 148.51] gi|88177413|gb|EAQ84881.1| CHGG_08895 [Chaetomium globosum CBS 148.51]
  misc_feature (1)..(945): NCBI GI: 85097176 Blast Desc: NCU04840 [Neurospora crassa OR74A] gi|28921889|gb|EAA31163.1| [Neurospora crassa OR74A]
  misc_feature (1)..(945): NCBI GI: 226292065 Blast Desc: autophagy-related protein 13 [Paracoccidioides brasiliensis Pb18]
  misc_feature (1)..(945): NCBI GI: 226282768 Blast Desc: autophagy-related protein 13 [Paracoccidioides brasiliensis Pb01]
MHQTPRPTLRAAFPPPSTSSNTARTRRPGSPASPGAQSPLSTEAMPHMSSPDREGPAASLPARPEGRPSRETIKKLDQIIQNVYSKAGTIILQERMQVTPVLVGKSREKRTSRWFQIDTDDIDDFKEEFRVWKTCGGFDNRPPPLIIETYLDTSRLKSGQSLVALDPDGRRWDVIEAINSSDQSSDSSSGRSGRRVNHVVLERWRIELKVTRTDDIEEFGPLLPTVYKKAIVLMRSIYTTTGFLPAWRMARNSKTKGAHPAMSIRCRVSAGDSRSFGAETLRTPLFEARGDVSTDLMFGDLEVPVGRFYASVSYRNQCNFQVVETESLLSSRIGMAISDDMFKPSLPHRTQSRREPLGHEIGSVPYQRDQRQAPDITENQQRYGSLSTFHGEGPVGTSPISALRAVKAPGSDTSSPPDSRPASREQVPHSLPISNLARRPSLRVAAEGTSRRPSVSFQSSPFKHGSLSGSPIPRMLDQDVPPSPRTSAGFSTAAHVRNRSSLTAGMPASLRGGPAPQATADSPVASSPRPANTNRFSSSFTHRRSRPSFGGTSKGDDDQASSGKQSLSSSVAQPGSGLLNEAGAGGSSGSFQTDDDSIQEFLKALDSKRTLQSFEPSKKGESATKRTTAQLSKFHLMRESNNALTESMNSSVQLQRSSSTSSRQLANVPGMSVSSSPGKPLSPHTPHTPAIPSRLSENSSVDYAAPTRTVPRSHQNIDLPEEPPASAPAATFERTTAIDIPMSPRPHPHARRSSSVAHQPRVLAEDEADEAQRSLSLGAEERDVPSLSVLLGRAAAEDAEAASSSALQPPADIRAAGSPDMEGQASSSVEREARPPKSLFSGLSSSPYGRRYGSSAGRGITPPQSGSGSLVGSSGRYSRGYSRGGASGPAPGAGSTEETEEEPLLFDMSEINREQSRRSLEESRDPRGGGFGSDRGSYFSGRGSGGRRWG

SEQ ID NO: 36585 - DNA, 4454 bp, Muscodor strobelii
  misc_feature: SGI EST ID NO. CUFF.87349.1
  misc_feature: Variant of the nucleotide sequence at SEQ ID NO 36583
ctcgaaggagctggtcgaatcaatgctgcaggactgttcaggacttctccggactactctatctgtcaaagtttaagaggcgataagaggcgagagcaagcttatcacgatgcttttgcgctgcgctattgatcgactttgaccgtttttccacatctgctgcacacggccgcctctctggctccatgcttctgcttctaaatttttgtacctttttgaatacatatccacaatctgtagccaaacaccgaggaacgcaagaggcatgcagtgcagccagcacacagtcgagctccttgcatgtagacggctcttcaagatttacctccgtgcgccgcaacctcattctttcgtccgaactcgaagatgcatcagacacctcgacccacacttcgtgccgccttcccacctccatccacatcgtcaaataccgccaggacgaggagaccgggcagtcctgccagtcctggcgcccagtcgccgctgtcaaccgaagccatgccgcacatgagctctccggacagagaagggccggcggcatctttgccagcccgcccagaaggccgcccgagccgcgagactatcaagaagcttgatcagattatacagaatgtatattcaaaagccgggacgatcattctacaggagcggatgcaggtaacacctgtgctcgtgggcaagtctcgcgagaaaaggacgagcagatggttccaaattgatacggatgatatcgatgatttcaaagaagaattccgagtttggaaaacatgcggtggttttgataatcgcccacctccactaataattgaaacatatctcgacacatcccggttaaaaagcggccagagtctggtagctctggacccagatgggcggcgctgggatgtcatagaagctatcaattcgtcagatcagtcgagcgacagcagttcagggcggtcaggtagacgcgttaatcatgtcgtgctagagcgatggcgaatcgaattgaaagtcacccggaccgacgatatcgaggaatttggacctctcttgccgacagtgtacaagaaagccattgtgttgatgcgatctatatatactacgacaggcttcttaccagcctggagaatggccaggaactccaagactaaaggggcgcaccctgccatgtcaatacgatgcagggtctccgctggagactcccgcagttttggagccgaaacactgcgtacgccgttatttgaggccagaggcgatgtgtctacggacttgatgtttggcgacctcgaagttcccgttggtcgcttttatgcttctgtctcatatcgaaaccagtgcaacttccaggtggtcgagactgagtcgctgctgagttcccgcataggaatggccatttccgatgatatgttcaagccatcattaccacatcggacccaaagtcggcgcgagcctcttggccatgagatcggctctgtaccataccagcgtgatcaacgacaagcacccgatatcacggaaaaccagcaacgctacggcagcttatccactttccacggggaagggcctgttggcacaagtcccatctccgcactacgagctgtcaaagcacctggctccgacacttcatcgcctcccgactcaaggcctgccagtagggaacaggtcccacattcattaccgatatcaaatttagctagacggccctctcttcgggtggcagcagaaggaacaagcaggcgcccatctgtgtctttccagtcgtcgccctttaagcacgggtcattatccggttcacctataccacgtatgcttgaccaggacgtgccgccatcgccgcggacaagcgctggattcagcacagctgcccacgtacgcaatcggtcatcgctcacagcaggaatgcctgcgtcgctacgcggaggccctgcgccgcaagctaccgcggatagtcctgtcgccagctcaccccggcctgccaatacgaatcgttttagtagcagttttactcatcgacggagccgtccatcatttggcggtacaagcaaaggagatgatgatcaagcaagcagtgggaaacagagtctgtcatcctcggtggcacagccaggatctggtctccttaatgaggctggcgccggaggcagctcaggctcgtttcaaaccgacgatgatagcattcaagaatttctcaaggcgcttgacagcaagcggacgcttcagagttttgagccgtcgaagaaaggggagtcggccactaagaggactactgctcagctatccaagttccacctcatgcgggaatcgaacaatgctctcaccgagtccatgaattcatccgtgcaattgcaaaggtcatcgagtacgtccagtcggcagctagctaatgtcccaggcatgtcggtctcgtcgtcgccaggaaagcctctgtcaccgcatacgcctcacacgcctgctataccatctcgtcttagtgagaattcgagcgtggactatgcggcacccacacgaacagtaccgcgatcacatcaaaatatcgacctcccggaagagccaccagcaagcgcgccggcagcaacgtttgaaaggaccacggctatcgatatacccatgtctccacgcccgcatccccatgccaggcggtcaagctctgtcgctcaccagcctcgcgtgctagccgaagacgaggccgacgaagctcagcgtagcctcagcctcggtgcggaggagcgtgatgtgcctagcctgagcgtattgcttggacgagcagctgctgaggatgccgaagcggcaagctcatctgcgctccagccaccagctgacatccgggcagcaggatcacccgatatggaaggacaggcatcgtcatctgtagaacgagaagcgcgaccacccaaaagcctgttcagcggtctttccagctcgccttacggcaggcgctacggtagcagtgcgggccgaggcatcacgccaccacagtcgggcagtggcagtctggtagggtccagtggtcggtacagccgcgggtactcacgtggcggcgccagcggtccagcaccgggtgctggctctacagaggagacggaagaggagccgttgcttttcgacatgtcagaaatcaaccgcgagcagtcgcgtcgcagtctggaggaaagccgagacccccgcggtggcggctttggcagcgatcgaggcagctacttttcgggccgtggcagcggtggtcgccgctggggatgatgctccccagcaaacttgctaatcacttacgttacctttaccgattttggatgatgctagaagccatctttttcactcatgcacagaggagaccatacaaggtttttgtctacggccatggtctgagcacctggcggatgttttcatttcaccacacacaaattgacaaccatctggatcaggccagcatttctcggcaggcatcggcgttcaaggtcagggtcaggatccgcgaggctgatcagcagtcctcgcaagtataggggaaaggcaaagggggggcggcaggagtccagagcgggcatggaagggaaggagaatacctgggcccacgctcgaagaagacccgccggcgttttagacaggaatggattctcgttctgcttgtatgtggcatttttatcgtcttgctgtatggtgtagctgtacgctggatgtatcgtgtgttggactagacacgtgtgctggcctgtacgagtaggaccggcagacagcgagcggcccttgggcaggcagcttatggatgccaagttgagaatcgcaatgtaaatgcacgtcaaatatatattgctaaatatgttcattgcgatgatgagtaatgtggtttaggttgaacatgccgttgcgcattgagttgacggtctttggctcattggtactacgacatcaagcagcatggcgatgtgggtattcagagatggagcatcctaagctgtacattcggctcatgaatattcaagataatcggacactatgttggtgatagaatttacgccttcgttttttatttacaagttatcatctgcctcgctcgaatataatgagtccaaagttttgagtacgtggttgccagtactgtgttcatgatatgctaatcaatcaatgtgcacgtgaggcacctctagctacttcgaatcaccacacccagcatacatgtagtcagataaccagtacctagcgtcaaccataaaacttaacatcgcctattcattaaaagaaattctagcaaattaaatcacaacaaacgaggagtgattagtctaatgtggtgagaatgaaggcggatgatagtaaaggtgtggcgaagttttaggtgaggcgtcatcgtgttgcgaagcatgtcggaattgtcttggcgttttgttgctttgcggagaagcatctgtgtcgttgctgtttatagcagtttaattcgagctgcctgggcacttttaggtaatgccaggtgagatgca

SEQ ID NO: 36586 - DNA, 1338 bp, Muscodor strobelii
  misc_feature: SGI cDNA ID NO. 572684
  misc_feature: Encodes the peptide sequence at SEQ ID NO 36587
atgcctgcgtcgctacgcggaggccctgcgccgcaagctaccgcggatagtcctgtcgccagctcaccccggcctgccaatacgaatcgttttagtagcagttttactcatcgacggagccgtccatcatttggcggtacaagcaaaggagatgatgatcaagcaagcagtgggaaacagagtctgtcatcctcggtggcacagccaggatctggtctccttaatgaggctggcgccggaggcagctcaggctcgtttcaaaccgacgatgatagcattcaagaatttctcaaggcgcttgacagcaagcggacgcttcagagttttgagccgtcgaagaaaggggagtcggccactaagaggactactgctcagctatccaagttccacctcatgcgggaatcgaacaatgctctcaccgagtccatgaattcatccgtgcaattgcaaaggtcatcgagtacgtccagtcggcagctagctaatgtcccaggcatgtcggtctcgtcgtcgccaggaaagcctctgtcaccgcatacgcctcacacgcctgctataccatctcgtcttagtgagaattcgagcgtggactatgcggcacccacacgaacagtaccgcgatcacatcaaaatatcgacctcccggaagagccaccagcaagcgcgccggcagcaacgtttgaaaggaccacggctatcgatatacccatgtctccacgcccgcatccccatgccaggcggtcaagctctgtcgctcaccagcctcgcgtgctagccgaagacgaggccgacgaagctcagcgtagcctcagcctcggtgcggaggagcgtgatgtgcctagcctgagcgtattgcttggacgagcagctgctgaggatgccgaagcggcaagctcatctgcgctccagccaccagctgacatccgggcagcaggatcacccgatatggaaggacaggcatcgtcatctgtagaacgagaagcgcgaccacccaaaagcctgttcagcggtctttccagctcgccttacggcaggcgctacggtagcagtgcgggccgaggcatcacgccaccacagtcgggcagtggcagtctggtagggtccagtggtcggtacagccgcgggtactcacgtggcggcgccagcggtccagcaccgggtgctggctctacagaggagacggaagaggagccgttgcttttcgacatgtcagaaatcaaccgcgagcagtcgcgtcgcagtctggaggaaagccgagacccccgcggtggcggctttggcagcgatcgaggcagctacttttcgggccgtggcagcggtggtcgccgctggggatga

SEQ ID NO: 36587 - protein, 445 aa, Muscodor strobelii
  misc_feature: SGI Peptide ID NO. 572684
  misc_feature (1)..(444): NCBI GI: 261360745 Blast Desc: conserved [Verticillium albo-atrum VaMs.102]
  misc_feature (1)..(444): NCBI GI: 46128227 Blast Desc: FG08491.1 [Gibberella zeae PH-1]
  misc_feature (1)..(424): NCBI GI: 156034378 Blast Desc: SS1G_13492 [Sclerotinia sclerotiorum 1980] gi|166989492|sp|A7F7B2.1|ATG13_SCLS1 RecName: Full=Autophagy-related protein 13 gi|154698895|gb|EDN98633.1|
  misc_feature (1)..(426): NCBI GI: 171681838 Blast Desc: protein product [Podospora anserina] gi|170940878|emb|CAP66528.1| protein product [Podospora anserina]
  misc_feature (1)..(444): NCBI GI: 39974799 Blast Desc: MGG_00454 [Magnaporthe grisea 70-15] gi|145018654|gb|EDK02933.1| MGG_00454 [Magnaporthe grisea 70-15]
  misc_feature (3)..(304): NCBI GI: 116202021 Blast Desc: CHGG_08895 [Chaetomium globosum CBS 148.51] gi|88177413|gb|EAQ84881.1| CHGG_08895 [Chaetomium globosum CBS 148.51]
  misc_feature (1)..(440): NCBI GI: 85097176 Blast Desc: NCU04840 [Neurospora crassa OR74A] gi|28921889|gb|EAA31163.1| [Neurospora crassa OR74A]
  misc_feature (13)..(440): NCBI GI: 239611320 Blast Desc: autophagy protein Atg13 [Ajellomyces dermatitidis ER-3]
  misc_feature (22)..(406): NCBI GI: 226282768 Blast Desc: autophagy-related protein 13 [Paracoccidioides brasiliensis Pb01]
  misc_feature (22)..(406): NCBI GI: 226292065 Blast Desc: autophagy-related protein 13 [Paracoccidioides brasiliensis Pb18]
MPASLRGGPAPQATADSPVASSPRPANTNRFSSSFTHRRSRPSFGGTSKGDDDQASSGKQSLSSSVAQPGSGLLNEAGAGGSSGSFQTDDDSIQEFLKALDSKRTLQSFEPSKKGESATKRTTAQLSKFHLMRESNNALTESMNSSVQLQRSSSTSSRQLANVPGMSVSSSPGKPLSPHTPHTPAIPSRLSENSSVDYAAPTRTVPRSHQNIDLPEEPPASAPAATFERTTAIDIPMSPRPHPHARRSSSVAHQPRVLAEDEADEAQRSLSLGAEERDVPSLSVLLGRAAAEDAEAASSSALQPPADIRAAGSPDMEGQASSSVEREARPPKSLFSGLSSSPYGRRYGSSAGRGITPPQSGSGSLVGSSGRYSRGYSRGGASGPAPGAGSTEETEEEPLLFDMSEINREQSRRSLEESRDPRGGGFGSDRGSYFSGRGSGGRRWG

SEQ ID NO: 36588 - DNA, 4454 bp, Muscodor strobelii; identical to SEQ ID NO: 36585
  misc_feature: SGI EST ID NO. CUFF.87349.1
  misc_feature: Variant of the nucleotide sequence at SEQ ID NO 36586

SEQ ID NO: 36589 - DNA, 2196 bp, Muscodor strobelii
  misc_feature: SGI cDNA ID NO. 572685
  misc_feature: Reduced expression when VOC is produced
  misc_feature: Encodes the peptide sequence at SEQ ID NO 36590
atgtttcgcggcgctgcggtcagcccgtacgatgaaggcatcactaaagcgaccgacgagaacctgacgtcggaggactggggcgctatcatcgacctctgcgacaaggtctcgtccgactcgaacggccccaaccaggtcacccagggcctgatcaagcgcctggcccatcgcaatgccaacgtgcagctctacactctcgagctcgccaacgccctctcccagaactgcggcaagcccatgcaccgcgagctcgccagccgctccttcaccgacgccctgctcaagctcgccaacgaccgcaacacccaccagcaggtcaaggccaagatcctcgagcgcatgaaggactggtccgacatgttcagcaacgacgccgacctcggcatcatgtacgacgcctactaccgcctcaagcagtccaacccggccctgcagcccccctccgccccgcagaagaccggcctcacccagcaggaccgccagaaggaggaggaggagctgcagatggccctgcagctgtctctgcaggaggaggagaggaagaaggcccccaagaccagcggagcgccgggcccgtccagctctggccatgcacagggccagggagcggcgtcgaacgagagaacggagcccatcccgtcccaccccacaggcaccaccgccgccaccgtttcccgtgtgcgcgccctatacgacttcgagccctccgagccaggcgagctgagattcaagaagggcgacgtcatcgctgtcttggcttcggtcttcaaggactggtggaaaggctcactcaagggcgagacgggcatcttccctctcaactacgtcgagaagctcaacgatcctactcccgatgagctgcagcgcgaggcacagatggaggccgaagtcttcgcagagatcaaaaacgtagagaaattactgacactactgagcacatctaataccgcgccacgggaggaggataatgaggagatttctaaattgtaccaccaaacgttggctatccggccaaagctaatcaagttaatcgagaaatattcgcaaaagaaagatgacttcacacagctaaacgagaagttcatcaaggcgcggagagactacgagtcgttattggagtcgtccatggctcacccaccagcgcacaattatcaccattacggaggggggcatcccatgcctcagggctacggtgctccagctggcccgccaggcccgggttatgctcctcccggcccaacgccgggtccgcaagatccccagagatattatacacccggtccgcaagggccccctccacacgagcataaccagtttcagaccacatcgcctgctcctaactttcaacggccgggacctgggaacgcgccgttttatctgcaaggagctgagatcccttctcaggccgcccaacctccggcacaacaatatcccccgcaaggagctcagcagccgccatcacaacagtatcctccgcaagggagccaacctccatctcagcagtatccaccccaaggacctcctcagcagcaacagcctccaccgcagcaatatccacctcgtgatcagccatcgagaatagccgcaggcaaacagccagcaccccttcatgcctctagtccgcctccccaacaacaaccgtatcagccatatcctcaggctgcacatcttgcaggccagaggccacagagcacatatggtaatccacaggaactgtcaacacctgcgtatgattcgcccgtcgcttcacacaacaacgcgtcagcaccggacccatactccgcatcagtctactcgcaagatgatccatatagctctccaacggcacccgcgccgtcaacttcaccgtcaacagtcgtaccaacaccactaatgattgcatcccatccagtccagcatccttcgcagcctcagtataatgcatatcagccacataatcaacatcagtatgatggtggttcagcacctccgcctatgcccacgggatcagctcctccaattccggggtcggtgatgagcccaccgccgttacagcccggtggtccgcattttgatgctaggcagagcctacctagtcagaatgcaccacatggtgggccacagcaaggtgggtataaggcttacgttcccccgcctgctggcgcggaaccgagtgcgccgcaggattattataggcagagtgctgcttattag

SEQ ID NO: 36590 - protein, 731 aa, Muscodor strobelii
  misc_feature: SGI Peptide ID NO. 572685
  misc_feature (226)..(280): Pfam Id: PF00018 Pfam Desc: SH3 domain
  misc_feature (227)..(280): Pfam Id: PF07653 Pfam Desc: Variant SH3 domain
  misc_feature (4)..(142): Pfam Id: PF00790 Pfam Desc: VHS domain
  misc_feature (1)..(731): NCBI GI: 261360744 Blast Desc: class E vacuolar protein-sorting machinery protein HSE1 [Verticillium albo-atrum VaMs.102]
  misc_feature (1)..(731): NCBI GI: 46128229 Blast Desc: FG08492.1 [Gibberella zeae PH-1]
  misc_feature (14)..(726): NCBI GI: 171681836 Blast Desc: protein product [Podospora anserina] gi|170940877|emb|CAP66527.1| protein product [Podospora anserina]
  misc_feature (1)..(731): NCBI GI: 256733943 Blast Desc: NECHADRAFT_99546 [Nectria haematococca mpVI 77-13-4]
  misc_feature (1)..(616): NCBI GI: 85097180 Blast Desc: NCU04841 [Neurospora crassa OR74A] gi|74616139|sp|Q7S6J4.1|HSE1_NEUCR RecName: Full=Class E vacuolar protein-sorting machinery protein hse-1 conserved [Neurospora
  misc_feature (1)..(727): NCBI GI: 150383482 Blast Desc: NCU04841 [Neurospora crassa OR74A] gi|74616139|sp|Q7S6J4.1|HSE1_NEUCR RecName: Full=Class E vacuolar protein-sorting machinery protein hse-1 conserved [Neurospora
  misc_feature (1)..(727): NCBI GI: 39974797 Blast Desc: MGG_00455 [Magnaporthe grisea 70-15] gi|145018653|gb|EDK02932.1| MGG_00455 [Magnaporthe grisea 70-15]
  misc_feature (1)..(729): NCBI GI: 116202029 Blast Desc: CHGG_08899 [Chaetomium globosum CBS 148.51] gi|121778961|sp|Q2GT05.1|HSE1_CHAGB RecName: Full=Class E vacuolar protein-sorting machinery protein HSE1 CHGG_08899 CBS
  misc_feature (1)..(731): NCBI GI: 156034400 Blast Desc: SS1G_13503 [Sclerotinia sclerotiorum 1980] gi|154698906|gb|EDN98644.1| SS1G_13503 [Sclerotinia sclerotiorum 1980]
  misc_feature (1)..(581): NCBI GI: 225680419 Blast Desc: class E vacuolar protein-sorting machinery protein hse1 [Paracoccidioides brasiliensis Pb03]
  misc_feature: Useful for introducing or modulating the production of volatile compounds
MFRGAAVSPYDEGITKATDENLTSEDWGAIIDLCDKVSSDSNGPNQVTQGLIKRLAHRNANVQLYTLELANALSQNCGKPMHRELASRSFTDALLKLANDRNTHQQVKAKILERMKDWSDMFSNDADLGIMYDAYYRLKQSNPALQPPSAPQKTGLTQQDRQKEEEELQMALQLSLQEEERKKAPKTSGAPGPSSSGHAQGQGAASNERTEPIPSHPTGTTAATVSRVRALYDFEPSEPGELRFKKGDVIAVLASVFKDWWKGSLKGETGIFPLNYVEKLNDPTPDELQREAQMEAEVFAEIKNVEKLLTLLSTSNTAPREEDNEEISKLYHQTLAIRPKLIKLIEKYSQKKDDFTQLNEKFIKARRDYESLLESSMAHPPAHNYHHYGGGHPMPQGYGAPAGPPGPGYAPPGPTPGPQDPQRYYTPGPQGPPPHEHNQFQTTSPAPNFQRPGPGNAPFYLQGAEIPSQAAQPPAQQYPPQGAQQPPSQQYPPQGSQPPSQQYPPQGPPQQQQPPPQQYPPRDQPSRIAAGKQPAPLHASSPPPQQQPYQPYPQAAHLAGQRPQSTYGNPQELSTPAYDSPVASHNNASAPDPYSASVYSQDDPYSSPTAPAPSTSPSTVVPTPLMIASHPVQHPSQPQYNAYQPHNQHQYDGGSAPPPMPTGSAPPIPGSVMSPPPLQPGGPHFDARQSLPSQNAPHGGPQQGGYKAYVPPPAGAEPSAPQDYYRQSAAY

SEQ ID NO: 36591 - DNA, 3058 bp, Muscodor strobelii
  misc_feature: SGI EST ID NO. CUFF.87346.0
  misc_feature: Variant of the nucleotide sequence at SEQ ID NO 36589
gggaggcttggacgggttcgcgaggggctagagtttgccgctacggcactacgtaatccgcagttcgcccaggctgcagtgatgcagcagtactagtactactactagacataccttactccaggtgggaaggcaagtacggtacatcgtcatctcaactccaaccccgtcactcactcactcacttacttactcgaataccgacttcacctcatcccaaccggccactacttctatacccaccattcaccacgcccgcataaatctctccgccaccgcagctcctggttgcgatccagatactactctcaataatatcgtgtctctcatcaccacagcctgacatcgaccggacatcgtgaagctgggaccaagagcaacccgtcacaatgtttcgcggcgctgcggtcagcccgtacgatgaaggcatcactaaagcgaccgacgagaacctgacgtcggaggactggggcgctatcatcgacctctgcgacaaggtctcgtccgactcgaacggccccaaccaggtcacccagggcctgatcaagcgcctggcccatcgcaatgccaacgtgcagctctacactctcgaggtccgtgcctgtgtgctgatgcaagcggacgtccccagctaactcgtgccaccccgcctccagctcgccaacgccctctcccagaactgcggcaagcccatgcaccgcgagctcgccagccgctccttcaccgacgccctgctcaagctcgccaacgaccgcaacacccaccagcaggtcaaggccaagatcctcgagcgcatgaaggactggtccgacatgttcagcaacgacgccgacctcggcatcatgtacgacgcctactaccgcctcaagcagtccaacccggccctgcagcccccctccgccccgcagaagaccggcctcacccagcaggaccgccagaaggaggaggaggagctgcagatggccctgcagctgtctctgcaggaggaggagaggaagaaggcccccaagaccagcggagcgccgggcccgtccagctctggccatgcacagggccagggagcggcgtcgaacgagagaacggagcccatcccgtcccaccccacaggcaccaccgccgccaccgtttcccgtgtgcgcgccctatacgacttcgagccctccgagccaggcgagctgagattcaagaagggcgacgtcatcgctgtcttggcttcggtcttcaaggactggtggaaaggctcactcaagggcgagacgggcatcttccctctcaactacgtcgagaagctcaacgatcctactcccgatgagctgcagcgcgaggcacagatggaggccgaagtcttcgcagagatcaaaaacgtagagaaattactgacactactgagcacatctaataccgcgccacgggaggaggataatgaggagatttctaaattgtaccaccaaacgttggctatccggccaaagctaatcaagttaatcgagaaatattcgcaaaagaaagatgacttcacacagctaaacgagaagttcatcaaggcgcggagagactacgagtcgttattggagtcgtccatggctcacccaccagcgcacaattatcaccattacggaggggggcatcccatgcctcagggctacggtgctccagctggcccgccaggcccgggttatgctcctcccggcccaacgccgggtccgcaagatccccagagatattatacacccggtccgcaagggccccctccacacgagcataaccagtttcagaccacatcgcctgctcctaactttcaacggccgggacctgggaacgcgccgttttatctgcaaggagctgagatcccttctcaggccgcccaacctccggcacaacaatatcccccgcaaggagctcagcagccgccatcacaacagtatcctccgcaagggagccaacctccatctcagcagtatccaccccaaggacctcctcagcagcaacagcctccaccgcagcaatatccacctcgtgatcagccatcgagaatagccgcaggcaaacagccagcaccccttcatgcctctagtccgcctccccaacaacaaccgtatcagccatatcctcaggctgcacatcttgcaggccagaggccacagagcacatatggtaatccacaggaactgtcaacacctgcgtatgattcgcccgtcgcttcacacaacaacgcgtcagcaccggacccatactccgcatcagtctactcgcaagatgatccatatagctctccaacggcacccgcgccgtcaacttcaccgtcaacagtcgtaccaacaccactaatgattgcatcccatccagtccagcatccttcgcagcctcagtataatgcatatcagccacataatcaacatcagtatgatggtggttcagcacctccgcctatgcccacgggatcagctcctccaattccggggtcggtgatgagcccaccgccgttacagcccggtggtccgcattttgatgctaggcagagcctacctagtcagaatgcaccacatggtgggccacagcaaggtgggtataaggcttacgttcccccgcctgctggcgcggaaccgagtgcgccgcaggattattataggcagagtgctgcttattagggagtggaaggattagtaggttgttaggaaagggtcgtgaagatatgatgtaagagagatgaagaggagacctccctgcggaggtccagttggtacttgaatgggaggcggtggaagtgaacgaagcgggaataagagcgagaggacacgatagggttgtatgtgatagggaaatgaatatattctatgagtacaatgtttccatttgcgtcttgttttgtcgagtgatgtcttatgttgagagactgttacgaacggtgggagtatgatgttcccgggtacatgatttggtgaggttgcaaatgtggctttgaagataagaggaaggcatcgtgctggttggtgggatacgttggcagaggttgtggtttcgcattaagtacctacgcagagtgattattcaagatggc

SEQ ID NO: 36592 - DNA, 1626 bp, Muscodor strobelii
  misc_feature: SGI cDNA ID NO. 572686
  misc_feature: Elevated expression when VOC is produced
  misc_feature: Encodes the peptide sequence at SEQ ID NO 36593
atgaccacgtctgatcgtcctagcagtggctgggcgacggcaaccgactggcaggcccatcgcgccttgattacagctctctatggtgaccagaataagacgttgaaggagaccatgcagatcatggaaagcgatcacaacttcttcgcaactgtacgtatgtacaaagctcggttccagcagtgggggatcgagaagaaaataaaggctgaagacgccgtggaaatatttcgtcaacagaccgctcgagccaaaaaaggcaaggaaacagtcgcgtatgtaagaggtcggaaaattaatccagaccgtcttcaaagataccgctatcgcgctgccgcagtcgtatccgagcagatcctcatggccgaaaatgaattaaacgctgcgctctccgagtcagatgccgtgccgtctcacgtcatctgcaggacgccctcgccctcgccatctccaaccccctctcctccgtcactctatccatcgcttgatgaccctttggattttaagataccaacggattgtatcaagatactaagagactacctcaaaggagaaagcgaatccagagcatgccaagtcgctgatccgggtgtgaaaacacaatgcgaggcttttacctgggcacattacctcgcaacgtcacaaggtcttattgtccacaatcgaatgaaggaaggtttcttcttgctcggaatctgttttgagcaatacaggctacatttattgaaccctgattcattcttctggttagcgacctataaggcagccttgctgctggcacatcgagatcaaaaacttgccgatgcattcatgcgttatgcatctagtctcacggctgttcttcttccacgctcacatcccttcaaccagatctggtcgaagatcatgatgagtgggttggcaggactgcaaagatacgctgctgtcttgttcgaatcctatctcgatgcttggaagcaacacgctgctgtccctgcccaagatccgaacgccctggcacaatggacttttgttgttattcaactccactccagcggcatgatatcgtataagttcacaagagaaacgatagagcagacattagatttgatagggaattcgaatacgtgtcagtatttactacaagaagcaaagttccgaatggcctgcttgcttgtagaaacaaacagattcgacgaggcagaagcaattacaagggagatcacagcatggctagatttacagtcaaggaccgaccgcgttcatctcagatgcaaatgtctgtgggtattattcgaaatgatggagaagaaagaaagcataagtcaagcgatccaagccggctattcattggtcaaattctgccatgatgtttatggacctgttcatctacaaacggtagatgccttctcggcagtggagagttttcacaggcgtatcgacaatactgcggcatggcaaaggatgtcagagcaatttgataagcgatggcttgtcctgcacgacctcgcacgagccaacaacggatttccacatgatgttgaagaaccttggcttcaccggtgcgtagaattggcagaagagcaacaccttattcaggaagtgatcgatctattcgaacgaagtccatggatctcagagtcttga

SEQ ID NO: 36593 - protein, 541 aa, Muscodor strobelii
  misc_feature: SGI Peptide ID NO. 572686
  misc_feature (10)..(147): NCBI GI: 164425649 Blast Desc: NCU06072 [Neurospora crassa OR74A] gi|157071008|gb|EAA30599.2| [Neurospora crassa OR74A]
  misc_feature (16)..(320): NCBI GI: 145603809 Blast Desc: [Magnaporthe grisea 70-15] gi|145011959|gb|EDJ96615.1| [Magnaporthe grisea 70-15]
  misc_feature (11)..(184): NCBI GI: 145605984 Blast Desc: MGG_06762 [Magnaporthe grisea 70-15] gi|145013719|gb|EDJ98360.1| MGG_06762 [Magnaporthe grisea 70-15]
  misc_feature (6)..(148): NCBI GI: 156041192 Blast Desc: SS1G_11575 [Sclerotinia sclerotiorum 1980] gi|154695958|gb|EDN95696.1| SS1G_11575 [Sclerotinia sclerotiorum 1980]
  misc_feature (11)..(295): NCBI GI: 116197018 Blast Desc: CHGG_05107 [Chaetomium globosum CBS 148.51] gi|88181020|gb|EAQ88488.1| CHGG_05107 [Chaetomium globosum CBS 148.51]
  misc_feature (14)..(292): NCBI GI: 46109918 Blast Desc: FG01841.1 [Gibberella zeae PH-1]
  misc_feature (3)..(293): NCBI GI: 256728687 Blast Desc: NECHADRAFT_85885 [Nectria haematococca mpVI 77-13-4]
  misc_feature (14)..(148): NCBI GI: 255945625 Blast Desc: Pc20g10910 [Penicillium chrysogenum Wisconsin 54-1255] gi|211588315|emb|CAP86420.1| Pc20g10910 [Penicillium chrysogenum Wisconsin 54-1255]
  misc_feature (14)..(147): NCBI GI: 115491217 Blast Desc: [Aspergillus terreus NIH2624] gi|114197096|gb|EAU38796.1| [Aspergillus terreus NIH2624]
  misc_feature (153)..(321): NCBI GI: 169767602 Blast Desc: [Aspergillus oryzae RIB40] gi|83766127|dbj|BAE56270.1| protein product [Aspergillus oryzae]
  misc_feature: Useful for introducing or modulating the production of volatile compounds
MTTSDRPSSGWATATDWQAHRALITALYGDQNKTLKETMQIMESDHNFFATVRMYKARFQQWGIEKKIKAEDAVEIFRQQTARAKKGKETVAYVRGRKINPDRLQRYRYRAAAVVSEQILMAENELNAALSESDAVPSHVICRTPSPSPSPTPSPPSLYPSLDDPLDFKIPTDCIKILRDYLKGESESRACQVADPGVKTQCEAFTWAHYLATSQGLIVHNRMKEGFFLLGICFEQYRLHLLNPDSFFWLATYKAALLLAHRDQKLADAFMRYASSLTAVLLPRSHPFNQIWSKIMMSGLAGLQRYAAVLFESYLDAWKQHAAVPAQDPNALAQWTFVVIQLHSSGMISYKFTRETIEQTLDLIGNSNTCQYLLQEAKFRMACLLVETNRFDEAEAITREITAWLDLQSRTDRVHLRCKCLWVLFEMMEKKESISQAIQAGYSLVKFCHDVYGPVHLQTVDAFSAVESFHRRIDNTAAWQRMSEQFDKRWLVLHDLARANNGFPHDVEEPWLHRCVELAEEQHLIQEVIDLFERSPWISES

SEQ ID NO: 36594 - DNA, 4337 bp, Muscodor strobelii
  misc_feature: SGI EST ID NO. CUFF.87320.0
  misc_feature: Variant of the nucleotide sequence at SEQ ID NO 36592
cgacatccaacgatctgttgatatgactgccgacccaatgaaatgaccttccagttcaccgcacatacctgtattcatcactgcatactgcaggaatggcaaggcaaacgtagccggtgtcacgtggagtaagtaagaaagtgaagtcagtgattcgatcgagacgcagcctcccactctccccgccctatcgacttgcattctcatcgtcctagcgtgccgttggcctggatcgctatgaccctgatttgggccttggcttgaggcttgaactttggcttcacctgaacttgccaatcgctccgtgcccggcttcaccatggaaaacccgtagagggcgggccgggtttgggcgtacgcaccgttgacataacggtccaacaacttctgagctagcttgccctcctggaccctgtgtccatcccaatgggccagtcacaccccctatccgcacatacagtacatagccctgcaagggagggatcgatggcgggactcttccacccccaacgccttctgcctcaatctgaacttaccatatgaatgcgtcgctgcatcatcgtcgtccgccaggctggtaatgacactacccgtgcagggtgctgtatgctcctgcccatttgtcctgtcgtcacaagccaaccacatcatggaactggattcaacacaagactacctcgtcttgtgtcgggtctcacaacaggaacattgacagcaccgacttgtacaaccactttgctaccaccctcgaataactcatctaagtcgataccccatttggacttcttcgaccctattttatcttgtgtttacatcttagtatcacattcaaatattgtcgccttcttcaaaacttcctctaagaattcctagttctgcaacggaggcgaccatctccagaacttagagccctagcgtaggccactgtcaatatgaccacgtctgatcgtcctagcagtggctgggcgacggcaaccgactggcaggcccatcgcgccttgattacagctctctatggtgaccagaataagacgttgaaggagaccatgcagatcatggaaagcgatcacaacttcttcgcaactgtacgtatgtacaaagctcggttccagcagtgggggatcgagaagaaaataaaggctgaagacgccgtggaaatatttcgtcaacagaccgctcgagccaaaaaaggcaaggaaacagtcgcgtatgtaagaggtcggaaaattaatccagaccgtcttcaaagataccgctatcgcgctgccgcagtcgtatccgagcagatcctcatggccgaaaatgaattaaacgctgcgctctccgagtcagatgccgtgccgtctcacgtcatctgcaggacgccctcgccctcgccatctccaaccccctctcctccgtcactctatccatcgcttgatgaccctttggattttaagataccaacggattgtatcaagatactaagagactacctcaaaggagaaagcgaatccagagcatgccaagtcgctgatccgggtgtgaaaacacaatgcgaggcttttacctgggcacattacctcgcaacgtcacaaggtcttattgtccacaatcgaatgaaggaaggtttcttcttgctcggaatctgttttgagcaatacaggctacatttattgaaccctgattcattcttctggttagcgacctataaggcagccttgctgctggcacatcgagatcaaaaacttgccgatgcattcatgcgttatgcatctagtctcacggctgttcttcttccacgctcacatcccttcaaccagatctggtcgaagatcatgatgagtgggttggcaggactgcaaagatacgctgctgtcttgttcgaatcctatctcgatgcttggaagcaacacgctgctgtccctgcccaagatccgaacgccctggcacaatggacttttgttgttattcaactccactccagcggcatgatatcgtataagttcacaagagaaacgatagagcagacattagatttgatagggaattcgaatacgtgtcagtatttactacaagaagcaaagttccgaatggcctgcttgcttgtagaaacaaacagattcgacgaggcagaagcaattacaagggagatcacagcatggctagatttacagtcaaggaccgaccgcgttcatctcagatgcaaatgtctgtgggtattattcgaaatgatggagaagaaagaaagcataagtcaagcgatccaagccggctattcattggtcaaattctgccatgatgtttatggacctgttcatctacaaacggtagatgccttctcggcagtggagagttttcacaggcgtatcgacaatactgcggcatggcaaaggatgtcagagcaatttgataagcgatggcttgtcctgcacgacctcgcacgagccaacaacggatttccacatgatgttgaagaaccttggcttcaccggtgcgtagaattggcagaagagcaacaccttattcaggaagtgatcgatctattcgaacgaagtccatggatctcagagtcttgaccgtcgattcagacagccgtgcaaagcatggcgaactacgttggcacctgttgtacgggtacagaatcgatacgcctgccgcccactataccaagcgatctcatgttgctcacgaattgtacatcaattcaaacacgtaccttagaagtaaccacagacatggatccgtgcgaaggcggcgatcatttacgaatttgctcccatcccgcaagtttcaacaacagatgcctctgcactccggcggacttccggctttggtgaccactccgggttttgataccctgggcgaattgcaagctagcagggcaggctgcatcaccgaccctccgccagtccattcaagcttgttatcctggatgccgttgatcccatcattctcagcaaacgaaacactctaagtaaatagtcacatgttgatcatataatgtaatctcgcgctacgtctcaagcaagcgatatactgcagccggcttttcaagccgccaactaagaagttaaaactcagatgacaagataaaaaatgttaaacataacaatcttatatcccaaaacatcactttacatttcttcgaactagtttttgccggtgctctacggaagtagccagtggtttttacaataacactcatcaaagtacagtcatagggcccagtgtacttcgcctaccaatccgtaacctgtggtctgtcgaaatttcatcccagcagacagaaactgtacagatccgagctgccatccgttcgcccggaagatgatgcgaggcagtcgggactccgcagtatcatctcgtgatgattctttactctatcttcctcagaatgatttgcccggcccccaaatcgatagatcagtcaccgacagggtaattcatgattccgatttgccgcaacgttaagaaccacacgtcaagtccgcagactccccgcggcgatgaacaaatcagagggtcgcagcgttcatcccttgcttattaatttagcagcatctatcgtcgcgcatgacgggaacactacttttattttgtgatctatcaatttctgtcatctcgctcagccctatctggacttggctccgaggattctgtgcatcgcgagagatcgtacaccacattattgtgcagctcattggttcgtatcactaccgagggagatgtgacgtggggtgtttgtgttgcatttgcaccggaggtctcatgtaaggcactgagcacagctcgactgtcccgtcagattatgcctctactacggtgatggccagcacatgtaactcggattattagatgatatccgatgatagatatcgaggttgcacatttgacgccgcacactaagggcggcatcgaatcgagatggcagatgcagggtatcaatctcgccgcatgttttggggtgggagtgtgagacgaattctacgatagggctgcgtgctccgtcatgcggtgcgtgcattaaggcaatatgcggggccctgcgtcccgtgtctctgccttgtatgcttgtacgagacaacgagtgcacgagcatacatactgtacagttcaaagaccggcgacggccgagccatcgaaggaaggatatgaaaacgaggccatgattggtcgtaaatacgcatggattcaaaccatgccctgaaggctttgatgtccacagcattatggagcttccgaggtgcccaaaggagatgggtagagaaatagggaggcccggcaagcctagcagacagtggctattgctccttcagccctgcttgcgtctcgtgttgctggctggcaaatcccgt

SEQ ID NO: 36595 - DNA, 3090 bp, Muscodor strobelii
  misc_feature: SGI cDNA ID NO. 572687
  misc_feature: Encodes the peptide sequence at SEQ ID NO 36596
atggtgcacgaacatgctccgccgaagccaccgcttcgcgatgcgaacggcaacgtgaatcccccatccgggtccaccaccagcaaaccccagccttcaacatctcagactccgggcttctcaaacccgggctcgtcatctatatatccgccgcttggccaacccgctgttaagagcagagtgtactccgggggcagcagtatggaagacaaatacgccaatctcttcatacagcccaagagctatcgtccagagcatcatcggccgcagcgcattaatggcccgctccagcctacttacagagaccgaaaggccgccccaaatccgctgtttagttccaagccgtcagctatgggctcacagaacaatcctattacgattgttgaccgcccgcccgtttcgagctatactcagccgggcgtctatgcagattatgttgatcccaagaaggctgccgcggatatcaaggcattgctagaaggatccctcgacgaggaaaaggaagaaaaagaagtcgtagcggcggctcccgctgaggacaagtccaaggtggaaggactcaaagcccgcttgctaccccaccagatcgagggtgtggaatggatgaggaatcgagagcttggtcctgtcaagaagggtaaagtgcccaaaggaggtcttctcgcggacgacatgggcctgggaaagaccctccagtccatctccctcatcctcacaaatgctaaaccagatgataagcacccaggcgtcgagaaaacgacgctagtggttgcccctctcgctttgattcgacagtgggaagcagaaatcaaggagaaggttgaggcttcccacaaattgaaagttctcgtacatcatggtcctcagcgcacaaagcgcttcgaggatctccgccgatacgacgtcgtcatcaccacctaccaaatccttgtttcggagcacggtcactctaatgagacgctcaaggcaggctgttttggcttgcactggtacagggtgattcttgacgaagcgcacactatcaagaacaggaatgccaaagctacaaaagcatgttatgaactgcgcagtgtatatcgatggtgtctgagtggtacacctatgcagaacaacctggacgagctgcagagtctcgtcaaatttctgcggatcaagccttacgacgatttacgtgaatggagagagcacttcgagctgccgatgaaaaacggcaggggagaagtcgccatccgacgtcttcatagtgtgttacagtgctttatgaagcgtaggaccaaggatatcttaaaagaagctggagcactcaacacgggtcctacccaaggtgaaggcaaagacgaagaaaagagcgcaacttcaagcttcaaggtaacagagcgcaaagtcgtggctatctctgctcagtttgccccggccgagcgccgcttctacgatcgtctagagcagcggacagacaagagtctggaagccatgatgcgcggcaaagtcaactacgctagtgccctcgtacttcttttgcgtttgagacaggcttgcaatcatccgaagctcgtagaaggaaaactcgagaaggacaaagacgccttgtcagaggaatctcgaccgaagaagaacgacgaagacgttgatgctcttgctgacctgctcggcggactcgacgttgaagctaagcactgcgaaatctgtggttgggaactcgatcgggagcatcgtcaacctggatcggacaagtgtaaagcatgttacgaggacttgcagtatttcaagcatcatgaagaaggtggagacctgaaagctccgaagacaagaactagacccaagaagaacaaggcgaagaaagccatgaagaagactgctaagaaggtggagaaagtagtagaggagaccaagactgttgcattccacaaacgaaagcctcgaaatcgacgtgccatcattgatagcgatgatgaagaggaagagggcgaatggctcaactctggcgatgaacaaggtcctttgcgcttaggcaaagcgggaggtacagatgacgagaatgcagagggcgacggagagaccatcaatactgaagactccgaagaggaagagtcgcaagacggtagtcatttagacagctttatcgtcaatgatggtgaagacacaaagcctcaagacctccgaaaggctatagaggaaacggattctgacgacgatgatctcgagtctttgacagatatgctctctcaaacacgaatcaagtctaaaaaggttgttcagtcctctgatgacgaggaaaccgggtcagacagtgtggccgactcagatcaggacgaggaggactctgaaagtgatggaggcgtttcggaatcagagttcgatgattccgaaagtggtgacgaggccttcgcattcaagcgcttcaaaccccataatataccacatgttctagcctcggcgaagatccgccaactgaccactatcttacacaaggaagtccaggagcacaagttcatcgtcttctcgcaattcacctcgatgcttgaccttgttgagccattccttcgcaaagaaggtctcaaatacgtccgttacgacggctcgatgaagaacgacgctcgcgaatccgcgcttcacagtctacgcaacgacaagaacacgcgtgtcttattgtgttcactgcgttgcggtgccttgggtctcaatctcacggctgcgtcgcgcgtcgttatcctggagccgttctggaacccgttcgtggaggaacaggctattgaccgtgtacatcgacttacgcaaaccgtggacgtcatcgtctacaaactcacggtcgagaatacggtcgaggaacggattctagagctccaagataagaagagacttcttgctgctacggctattgagggtggtgccaagaaggaggcacttaagcttggtctgaaagagatgcttgatttgttcaagcatgttggtggtagtggccgcagtgctgatgatggagaggagaatgtgtatggagcttttcgcgatcaggctggcgctttgagatcgagaccaagaaaggaggctagtaacgccagtaaggagagtacggtttatggacgacgatggtag

SEQ ID NO: 36596 - protein, 1029 aa, Muscodor strobelii
  misc_feature: SGI Peptide ID NO. 572687
  misc_feature (846)..(924): Pfam Id: PF00271 Pfam Desc: Helicase conserved C-terminal domain
  misc_feature (194)..(518): Pfam Id: PF00176 Pfam Desc: SNF2 family N-terminal domain
  misc_feature (194)..(429): Pfam Id: PF00176 Pfam Desc: SNF2 family N-terminal domain
  misc_feature (492)..(518): Pfam Id: PF00176 Pfam Desc: SNF2 family N-terminal domain
  misc_feature (73)..(1029): NCBI GI: 256733456 Blast Desc: NECHADRAFT_105975 [Nectria haematococca mpVI 77-13-4]
  misc_feature (1)..(1029): NCBI GI: 46128445 Blast Desc: FG08600.1 [Gibberella zeae PH-1]
  misc_feature (51)..(1029): NCBI GI: 261360743 Blast Desc: ATP-dependent helicase RIS1 [Verticillium albo-atrum VaMs.102]
  misc_feature (92)..(999): NCBI GI: 145611352 Blast Desc: MGG_00453 [Magnaporthe grisea 70-15] gi|145018655|gb|EDK02934.1| MGG_00453 [Magnaporthe grisea 70-15]
  misc_feature (64)..(1029): NCBI GI: 85097277 Blast Desc: NCU11284 [Neurospora crassa OR74A] gi|28921903|gb|EAA31176.1| conserved [Neurospora crassa OR74A] gi|39979195|emb|CAE85566.1| conserved [Neurospora crassa]
  misc_feature (64)..(1029): NCBI GI: 25465825 Blast Desc: NCU11284 [Neurospora crassa OR74A] gi|28921903|gb|EAA31176.1| conserved [Neurospora crassa OR74A] gi|39979195|emb|CAE85566.1| conserved [Neurospora crassa]
  misc_feature (74)..(1029): NCBI GI: 171681928 Blast Desc: protein product [Podospora anserina] gi|170940923|emb|CAP66573.1| protein product [Podospora anserina]
  misc_feature (206)..(1029): NCBI GI: 116202151 Blast Desc: CHGG_08960 [Chaetomium globosum CBS 148.51] gi|88177478|gb|EAQ84946.1| CHGG_08960 [Chaetomium globosum CBS 148.51]
  misc_feature (89)..(1028): NCBI GI: 169607196 Blast Desc: SNOG_06654 [Phaeosphaeria nodorum SN15] gi|111065365|gb|EAT86485.1| SNOG_06654 [Phaeosphaeria nodorum SN15]
  misc_feature (106)..(991): NCBI GI: 226292087 Blast Desc: conserved [Paracoccidioides brasiliensis Pb18]
MVHEHAPPKPPLRDANGNVNPPSGSTTSKPQPSTSQTPGFSNPGSSSIYPPLGQPAVKSRVYSGGSSMEDKYANLFIQPKSYRPEHHRPQRINGPLQPTYRDRKAAPNPLFSSKPSAMGSQNNPITIVDRPPVSSYTQPGVYADYVDPKKAAADIKALLEGSLDEEKEEKEVVAAAPAEDKSKVEGLKARLLPHQIEGVEWMRNRELGPVKKGKVPKGGLLADDMGLGKTLQSISLILTNAKPDDKHPGVEKTTLVVAPLALIRQWEAEIKEKVEASHKLKVLVHHGPQRTKRFEDLRRYDVVITTYQILVSEHGHSNETLKAGCFGLHWYRVILDEAHTIKNRNAKATKACYELRSVYRWCLSGTPMQNNLDELQSLVKFLRIKPYDDLREWREHFELPMKNGRGEVAIRRLHSVLQCFMKRRTKDILKEAGALNTGPTQGEGKDEEKSATSSFKVTERKVVAISAQFAPAERRFYDRLEQRTDKSLEAMMRGKVNYASALVLLLRLRQACNHPKLVEGKLEKDKDALSEESRPKKNDEDVDALADLLGGLDVEAKHCEICGWELDREHRQPGSDKCKACYEDLQYFKHHEEGGDLKAPKTRTRPKKNKAKKAMKKTAKKVEKVVEETKTVAFHKRKPRNRRAIIDSDDEEEEGEWLNSGDEQGPLRLGKAGGTDDENAEGDGETINTEDSEEEESQDGSHLDSFIVNDGEDTKPQDLRKAIEETDSDDDDLESLTDMLSQTRIKSKKVVQSSDDEETGSDSVADSDQDEEDSESDGGVSESEFDDSESGDEAFAFKRFKPHNIPHVLASAKIRQLTTILHKEVQEHKFIVFSQFTSMLDLVEPFLRKEGLKYVRYDGSMKNDARESALHSLRNDKNTRVLLCSLRCGALGLNLTAASRVVILEPFWNPFVEEQAIDRVHRLTQTVDVIVYKLTVENTVEERILELQDKKRLLAATAIEGGAKKEALKLGLKEMLDLFKHVGGSGRSADDGEENVYGAFRDQAGALRSRPRKEASNASKESTVYGRRW

SEQ ID NO: 36597 - DNA, 3822 bp, Muscodor strobelii
  misc_feature: SGI EST ID NO. CUFF.87322.0
  misc_feature: Variant of the nucleotide sequence at SEQ ID NO 36595
cgaattcaagtctgtttgtcagtacggcaataaacaagccgtcatactatcggtcacaatcgataggcatcaccaccgacaaatcatcatcgggtttgttgcctaaagacactcagaacacaccggcagttggtcttagcgggacgacatatttgacagcatttcttctgcttctaatgtcaattgagactgtattttgcgatcggcaaacgcagaatactaagtgagaatacgtcccttgcgcgcacatgcggaagccaggagacaactacagcgttcaccctagaaacaacttatactctcttcactcgccgacgtttcgcaaatctaaaacgcacatcggaggcgaaacaacccactgtcactcaaactcaggtctctgcgaccccgcgacgacaaacggacagccagcagtcgcttttacagcccctcgagtcctcgggtattacacaatggtgcacgaacatgctccgccgaagccaccgcttcgcgatgcgaacggcaacgtgaatcccccatccgggtccaccaccagcaaaccccagccttcaacatctcagactccgggcttctcaaacccgggctcgtcatctatatatccgccgcttggccaacccgctgttaagagcagagtgtactccgggggcagcagtatggaagacaaatacgccaatctcttcatacagcccaagagctatcgtccagagcatcatcggccgcagcgcattaatggcccgctccagcctacttacagagaccgaaaggccgccccaaatccgctgtttagttccaagccgtcagctatgggctcacagaacaatcctattacgattgttgaccgcccgcccgtttcgagctatactcagccgggcgtctatgcagattatgttgatcccaagaaggctgccgcggatatcaaggcattgctagaaggatccctcgacgaggaaaaggaagaaaaagaagtcgtagcggcggctcccgctgaggacaagtccaaggtggaaggactcaaagcccgcttgctaccccaccagatcgagggtgtggaatggatgaggaatcgagagcttggtcctgtcaagaagggtaaagtgcccaaaggaggtcttctcgcggacgacatgggcctgggaaagaccctccagtccatctccctcatcctcacaaatgctaaaccagatgataagcacccaggcgtcgagaaaacgacgctagtggttgcccctctcgctttgattcgacagtgggaagcagaaatcaaggagaaggttgaggcttcccacaaattgaaagttctcgtacatcatggtcctcagcgcacaaagcgcttcgaggatctccgccgatacgacgtcgtcatcaccacctaccaaatccttgtttcggagcacggtcactctaatgagacgctcaaggcaggctgttttggcttgcactggtacagggtgattcttgacgaagcgcacactatcaagaacaggaatgccaaagctacaaaagcatgttatgaactgcgcagtgtatatcgatggtgtctgagtggtacacctatgcagaacaacctggacgagctgcagagtctcgtcaaatttctgcggatcaagccttacgacgatttacgtgaatggagagagcacttcgagctgccgatgaaaaacggcaggggagaagtcgccatccgacgtcttcatagtgtgttacagtgctttatgaagcgtaggaccaaggatatcttaaaagaagctggagcactcaacacgggtcctacccaaggtgaaggcaaagacgaagaaaagagcgcaacttcaagcttcaaggtaacagagcgcaaagtcgtggctatctctgctcagtttgccccggccgagcgccgcttctacgatcgtctagagcagcggacagacaagagtctggaagccatgatgcgcggcaaagtcaactacgctagtgccctcgtacttcttttgcgtttgagacaggcttgcaatcatccgaagctcgtagaaggaaaactcgagaaggacaaagacgccttgtcagaggaatctcgaccgaagaagaacgacgaagacgttgatgctcttgctgacctgctcggcggactcgacgttgaagctaagcactgcgaaatctgtggttgggaactcgatcgggagcatcgtcaacctggatcggacaagtgtaaagcatgttacgaggacttgcagtatttcaagcatcatgaagaaggtggagacctgaaagctccgaagacaagaactagacccaagaagaacaaggcgaagaaagccatgaagaagactgctaagaaggtggagaaagtagtagaggagaccaagactgttgcattccacaaacgaaagcctcgaaatcgacgtgccatcattgatagcgatgatgaagaggaagagggcgaatggctcaactctggcgatgaacaaggtcctttgcgcttaggcaaagcgggaggtacagatgacgagaatgcagagggcgacggagagaccatcaatactgaagactccgaagaggaagagtcgcaagacggtagtcatttagacagctttatcgtcaatgatggtgaagacacaaagcctcaagacctccgaaaggctatagaggaaacggattctgacgacgatgatctcgagtctttgacagatatgctctctcaaacacgaatcaagtctaaaaaggttgttcagtcctctgatgacgaggaaaccgggtcagacagtgtggccgactcagatcaggacgaggaggactctgaaagtgatggaggcgtttcggaatcagagttcgatgattccgaaagtggtgacgaggccttcgcattcaagcgcttcaaaccccataatataccacatgttctagcctcggcgaagatccgccaactgaccactatcttacacaaggaagtccaggagcacaagttcatcgtcttctcgcaattcacctcgatgcttgaccttgttgagccattccttcgcaaagaaggtctcaaatacgtccgttacgacggctcgatgaagaacgacgctcgcgaatccgcgcttcacagtctacgcaacgacaagaacacgcgtgtcttattgtgttcactgcgttgcggtgccttgggtctcaatctcacggctgcgtcgcgcgtcgttatcctggagccgttctggaacccgttcgtggaggaacaggctattgaccgtgtacatcgacttacgcaaaccgtggacgtcatcgtctacaaactcacggtcgagaatacggtcgaggaacggattctagagctccaagataagaagagacttcttgctgctacggctattgagggtggtgccaagaaggaggcacttaagcttggtctgaaagagatgcttgatttgttcaagcatgttggtggtagtggccgcagtgctgatgatggagaggagaatgtgtatggagcttttcgcgatcaggctggcgctttgagatcgagaccaagaaaggaggctagtaacgccagtaaggagagtacggtttatggacgacgatggtagattttgacgagacgcaagaataacatgagtcttgctgttatgatgacgaggaatggcaaaatgaggcgttgaggtgtagacggaccgttggagtattccaggttaccaataggctgggaatgagtgctacacaagattaaagctacaagacgttgggtaaaggatacctagctagacggcttgctttgacgtttatattgcttcgtcgttgttagattatatacaaacgggacattcagcttgctagattagcaacgcattttcaatatgcatgatcact

SEQ ID NO: 36598 - DNA, 987 bp, Muscodor strobelii
  misc_feature: SGI cDNA ID NO. 572688
  misc_feature: Encodes the peptide sequence at SEQ ID NO 36599
atgcctttcgatacagagctcacccgccagctaggcatcaggatccccgtcgtgcagggtggcatgcaacatgttggctatgcagagatggcttctgctgtatctaacgccggcggtctgggtattctcacagccctcactcaacctacacccgcagacctgcgcaaagagatccagaaatgtcgaaagatgacaaaatatccatttggcgtcaatatcacacttctgccagctctgaaccctccggactacggtgcctacgcccaggccgtcattgatgagggcatcaagatcgtcgagaccgctggtaacagccccggtcccgtgattaagaagctgaaggccgcgggtgtgatcatcttacataagtgcaccactattcggcacgcacaaagcgccatcaaactcggcgtcgatttcttatcaatcgatgggttcgagtgtgctggccatgttggtgaatccgacattaccaacttcatcctgctcagcaaggctcgacagactctgaaagttccatttattgcctccggcggatttgctgatggacaaggtcttgcggcggcgctgtgccttggtgccgagggtatcaacatgggaacgaggttcatgtgcacagtagagtcgccaatccaccagaagatcaaggaggaaatcgtcaaagctcaagagacagacacagctttagtaatgcgccgctggaccaacaccacacgactgtatcgcaacaaggtcacagatgccgttgtcaagatcgagcgcgatagcaagactggcgagttcgccgagattgcaccctatgttagcggcaagcgcggtcgcgaggttttcattaacggtgatccggagtatggtgtttggacagcgggtcaggtcattggattgattcatgatatccctacttgcgacgtgctcgttaatagaattgagaaagaggccaaggaaacactgacatcaaagctgaaattagcgaagcctaagttgtag

SEQ ID NO: 36599 - protein, 328 aa, Muscodor strobelii
  misc_feature: SGI Peptide ID NO. 572688
  misc_feature (4)..(312): Pfam Id: PF03060 Pfam Desc: 2-nitropropane dioxygenase
  misc_feature (4)..(227): Pfam Id: PF03060 Pfam Desc: 2-nitropropane dioxygenase
  misc_feature (1)..(326): NCBI GI: 171681902 Blast Desc: protein product [Podospora anserina] gi|170940910|emb|CAP66560.1| protein product [Podospora anserina]
  misc_feature (1)..(326): NCBI GI: 156064695 Blast Desc: SS1G_00355 [Sclerotinia sclerotiorum 1980] gi|154691217|gb|EDN90955.1| SS1G_00355 [Sclerotinia sclerotiorum 1980]
  misc_feature (1)..(327): NCBI GI: 256734067 Blast Desc: [Nectria haematococca mpVI 77-13-4]
  misc_feature (1)..(326): NCBI GI: 154322863 Blast Desc: BC1G_00774 [Botryotinia fuckeliana B05.10] gi|150848108|gb|EDN23301.1| BC1G_00774 [Botryotinia fuckeliana B05.10]
  misc_feature (1)..(323): NCBI GI: 85097345 Blast Desc: NCU04803 [Neurospora crassa OR74A] gi|28921920|gb|EAA31193.1| NCU04803 [Neurospora crassa OR74A]
  misc_feature (1)..(318): NCBI GI: 242792756 Blast Desc: 2-nitropropane dioxygenase family oxidoreductase, [Talaromyces stipitatus ATCC 10500] gi|242792761|ref|XP_002482021.1| 2-nitropropane dioxygenase ATCC
  misc_feature (1)..(327): NCBI GI: 46128115 Blast Desc: FG08435.1 [Gibberella zeae PH-1]
  misc_feature (1)..(317): NCBI GI: 212535318 Blast Desc: 2-nitropropane dioxygenase family oxidoreductase, [Penicillium marneffei ATCC 18224] gi|210070214|gb|EEA24304.1| 2-nitropropane dioxygenase family oxidoreductase, [Penicillium
  misc_feature (1)..(323): NCBI GI: 238504960 Blast Desc: 2-nitropropane dioxygenase family oxidoreductase, [Aspergillus flavus NRRL3357] gi|220689823|gb|EED46173.1| 2-nitropropane dioxygenase family oxidoreductase, [Aspergillus
  misc_feature (1)..(323): NCBI GI: 255949168 Blast Desc: Pc22g14270 [Penicillium chrysogenum Wisconsin 54-1255] gi|211592368|emb|CAP98715.1| Pc22g14270 [Penicillium chrysogenum Wisconsin 54-1255]
  misc_feature (1)..(227): SWISSPROT Homolog: EC 1.13.11.32 2-nitropropane dioxygenase
MPFDTELTRQLGIRIPVVQGGMQHVGYAEMASAVSNAGGLGILTALTQPTPADLRKEIQKCRKMTKYPFGVNITLLPALNPPDYGAYAQAVIDEGIKIVETAGNSPGPVIKKLKAAGVIILHKCTTIRHAQSAIKLGVDFLSIDGFECAGHVGESDITNFILLSKARQTLKVPFIASGGFADGQGLAAALCLGAEGINMGTRFMCTVESPIHQKIKEEIVKAQETDTALVMRRWTNTTRLYRNKVTDAVVKIERDSKTGEFAEIAPYVSGKRGREVFINGDPEYGVWTAGQVIGLIHDIPTCDVLVNRIEKEAKETLTSKLKLAKPKL

SEQ ID NO: 36600 - DNA, 1567 bp, Muscodor strobelii
  misc_feature: SGI EST ID NO. CUFF.87326.0
  misc_feature: Variant of the nucleotide sequence at SEQ ID NO 36598
gcagtctggggtacgtgcacgattcttcactgctcacgagtcggcaagcctaggtctcaccgttgccccatcattcggccccaagccactgaacctcggcatctcctgtcgatttggtgtcaggatatgcaatcccagtggacttcgctcccttcgttataaagcaacttcacacatctacagttcctttccccacgatttagatatctctttgttctagtggccgtcgttcaggagtaattttgccatttgctagcgtcatttctatccatctacacctttagcgtcgtcaggatagaagattcgcagaggaagtagaacgcctattaagggttgtgttcgccaagatgcctttcgatacagagctcacccgccagctaggcatcaggatccccgtcgtgcagggtggcatgcaacatgttggctatgcagagatggcttctgctgtatctaacgccggcggtctgggtattctcacagccctcactcaacctacacccgcagacctgcgcaaagagatccagaaatgtcgaaagatgacaaaatatccatttggcgtcaatatcacacttctgccagctctgaaccctccggactacggtgcctacgcccaggccgtcattgatgagggcatcaagatcgtcgagaccgctggtaacagccccggtcccgtgattaagaagctgaaggccgcgggtgtgatcatcttacataagtgcaccactattcggcacgcacaaagcgccatcaaactcggcgtcgatttcttatcaatcgatgggttcgagtgtgctggccatgttggtgaatccgacattaccaacttcatcctgctcagcaaggctcgacagactctgaaagttccatttattgcctccggcggatttgctgatggacaaggtcttgcggcggcgctgtgccttggtgccgagggtatcaacatgggaacgaggttcatgtgcacagtagagtcgccaatccaccagaagatcaaggaggaaatcgtcaaagctcaagagacagacacagctttagtaatgcgccgctggaccaacaccacacgactgtatcgcaacaaggtcacagatgccgttgtcaagatcgagcgcgatagcaagactggcgagttcgccgagattgcaccctatgttagcggcaagcgcggtcgcgaggttttcattaacggtgatccggagtatggtgtttggacagcgggtcaggtcattggattgattcatgatatccctacttgcgacgtgctcgttaatagaattgagaaagaggccaaggaaacactgacatcaaagctgaaattagcgaagcctaagttgtagatatagagctctaactttcttgtacgatgtgctgagcgtaattagaaatgcttgtatcaatcgagcaagtcacgaacgagatagccttagcgcagagactccgatctgtgttgacttacttttgtcttttgtcgctagtatctttattcattgtttctgttagcattggattcttctcggcttttctcattgtggagcatagatgccagaatcagtcagaacgaatagacgag

SEQ ID NO: 36601 - DNA, 495 bp, Muscodor strobelii
  misc_feature: SGI cDNA ID NO. 572689
  misc_feature: Encodes the peptide sequence at SEQ ID NO 36602
atgggtttcggaagtcttttcggctccagctcttcgagccagcagagcaaggcctcctatcccgaccagagaactcccgacgaatggcgcgcagtgctgaacaaagaacaattccgcatcctccgtgagaagggcacagaagcacccggctctcacaaatttgacaagctgttcaccgagactggtgtctacacttgcgccggatgcaacgcacccttgtacaaggcgaaccacaagttcaagtccggatgcggatggcccgcttatttcgacaacattcccggtgccgtcacccgctacgaggatcgctcttggggcatgtcgcgcaccgagattgtttgctcgaactgcggtggccatcttggccacgtgttcaagggcgagggttatcccactcccaccgatgagaggcattgcgtcaatggagtcagcttgaacttcgctcccgacgatgtcatcaagcagaagccagcagaggaacagcccaaggcatga

SEQ ID NO: 36602 - protein, 164 aa, Muscodor strobelii
  misc_feature: SGI Peptide ID NO. 572689
  misc_feature (26)..(150): Pfam Id: PF01641 Pfam Desc: SelR domain
  misc_feature (19)..(164): NCBI GI: 261359421 Blast Desc: methionine-R-sulfoxide reductase B2 [Verticillium albo-atrum VaMs.102]
  misc_feature (14)..(151): NCBI GI: 171682384 Blast Desc: protein product [Podospora anserina] gi|170941151|emb|CAP66801.1| protein product [Podospora anserina]
  misc_feature (19)..(161): NCBI GI: 256727114 Blast Desc: NECHADRAFT_73488 [Nectria haematococca mpVI 77-13-4]
  misc_feature (3)..(151): NCBI GI: 121699451 Blast Desc: methionine-R-sulfoxide reductase SelR, [Aspergillus clavatus NRRL 1] gi|119396167|gb|EAW06599.1| methionine-R-sulfoxide reductase SelR, [Aspergillus clavatus NRRL
  misc_feature (19)..(157): NCBI GI: 46135969 Blast Desc: FG09500.1 [Gibberella zeae PH-1]
  misc_feature (3)..(151): NCBI GI: 242764086 Blast Desc: methionine-R-sulfoxide reductase SelR, [Talaromyces stipitatus ATCC 10500] gi|218723901|gb|EED23318.1| methionine-R-sulfoxide reductase SelR, [Talaromyces stipitatus
  misc_feature (11)..(151): NCBI GI: 146324407 Blast Desc: methionine-R-sulfoxide reductase SelR [Aspergillus fumigatus Af293] gi|129557231|gb|EAL88637.2| methionine-R-sulfoxide reductase SelR, [Aspergillus fumigatus
  misc_feature (3)..(151): NCBI GI: 145243478 Blast Desc: An11g02640 [Aspergillus niger] gi|134078940|emb|CAK40606.1| protein product [Aspergillus niger]
  misc_feature (11)..(151): NCBI GI: 159124235 Blast Desc: methionine-R-sulfoxide reductase SelR, [Aspergillus fumigatus A1163]
  misc_feature (12)..(151): NCBI GI: 212529216 Blast Desc: methionine-R-sulfoxide reductase SelR, [Penicillium marneffei ATCC 18224] gi|210074163|gb|EEA28250.1| methionine-R-sulfoxide reductase SelR, [Penicillium marneffei
  misc_feature (17)..(151): SWISSPROT Homolog: EC 1.8.4.12 Peptide-methionine (R)-S-oxide reductase
MGFGSLFGSSSSSQQSKASYPDQRTPDEWRAVLNKEQFRILREKGTEAPGSHKFDKLFTETGVYTCAGCNAPLYKANHKFKSGCGWPAYFDNIPGAVTRYEDRSWGMSRTEIVCSNCGGHLGHVFKGEGYPTPTDERHCVNGVSLNFAPDDVIKQKPAEEQPKA

SEQ ID NO: 36603 - DNA, 1258 bp, Muscodor strobelii
  misc_feature: SGI EST ID NO. CUFF.87328.0
  misc_feature: Variant of the nucleotide sequence at SEQ ID NO 36601
cgcagttcccgtgctgtggagtcctcctctctgacgccatgaaccaggggtcttaatgaatattggaggggtcctgcctttcgagattcctcatcatgttgcggctgagtttaggggatgacgacactgtgatcacctcctgttgtcactatcattcagcgggaaactaggtgtatgtctacagtatgaagtagctactggatactatgacgaacattccaaatacaccaaacaagtgatctaagaattgaaactgtcatcactgtccgctttatggaatacgctgatttgataccgccacacgcaataccttgacctacagcatatctaccttacattacttaaagcctcttttatctctcaacgtcgcagacattttatctatcgcatcacattgcaactatccgcagccctcatgagattgcctccattcgcgacagtattacgaactttctacgccttctctcatctaccgcgagttcgagcgacagcgcccgctttgcaccaaattaactcaccaaattccggatatctcgcagccatgggtttcggaagtcttttcggctccagctcttcgagccagcagagcaaggcctcctatcccgaccagagaactcccgacgaatggcgcgcagtgctgaacaaagaacaattccgcatcctccgtgagaagggcacagaagcacccggctctcacaaatttgacaagctgttcaccgagactggtgtctacacttgcgccggatgcaacgcacccttgtacaaggcgaaccacaagttcaagtccggatgcggatggcccgcttatttcgacaacattcccggtgccgtcacccgctacgaggatcgctcttggggcatgtcgcgcaccgagattgtttgctcgaactgcggtggccatcttggccacgtgttcaagggcgagggttatcccactcccaccgatgagaggcattgcgtcaatggagtcagcttgaacttcgctcccgacgatgtcatcaagcagaagccagcagaggaacagcccaaggcatgaaaacgactgattagatatttgaggattattagtagaggaatttgacacgattggacgtgatgatgatgtggaatgagaaagctttttgggaggcaggagtaagatgggcatatacttgccaaaatactgcaactgcagatgtgcgttagcatgcatacattgaacagatatcagtcaatgctgagaacaattatcaattatacaaagacagttgttcctcgc

SEQ ID NO: 36604 - DNA, 375 bp, Muscodor strobelii
  misc_feature: SGI cDNA ID NO. 572690
  misc_feature: Encodes the peptide sequence at SEQ ID NO 36605
atgtcagtcattaagatcaacgtggctggcaagtccgccgccgctgcgcgcagcaaggctcgtgccagcaacagggtcaacaaggtccgcgtcgtcggccgctgggcttcacgcgcgacctggccgccagtccaccccactcgcatccgcttgaccggacgcttcgtagcactgcgtcagatcaacgagatgatcgccgcctggcagcacgagctggatcactcggcggctttccttgaccaactcccaactccgccgcccagtcccaagctcacccaagccggtacccacatccgtctagtcgggcggtatgccgccatccatcagatcgacaacatgatcgcagacttggaggggcacatgaagagctcataa

SEQ ID NO: 36605 - protein, 124 aa, Muscodor strobelii
  misc_feature: SGI Peptide ID NO. 572690
MSVIKINVAGKSAAAARSKARASNRVNKVRVVGRWASRATWPPVHPTRIRLTGRFVALRQINEMIAAWQHELDHSAAFLDQLPTPPPSPKLTQAGTHIRLVGRYAAIHQIDNMIADLEGHMKSS

SEQ ID NO: 36606 - DNA, 181 bp, Muscodor strobelii
  misc_feature: SGI EST ID NO. CUFF.87316.0
  misc_feature: Variant of the nucleotide sequence at SEQ ID NO 36604
cgccagtccaccccactcgcatccgcttgaccggacgcttcgtagcactgcgtcagatcaacgagatgatcgccgcctggcagcacgagctggatcactcggcggctttccttgaccaactcccaactccgccgcccagtcccaagctcacccaagccggtacccacatccgtctagtcgg

SEQ ID NO: 36607 - DNA, 891 bp, Muscodor strobelii
  misc_feature: SGI cDNA ID NO. 572691
  misc_feature: Encodes the peptide sequence at SEQ ID NO 36608
atgcagtacactcaactcttcacattggctcttggcctcgtcctcttcgctacctctagtctggcctctcctctctcgccctatgctgctgtcgtccctgacgccaccatcactcccggtcccgttcctcctttcagccccggtggcatccatcctagtgctctcggccacattgacgaccagtcggactccaatggcgagtttactatcgtctcctctggtcatggtacagccattggtggtgccctagctcccttgcctactcaacaagccaccaatattggccaaattgcccctccacctccttttatgaccatcacgttcgtgaataggcacaacgtggctgtttcgacgacccatggtcgtaatgccggtgcccctgccgctacaagcggaaacgtcaaccctggcaccattgccgttggtgccaccgctgctttcgccgttccgactaactgggctggtcgtgtcgctgttgctgaggcacactggggacctctgactggcggacgtttcgccactctgttggaagcgaacttcaactatgctgctggatacggcgttgctgttcctgatttcgacgtcagctacgtcgatgcatactccctccccatgacctgtgcctgcaacggaaagacactcgctggttgcaataaggctttgttcgggctgcatgcctgtcccgctggagatctacacgcgggctcgtgctataaccccctgaaggacagcaacgacgccaaggccgcgactgcgttcttcgctccctgcagcagagctgcctacacattccctaaggacaatgaggcaaattcttatggtgtctgtcagagtgcgagggtcacttgctgcattggtgctgcttgtgctgccggccctaagcagtcttag

SEQ ID NO: 36608 - protein, 296 aa, Muscodor strobelii
  misc_feature: SGI Peptide ID NO. 572691
  misc_feature (75)..(295): NCBI GI: 242788311 Blast Desc: conserved [Talaromyces stipitatus ATCC 10500] gi|218721340|gb|EED20759.1| conserved [Talaromyces stipitatus ATCC 10500]
  misc_feature (98)..(295): NCBI GI: 212544009 Blast Desc: PMAA_049590 [Penicillium marneffei ATCC 18224] gi|210067066|gb|EEA21159.1| PMAA_049590 [Penicillium marneffei ATCC 18224]
  misc_feature (66)..(196): NCBI GI: 145605565 Blast Desc: [Magnaporthe grisea 70-15] gi|145013383|gb|EDJ98024.1| [Magnaporthe grisea 70-15]
  misc_feature (193)..(296): NCBI GI: 171688956 Blast Desc: protein product [Podospora anserina] gi|170944440|emb|CAP70551.1| protein product [Podospora anserina]
MQYTQLFTLALGLVLFATSSLASPLSPYAAVVPDATITPGPVPPFSPGGIHPSALGHIDDQSDSNGEFTIVSSGHGTAIGGALAPLPTQQATNIGQIAPPPPFMTITFVNRHNVAVSTTHGRNAGAPAATSGNVNPGTIAVGATAAFAVPTNWAGRVAVAEAHWGPLTGGRFATLLEANFNYAAGYGVAVPDFDVSYVDAYSLPMTCACNGKTLAGCNKALFGLHACPAGDLHAGSCYNPLKDSNDAKAATAFFAPCSRAAYTFPKDNEANSYGVCQSARVTCCIGAACAAGPKQS

SEQ ID NO: 36609 - DNA, 377 bp, Muscodor strobelii
  misc_feature: SGI EST ID NO. CUFF.87344.0
  misc_feature: Variant of the nucleotide sequence at SEQ ID NO 36607
ggacgtttcgccactctgttggaagcgaacttcaactatgctgctggatacggcgttgctgttcctgatttcgacgtcagctacgtgtacgtacagttccagtaaggacaagaatcacaaagaagactaacatatgcagcgatgcatactccctccccatgacctgtgcctgcaacggaaagacactcgctggttgcaataaggctttgttcgggctgcatgcctgtcccgctggagatctacacgcgggctcgtgctataaccccctgaaggacagcaacgacgccaaggccgcgactgcgttcttcgctccctgcagcagagctgcctacacattccctaaggacaatgaggcaaattcttatggtgtctgtcag

SEQ ID NO: 36610 - DNA, 1650 bp, Muscodor strobelii
  misc_feature: SGI cDNA ID NO. 572692
  misc_feature: Reduced expression when VOC is produced
  misc_feature: Encodes the peptide sequence at SEQ ID NO 36611
atggctacgatagccagcaaccggcccacggccgcacctgcctcttctcaccagtacacctgcaacacctgtcaagtggccttccgctatgccgacacgcagaagagccacatgaagacggactggcatcgatacaacctcaagcgccgtgtcgcatccttgcctgccatctcgtccgaggtcttcaccgagaaggtcctccagactcgtgccgccactaccgccgaggccaacaaagccagcttccagcaagtctgcgatgtatgccagagaacctactacagcgagaactcgtaccagaaccacatcagcagccagaagcacaaggccaaagaggcctctctacttcgacgtggggaccatatcgatgatgccagctctgtcatgagctctgccttctccctgggagagtccatccctaccctccctgctgcgacggagacagtcgactcggatgccgaagatgagtttaacgaggttgtcgagggcctgcagaagtcgaccctgaacgagcgcccatcccccgtcaaacgcccgtcgaatccccatccttccgcagagggccagcatgatcgcgagcacccggtgtctgacgacccaagcgagactgcttccagcacggccaccccagtctctaccatcactctcaagtcctgcctgttctgcaactacgactccccaactgtgcccctcaatgttgtgcacatggagcgcatacatggcatgttcattccggaaaagcagtatcttgttgacctcgaggggctggtcaccttgctgcagcaacgaattcaggagtaccacgagtgtctttattgtggcaaatacaaaaacaccgcggctgccgtccagacgcatatgcgtgacaaggggcactgcatgatcccattcactagcgaggaggagcagctcagaatcggtgacttttacgatttccgaagcacttattcggatggagaagaggactcggaggatgagtctgtagatgataagccttcgggcggagccaagcttggagccaagaggccctccaaagctgtcggcgagaatggtgaagagatcaccgcagaagaggagggctgggagactgatagctctgcttcttcctgtgcttctgaggatcttaggtcgattccggttgatcatcacatagagcagtacgagcgtctcgagaagcatccacaccactcatcccacgaccctcgtcatcaccaccagaaagatggttggcactctcatgcccacaagcaccgtgccatcttctatgacgataccgaattgcatcttccctctggacgtgctgtgggccaccgctctctcgccaaatactatcgccagaacctaagcagttaccccacggaagaggaacgtgctgagagattggctattgagggagccgagggctcaggcgatgaagcccagaatggcgatagacgggtcgcacgacgagaccatcccaatcatggagcagttgtcagtcgtgccgatggcggtgctggtatgctcggagtgagtgaccgcaagaagaaagaggttaggaaagcggagcttcgcaacgagcgacagcagcaaggccagttcagacgcaaccaggcactggtcaacaggaacgccaacaaccagaagtactacaactaccagatcctatag

SEQ ID NO: 36611 - protein, 549 aa, Muscodor strobelii
  misc_feature: SGI Peptide ID NO. 572692
  misc_feature (1)..(549): NCBI GI: 145606156 Blast Desc: MGG_02505 [Magnaporthe grisea 70-15] gi|145013878|gb|EDJ98519.1| MGG_02505 [Magnaporthe grisea 70-15]
  misc_feature (1)..(548): NCBI GI: 261359375 Blast Desc: zinc finger protein Yan [Verticillium albo-atrum VaMs.102]
  misc_feature (1)..(523): NCBI GI: 116202651 Blast Desc: CHGG_09210 [Chaetomium globosum CBS 148.51] gi|88177728|gb|EAQ85196.1| CHGG_09210 [Chaetomium globosum CBS 148.51]
  misc_feature (11)..(547): NCBI GI: 46124099 Blast Desc: FG06427.1 [Gibberella zeae PH-1]
  misc_feature (1)..(545): NCBI GI: 85086154 Blast Desc: NCU04022 [Neurospora crassa OR74A] gi|28918731|gb|EAA28401.1| conserved [Neurospora crassa OR74A] gi|29150135|emb|CAD79695.1| conserved [Neurospora crassa]
  misc_feature (1)..(534): NCBI GI: 171682514 Blast Desc: protein product [Podospora anserina] gi|170941216|emb|CAP66866.1| protein product [Podospora anserina]
  misc_feature (1)..(549): NCBI GI: 154292948 Blast Desc: BC1G_14372 [Botryotinia fuckeliana B05.10] gi|150845713|gb|EDN20906.1| BC1G_14372 [Botryotinia fuckeliana B05.10]
  misc_feature (11)..(549): NCBI GI: 119193572 Blast Desc: CIMG_01163 [Coccidioides immitis RS]
  misc_feature (11)..(549): NCBI GI: 240105655 Blast Desc: C2H2 type zinc finger containing protein [Coccidioides posadasii C735 delta SOWgp]
  misc_feature (1)..(549): NCBI GI: 156034412 Blast Desc: SS1G_13509 [Sclerotinia sclerotiorum 1980] gi|154698912|gb|EDN98650.1| SS1G_13509 [Sclerotinia sclerotiorum 1980]
  misc_feature: Useful for introducing or modulating the production of volatile compounds
MATIASNRPTAAPASSHQYTCNTCQVAFRYADTQKSHMKTDWHRYNLKRRVASLPAISSEVFTEKVLQTRAATTAEANKASFQQVCDVCQRTYYSENSYQNHISSQKHKAKEASLLRRGDHIDDASSVMSSAFSLGESIPTLPAATETVDSDAEDEFNEVVEGLQKSTLNERPSPVKRPSNPHPSAEGQHDREHPVSDDPSETASSTATPVSTITLKSCLFCNYDSPTVPLNVVHMERIHGMFIPEKQYLVDLEGLVTLLQQRIQEYHECLYCGKYKNTAAAVQTHMRDKGHCMIPFTSEEEQLRIGDFYDFRSTYSDGEEDSEDESVDDKPSGGAKLGAKRPSKAVGENGEEITAEEEGWETDSSASSCASEDLRSIPVDHHIEQYERLEKHPHHSSHDPRHHHQKDGWHSHAHKHRAIFYDDTELHLPSGRAVGHRSLAKYYRQNLSSYPTEEERAERLAIEGAEGSGDEAQNGDRRVARRDHPNHGAVVSRADGGAGMLGVSDRKKKEVRKAELRNERQQQGQFRRNQALVNRNANNQKYYNYQIL

SEQ ID NO: 36612 - DNA, 2877 bp, Muscodor strobelii
  misc_feature: SGI EST ID NO. CUFF.87383.0
  misc_feature: Variant of the nucleotide sequence at SEQ ID NO 36610
attcacccctccaacccgcagtctcgcctccctgacccctccaagatagccctctgtgtccccctctgcagagagaaaaaaacgctcgtgatgtcaacggagggtatttaaactgcacgccgtctttcgcttctaacaaccttacccctaccctttctccggccccagacagtactgcgtacatatacgatctgcacttgtctgagtcgctgttagctgacagaacattccatcaccgtgttctgttgcttccatattctctagaccgggtgcaatccagcgccacaatttgtgcaaaggcgacttgtgcatcattccaaaaccataacatcaacggcgacttcctcacccgactgacaccctctcgctcctgtcgcaactcctcaccttccattctctacctgctcgccgcccttttaccatccgtcgtccgtctcacaacttttcgcaaccccctcttcgacacagtcttatcccttcgcctctccctgtgtgcgcgatggctacgatagccagcaaccggcccacggccgcacctgcctcttctcaccagtacacctgcaacacctgtcaagtggccttccgctatgccgacacgcagaagagccacatgaagacggactggcatcgatacaacctcaagcgccgtgtcgcatccttgcctgccatctcgtccgaggtcttcaccgagaaggtcctccagactcgtgccgccactaccgccgaggccaacaaagccagcttccagcaagtctgcgatgtatgccagagaacctactacagcgagaactcgtaccagaaccacatcagcagccagaagcacaaggccaaagaggcctctctacttcgacgtggggaccatatcgatgatgccagctctgtcatgagctctgccttctccctgggagagtccatccctaccctccctgctgcgacggagacagtcgactcggatgccgaagatgagtttaacgaggttgtcgagggcctgcagaagtcgaccctgaacgagcgcccatcccccgtcaaacgcccgtcgaatccccatccttccgcagagggccagcatgatcgcgagcacccggtgtctgacgacccaagcgagactgcttccagcacggccaccccagtctctaccatcactctcaagtcctgcctgttctgcaactacgactccccaactgtgcccctcaatgttgtgcacatggagcgcatacatggcatgttcattccggaaaagcagtatcttgttgacctcgaggggctggtcaccttgctgcagcaacgaattcaggagtaccacgagtgtctttattgtggcaaatacaaaaacaccgcggctgccgtccagacgcatatgcgtgacaaggggcactgcatgatcccattcactagcgaggaggagcagctcagaatcggtgacttttacgatttccgaagcacttattcggatggagaagaggactcggaggatgagtctgtagatgataagccttcgggcggagccaagcttggagccaagaggccctccaaagctgtcggcgagaatggtgaagagatcaccgcagaagaggagggctgggagactgatagctctgcttcttcctgtgcttctgaggatcttaggtcgattccggttgatcatcacatagagcagtacgagcgtctcgagaagcatccacaccactcatcccacgaccctcgtcatcaccaccagaaagatggttggcactctcatgcccacaagcaccgtgccatcttctatgacgataccgaattgcatcttccctctggacgtgctgtgggccaccgctctctcgccaaatactatcgccagaacctaagcagttaccccacggaagaggaacgtgctgagagattggctattgagggagccgagggctcaggcgatgaagcccagaatggcgatagacgggtcgcacgacgagaccatcccaatcatggagcagttgtcagtcgtgccgatggcggtgctggtatgctcggagtgagtgaccgcaagaagaaagaggttaggaaagcggagcttcgcaacgagcgacagcagcaaggccagttcagacgcaaccaggcactggtcaacaggaacgccaacaaccagaagtactacaactaccagatcctatagacattggcagcttgtatacattggacgcaagtctttgtttggtggcgtccgcatacacttgagaatagacgggttgcttacgaaaatcctatggcgcatagcttctcatgcaatgagtgatgagaatcagtttgtgcctgagctctacagttagctcatggtgaattgtcggatgcttgccatcttctaccgagaaacgcgcaacgaaacactgcgggttatgtagctgttgcggaaggaaaaaggagagacacaaaagggttgccgctggtcattgacaatagacgatcaactcgtctcgaggaggcacccaattgtccctagccgcatagccacggaatcgataggttagcaggccaaagggcaaaaatttcgtagggcaaagcattgagtttacaacattgttttcttcttatgagacagtgcctcgtgatcataagttttctattaccctgttgaacaatcattaccttattggctttttgccctttatgttatctgtgacatttaatatccagggcgctgaggtgctcatattctcaccatcgatccgctgcactgggtatgcccctatttcgaggcgttgtcgttcatgttgtccagcaggatcagacgtatacaaagcctgagctctctcaatacattttgatcacctgatctgaaggaccacttagtatatagtcctgtagcgctacatctctaacatggagcactcacatcatggtttc

SEQ ID NO: 36613 - DNA, 3900 bp, Muscodor strobelii
  misc_feature: SGI cDNA ID NO. 572693
  misc_feature: Reduced expression when VOC is produced
  misc_feature: Encodes the peptide sequence at SEQ ID NO 36614
atgacgatagacactactcgcccggtggacggtggccgtggccagcacacgcttgaagatgacatcctcgcagctctatgggagaatgcccctttcccgaggcttccctttgacgcaccgccggaaatcagagatctggtagtcgatatcgagaaccccaagagagtctataccatacatcgtgcctctcgccgtcataatcttcagctgcttgtggagaagtttgttcaccagcttcgttatggatgcggcagcagcgcgtgctcgacggctacgtgttttacgtatcgcaaaagggccgccgggcgagcgcctattcgccgttacaaccccaacagcgccaggacgcttgccgtctacctagccagccaagacaaccccgaggctcgattgtgtccgcatcttcaaccgcccagcaagccctccgactcccttaaaccactcatcttcacccacaaatacccacctccaccgaccgatgctgcgaagtcacgcctttctccgaggaggaaatcttcctccacccccgaaacatcaccagtccgccatcacttgccgtcgccgatctatacagatcgacacggccagcaccatgcctcgccttcatcacccagacccgaggcggcgacaccttcatcgtcacgaaggggcaatgcgcaaacagatacggccgacaacgagcagtcaggggtgaagaaggactatcgttccttcgctgccaacgtctttggcaccgtcgccttcaagatgctcgagtggctgacgccaaacagcattgaggctctgcaggacgacatggaatgggacggtgagtcgccaagactgaataagtcaccagctcaacctcttctatcatcagacggcggcagtggaagccgtctcgcttcgccaacaacatcgcctcgtttatggagtcgacgttcttctctcgatggcgccgtcttagatgtcaacggacacgcagaacaaccccaggagacaactgctagagaaccccacgatcgattgaatggtagtgtccctgccgaaagactgcctatggcgactccaacccgatcaccgcatgcgaggcggaagtccaacaccaagatccgcacctcgtctgggccaaaaccaacttccaaactagtagtagagtcgatcaaagacgtgaccgaggagaaggtgctgggatcgccagaccgaatagctaaaggcttggttcttccttcgccagccttacgcaccacatctgaatcctcgagcgacgacctttctgacaataaagcagatcagcagtcatcggtttctcttgagcacgaatcgccgacaacgagtgacaatgcccagggagacgccatcaacggcgatgacagatccagcgagtgggaggaaacgggatccggagaactgccaaacggagcgcatcatagcgatgccgtatcagaaccacagtctgagttggatagctatcttcctcagtcactcggtcgtctaactcttgaagctgttaatttcatctgcgatgtcctgcaagatgatgcaacggctgagcggcacctgctcgagccaccgaccatcagtggttctttgcggcgctcatccggtaggcgcaaatcatggagaaggaagcggaagcctcaagtatcgtacccgcaggacctcaagtatcaatggaagcttttcgttgagcagagtatattcaacgttttgagcgacccgcgggccgtactcgactctttcacttctcgtgacggaacgattgactcccagaccctatggtattgtatgctccggttgacaagagctgctcctcagctggtcttcgatagtttatggatttctttggccagcctatttgcaccgccactgtcattgcaatctcctcggtcaccaaccgccaaggtcttcggctcctcgcaaaatgctctgtccaatgtcgaagcagcatcactcatgtctatctgtttccatgcgttggtcgccgctgcgccgctggtaaccgactcccgacagcttcatgacatgtcgcgcatccgatctcacggattatcactcatcggtagtggagccgtggcgagacagccaagctctgtgtgtctagaatacgaagacgtatttactgatgacttggctctgcgattggctaagaggctacttacagccatttccacaagacgttattttgatgaactggctcaattagacctgaaccggatcgaagacagtactgcatccaacgtgcttgatatcatgctgtcccagatcgagccatctatgccgtccatattgcacttcacaaggtccgaacggaccgtgcatgagaagcgagttcccattctcctcctggactgggctcgggctgtcatggtacaggagtgggctggaaaaccggatgttgctggggatggtcccttcggtggtgccctgatgctgattggcgctatgtaccggaaacgtcagtctctgcttctcggcgatgcccatttccgctccgagtattttggtgatcgactcgacactgtcgaaatgccagtgtcgtggctcaacttcgaatctacgagacaaagggttcatctcttagactacccttacacctttaacccagctttgttagtcacctactttcgagccatcaattactcgcgaatgaatcgttcgcatgaggaatcaatcttactcgacagccaaatcaagtacttcataggaccaggcggcctggaaacgggacttcaccaacgcgacatcttggaagacttgttaaaaacgcccacggctaaatatcttatcttagatatacgccgtgaggatgtcctcgccgatgctttcgatcagctctggagacgcgaagagcgagagcttatgcggcccctcaagattcatctaggggaggacagtggcgaggagggcttcgattctggtggcgttcagcaggaattctttcgcttggccatcgctgaagctctcgaaccggattacggcgcctttacagtcgaggataggacacgtatgacatggtttcagcccggttccctccagcctgaatggagatatgaattagtgggcttgattgtctccctggctgtgtataacggcttgactttacctgttacatttcccaaggctttatatcacaaattacttggcgagcctgtcacggaacttcatcatattgccgatggatggcctgaactggccagcggccttacgaacctgcttgagtggaacgagacagatggtgcagtagaggatgtcttcgttttgacatacgaattctcgacctcgatgttcggccagcccgtcacacgccagatggacccaacacaacggcaatcctggccacaactatcgtcacatcccaatgcagaaccgctttcggctgataacccgactgacgcaccagccgtgaccggcgataaccgcaacgcctacgtaagcgactatatccgatacctaacagatatctcggtagagccacaattcgcggccttcgagcgtggtttcaaaacatgtctacaccccaaatcactctcacttctcacacctaccctgctgcagtccatcgtcgagggtacacaggagatcaatatctcggagctgaagagagcagtgcgatacgtgggctgggacgcgggacacagcacgattaaagatttctggtccgtggttaagacctacgacgagagaatgaggaggaaactgctcgagtttgtcacggcgtcggaccgggttcccgtcggcggtgtgcagaacgtgcagtttgtgatccagaggaatgggagtgaggatgaggggggccacttgccgacggcttatacgtgttatggtacgcttttgttgccggagtatccggataaggaggtccttagggagagactgggtatggctattgagaatgcgcaggggttcgggtttgcgtaa

SEQ ID NO: 36614 - protein, 1299 aa, Muscodor strobelii
  misc_feature: SGI Peptide ID NO. 572693
  misc_feature (975)..(1299): Pfam Id: PF00632 Pfam Desc: HECT-domain (ubiquitin-transferase)
  misc_feature (1128)..(1299): Pfam Id: PF00632 Pfam Desc: HECT-domain (ubiquitin-transferase)
  misc_feature (975)..(1096): Pfam Id: PF00632 Pfam Desc: HECT-domain (ubiquitin-transferase)
  misc_feature (7)..(1299): NCBI GI: 116202649 Blast Desc: CHGG_09209 [Chaetomium globosum CBS 148.51] gi|88177727|gb|EAQ85195.1| CHGG_09209 [Chaetomium globosum CBS 148.51]
  misc_feature (1)..(1253): NCBI GI: 85086163 Blast Desc: NCU04024 [Neurospora crassa OR74A] gi|28918733|gb|EAA28403.1| [Neurospora crassa OR74A] gi|29150137|emb|CAD79697.1| related to ubiquitin-protein ligase
  misc_feature (1)..(1299): NCBI GI: 171682520 Blast Desc: protein product [Podospora anserina] gi|170941219|emb|CAP66869.1| protein product [Podospora anserina]
  misc_feature (40)..(1299): NCBI GI: 261359374 Blast Desc: ubiquitin-protein ligase E3A [Verticillium albo-atrum VaMs.102]
  misc_feature (484)..(1299): NCBI GI: 145606154 Blast Desc: MGG_11888 [Magnaporthe grisea 70-15] gi|145013877|gb|EDJ98518.1| MGG_11888 [Magnaporthe grisea 70-15]
  misc_feature (19)..(1298): NCBI GI: 156034410 Blast Desc: SS1G_13508 [Sclerotinia sclerotiorum 1980] gi|154698911|gb|EDN98649.1| SS1G_13508 [Sclerotinia sclerotiorum 1980]
  misc_feature (1)..(1297): NCBI GI: 154292950 Blast Desc: BC1G_14373 [Botryotinia fuckeliana B05.10] gi|150845714|gb|EDN20907.1| BC1G_14373 [Botryotinia fuckeliana B05.10]
  misc_feature (477)..(1299): NCBI GI: 256727764 Blast Desc: NECHADRAFT_91396 [Nectria haematococca mpVI 77-13-4]
  misc_feature (482)..(1299): NCBI GI: 46124097 Blast Desc: FG06426.1 [Gibberella zeae PH-1]
  misc_feature (34)..(1299): NCBI GI: 225557473 Blast Desc: HECT domain-containing protein [Ajellomyces capsulatus G186AR]
  misc_feature: Useful for introducing or modulating the production of volatile compounds
MTIDTTRPVDGGRGQHTLEDDILAALWENAPFPRLPFDAPPEIRDLVVDIENPKRVYTIHRASRRHNLQLLVEKFVHQLRYGCGSSACSTATCFTYRKRAAGRAPIRRYNPNSARTLAVYLASQDNPEARLCPHLQPPSKPSDSLKPLIFTHKYPPPPTDAAKSRLSPRRKSSSTPETSPVRHHLPSPIYTDRHGQHHASPSSPRPEAATPSSSRRGNAQTDTADNEQSGVKKDYRSFAANVFGTVAFKMLEWLTPNSIEALQDDMEWDGESPRLNKSPAQPLLSSDGGSGSRLASPTTSPRLWSRRSSLDGAVLDVNGHAEQPQETTAREPHDRLNGSVPAERLPMATPTRSPHARRKSNTKIRTSSGPKPTSKLVVESIKDVTEEKVLGSPDRIAKGLVLPSPALRTTSESSSDDLSDNKADQQSSVSLEHESPTTSDNAQGDAINGDDRSSEWEETGSGELPNGAHHSDAVSEPQSELDSYLPQSLGRLTLEAVNFICDVLQDDATAERHLLEPPTISGSLRRSSGRRKSWRRKRKPQVSYPQDLKYQWKLFVEQSIFNVLSDPRAVLDSFTSRDGTIDSQTLWYCMLRLTRAAPQLVFDSLWISLASLFAPPLSLQSPRSPTAKVFGSSQNALSNVEAASLMSICFHALVAAAPLVTDSRQLHDMSRIRSHGLSLIGSGAVARQPSSVCLEYEDVFTDDLALRLAKRLLTAISTRRYFDELAQLDLNRIEDSTASNVLDIMLSQIEPSMPSILHFTRSERTVHEKRVPILLLDWARAVMVQEWAGKPDVAGDGPFGGALMLIGAMYRKRQSLLLGDAHFRSEYFGDRLDTVEMPVSWLNFESTRQRVHLLDYPYTFNPALLVTYFRAINYSRMNRSHEESILLDSQIKYFIGPGGLETGLHQRDILEDLLKTPTAKYLILDIRREDVLADAFDQLWRREERELMRPLKIHLGEDSGEEGFDSGGVQQEFFRLAIAEALEPDYGAFTVEDRTRMTWFQPGSLQPEWRYELVGLIVSLAVYNGLTLPVTFPKALYHKLLGEPVTELHHIADGWPELASGLTNLLEWNETDGAVEDVFVLTYEFSTSMFGQPVTRQMDPTQRQSWPQLSSHPNAEPLSADNPTDAPAVTGDNRNAYVSDYIRYLTDISVEPQFAAFERGFKTCLHPKSLSLLTPTLLQSIVEGTQEINISELKRAVRYVGWDAGHSTIKDFWSVVKTYDERMRRKLLEFVTASDRVPVGGVQNVQFVIQRNGSEDEGGHLPTAYTCYGTLLLPEYPDKEVLRERLGMAIENAQGFGFA

SEQ ID NO: 36615 - DNA, 5342 bp, Muscodor strobelii
  misc_feature: SGI EST ID NO. CUFF.87391.0
  misc_feature: Variant of the nucleotide sequence at SEQ ID NO 36613
ctgctgttggatgtctctgactgtatgcaagaatgtgcttgttagccactctccattaccaatgaccgcttcttgccacagacgacaaaccctttgttacatttggttgacacctgtccctatgttctttctatcgagtgcagataggtagaaagtgacgcatcatatcttcatggaatcgatcaatactcctgtgtttactgacttctactaagatcacaataggtgtacttactgtgtacttgagagatcttttacccctaccttaggtaatcaacactacttctagacaacttcatcatcgacatcttctttcttcatccaacgaccaacaagctgaactgatgagtatttgctggctgagtgcttcctggcgctagaccaggcccaatgaaagcaagacaaggatttgaacaagtaccggagagatccgcaggaggcccgcgcacgtcgaacttaatgccccggttgcaacttggcacggctggctgcgacctcgtaaatcccatcgtccatcagcctgcgctttgcgattcgtgatgcgcctttgtcgtcgccctatcccagtcgcgactctgggctcttcgtcgaggccgccgtgacacccatgccctttgattctccgtatttatttgaatctaatacctatttatctgccctcgccgttgttttgtgtacattagagctagaaaaccagcggataaacatacattcgacgagaacccagcttcatccatcagcccagccgagccaagccttctcctgcctggcctcctgcttccccaaccatcgactgtaacaccatactgcgtccatcgtctcagcctgctcccttttcacgatcgactctcctcctcttgataccctattcagcaattggcgctggatgatatgacgatagacactactcgcccggtggacggtggccgtggccagcacacgcttgaagatgacatcctcgcagctctatgggagaatgcccctttcccgaggcttccctttgacgcaccgccggaaatcagagatctggtagtcgatatcgagaaccccaagagagtctataccatacatcgtgcctctcgccgtcataatcttcagctgcttgtggagaagtttgttcaccagcttcgttatggatgcggcagcagcgcgtgctcgacggctacgtgttttacgtatcgcaaaagggccgccgggcgagcgcctattcgccgttacaaccccaacagcgccaggacgcttgccgtctacctagccagccaagacaaccccgaggctcgattgtgtccgcatcttcaaccgcccagcaagccctccgactcccttaaaccactcatcttcacccacaaatacccacctccaccgaccgatgctgcgaagtcacgcctttctccgaggaggaaatcttcctccacccccgaaacatcaccagtccgccatcacttgccgtcgccgatctatacagatcgacacggccagcaccatgcctcgccttcatcacccagacccgaggcggcgacaccttcatcgtcacgaaggggcaatgcgcaaacagatacggccgacaacgagcagtcaggggtgaagaaggactatcgttccttcgctgccaacgtctttggcaccgtcgccttcaagatgctcgagtggctgacgccaaacagcattgaggctctgcaggacgacatggaatgggacggtgagtcgccaagactgaataagtcaccagctcaacctcttctatcatcagacggcggcagtggaagccgtctcgcttcgccaacaacatcgcctcgtttatggagtcgacgttcttctctcgatggcgccgtcttagatgtcaacggacacgcagaacaaccccaggagacaactgctagagaaccccacgatcgattgaatggtagtgtccctgccgaaagactgcctatggcgactccaacccgatcaccgcatgcgaggcggaagtccaacaccaagatccgcacctcgtctgggccaaaaccaacttccaaactagtagtagagtcgatcaaagacgtgaccgaggagaaggtgctgggatcgccagaccgaatagctaaaggcttggttcttccttcgccagccttacgcaccacatctgaatcctcgagcgacgacctttctgacaataaagcagatcagcagtcatcggtttctcttgagcacgaatcgccgacaacgagtgacaatgcccagggagacgccatcaacggcgatgacagatccagcgagtgggaggaaacgggatccggagaactgccaaacggagcgcatcatagcgatgccgtatcagaaccacagtctgagttggatagctatcttcctcagtcactcggtcgtctaactcttgaagctgttaatttcatctgcgatgtcctgcaagatgatgcaacggctgagcggcacctgctcgagccaccgaccatcagtggttctttgcggcgctcatccggtaggcgcaaatcatggagaaggaagcggaagcctcaagtatcgtacccgcaggacctcaagtatcaatggaagcttttcgttgagcagagtatattcaacgttttgagcgacccgcgggccgtactcgactctttcacttctcgtgacggaacgattgactcccagaccctatggtattgtatgctccggttgacaagagctgctcctcagctggtcttcgatagtttatggatttctttggccagcctatttgcaccgccactgtcattgcaatctcctcggtcaccaaccgccaaggtcttcggctcctcgcaaaatgctctgtccaatgtcgaagcagcatcactcatgtctatctgtttccatgcgttggtcgccgctgcgccgctggtaaccgactcccgacagcttcatgacatgtcgcgcatccgatctcacggattatcactcatcggtagtggagccgtggcgagacagccaagctctgtgtgtctagaatacgaagacgtatttactgatgacttggctctgcgattggctaagaggctacttacagccatttccacaagacgttattttgatgaactggctcaattagacctgaaccggatcgaagacagtactgcatccaacgtgcttgatatcatgctgtcccagatcgagccatctatgccgtccatattgcacttcacaaggtccgaacggaccgtgcatgagaagcgagttcccattctcctcctggactgggctcgggctgtcatggtacaggagtgggctggaaaaccggatgttgctggggatggtcccttcggtggtgccctgatgctgattggcgctatgtaccggaaacgtcagtctctgcttctcggcgatgcccatttccgctccgagtattttggtgatcgactcgacactgtcgaaatgccagtgtcgtggctcaacttcgaatctacgagacaaagggttcatctcttagactacccttacacctttaacccagctttgttagtcacctactttcgagccatcaattactcgcgaatgaatcgttcgcatgaggaatcaatcttactcgacagccaaatcaagtacttcataggaccaggcggcctggaaacgggacttcaccaacgcgacatcttggaagacttgttaaaaacgcccacggctaaatatcttatcttagatatacgccgtgaggatgtcctcgccgatgctttcgatcagctctggagacgcgaagagcgagagcttatgcggcccctcaagattcatctaggggaggacagtggcgaggagggcttcgattctggtggcgttcagcaggaattctttcgcttggccatcgctgaagctctcgaaccggattacggcgcctttacagtcgaggataggacacgtatgacatggtttcagcccggttccctccagcctgaatggagatatgaattagtgggcttgattgtctccctggctgtgtataacggcttgactttacctgttacatttcccaaggctttatatcacaaattacttggcgagcctgtcacggaacttcatcatattgccgatggatggcctgaactggccagcggccttacgaacctgcttgagtggaacgagacagatggtgcagtagaggatgtcttcgttttgacatacgaattctcgacctcgatgttcggccagcccgtcacacgccagatggacccaacacaacggcaatcctggccacaactatcgtcacatcccaatgcagaaccgctttcggctgataacccgactgacgcaccagccgtgaccggcgataaccgcaacgcctacgtaagcgactatatccgatacctaacagatatctcggtagagccacaattcgcggccttcgagcgtggtttcaaaacatgtctacaccccaaatcactctcacttctcacacctaccctgctgcagtccatcgtcgagggtacacaggagatcaatatctcggagctgaagagagcagtgcgatacgtgggctgggacgcgggacacagcacgattaaagatttctggtccgtggttaagacctacgacgagagaatgaggaggaaactgctcgagtttgtcacggcgtcggaccgggttcccgtcggcggtgtgcagaacgtgcagtttgtgatccagaggaatgggagtgaggatgaggggggccacttgccgacggcttatacgtgttatggtacgcttttgttgccggagtatccggataaggaggtccttagggagagactgggtatggctattgagaatgcgcaggggttcgggtttgcgtaagagatgagaatctacatagggaggctggttgcgcgtatggcgtgcgcttgtacagattaggagatgagaagggctgtgagagatggggggtttgagtatattgagcaaggagcgtgtaggcattgcattgcattgtgtctggttaatttatggattcttgactgtaactggcgtgttgggatttgagtttgacttttgacttttagaggtgttgcatgtatcttcgccaagtacttacttcggctccgagcacgaagaacagaagtgagagggaacttctcctcccaactacccggaagaacatcttggagatgacactacaaagatgatgaaatggtggtctgtggcatctgtcaagcagtatcatttacgtacatgccatatagcggagatttcgttaaggttgtcaggcctaatctagagttgatgcatctcgcaggtagacagacatatgggcttcgcggacacgactacctagactgtcggagatcttgatcatctctaggtgcggtagatagtatttatctgtaggccaagatatgatatgtcga

SEQ ID NO: 36616 - DNA, 915 bp, Muscodor strobelii
  misc_feature: SGI cDNA ID NO. 572694
  misc_feature: Encodes the peptide sequence at SEQ ID NO 36617
atgagacatacatggttgctgtcccttccactaacagcctccgccgcgtggttatccataccttctgcaacggctgatgggtatggtggcatctcaggccccggcccatctcctacggccgctccccctcggtatgcagccgagcagctgctcgcgcgtgactttcacctaggtcacgatacttgtggctttggtggttctgacaatccatatgtcacatatgcgtgttaccagtccataggaacatgcgagcagatgggaagctatctaggctgttgcacgagtaacctagcatcatcggaaacggttcttacagcgctcgactgcagtgtggcgagttctccacgagaattcgaacttctagcatcgccgtattctcttgccacttcgtctccttcggcaacgggcggcgatgtgtcggattcgaccataacctcggactcggcaacgaacacaggatctgtaacctcttccggggtgacatcatcctcggcgggaacacagtcaggcgcctctagcgggtccaattcaacttcggactcggactcgaactcaggcgcaaaaacagcgtcagtgctaggcggagcaatagccggcagcgtcgtgggcggtcttggggttatcggcgtggtcgttcttggcatattttatatccggaagcgctacaacacgccccaagctcctccagcttcaccaccacctgcagtcaccggacccgctgagcttggcagtaatgggacaggaggatatcccggtcctcaactacatctctggcaaggcccaggctatgccgaagtaccgcagaacgatcgcatggagctgcataagtacccgtctccgtcaccatcgccagtcgtcgaagcaccttccaacccagtcatcggatcgcaggagaatagagcggaactgcgctga

SEQ ID NO: 36617 - protein, 304 aa, Muscodor strobelii
  misc_feature: SGI Peptide ID NO. 572694
  misc_feature (36)..(233): NCBI GI: 256734580 Blast Desc: NECHADRAFT_98851 [Nectria haematococca mpVI 77-13-4]
MRHTWLLSLPLTASAAWLSIPSATADGYGGISGPGPSPTAAPPRYAAEQLLARDFHLGHDTCGFGGSDNPYVTYACYQSIGTCEQMGSYLGCCTSNLASSETVLTALDCSVASSPREFELLASPYSLATSSPSATGGDVSDSTITSDSATNTGSVTSSGVTSSSAGTQSGASSGSNSTSDSDSNSGAKTASVLGGAIAGSVVGGLGVIGVVVLGIFYIRKRYNTPQAPPASPPPAVTGPAELGSNGTGGYPGPQLHLWQGPGYAEVPQNDRMELHKYPSPSPSPVVEAPSNPVIGSQENRAELR

SEQ ID NO: 36618 - DNA, 1419 bp, Muscodor strobelii
  misc_feature: SGI EST ID NO. CUFF.87356.0
  misc_feature: Variant of the nucleotide sequence at SEQ ID NO 36616
ccatcgccccatcagatttccacatcgtcatcctaaactggatctggaagattgttccttcgtgattgattagtcgaattagtcgcgactacttcttcattatacgcttctgagactggcaagctgagccatcatggcccactctcccggaacccgtctgtctgctgtcttcgtgatcgtcatgtttttacactcatacattcttctctgcttgtctgcaggatagcgatattctggtatcagatattcgcatctaattacacactgcgcgctggaaaatatctacaatgagacatacatggttgctgtcccttccactaacagcctccgccgcgtggttatccataccttctgcaacggctgatgggtatggtggcatctcaggccccggcccatctcctacggccgctccccctcggtatgcagccgagcagctgctcgcgcgtgactttcacctaggtcacgatacttgtggctttggtggttctgacaatccatatgtcacatatgcgtgttaccagtccataggaacatgcgagcagatgggaagctatctaggctgttgcacgagtaacctagcagtatgctctacaacctttcagacgacatgccaggactatacacccggaggggactgtagtgcatactcaaagaccaggtgttgtgatagttacgctccatattgcatttcgtggttgctcacgtcatcggaaacggttcttacagcgctcgactgcagtgtggcgagttctccacgagaattcgaacttctagcatcgccgtattctcttgccacttcgtctccttcggcaacgggcggcgatgtgtcggattcgaccataacctcggactcggcaacgaacacaggatctgtaacctcttccggggtgacatcatcctcggcgggaacacagtcaggcgcctctagcgggtccaattcaacttcggactcggactcgaactcaggcgcaaaaacagcgtcagtgctaggcggagcaatagccggcagcgtcgtgggcggtcttggggttatcggcgtggtcgttcttggcatattttatatccggaagcgctacaacacgccccaagctcctccagcttcaccaccacctgcagtcaccggacccgctgagcttggcagtaatgggacaggaggatatcccggtcctcaactacatctctggcaaggcccaggctatgccgaagtaccgcagaacgatcgcatggagctgcataagtacccgtctccgtcaccatcgccagtcgtcgaagcaccttccaacccagtcatcggatcgcaggagaatagagcggaactgcgctgatgtgatgaagggtaataggtggatcgggatctgtatataagataaaacaccaatacatagcatgtcaatttcaatgaataattgactaccgttc

SEQ ID NO: 36619 - DNA, 3216 bp, Muscodor strobelii
  misc_feature: SGI cDNA ID NO. 572695
  misc_feature: Reduced expression when VOC is produced
  misc_feature: Encodes the peptide sequence at SEQ ID NO 36620
atggaccagaacaagctcgttgagctgctccaggcatgccagattcctgacacccagaaggtcaaggccgccaccgccgagctgcgcaagaacttcttccctcacccagactctctgcttggcctgctccatgtcattgtctcccaccctgagccgacggtgcgcatgctggctgctgtccaagccttgcgcctcgtccccaagcactggcaaaagatcgatgcttcccagaagcccgccgtccgcacccagcttctccagaccatcgtcaacgagcaggacgctaagtgccgacacggccagtcgcgcgtcatcgccgccctcgctactctcgatttcgagaccaacgaatgggccgacctgctgccaaacgtcacccagcttgccacctctgacaacgtagctcatcgcgaggttggctcttacatcatcttcagcttgctcgaggccaaccccacctacttcgaggaccatctcgtcaagctgttcgagctcttcgccaagaccatccgcgacccccagagtcgcgatgtccgcgtcaataccatgatgtccatcagcgctgccctcatgttggtagacgtcgatgaggacgagcagaccctgaacgctgttcaggagtttgttcccgccatggttgatgttctaaaggatgccgtcaccgcccaggacgatgagcgtatccagcaagccttcgaggtcttccagtccttcctcgcctacgagtcggctctcatctccaagtacttcaaggacctcgtccagttcatgctggacctagccgctaacacggccgccgacgatgaagtccgtagtcaagcattggccttcttggcacagtgcgtcagataccgccgcatgaagatccagggtattccggatatgggtactcaactcatgaggaagagtcttgccattgtcgccgaaatggaagaggatgacgaagaggacgacaccactcctgccagatcagctttgattctcattgaccaactctcgaccgatctccctccacgacaggtcattgtccccttgctggaggaattcccccaatatgctagttcgggcaatgctggccatcgccgtgctggtattctggctctgggaacctgcgctgagggtgccccggagtttgtttccacacagatcggatcccttatgcccgccgtgctccagctcctgcaagatcccgagagaagcgttcgtcactccgcccttattggtcttatccgtctcggcgaggatctttctgacagtatggctgctcaccatgacgccattttgaccgcccttgtccttaatctggacgctgccgccaacgaccaaaatgacgagaagaatgctgagatcattcgctcagtctgcggagtaatggactctttggccgatggtcttggtcaggatatcatggccaagtatggcgagactatgattcaccgcattggaaacttcctatcccaccccgacttcaaggtcaaggctacagcagctggtgctcttggtgctatcgctggatccatcaagagcgctttcaagccctacctcaaccagattatggaggctatgtcgacatacatcctagctgagagtggagaggaagagctagctctgcgcagtgccgtctgcgatgctatgggacgcattgccgcaggtgttggtgctcaggacttcagcccttacgtcatgccgctgttggtagcaagtgagaaggctttgcacctggagaacgcccgtctccgagagacgaccttcatattatggagtcagctcgctactgtctatgatggtgacctgggcgattccttggccggcattttcaagggacttttcgactgccttgaactcgatgaggaagaagtcgactttgatctcgctgaagaccaagatggtctggtcgatgaagaagtcatcattcagggcaagaaggctctcgccaaggccgctgctgatggcgacgatgaagatgagatggatgatgacgatgatgatgactgggatgaccttgtgggtgtctcagcccaggctctggagaaggaaatcgctctagaggtcctcggcgatgtcatttatgcttccaaggagaaaagcgcgccttacatcgagaaagccgttgagctggtgaccccttttgctgagcactcttatgaagggtgccgtaagacagccattggaacgttgtggcgaacctacgcctgcatttgggaggtgatggagaagcagactggcaagaagtgggaagctggcttgcctttgaagttcgagatcgatagcaatattgccaaattgggtgaaattgttaccgctgctacgatgcaagtctgggcagatgagggcgatcgggatgttgttacggagatcaaccgatctgtcgcctctaccctgaaggccactggcccagcaatccttggacagaaggacatgatgcagcagatcatcactgtcatcgcatccatcaccactcgagcgcatccttgccaacaggatcttggcgacgatgatgctcaagaggatgttgaaggtgggtctgaatgggactggctcatcattgacaccgctcttgatgttctcattggccttgcatgcgccttgggcgagcagttcgccgagatctggaaagtcttcgagaagcccattgtcaagtttgtcagctcgaacgaacacattgagcgatccacagccgttggtgtgattgctgagtgtgttgcctacatgtcctctgctgtaacaccttacaccaagactttactacctcccctattgcatcgtctgtcagacgaggatcaggagactcggtccaacacagcttacgcagttggtcagcttgtgttgcactcacaagacgagaagacctatctccccagctttcctcagattttgcagaagctggagccacttctccacatccaagccgccagattgcaggataatgcggcaggttgtctgtgtcgcatgattcaagccaatgccgacaaggtccctatcgccgaagtactgcctgctttggttgaccttctgcctttgaaggaagattacgaggagaacaaacctgtctacaactgtctgcataagctttattccatgtcaaaccctaccgtacaagagcttacgccacggctgcttcccatcttccaacaggtcctcagcccacccgaggaccagctggatgatgaaacgaggcaaattgtacagcagatggcctcgcacctatccaagtaa

SEQ ID NO: 36620 - protein, 1071 aa, Muscodor strobelii
  misc_feature: SGI Peptide ID NO. 572695
  misc_feature (909)..(945): Pfam Id: PF02985 Pfam Desc: HEAT repeat
  misc_feature (380)..(416): Pfam Id: PF02985 Pfam Desc: HEAT repeat
  misc_feature (35)..(91): Pfam Id: PF03810 Pfam Desc: Importin-beta N-terminal domain
  misc_feature (1)..(1064): NCBI GI: 116203199 Blast Desc: CHGG_09484 [Chaetomium globosum CBS 148.51] gi|88178002|gb|EAQ85470.1| CHGG_09484 [Chaetomium globosum CBS 148.51]
  misc_feature (90)..(1071): NCBI GI: 171682822 Blast Desc: protein product [Podospora anserina] gi|170941370|emb|CAP67020.1| protein product [Podospora anserina]
  misc_feature (1)..(1070): NCBI GI: 261361544 Blast Desc: karyopherin Kap123 [Verticillium albo-atrum VaMs.102]
  misc_feature (1)..(1063): NCBI GI: 156060425 Blast Desc: SS1G_02351 [Sclerotinia sclerotiorum 1980] gi|154699759|gb|EDN99497.1| SS1G_02351 [Sclerotinia sclerotiorum 1980]
  misc_feature (1)..(1069): NCBI GI: 145603711 Blast Desc: MGG_05869 [Magnaporthe grisea 70-15] gi|145011884|gb|EDJ96540.1| MGG_05869 [Magnaporthe grisea 70-15]
  misc_feature (1)..(1055): NCBI GI: 154311965 Blast Desc: BC1G_06016 [Botryotinia fuckeliana B05.10] gi|150850666|gb|EDN25859.1| BC1G_06016 [Botryotinia fuckeliana B05.10]
  misc_feature (1)..(1071): NCBI GI: 256725016 Blast Desc: [Nectria haematococca mpVI 77-13-4]
  misc_feature (1)..(1071): NCBI GI: 46110703 Blast Desc: FG02233.1 [Gibberella zeae PH-1]
  misc_feature (1)..(1071): NCBI GI: 169619976 Blast Desc: SNOG_13188 [Phaeosphaeria nodorum SN15] gi|111058395|gb|EAT79515.1| SNOG_13188 [Phaeosphaeria nodorum SN15]
  misc_feature (1)..(1071): NCBI GI: 189201355 Blast Desc: karyopherin Kap123 [Pyrenophora tritici-repentis Pt-1C-BFP] gi|187984113|gb|EDU49601.1| karyopherin Kap123 [Pyrenophora tritici-repentis Pt-1C-BFP]
  misc_feature: Useful for introducing or modulating the production of volatile compounds
MDQNKLVELLQACQIPDTQKVKAATAELRKNFFPHPDSLLGLLHVIVSHPEPTVRMLAAVQALRLVPKHWQKIDASQKPAVRTQLLQTIVNEQDAKCRHGQSRVIAALATLDFETNEWADLLPNVTQLATSDNVAHREVGSYIIFSLLEANPTYFEDHLVKLFELFAKTIRDPQSRDVRVNTMMSISAALMLVDVDEDEQTLNAVQEFVPAMVDVLKDAVTAQDDERIQQAFEVFQSFLAYESALISKYFKDLVQFMLDLAANTAADDEVRSQALAFLAQCVRYRRMKIQGIPDMGTQLMRKSLAIVAEMEEDDEEDDTTPARSALILIDQLSTDLPPRQVIVPLLEEFPQYASSGNAGHRRAGILALGTCAEGAPEFVSTQIGSLMPAVLQLLQDPERSVRHSALIGLIRLGEDLSDSMAAHHDAILTALVLNLDAAANDQNDEKNAEIIRSVCGVMDSLADGLGQDIMAKYGETMIHRIGNFLSHPDFKVKATAAGALGAIAGSIKSAFKPYLNQIMEAMSTYILAESGEEELALRSAVCDAMGRIAAGVGAQDFSPYVMPLLVASEKALHLENARLRETTFILWSQLATVYDGDLGDSLAGIFKGLFDCLELDEEEVDFDLAEDQDGLVDEEVIIQGKKALAKAAADGDDEDEMDDDDDDDWDDLVGVSAQALEKEIALEVLGDVIYASKEKSAPYIEKAVELVTPFAEHSYEGCRKTAIGTLWRTYACIWEVMEKQTGKKWEAGLPLKFEIDSNIAKLGEIVTAATMQVWADEGDRDVVTEINRSVASTLKATGPAILGQKDMMQQIITVIASITTRAHPCQQDLGDDDAQEDVEGGSEWDWLIIDTALDVLIGLACALGEQFAEIWKVFEKPIVKFVSSNEHIERSTAVGVIAECVAYMSSAVTPYTKTLLPPLLHRLSDEDQETRSNTAYAVGQLVLHSQDEKTYLPSFPQILQKLEPLLHIQAARLQDNAAGCLCRMIQANADKVPIAEVLPALVDLLPLKEDYEENKPVYNCLHKLYSMSNPTVQELTPRLLPIFQQVLSPPEDQLDDETRQIVQQMASHLSK

SEQ ID NO: 36621 - DNA, 4108 bp, Muscodor strobelii
  misc_feature: SGI EST ID NO. CUFF.87364.0
  misc_feature: Variant of the nucleotide sequence at SEQ ID NO 36619
gcgggtttgacagctgcattgatctctgctaatggaagaatctttttacacttttgcggctggcagcagctgttcgtctggagatgattcggaagaactggggatctctgaccgaggagagatggctcttatcttatcgtgaaatttaagctactcagggacggcgccaaattattcgcaggcagcccctcggcgaagggactcgacatgggtggtgttgctaccccaccatgaaattgcgtaccaaaatctttttttccctttcacgtcccctccccccttctctcttcattcgaccgtttccaagtctcgatctgtgctctattcgagtgatcggatcgttactggaattatagtttcttctggggttcctattgtctctcgacgagacagcaccctcgtccgccatggaccagaacaagctcgttgagctgctccaggcatgccagattcctgacacccagaaggtcaaggccgccaccgccgagctgcgcaagaacttcttccctcacccagactctctgcttggcctgctccatgtcattgtctcccaccctgagccgacggtgcgcatgctggctgctgtccaagccttgcgcctcgtccccaagcactggcaaaagatcgatgcttcccagaagcccgccgtccgcacccagcttctccagaccatcgtcaacgagcaggacgctaagtgccgacacggccagtcgcgcgtcatcgccgccctcgctactctcgatttcgagaccaacgaatgggccgacctgctgccaaacgtcacccagcttgccacctctgacaacgtagctcatcgcgaggttggctcttacatcatcttcagcttgctcgaggccaaccccacctacttcgaggaccatctcgtcaagctgttcgagctcttcgccaagaccatccgcgacccccagagtcgcgatgtccgcgtcaataccatgatgtccatcagcgctgccctcatgttggtagacgtcgatgaggacgagcagaccctgaacgctgttcaggagtttgttcccgccatggttgatgttctaaaggatgccgtcaccgcccaggacgatgagcgtatccagcaagccttcgaggtcttccagtccttcctcgcctacgagtcggctctcatctccaagtacttcaaggacctcgtccagttcatgctggacctagccgctaacacggccgccgacgatgaagtccgtagtcaagcattggccttcttggcacagtgcgtcagataccgccgcatgaagatccagggtattccggatatgggtactcaactcatgaggaagagtcttgccattgtcgccgaaatggaagaggatgacgaagaggacgacaccactcctgccagatcagctttgattctcattgaccaactctcgaccgatctccctccacgacaggtcattgtccccttgctggaggaattcccccaatatgctagttcgggcaatgctggccatcgccgtgctggtattctggctctgggaacctgcgctgagggtgccccggagtttgtttccacacagatcggatcccttatgcccgccgtgctccagctcctgcaagatcccgagagaagcgttcgtcactccgcccttattggtcttatccgtctcggcgaggatctttctgacagtatggctgctcaccatgacgccattttgaccgcccttgtccttaatctggacgctgccgccaacgaccaaaatgacgagaagaatgctgagatcattcgctcagtctgcggagtaatggactctttggccgatggtcttggtcaggatatcatggccaagtatggcgagactatgattcaccgcattggaaacttcctatcccaccccgacttcaaggtcaaggctacagcagctggtgctcttggtgctatcgctggatccatcaagagcgctttcaagccctacctcaaccagattatggaggctatgtcgacatacatcctagctgagagtggagaggaagagctagctctgcgcagtgccgtctgcgatgctatgggacgcattgccgcaggtgttggtgctcaggacttcagcccttacgtcatgccgctgttggtagcaagtgagaaggctttgcacctggagaacgcccgtctccgagagacgaccttcatattatggagtcagctcgctactgtctatgatggtgacctgggcgattccttggccggcattttcaagggacttttcgactgccttgaactcgatgaggaagaagtcgactttgatctcgctgaagaccaagatggtctggtcgatgaagaagtcatcattcagggcaagaaggctctcgccaaggccgctgctgatggcgacgatgaagatgagatggatgatgacgatgatgatgactgggatgaccttgtgggtgtctcagcccaggctctggagaaggaaatcgctctagaggtcctcggcgatgtcatttatgcttccaaggagaaaagcgcgccttacatcgagaaagccgttgagctggtgaccccttttgctgagcactcttatgaagggtgccgtaagacagccattggaacgttgtggcgaacctacgcctgcatttgggaggtgatggagaagcagactggcaagaagtgggaagctggcttgcctttgaagttcgagatcgatagcaatattgccaaattgggtgaaattgttaccgctgctacgatgcaagtctgggcagatgagggcgatcgggatgttgttacggagatcaaccgatctgtcgcctctaccctgaaggccactggcccagcaatccttggacagaaggacatgatgcagcagatcatcactgtcatcgcatccatcaccactcgagcgcatccttgccaacaggatcttggcgacgatgatgctcaagaggatgttgaaggtgggtctgaatgggactggctcatcattgacaccgctcttgatgttctcattggccttgcatgcgccttgggcgagcagttcgccgagatctggaaagtcttcgagaagcccattgtcaagtttgtcagctcgaacgaacacattgagcgatccacagccgttggtgtgattgctgagtgtgttgcctacatgtcctctgctgtaacaccttacaccaagactttactacctcccctattgcatcgtctgtcagacgaggatcaggagactcggtccaacacagcttacgcagttggtcagcttgtgttgcactcacaagacgagaagacctatctccccagctttcctcagattttgcagaagctggagccacttctccacatccaagccgccagattgcaggataatgcggcaggttgtctgtgtcgcatgattcaagccaatgccgacaaggtccctatcgccgaagtactgcctgctttggttgaccttctgcctttgaaggaagattacgaggagaacaaacctgtctacaactgtctgcataagctttattccatgtcaaaccctaccgtacaagagcttacgccacggctgcttcccatcttccaacaggtcctcagcccacccgaggaccagctggatgatgaaacgaggcaaattgtacagcagatggcctcgcacctatccaagtaaaatcatcgtcggtttatgaaatgagcctggcgaagaattcttgatagaattcttaattttttccatgtctatcacaaggaagcgacgtggaaaaaatatgagcacgaagtgtatgaatgaatgagctctcggaatggtcggtgaaggtggtaattttgccttcgatacatagatgattccccatggataaatagatccaacacaagtgagatatgagattatcactttacccgacatcattgccatgtcgatgccgaatgagaattaaacaagttgcctaatagctgcctcgtcttatgtgttgaatattgaatactgaaaacaatcaatgccgaacccgaccaaactcgatcgttcatggccagcacaacatttcatgacacagcaatcttcgatgagcagtttcgtgtgatcacctccctacaagtcacacgaatcgaatgtggcctatttgctttgagttcgctggaagtaggaattacgcg

SEQ ID NO: 36622 - DNA, 960 bp, Muscodor strobelii
  misc_feature: SGI cDNA ID NO. 572696
  misc_feature: Encodes the peptide sequence at SEQ ID NO 36623
atgcagtactctctcgctttggcttcggccctctttggagcagctcttgctgtcccggcctctgatgcctcatccaaatgctcaaaggctttcgatggaactttcgagatcaccgtcaaccacatcacaaaggagaagagaggcgtgcccgcaaagcgagacgtctgtggatccgagggaattcttgttttgactttggaagactctaagctcaaggatgctcaaggccggactggatatatcgcctcgaacttccagtttcagttcgatgcacctcctcaggctggaaccctcgttgacagcggcttcagcgtttgtgaagacaacgttttggctctaggtggttcgcagactttctaccagtgcaagtcgggtaccttttataacctgtacaacaagaactgggccgatcagtgcgagcccgtcagcatcattgctgttgcttgcggtaccgacgatgtagtatcgcagggaccggatggacagatcgtcgggaccactgttgttcagaccaccatcgtgacggctctttcggatggtcagccccaggttgtcaccaccgtcgtgccatccactatctacaccacagtcgttcccgtgagcgagtattccgatggccaggttcaggtcacaccaaccggcccggctccgtcgtcctcgcccgcggagtcgaccccctcctcatccgtcccaccagctacctacccgagcgccaccagcgccagtgttccctctaccagcgcagtgccttccacatccggtggagtgtcgactacggtcgctagctcgtctagcgcgcccgttaccagcagccctagcagctctagcgcccctgcatctgaatcatcatctaccgctgctcccacgacctccgctcccgccagcggctcgtcacacgttgcggctggctctatgggtgctcttgtgctcggcatgctggtggcattcgtctgcttgtaa

SEQ ID NO: 36623 - protein, 319 aa, Muscodor strobelii
  misc_feature: SGI Peptide ID NO. 572696
  misc_feature (4)..(229): NCBI GI: 145611987 Blast Desc: MGG_07997 [Magnaporthe grisea 70-15] gi|145019231|gb|EDK03459.1| MGG_07997 [Magnaporthe grisea 70-15]
  misc_feature (19)..(231): NCBI GI: 85086199 Blast Desc: NCU04033 [Neurospora crassa OR74A] gi|28918742|gb|EAA28412.1| [Neurospora crassa OR74A] gi|39979222|emb|CAE85592.1| related to covalently-linked cell
  misc_feature (1)..(213): NCBI GI: 46110583 Blast Desc: FG02173.1 [Gibberella zeae PH-1]
  misc_feature (19)..(208): NCBI GI: 171682752 Blast Desc: protein product [Podospora anserina] gi|170941335|emb|CAP66985.1| protein product [Podospora anserina]
  misc_feature (1)..(187): NCBI GI: 116203005 Blast Desc: CHGG_09387 [Chaetomium globosum CBS 148.51] gi|88177905|gb|EAQ85373.1| CHGG_09387 [Chaetomium globosum CBS 148.51]
  misc_feature (5)..(216): NCBI GI: 256724892 Blast Desc: NECHADRAFT_34750 [Nectria haematococca mpVI 77-13-4]
  misc_feature (25)..(319): NCBI GI: 15421148 Blast Desc: covalently-linked cell wall protein [Blumeria graminis]
  misc_feature (15)..(221): NCBI GI: 154323079 Blast Desc: BC1G_00882 [Botryotinia fuckeliana B05.10] gi|150848216|gb|EDN23409.1| BC1G_00882 [Botryotinia fuckeliana B05.10]
  misc_feature (15)..(272): NCBI GI: 156064533 Blast Desc: SS1G_00274 [Sclerotinia sclerotiorum 1980] gi|154691136|gb|EDN90874.1| SS1G_00274 [Sclerotinia sclerotiorum 1980]
  misc_feature (27)..(313): NCBI GI: 169609402 Blast Desc: SNOG_07793 [Phaeosphaeria nodorum SN15] gi|111064139|gb|EAT85259.1| SNOG_07793 [Phaeosphaeria nodorum SN15]
MQYSLALASALFGAALAVPASDASSKCSKAFDGTFEITVNHITKEKRGVPAKRDVCGSEGILVLTLEDSKLKDAQGRTGYIASNFQFQFDAPPQAGTLVDSGFSVCEDNVLALGGSQTFYQCKSGTFYNLYNKNWADQCEPVSIIAVACGTDDVVSQGPDGQIVGTTVVQTTIVTALSDGQPQVVTTVVPSTIYTTVVPVSEYSDGQVQVTPTGPAPSSSPAESTPSSSVPPATYPSATSASVPSTSAVPSTSGGVSTTVASSSSAPVTSSPSSSSAPASESSSTAAPTTSAPASGSSHVAAGSMGALVLGMLVAFVCL

SEQ ID NO: 36624 - DNA, 1785 bp, Muscodor strobelii
  misc_feature: SGI EST ID NO. CUFF.87370.0
  misc_feature: Variant of the nucleotide sequence at SEQ ID NO 36622
atctcgcctggttgtttgcgagatgtatgtatcatagtagtactccttcgagggtgggcgggcaagatagcaattcggcaagtctgcagacagtgatgggcaaatgatgaacgacacgcagggaaggaaatcctggtagacaggatcagcaacaataccgtacgtacgcgtactcagtacctttgtctctgaatctccgttactctactggtctgcatagactgatctacttggacttgattctgtgtctccttaaaagttggtcccccccaactcagttcctgtttttccttctcccttctcagcctactgaaaaaccattgaagtattccgtcgcaattgtgaaagagattgggttgagtctgtcactcgcttaccacctcacggtatatcccatcgttgtgttatcgcactatccaatcgctacgactcccgcggctcaaacgatttttcaatcaacataatgcagtactctctcgctttggcttcggccctctttggagcagctcttgctgtcccggcctctgatgcctcatccaaatgctcaaaggctttcgatggaactttcgagatcaccgtcaaccacatcacaaaggagaagagaggcgtgcccgcaaagcgagacgtctgtggatccgagggaattcttgttttgactttggaagactctaagctcaaggatgctcaaggccggactggatatatcgcctcgaacttccagtttcagttcgatgcacctcctcaggctggaaccctcgttgacagcggcttcagcgtttgtgaagacaacgttttggctctaggtggttcgcagactttctaccagtgcaagtcgggtaccttttataacctgtacaacaagaactgggccgatcagtgcgagcccgtcagcatcattgctgttgcttgcggtaccgacgatgtagtatcgcagggaccggatggacagatcgtcgggaccactgttgttcagaccaccatcgtgacggctctttcggatggtcagccccaggttgtcaccaccgtcgtgccatccactatctacaccacagtcgttcccgtgagcgagtattccgatggccaggttcaggtcacaccaaccggcccggctccgtcgtcctcgcccgcggagtcgaccccctcctcatccgtcccaccagctacctacccgagcgccaccagcgccagtgttccctctaccagcgcagtgccttccacatccggtggagtgtcgactacggtcgctagctcgtctagcgcgcccgttaccagcagccctagcagctctagcgcccctgcatctgaatcatcatctaccgctgctcccacgacctccgctcccgccagcggctcgtcacacgttgcggctggctctatgggtgctcttgtgctcggcatgctggtggcattcgtctgcttgtaaataaagccgtattggcgcccagagcaaatggttccgcccaatatctcttcgtctcactttcaggggcttaaatcatagcgaatcttggtcagaagcgaaggcacgactaatgagatggaatgaaaaagacgagaaagatgagtgggaaggaaataatgtcgcatccgaatggatgtataatagtaatttgggaaagggctggatgaatgagggacttcattctcggcgtatggcaagcattgctgtttcgcacattgtcatctatagttagctatacatatatatatgaatgctattgaatagtcgaataatggaatatgagtttagtacctcgcgtaaataattggaaccggtcaatcgcg

SEQ ID NO: 36625 - DNA, 876 bp, Muscodor strobelii
  misc_feature: SGI cDNA ID NO. 572697
  misc_feature: Encodes the peptide sequence at SEQ ID NO 36626
atgtcggaacactggaagtcgaccccaaattactggtgcaagcactgtagcaccttcgtccgcgacaccaagctcgagcgcaagaaccatgaagccactgcaaagcaccagtctgccctcaagcgcttcctgcgggagctgcatcggggccatgagaacgaggaacgagagaaagaacgcgcaaggcgcgaaatcgaccgtctcaacggcatcaagcccacatacccctccggagctggcccctccaaagcctccggctcgtcctcatcatcgcagaccgcaaccactgctcagcgccatgcccaatgggaacagcttgccgatatgggcatcgatgtgcccactgagttgcgcggcgatatggctatggcaggcgagtggactgtcacgaacacacgcataatcaacgacgcgcccgaaaccgatgacccagattccaaggacggaaatatagatgccgttgccgtcggtgtccggaagcgagcaaagcccgaggatgaagacgagaaagacgaagaagaagaaaaagctgcactccagggcctgttcaagaaaccaaagaaatggggtcggaatacgagaggagcaccggagaatgatgctgagttggatgcattactaagtgcgcccttatcgaggccgctaaagaaagaggaagaggaagaggtagtcaagaccgcacccaaagaggagccgtctgacggcatcaagaaggaagagcctgacgctgaggactctcagtcactatccaatattgcccacgcgaaagacgtcacagcgagcgaggcgcccatcaagcaagagcatggagccgaacctgaagcttctgctgtagtcttcaaaaagcggaaaccgaagaatatccgtcagaaatga

SEQ ID NO: 36626 - protein, 291 aa, Muscodor strobelii
  misc_feature: SGI Peptide ID NO. 572697
  misc_feature (8)..(44): Pfam Id: PF06220 Pfam Desc: U1 zinc finger
  misc_feature (1)..(291): NCBI GI: 46110697 Blast Desc: FG02230.1 [Gibberella zeae PH-1]
  misc_feature (1)..(291): NCBI GI: 171682750 Blast Desc: protein product [Podospora anserina] gi|170941334|emb|CAP66984.1| protein product [Podospora anserina]
  misc_feature (1)..(291): NCBI GI: 154323266 Blast Desc: BC1G_00032 [Botryotinia fuckeliana B05.10] gi|150842261|gb|EDN17454.1| BC1G_00032 [Botryotinia fuckeliana B05.10]
  misc_feature (1)..(291): NCBI GI: 156058009 Blast Desc: SS1G_04736 [Sclerotinia sclerotiorum 1980] gi|154702521|gb|EDO02260.1| SS1G_04736 [Sclerotinia sclerotiorum 1980]
  misc_feature (1)..(291): NCBI GI: 39945756 Blast Desc: MGG_07998 [Magnaporthe grisea 70-15] gi|145019232|gb|EDK03460.1| MGG_07998 [Magnaporthe grisea 70-15]
  misc_feature (1)..(291): NCBI GI: 256724911 Blast Desc: NECHADRAFT_34432 [Nectria haematococca mpVI 77-13-4]
  misc_feature (1)..(289): NCBI GI: 261191809 Blast Desc: U1 zinc finger domain-containing protein [Ajellomyces dermatitidis SLH14081] gi|239589628|gb|EEQ72271.1| U1 zinc finger domain-containing protein [Ajellomyces dermatitidis SLH14081] U1
  misc_feature (1)..(189): NCBI GI: 261361538 Blast Desc: conserved [Verticillium albo-atrum VaMs.102]
  misc_feature (1)..(284): NCBI GI: 169607361 Blast Desc: SNOG_06737 [Phaeosphaeria nodorum SN15] gi|111064268|gb|EAT85388.1| SNOG_06737 [Phaeosphaeria nodorum SN15]
  misc_feature (1)..(291): NCBI GI: 85086195 Blast Desc: NCU04032 [Neurospora crassa OR74A] gi|28918741|gb|EAA28411.1| [Neurospora crassa OR74A] gi|39979221|emb|CAE85591.1| conserved [Neurospora crassa]
MSEHWKSTPNYWCKHCSTFVRDTKLERKNHEATAKHQSALKRFLRELHRGHENEEREKERARREIDRLNGIKPTYPSGAGPSKASGSSSSSQTATTAQRHAQWEQLADMGIDVPTELRGDMAMAGEWTVTNTRIINDAPETDDPDSKDGNIDAVAVGVRKRAKPEDEDEKDEEEEKAALQGLFKKPKKWGRNTRGAPENDAELDALLSAPLSRPLKKEEEEEVVKTAPKEEPSDGIKKEEPDAEDSQSLSNIAHAKDVTASEAPIKQEHGAEPEASAVVFKKRKPKNIRQK

SEQ ID NO: 36627 - DNA, 1543 bp, Muscodor strobelii
  misc_feature: SGI EST ID NO. CUFF.87376.0
  misc_feature: Variant of the nucleotide sequence at SEQ ID NO 36625
ttgaatgcgacctgtaacttccaagttgcgatccgaagttccacgttaagagtcacattcccacttccacaacttattcctaccgttcctttctgccgtcaaagctcacgcctcacgtctcacgatagctttagcagaagcgaacagcgaagatgtcggaacactggaagtcgaccccaaattactggtgcaagcactgtagcaccttcgtccgcgacaccaagctcgagcgcaagaaccatgaagccactgcaaagcaccagtctgccctcaagcgcttcctgcgggagctgcatcggggccatgagaacgaggaacgagagaaagaacgcgcaaggcgcgaaatcgaccgtctcaacggcatcaagcccacatacccctccggagctggcccctccaaagcctccggctcgtcctcatcatcgcagaccgcaaccactgctcagcgccatgcccaatgggaacagcttgccgatatgggcatcgatgtgcccactgagttgcgcggcgatatggctatggcaggcgagtggactgtcacgaacacacgcataatcaacgacgcgcccgaaaccgatgacccagattccaaggacggaaatatagatgccgttgccgtcggtgtccggaagcgagcaaagcccgaggatgaagacgagaaagacgaagaagaagaaaaagctgcactccagggcctgttcaagaaaccaaagaaatggggtcggaatacgagaggagcaccggagaatgatgctgagttggatgcattactaagtgcgcccttatcgaggccgctaaagaaagaggaagaggaagaggtagtcaagaccgcacccaaagaggagccgtctgacggcatcaagaaggaagagcctgacgctgaggactctcagtcactatccaatattgcccacgcgaaagacgtcacagcgagcgaggcgcccatcaagcaagagcatggagccgaacctgaagcttctgctgtagtcttcaaaaagcggaaaccgaagaatatccgtcagaaatgatgtgcgcatctaatatgcctagacatttgacaacatccatccctctcgagattctgtgaccagactttacggtatcgagctctatcttattgaagttagaataacgagaggccctgaataatccaaccatgagatacggtatgcgagcatgagcgtggcattctgtcttgtttctacgggacacagtatcgctgggaggctagcactacgtgcttacaatgaaatcttcagccttaggacattgaaagatctccgacctttcacaagagccccattgtatctacaaaaacatgcgaccaacaatctccggaggcggatttccccatttcaagctagtctagcccaggtcgcggaataacttgagtgacttctgttgggggccgtttcccgatattgaattctagacctcttcgctgacgccattctgcacaaattactgtgcaatacagcatccgtgaaacatttagcgcagacgaaaatatcctgccaaaacgccaaccatcggctgtgcccgc

SEQ ID NO: 36628 - DNA, 2394 bp, Muscodor strobelii
  misc_feature: SGI cDNA ID NO. 572698
  misc_feature: Encodes the peptide sequence at SEQ ID NO 36629
atggccgaacgggatgacgattggagagacgatccgtccgttacttcgcgacctagtcttcgctctgtctcgaggttgacaagttcgccgtcttttcgatctcagcctcaccgcgccgctagtgacgctgacgctgtatcgctgtctacgctggacgaggatgattttcggtatttcggaattccgtcaacgggaagcgactttcagggcgcgaggactagtgggagattgacatttaacggccagccagagattgtctctggcgacgatgatggagatctgggtgtgagcgccggcatgggaggtgtcaggaaggtacccgatgccacggagcggacactgcataacacccattcccgcggaaattcggggacaacctcaggtccagtatcaccaccaacgccattcgatggaatagtcaccgaatatccttcacctgcgcagaaaaacaatctattcgctccttttaatcgcttcaaaactcgacgaccggaagatgatgagattttactaaatcctgcttcaccaagagcctcgcaatggctcaatgctactccagcgccgccggcataccgggcagctgtgctctcgcggaggaactggaagtggtgggttcagccgtcgatggtgatgtactttttgtttgtattcggtgttcttggtgctgtgggtcatcatctgtactacaacagtttgaacgggaagccggcggatgatcaactgctcaggctgaggtatggtgttgtgctggcttttattgccaaggctggactggtcactgcggttgttgttgcatttaagcagcggatctggtatactatgagaaatagagttctctcggtagaggcactggattcgttgtttgctgcgactgaggactttactgcgttgtttaatatcgaggtttataagcaggctaaagttgctatgttgcttgcggtgtttgtttgggtgacgcctttcttgctcattataacgagtaccactctgaccgtagagctgtctacacgggtggagaatacgtcttgccagggaatcaaaaccctcaatctcactaatgaagaagtagagaactggagagacccaacctacctaaacggtatacaagaagtcacactgtcaatatggaacacaacgatcccgctcgacgaagagcaccctaatttcgacaaggaagaatggtttgactattatacggcgccgaaggaagcatatgtcaatatagcaacattagcagcatacgaccaaaagacgcttatgaagaatggcgcgaatctcgatatatgtggcgcagggtggaattgcacttatactatcaactttacggcaccagcatacagatgcaccaacgtctccagcggtgtgggccctgaggtcaataatctgggtgaccaaaaaccaccggaaggatttacgaccgatctattgatgccttctggcaagtatagttactacgtctatgcctttggttccgaatattcgggccagcagatgaagagcaccacttctggaggaataccaaccgaccctcctccctatcccaagaccttgggagcgtggcggacggagccggtaatctggttcggatactcagaatatgtgggtgaaaactggccgccaccggataataacaaagcagaaggctggaatgaatcattcgttccccacgtcattgcatgtgagaattgggaaacagactatacggtcacctttgatatcaggggtgcagacctgacgacagaggtgacaaatcggactttcttacacaaagtcatcgacacgacatgggaccaaagcgaagacgcaatggacggtacgaacgacaacataacagccttaccatcctcgaattacgtgtatccacacgacgtccgtaaataccgacgcgtatcagccttccactccctaggctgggctctgcgtaatttcatcaacggcacgatagactccacgaaggtctccctacccactgaaaatactcaagccctacaaacaaaactaatagacacatcacgatacttcctacccttccccaacgcaacggagcgactagaaagtctcttcgacgacatgatcctctcgatgttctccaagccagaattcctcgccgtcgtctgggcgtcggaccccagcgctaagagcggactaggaaagggagatgagtcgactatgtatccgtgcataagaagccaaagccagaacgtattcgattatcacgtgagagatctatgggttgtatacgctttggtcattctacttgggctcgcggggatagaggtcggtcgacatgctgttagagctaatgagggggtgttgagagatacgagatttagtaccattgttgctgccacgcggggcccgggactggataatgttgggcggagcggtgggtaa

SEQ ID NO: 36629 - protein, 797 aa, Muscodor strobelii
  misc_feature: SGI Peptide ID NO. 572698
  misc_feature (160)..(797): NCBI GI: 170940117 Blast Desc: protein product [Podospora anserina]
  misc_feature (244)..(796): NCBI GI: 261361514 Blast Desc: conserved [Verticillium albo-atrum VaMs.102]
  misc_feature (195)..(793): NCBI GI: 39967501 Blast Desc: MGG_01996 [Magnaporthe grisea 70-15] gi|145012862|gb|EDJ97503.1| MGG_01996 [Magnaporthe grisea 70-15]
  misc_feature (198)..(792): NCBI GI: 256725671 Blast Desc: NECHADRAFT_42939 [Nectria haematococca mpVI 77-13-4]
  misc_feature (201)..(792): NCBI GI: 46111615 Blast Desc: FG02689.1 [Gibberella zeae PH-1]
  misc_feature (193)..(790): NCBI GI: 116196690 Blast Desc: CHGG_04943 [Chaetomium globosum CBS 148.51] gi|88180856|gb|EAQ88324.1| CHGG_04943 [Chaetomium globosum CBS 148.51]
  misc_feature (157)..(796): NCBI GI: 256730443 Blast Desc: NECHADRAFT_95095 [Nectria haematococca mpVI 77-13-4]
  misc_feature (211)..(789): NCBI GI: 55823919 Blast Desc: Eqi8 [Fusarium heterosporum]
  misc_feature (179)..(792): NCBI GI: 171676924 Blast Desc: protein product [Podospora anserina] gi|170936529|emb|CAP61189.1| protein product [Podospora anserina]
  misc_feature (346)..(789): NCBI GI: 164424980 Blast Desc: NCU06557 [Neurospora crassa OR74A] gi|157070738|gb|EAA33028.2| [Neurospora crassa OR74A]
MAERDDDWRDDPSVTSRPSLRSVSRLTSSPSFRSQPHRAASDADAVSLSTLDEDDFRYFGIPSTGSDFQGARTSGRLTFNGQPEIVSGDDDGDLGVSAGMGGVRKVPDATERTLHNTHSRGNSGTTSGPVSPPTPFDGIVTEYPSPAQKNNLFAPFNRFKTRRPEDDEILLNPASPRASQWLNATPAPPAYRAAVLSRRNWKWWVQPSMVMYFLFVFGVLGAVGHHLYYNSLNGKPADDQLLRLRYGVVLAFIAKAGLVTAVVVAFKQRIWYTMRNRVLSVEALDSLFAATEDFTALFNIEVYKQAKVAMLLAVFVWVTPFLLIITSTTLTVELSTRVENTSCQGIKTLNLTNEEVENWRDPTYLNGIQEVTLSIWNTTIPLDEEHPNFDKEEWFDYYTAPKEAYVNIATLAAYDQKTLMKNGANLDICGAGWNCTYTINFTAPAYRCTNVSSGVGPEVNNLGDQKPPEGFTTDLLMPSGKYSYYVYAFGSEYSGQQMKSTTSGGIPTDPPPYPKTLGAWRTEPVIWFGYSEYVGENWPPPDNNKAEGWNESFVPHVIACENWETDYTVTFDIRGADLTTEVTNRTFLHKVIDTTWDQSEDAMDGTNDNITALPSSNYVYPHDVRKYRRVSAFHSLGWALRNFINGTIDSTKVSLPTENTQALQTKLIDTSRYFLPFPNATERLESLFDDMILSMFSKPEFLAVVWASDPSAKSGLGKGDESTMYPCIRSQSQNVFDYHVRDLWVVYALVILLGLAGIEVGRHAVRANEGVLRDTRFSTIVAATRGPGLDNVGRSGG

SEQ ID NO: 36630 - DNA, 3124 bp, Muscodor strobelii
  misc_feature: SGI EST ID NO. CUFF.87388.2
  misc_feature: Variant of the nucleotide sequence at SEQ ID NO 36628
ttatcgttgaggctataacccaacaccccgggctgtgccacgctatggttgacaattgcccaatagaacatgcagagagacacagggatacggccaagcatcgcttgcattcaacgaattatgtaaggatgaagagtcccacccgaagatgaccagcgaaaagatgaagatgggtatataggagcaggcacagaaatccgatctgtcagacaccaactcaatcaaactatctcactctcaaacgactaatatctccatcgaatgctaccttgcctctcgcatcttctggactaataaatttgattgactgtcgacgcgcggacacaaagtgcatgttggtgaccagtctgcatgagctgccatgcagctgattggatgcccgccctgtcgatcgtcgaatcagctcccacaccatctaacataggtcttggataggtattcgccaggtgctcctcagctcctcagtattggatcggccagcctcactctgggacttgataatttgcatatctacctaatgggaccgtaaaatggccgaacgggatgacgattggagagacgatccgtccgttacttcgcgacctagtcttcgctctgtctcgaggttgacaagttcgccgtcttttcgatctcagcctcaccgcgccgctagtgacgctgacgctgtatcgctgtctacgctggacgaggatgattttcggtatttcggaattccgtcaacgggaagcgactttcagggcgcgaggactagtgggagattgacatttaacggccagccagagattgtctctggcgacgatgatggagatctgggtgtgagcgccggcatgggaggtgtcaggaaggtacccgatgccacggagcggacactgcataacacccattcccgcggaaattcggggacaacctcaggtccagtatcaccaccaacgccattcgatggaatagtcaccgaatatccttcacctgcgcagaaaaacaatctattcgctccttttaatcgcttcaaaactcgacgaccggaagatgatgagattttactaaatcctgcttcaccaagagcctcgcaatggctcaatgctactccagcgccgccggcataccgggcagctgtgctctcgcggaggaactggaagtggtgggttcagccgtcgatggtgatgtactttttgtttgtattcggtgttcttggtgctgtgggtcatcatctgtactacaacagtttgaacgggaagccggcggatgatcaactgctcaggctgaggtatggtgttgtgctggcttttattgccaaggctggactggtcactgcggttgttgttgcatttaagcagcggatctggtatactatgagaaatagagttctctcggtagaggcactggattcgttgtttgctgcgactgaggactttactgcgttgtttaatatcgaggtttataagcaggctaaagttgctatgttgcttgcggtgtttgtttgggtgacgcctttcttgctcattataacgagtaccactctgaccgtagagctgtctacacgggtggagaatacgtcttgccagggaatcaaaaccctcaatctcactaatgaagaagtagagaactggagagacccaacctacctaaacggtatacaagaagtcacactgtcaatatggaacacaacgatcccgctcgacgaagagcaccctaatttcgacaaggaagaatggtttgactattatacggcgccgaaggaagcatatgtcaatatagcaacattagcagcatacgaccaaaagacgcttatgaagaatggcgcgaatctcgatatatgtggcgcagggtggaattgcacttatactatcaactttacggcaccagcatacagatgcaccaacgtctccagcggtgtgggccctgaggtcaataatctgggtgaccaaaaaccaccggaaggatttacgaccgatctattgatgccttctggcaagtatagttactacgtctatgcctttggttccgaatattcgggccagcagatgaagagcaccacttctggaggaataccaaccgaccctcctccctatcccaagaccttgggagcgtggcggacggagccggtaatctggttcggatactcagaatatgtgggtgaaaactggccgccaccggataataacaaagcagaaggctggaatgaatcattcgttccccacgtcattgcatgtgagaattgggaaacagactatacggtcacctttgatatcaggggtgcagacctgacgacagaggtgacaaatcggactttcttacacaaagtcatcgacacgacatgggaccaaagcgaagacgcaatggacggtacgaacgacaacataacagccttaccatcctcgaattacgtgtatccacacgacgtccgtaaataccgacgcgtatcagccttccactccctaggctgggctctgcgtaatttcatcaacggcacgatagactccacgaaggtctccctacccactgaaaatactcaagccctacaaacaaaactaatagacacatcacgatacttcctacccttccccaacgcaacggagcgactagaaagtctcttcgacgacatgatcctctcgatgttctccaagccagaattcctcgccgtcgtctgggcgtcggaccccagcgctaagagcggactaggaaagggagatgagtcgactatgtatccgtgcataagaagccaaagccagaacgtattcgattatcacgtgagagatctatgggttgtatacgctttggtcattctacttgggctcgcggggatagaggtcggtcgacatgctgttagagctaatgagggggtgttgagagatacgagatttagtaccattgttgctgccacgcggggcccgggactggataatgttgggcggagcggtgggtaatgatgcggatcggttgatcgccgatgaatagaggctatagaggtttttccgagcgtttaatagtttatatttggtgttaggcgtttagcagtatcttggataagtactaggacgaagtgttcgcggagagcgattatgttgtttttactacctttagtaatgataaaacttatttatcaaagagcgatggctctcaaacc

SEQ ID NO: 36631 - DNA, 1482 bp, Muscodor strobelii
  misc_feature: SGI cDNA ID NO. 572699
  misc_feature: Encodes the peptide sequence at SEQ ID NO 36632
atggccgacggcgctcctgctgcatctggcggtgacactggcggcggtggtgcttcacacggtggtgcaccaagcgcctcaggtgctgctcacgaccctgctggtggccatgctggccctgaccaccatgggcagggtggaagcaacggccacgcccacgacggcgactttgccttcaccgagaagaaatccatgccaccacagccttccagacgcaccacagcaacgcccaatcccttcagtcgacggaacacaagcatagacttggacgactacttctccggccctcgagatctcaccaagcactcgaaatggcctctcttcatgcaactccacggcagtatcacccccaagatggtcgttcccctgctcgtcgtgggagcgtgggcctcgatcataacagtggtctcgaaaacggttcctggcgttaacctgggcattgaatcgattctcctgaccatcactggtttcgtcgtcagcatgggtctgtcgttcagaagttcctccgcgtacgagcgctatgcagaagggcggcgttattggagccagctcatccttgctagccaaggtctcggacgagctatctgggtgaatgcaggcgagcgtcccgaccagattcaagaggatatcctcggaaagcttaccgctatgaacctgatagtcgcattcgccgtctctctgaagcacaagctccgattcgaaccctacacccactacgaggacattgtggatctggtcgaccacatcgacactctcgctaaagaagccacccaggacgatgtgatgacaaagaagaagatgggcatcttccacaccgtgggcgagaacctggggctgtcattcgccgcatcgaacccccgtaagatggtgaagcgcagtaagcggcctcttggcaacctgcctctcgagattctctgctatctcactgcctacgccgacgagctcgtcgccaacaaccagctccccgtcggcatgacccagacagcaatctacaatagtattggagcgctgaacgatgctctggttaacaccgaacgtatcctcaacacacctctcccccttgcgtatgccatcgccatctcccaaatcacctggctctacgtattcctgcttccattccagttgtacaaagctctcgggtggataacaatccccgccagcatagtatcctcgttcctcattctgtccatcttcttcattggtcacgagatcgagaacccattcggaacggatgtcaacgatctgccgctcgagcacttctgcgagcaagtcgtcctggacatggagaccatctcatcgcagcccaagattagacctagggatttcatcaagagcgcgagaaataaggtcatgttcccttatagcactagcaactacttctcatgggagacccagagcgagggtgctatccgcgcggctttgaaggagaggccaaatgcaccattcatgaaagtacctactactggcaccgagagtgtctga

SEQ ID NO: 36632 - protein, 493 aa, Muscodor strobelii
  misc_feature: SGI Peptide ID NO. 572699
  misc_feature (97)..(447): Pfam Id: PF05249 Pfam Desc: Uncharacterised protein family (UPF0187)
  misc_feature (345)..(421): Pfam Id: PF05249 Pfam Desc: Uncharacterised protein family (UPF0187)
  misc_feature (154)..(235): Pfam Id: PF05249 Pfam Desc: Uncharacterised protein family (UPF0187)
  misc_feature (42)..(482): NCBI GI: 145615356 Blast Desc: MGG_05525 [Magnaporthe grisea 70-15] gi|145022197|gb|EDK06217.1| MGG_05525 [Magnaporthe grisea 70-15]
  misc_feature (76)..(482): NCBI GI: 171676440 Blast Desc: protein product [Podospora anserina] gi|170936286|emb|CAP60945.1| protein product [Podospora anserina]
  misc_feature (76)..(483): NCBI GI: 116200420 Blast Desc: CHGG_10755 [Chaetomium globosum CBS 148.51] gi|88175469|gb|EAQ82937.1| CHGG_10755 [Chaetomium globosum CBS 148.51]
  misc_feature (76)..(482): NCBI GI: 164422841 Blast Desc: NCU09677 [Neurospora crassa OR74A] gi|157069845|gb|EAA31531.2| NCU09677 [Neurospora crassa OR74A]
  misc_feature (76)..(482): NCBI GI: 28949975 Blast Desc: conserved [Neurospora crassa]
  misc_feature (66)..(482): NCBI GI: 46124395 Blast Desc: FG06575.1 [Gibberella zeae PH-1]
  misc_feature (48)..(482): NCBI GI: 256726383 Blast Desc: NECHADRAFT_79548 [Nectria haematococca mpVI 77-13-4]
  misc_feature (14)..(477): NCBI GI: 115438102 Blast Desc: conserved [Aspergillus terreus NIH2624] gi|114188795|gb|EAU30495.1| conserved [Aspergillus terreus NIH2624]
  misc_feature (19)..(477): NCBI GI: 119498425 Blast Desc: UPF0187 domain membrane protein [Neosartorya fischeri NRRL 181] gi|119414134|gb|EAW24073.1| UPF0187 domain membrane protein [Neosartorya fischeri NRRL 181]
  misc_feature (16)..(477): NCBI GI: 67523591 Blast Desc: AN2251.2 [Aspergillus nidulans FGSC A4] gi|40744780|gb|EAA63936.1| AN2251.2 [Aspergillus nidulans FGSC A4] gi|259487642|tpe|CBF86467.1| TPA: UPF0187 domain membrane A4]
MADGAPAASGGDTGGGGASHGGAPSASGAAHDPAGGHAGPDHHGQGGSNGHAHDGDFAFTEKKSMPPQPSRRTTATPNPFSRRNTSIDLDDYFSGPRDLTKHSKWPLFMQLHGSITPKMVVPLLVVGAWASIITVVSKTVPGVNLGIESILLTITGFVVSMGLSFRSSSAYERYAEGRRYWSQLILASQGLGRAIWVNAGERPDQIQEDILGKLTAMNLIVAFAVSLKHKLRFEPYTHYEDIVDLVDHIDTLAKEATQDDVMTKKKMGIFHTVGENLGLSFAASNPRKMVKRSKRPLGNLPLEILCYLTAYADELVANNQLPVGMTQTAIYNSIGALNDALVNTERILNTPLPLAYAIAISQITWLYVFLLPFQLYKALGWITIPASIVSSFLILSIFFIGHEIENPFGTDVNDLPLEHFCEQVVLDMETISSQPKIRPRDFIKSARNKVMFPYSTSNYFSWETQSEGAIRAALKERPNAPFMKVPTTGTESV

SEQ ID NO: 36633 - DNA, 2209 bp, Muscodor strobelii
  misc_feature: SGI EST ID NO. CUFF.87441.0
  misc_feature: Variant of the nucleotide sequence at SEQ ID NO 36631
aaataaagcaagtgcttcgcctcgatcggatgggaccgctcctgccccatttctaggacctattgtaataagtcgtgagctcgtaatacaggtcgatgagctgtgcttgtccctgtgcttgtgcttcacccaccgtccctcgtatataagtcctcgacaactccacatcctcttcggatctgcagtcttttcctcctcgattgtgtcttcgtgtccgtggtgttacagcaactgcctttcttttcttgacttttctttttctcggtacttcccttactcacgtcataatggccgacggcgctcctgctgcatctggcggtgacactggcggcggtggtgcttcacacggtggtgcaccaagcgcctcaggtgctgctcacgaccctgctggtggccatgctggccctgaccaccatgggcagggtggaagcaacggccacgcccacgacggcgactttgccttcaccgagaagaaatccatgccaccacagccttccagacgcaccacagcaacgcccaatcccttcagtcgacggaacacaagcatagacttggacgactacttctccggccctcgagatctcaccaagcactcgaaatggcctctcttcatgcaactccacggcagtatcacccccaagatggtcgttcccctgctcgtcgtgggagcgtgggcctcgatcataacagtggtctcgaaaacggttcctggcgttaacctgggcattgaatcgattctcctgaccatcactggtttcgtcgtcagcatgggtctgtcgttcagaagttcctccgcgtacgagcgctatgcagaagggcggcgttattggagccagctcatccttgctagccaaggtctcggacgagctatctgggtgaatgcaggcgagcgtcccgaccagattcaagaggatatcctcggaaagcttaccgctatgaacctgatagtcgcattcgccgtctctctgaagcacaagctccgattcgaaccctacacccactacgaggacattgtggatctggtcgaccacatcgacactctcgctaaagaagccacccaggacgatgtgatgacaaagaagaagatgggcatcttccacaccgtgggcgagaacctggggctgtcattcgccgcatcgaacccccgtaagatggtgaagcgcagtaagcggcctcttggcaacctgcctctcgagattctctgctatctcactgcctacgccgacgagctcgtcgccaacaaccagctccccgtcggcatgacccagacagcaatctacaatagtattggagcgctgaacgatgctctggttaacaccgaacgtatcctcaacacacctctcccccttgcgtatgccatcgccatctcccaaatcacctggctctacgtattcctgcttccattccagttgtacaaagctctcgggtggataacaatccccgccagcatagtatcctcgttcctcattctgtccatcttcttcattggtcacgagatcgagaacccattcggaacggatgtcaacgatctgccgctcgagcacttctgcgagcaagtcgtcctggacatggagaccatctcatcgcagcccaagattagacctagggatttcatcaagagcgcgagaaataaggtcatgttcccttatagcactagcaactacttctcatgggagacccagagcgagggtgctatccgcgcggctttgaaggagaggccaaatgcaccattcatgaaagtacctactactggcaccgagagtgtctgaagagacgaaaaattgagcatttaaatatggaaaaatcggggtacttctagaagacatcagatcgagtgcatagctagaggatacaccgcttactattgctgtcttgtaaccatagtatatctattattaattcgcacgcatcgcgttgagaaaaaatgggtcggcgtcggcgcagggatcatttcatgatgaaataaacaatacgagaacaattcattcacgcctgcagtgtcttgccattggtgttgatgtggatgtatgattacatgatgacataggcttaagtcatcagctagttggtgctcttcaggtgcataggaatgcgacgagagccaataaacggctgaacgaaatgagggggtcaacttcaagaatcagattcttttcaatgcgagatggaagagagctgtctgtgcccggcgcgttactttcaatctcgc

SEQ ID NO: 36634 - DNA, 1701 bp, Muscodor strobelii
  misc_feature: SGI cDNA ID NO. 572700
  misc_feature: Encodes the peptide sequence at SEQ ID NO 36635
atgcctgtcgaagttatcacaatcgtcaactcgtctggcaagatcatcagcaatggcaaacatttaatgagtatattcaaagaggccaaggctgcctacgatgaaaagaaagccgccgtcagagcagaacgtgctgtgaaacgctctcagacctacgatgtgccggttgtaccccgttacgagccagaagtttattatgaacagccggagacacagtatgactacgaatatggccatggcgattacgatcatcgggaaatccacgatgatggtgcctcgctcacctcgtcccgcagaagccatcgatcgaggcacagtcatcgatctaaacatcgatcatcttcacaagttcggcccgcgttgacggaagggaacttgcgctcacattccgaagtgtcttcagtaacaccttcacgacctccagtcacctatcgttccccatatgcagaaacagcgccaagagacatggccgtgagtcgtcctagtcttgtgcgcgctccaacgatgcctggagttccaacacaaatgatggctcctgggcccccccaacaacccgcatatcttcaccgcgcggcttctgatccatcaatgaagccaaagaagaaagagattgatatgaatctagcatatggtaatatacctccagatcttgaggaccgggtcgacttggatcccgcgtacaagtcaatggagaaggagggcaaggcacggagcttgatggcgaagattgaggatctactaactgaggcgcattgtcttcaccacacggcaaatcacatcattgagcaccttcagggtaaacctgaggctgccgccgccgtcgctctcactctggccgagctatcatcactgataggcaagatgtcgccctcattcctaggtgtcatcaaaggaggtagcccagctatcttcgctttgcttgctagtccacagttcttgattgctgcgggactgactgttggcgtaactgtcgtcatgtttggaggctggaagattatcaagcgcatgaaggaggtcaaggacgcagaagctgcagcggctgcagctccgatggcttttgaagcgcacccaactcagccatatgagcaaggccacccagttcagccaccttatcccgaatcagagatcaccgctggctacgatgaggctttagtcgtcgaagaagagctcagcactattgagacatggcgacgaggcatcgcgcctttcggcgaagacgaaagcgcagatctcgaattgatcagtccggaagctgaccgtgccatccgcagtcagtacggcggtgatgatgcacggacagaacggagcgttcgtacaagccggacacacaggagtagcaagtctcacaaatcgcacaagtcacacaagagtcaccgggaacgtgccttggatgaccaagatattcccgatcggaagagtagcaagcacttcaaggaagtcgaggatgatgtgagcgagtccggtagtcaacggagccatcgcagccatcgtagccatcggagtgaacggtctcaacgctccgagaggacggagaagacctcaagatcaagacgcactttggccatcgaggatggtagcaaagataaagaaaacactatcgaggctgtaattcgaccgaagaaggacaacatgctcaagtccctgttcaaaaagaagaagaatgaagaggaccgcaacaggagtcaatctgtgatggtttga

SEQ ID NO: 36635 - protein, 566 aa, Muscodor strobelii
  misc_feature: SGI Peptide ID NO. 572700
  misc_feature (19)..(566): NCBI GI: 261361509 Blast Desc: conserved [Verticillium albo-atrum VaMs.102]
  misc_feature (1)..(549): NCBI GI: 39976279 Blast Desc: MGG_05934 [Magnaporthe grisea 70-15] gi|145011799|gb|EDJ96455.1| MGG_05934 [Magnaporthe grisea 70-15]
  misc_feature (4)..(556): NCBI GI: 256725021 Blast Desc: NECHADRAFT_77095 [Nectria haematococca mpVI 77-13-4]
  misc_feature (4)..(549): NCBI GI: 85096689 Blast Desc: NCU07123 [Neurospora crassa OR74A] gi|28921793|gb|EAA31070.1| [Neurospora crassa OR74A]
  misc_feature (1)..(500): NCBI GI: 171682940 Blast Desc: protein product [Podospora anserina] gi|170941429|emb|CAP67080.1| protein product [Podospora anserina]
  misc_feature (1)..(556): NCBI GI: 46110717 Blast Desc: FG02240.1 [Gibberella zeae PH-1]
  misc_feature (17)..(429): NCBI GI: 116203325 Blast Desc: CHGG_09547 [Chaetomium globosum CBS 148.51] gi|88178065|gb|EAQ85533.1| CHGG_09547 [Chaetomium globosum CBS 148.51]
  misc_feature (81)..(420): NCBI GI: 156060081 Blast Desc: SS1G_02178 [Sclerotinia sclerotiorum 1980] gi|154699587|gb|EDN99325.1| SS1G_02178 [Sclerotinia sclerotiorum 1980]
  misc_feature (4)..(454): NCBI GI: 189200997 Blast Desc: conserved [Pyrenophora tritici-repentis Pt-1C-BFP] gi|187983934|gb|EDU49422.1| conserved [Pyrenophora tritici-repentis Pt-1C-BFP]
  misc_feature (140)..(427): NCBI GI: 154312071 Blast Desc: BC1G_06069 [Botryotinia fuckeliana B05.10] gi|150850719|gb|EDN25912.1| BC1G_06069 [Botryotinia fuckeliana B05.10]
MPVEVITIVNSSGKIISNGKHLMSIFKEAKAAYDEKKAAVRAERAVKRSQTYDVPVVPRYEPEVYYEQPETQYDYEYGHGDYDHREIHDDGASLTSSRRSHRSRHSHRSKHRSSSQVRPALTEGNLRSHSEVSSVTPSRPPVTYRSPYAETAPRDMAVSRPSLVRAPTMPGVPTQMMAPGPPQQPAYLHRAASDPSMKPKKKEIDMNLAYGNIPPDLEDRVDLDPAYKSMEKEGKARSLMAKIEDLLTEAHCLHHTANHIIEHLQGKPEAAAAVALTLAELSSLIGKMSPSFLGVIKGGSPAIFALLASPQFLIAAGLTVGVTVVMFGGWKIIKRMKEVKDAEAAAAAAPMAFEAHPTQPYEQGHPVQPPYPESEITAGYDEALVVEEELSTIETWRRGIAPFGEDESADLELISPEADRAIRSQYGGDDARTERSVRTSRTHRSSKSHKSHKSHKSHRERALDDQDIPDRKSSKHFKEVEDDVSESGSQRSHRSHRSHRSERSQRSERTEKTSRSRRTLAIEDGSKDKENTIEAVIRPKKDNMLKSLFKKKKNEEDRNRSQSVMV

SEQ ID NO: 36636 - DNA, 3130 bp, Muscodor strobelii
  misc_feature: SGI EST ID NO. CUFF.87434.0
  misc_feature: Variant of the nucleotide sequence at SEQ ID NO 36634
cacgcgacctttttcccgtgaatctgggaaggccgcatgctgatcgaactgtgcagtgcgatctctgaacgggctgcatcgatcagatgccaattgtttgtcaccaaagaatatggtgattatgcattcgcgcctaatgttcaccttcagggcatccaatcaacagcattcgcgccgaaacagctgtgaagagatggacggctgggtctggctgctggcgaggggtgggtggaatgcaacgccggagagcgcctttttcttattcgtcatataccttgggctatatcttcgccccgagaccacgcattaaaccaacgcatgaaggtacacgacatattttggtcccggatcgacagccataacttgtttcgatcaagtctcttgcgcgctgtttttatccgtcgacaacttaatagagcgtcactggcagaagcagggacggcgaactattcctctgttctctaaacttggcctgccaaagaggacccgactccgctgtccacttggcctgataagttagttcgcttgctcaccgctgtgtcggattgaactagaatttggaaacgcttcaaccagcgagaatcagggactagaaccacggagggtcccaacctcgtggaaaatcatctggatccaaaagagaagatcggatccttggccaagctgccattttagctcccgcattaatcgggcatcgtgccccattgataccactgctttcacagcaacagcggtcaggacaagggaccttttattcccttctctcccctcaccaccatcttggattgaagttggagaaatcgcaagtcagaagagatgcctgtcgaagttatcacaatcgtcaactcgtctggcaagatcatcagcaatggcaaacatttaatgagtatattcaaagaggccaaggctgcctacgatgaaaagaaagccgccgtcagagcagaacgtgctgtgaaacgctctcagacctacgatgtgccggttgtaccccgttacgagccagaagtttattatgaacagccggagacacagtatgactacgaatatggccatggcgattacgatcatcgggaaatccacgatgatggtgcctcgctcacctcgtcccgcagaagccatcgatcgaggcacagtcatcgatctaaacatcgatcatcttcacaagttcggcccgcgttgacggaagggaacttgcgctcacattccgaagtgtcttcagtaacaccttcacgacctccagtcacctatcgttccccatatgcagaaacagcgccaagagacatggccgtgagtcgtcctagtcttgtgcgcgctccaacgatgcctggagttccaacacaaatgatggctcctgggcccccccaacaacccgcatatcttcaccgcgcggcttctgatccatcaatgaagccaaagaagaaagagattgatatgaatctagcatatggtaatatacctccagatcttgaggaccgggtcgacttggatcccgcgtacaagtcaatggagaaggagggcaaggcacggagcttgatggcgaagattgaggatctactaactgaggcgcattgtcttcaccacacggcaaatcacatcattgagcaccttcagggtaaacctgaggctgccgccgccgtcgctctcactctggccgagctatcatcactgataggcaagatgtcgccctcattcctaggtgtcatcaaaggaggtagcccagctatcttcgctttgcttgctagtccacagttcttgattgctgcgggactgactgttggcgtaactgtcgtcatgtttggaggctggaagattatcaagcgcatgaaggaggtcaaggacgcagaagctgcagcggctgcagctccgatggcttttgaagcgcacccaactcagccatatgagcaaggccacccagttcagccaccttatcccgaatcagagatcaccgctggctacgatgaggctttagtcgtcgaagaagagctcagcactattgagacatggcgacgaggcatcgcgcctttcggcgaagacgaaagcgcagatctcgaattgatcagtccggaagctgaccgtgccatccgcagtcagtacggcggtgatgatgcacggacagaacggagcgttcgtacaagccggacacacaggagtagcaagtctcacaaatcgcacaagtcacacaagagtcaccgggaacgtgccttggatgaccaagatattcccgatcggaagagtagcaagcacttcaaggaagtcgaggatgatgtgagcgagtccggtagtcaacggagccatcgcagccatcgtagccatcggagtgaacggtctcaacgctccgagaggacggagaagacctcaagatcaagacgcactttggccatcgaggatggtagcaaagataaagaaaacactatcgaggctgtaattcgaccgaagaaggacaacatgctcaagtccctgttcaaaaagaagaagaatgaagaggaccgcaacaggagtcaatctgtgatggtttgagctatgatacccatcgcctgaagattgttgatgtactgcatttggttttcgtcttttggactcataataatgttgggctggagtacttttgcttaaacgaagcgtactagaaccccaccgagggggacaaagtcctatttacaccacaactataccctcaaatataacgcaaaggtcctacgagtatatagcaactgccttagggtacgatagaatgacccaactctatctagtgtctatgttaccggcatagacagaaccaataattgatataaatagacctgtactgcaatccagagccctaaataaacggggctggctatactagcatctgttcgcgacttcgatcctttgacataccagctgagttattacgctttgagtagcgtggcctgcctcatctagatcggactatacttagagtctggggctaaagcagacctgcaatgcaggtgagccgtaggtcaactaggctttgcattgccagaataatcaatgtcagactggacattcgcatcgcaagttctactgtaattgtagactagaagggggtaactaatgtcgcttatactgtatggagttgaggactctgcatgtttctgggggctaaaaa

SEQ ID NO: 36637 - DNA, 840 bp, Muscodor strobelii
  misc_feature: SGI cDNA ID NO. 572701
  misc_feature: Encodes the peptide sequence at SEQ ID NO 36638
atgatgaattggtggaaacaacgacaagccaaacgtgcacggaagaaaacagcacaccaaaacggtccagattaccgagaccgctggccaacagcagctacattggtcgaggatcgcagccccgcgagctctctgaagccgacgtggtcagagaggttgtcctcaaaacttttccagattcagtcattcttcaagagacgccgaaatttcggaccgggcgaaagtacacacccgtacgacattgcatatagtcagccggcactggaagtgagcgaagtccacatgtcatcatcaatggatgttcagccttccgagcatgagagaaaatggtggcagcttttcactcgtccgccacgagagcaacatccgcagccaccgcccgtgatcatacaacctgctactgtcgtccaagttcaagaagaaccagacgcaccgaaaactgtaactcctcttcgccgccttcttcagattccacgatcaagaactggcactcctgctggatctgaccgagagacgaaatccttcagatcggcccgctcaccagctccggctcctcctactcctgtgccgtcgttagccagaacacctgtgcgagctgtcgaaactcctcaactctcagcccagcagcccagaatctcctggtactcaccaaaaccgtcaccgacaccggcacctcctccaatgggaaagcctgctacgaaaacgcctgtgccgattattgaaaagcgagccatcgaagagcctgattccccgcgcactcggccaaagctaccctggtatacaaaacttaaacgtcgcttgggcatggctgagaaaacgactggttggctttatgcttaa

SEQ ID NO: 36638 - protein, 279 aa, Muscodor strobelii
  misc_feature: SGI Peptide ID NO. 572701
MMNWWKQRQAKRARKKTAHQNGPDYRDRWPTAATLVEDRSPASSLKPTWSERLSSKLFQIQSFFKRRRNFGPGESTHPYDIAYSQPALEVSEVHMSSSMDVQPSEHERKWWQLFTRPPREQHPQPPPVIIQPATVVQVQEEPDAPKTVTPLRRLLQIPRSRTGTPAGSDRETKSFRSARSPAPAPPTPVPSLARTPVRAVETPQLSAQQPRISWYSPKPSPTPAPPPMGKPATKTPVPIIEKRAIEEPDSPRTRPKLPWYTKLKRRLGMAEKTTGWLYA

SEQ ID NO: 36639 - DNA, 789 bp, Muscodor strobelii
  misc_feature: SGI cDNA ID NO. 572702
  misc_feature: Encodes the peptide sequence at SEQ ID NO 36640
atgtctaacaattacggatattcaaataacggcggcggaggtggctacaatggacagccaccgcatgaccaatattctcagtacccgccgcaaaatcagtaccagtctcagggttatccaggccagcaatacccaccaccacagcagcaatacggtggccatgcgccgtcgcattcgccataccctccgcagcaatcgtatggagcgccgcctcaagggcaacattctccctatccccctcagggccaacagccatatggcggaccacctcacgatccaaacgcttaccggggtcaagggtatccgccccagggacaggcttctggacaggctgcttcgtacatgcaaggcgggcaccaatacccaccacagcattccgatcatcagcagcagcagcactcgtcgcagcatgacaacggcgagggaaaagatagaggaatggcatcgatgctcgtaggagcgttagctggcaaggctgctggtcatggtggctctagccatggcgggggcagcaacccgctagcatcagtcggagcagcggctgcaggagccttgctcggaggcagccacggaggcagccacggaggtaaccatggtggtggtcatggaggtggtcctttcgggcacagtggcgggccatttggcagtggcgggccatttggcggtggcggcggtcgcggcggtcacggcggtcacggcggtggacataagcacaagaaagagaagaagcatcacaaacgcaagggaagtggaagctcgagtagctcaagcagtagcgacagcgattag

SEQ ID NO: 36640 - protein, 262 aa, Muscodor strobelii
  misc_feature: SGI Peptide ID NO. 572702
MSNNYGYSNNGGGGGYNGQPPHDQYSQYPPQNQYQSQGYPGQQYPPPQQQYGGHAPSHSPYPPQQSYGAPPQGQHSPYPPQGQQPYGGPPHDPNAYRGQGYPPQGQASGQAASYMQGGHQYPPQHSDHQQQQHSSQHDNGEGKDRGMASMLVGALAGKAAGHGGSSHGGGSNPLASVGAAAAGALLGGSHGGSHGGNHGGGHGGGPFGHSGGPFGSGGPFGGGGGRGGHGGHGGGHKHKKEKKHHKRKGSGSSSSSSSSDSD

SEQ ID NO: 36641 - DNA, 1750 bp, Muscodor strobelii
  misc_feature: SGI EST ID NO. CUFF.87443.0
  misc_feature: Variant of the nucleotide sequence at SEQ ID NO 36639
cggggatcgggggcgatctcatatcccgccctgcgcctcaactgcgactaaagaaacagctgttctttgtcacaaacagataggactgtgtgacaggaggccgccagctctttatccttaaattgacaagcttggccaaaccacctcactcactctctcgtttagtcaaacaacattccacaaccccaaatacgtcattgcgatcaatagcagtatcgcattcaagatgtctaacaattacggatattcaaataacggcggcggaggtggctacaatggacagccaccgcatgaccaatattctcagtacccgccgcaaaatcagtaccagtctcagggttatccaggccagcaatacccaccaccacagcagcaatacggtggccatgcgccgtcgcattcgccataccctccgcagcaatcgtatggagcgccgcctcaagggcaacattctccctatccccctcagggccaacagccatatggcggaccacctcacgatccaaacgcttaccggggtcaagggtatccgccccagggacaggcttctggacaggctgcttcgtacatgcaaggcgggcaccaatacccaccacagcattccgatcatcagcagcagcagcactcgtcgcagcatgacaacggcgagggaaaagatagaggaatggcatcgatgctcgtaggagcgttagctggcaaggctgctggtcatggtggctctagccatggcgggggcagcaacccgctagcatcagtcggagcagcggctgcaggagccttgctcggaggcagccacggaggcagccacggaggtaaccatggtggtggtcatggaggtggtcctttcgggcacagtggcgggccatttggcagtggcgggccatttggcggtggcggcggtcgcggcggtcacggcggtcacggcggtggacataagcacaagaaagagaagaagcatcacaaacgcaagggaagtggaagctcgagtagctcaagcagtagcgacagcgattagacgaggaatggccccaaatctaaatgcatcttattgacagtctcacatgacttcgttttagagatcactatggttttcgacagaatactttgtgttatgcaaacaagaggcgtcctctatcgttctgtttggattcatcgtctaggatctgttttcttggtaacgactcagtgaccactaatacgcccacctcaccgagtcccgaataattcttgcgatccttcatgtaccagcaggggtggtaatcctcagcaatggcgataaccacttcacatctctcgaattctctcccattcgttccacaagttgttttagtacgcgagttttcatccatggtaggcgatctaggatccggcatttctcgacgaacatcctcttttcgttgttgtccggcgctcgaatttgcacaggcccttcaaacaccctgccctgggtcctctgccaaggcgatctcaagcatagatagagcaaatgtacgaacagttgcggcaggaattcatacccttgaccaccaaacgtctcgatgtggtcaggaacgagacaaacgtacttgctggtcgccatatgattcatgtgatgtattgcgatggccattacggcccagagcgtgttgcgaggcgcgacaacaccacggaccgttgcttcgatgttttggcatgtgcgatagatgatccgatatctgattctggtcataaattcttctgttgtaggtgtgaatttattctgaggtatgat

SEQ ID NO: 36642 - DNA, 1050 bp, Muscodor strobelii
  misc_feature: SGI cDNA ID NO. 572703
  misc_feature: Encodes the peptide sequence at SEQ ID NO 36643
atgcctgcagtagcggctaaagcccctctaccattcctatccaacgacgatgccatggatcctctgcccattttagacgaatctcacatcaacgacttgtccgcagttctcagtggtatagctaaaggtaactatcccagaatagacgctgtacctcacgcattgaatgcatacaactataccaaagtggtccagggcgagcgcaaggtatgggcttatttccagcctgtcactgaaatatcggataagtcaaatcgcatgccgcctcatctcattctcgatgacaagatactcgacgacctagagacggaatacatccctttatggcccttcagcagagatcttgctagaactgctgcagacgcaaacccagtgacttcagcaagctaccgtcttatttgcttcatacataagcaccggatcgacatcaagaatagtacccagaaatcagtattcactattagcatatgggatcgagagaacaaggagctgacttggcatgatacgtacccttatgggcgagccaatcgatgcaaagccatcaaacatttttggcaaactgtatccatcatacctcagaataaattcacacctacaacagaagaatttatgaccagaatcagatatcggatcatctatcgcacatgccaaaacatcgaagcaacggtccgtggtgttgtcgcgcctcgcaacacgctctgggccgtaatggccatcgcaatacatcacatgaatcatatggcgaccagcaagtacgtttgtctcgttcctgaccacatcgagacgtttggtggtcaaggatcgcctaccatggatgaaaactcgcgtactaaaacaacttgtggaacgaatgggagagaattcgagagatgtgaagtggttatcgccattgctgaggattaccacccctgctggtacatgaaggatcgcaagaattattcgggactcggtgaggtgggcgtattagtggtcactgagtcgttaccaagaaaacagatcctagacgatgaatccaaacagaacgatagaggacgcctcttgtttgcataa

SEQ ID NO: 36643 - protein, 349 aa, Muscodor strobelii
  misc_feature: SGI Peptide ID NO. 572703
MPAVAAKAPLPFLSNDDAMDPLPILDESHINDLSAVLSGIAKGNYPRIDAVPHALNAYNYTKVVQGERKVWAYFQPVTEISDKSNRMPPHLILDDKILDDLETEYIPLWPFSRDLARTAADANPVTSASYRLICFIHKHRIDIKNSTQKSVFTISIWDRENKELTWHDTYPYGRANRCKAIKHFWQTVSIIPQNKFTPTTEEFMTRIRYRIIYRTCQNIEATVRGVVAPRNTLWAVMAIAIHHMNHMATSKYVCLVPDHIETFGGQGSPTMDENSRTKTTCGTNGREFERCEVVIAIAEDYHPCWYMKDRKNYSGLGEVGVLVVTESLPRKQILDDESKQNDRGRLLFA

SEQ ID NO: 36644 - DNA, 957 bp, Muscodor strobelii
  misc_feature: SGI cDNA ID NO. 572704
  misc_feature: Encodes the peptide sequence at SEQ ID NO 36645
atggcattcaaaaaaactattctggttaccggtggtaccgttaatcttggctaccacgcggctcacgagatcgctaagactcatcccgatactctcgttgtcatttcgtctagatccgataaggagaaagctgccgaaaagatcaaccagtctcttggccagaagaacacagtttacatgcctctcgaccttggtgacctgtcaaacgtacggaagttcgcggaaacctggtctgagaaacaatatcctcctatccaagcactgcttctcaatgcaggcctacaattcccaggtgacgttcagcataccgtcgatggcatcgaagcgacattcggtattaaccacgttggcggcgctcttctcttccacctcctctgcccatttcttgctccagatgccaggatagtcctgacttcaagcggtacacacgaccctgcacaacacagcggcctgcctgacgcaatctacaacaatgctgaagagttagcgcacccgactccggtgaccagccagtatccagggcggcagcgatatgcaacaagcaagctttgcaacattctatggacgtatgccttggacagacatcttaaggaacaggggagccaagtcaccgtgaatgcttttgaccccggtttgatgcccggttccggactggcgagggaagcgagtggcatcgagaaattcttctggatgcgcgtcctacctcatatcatcccgctgctacgactgtttctattcgcgaatattcactcgccacaagcttcgggtaagaacctcgcacgagtcgccatagaaccttcgttggcggttgtaagtgggaaatacttcgaaatgcggcaagatatcaagtccagtaaggatagctacgatatcagcaagcaagatgacttatggcgatggactgtggactatcttgcgaagggagacgagaaggaaaagtttgagcaactgaaatga

SEQ ID NO: 36645 - protein, 318 aa, Muscodor strobelii
  misc_feature: SGI Peptide ID NO. 572704
  misc_feature (5)..(151): Pfam Id: PF00106 Pfam Desc: short chain dehydrogenase
  misc_feature (5)..(141): Pfam Id: PF00106 Pfam Desc: short chain dehydrogenase
  misc_feature (1)..(314): NCBI GI: 145228893 Blast Desc: An01g03210 [Aspergillus niger] gi|134054847|emb|CAK43687.1| protein product [Aspergillus niger]
  misc_feature (5)..(315): NCBI GI: 212539179 Blast Desc: short-chain dehydrogenase, [Penicillium marneffei ATCC 18224] gi|210069487|gb|EEA23578.1| short-chain dehydrogenase, [Penicillium marneffei ATCC 18224]
  misc_feature (3)..(312): NCBI GI: 39974903 Blast Desc: MGG_00402 [Magnaporthe grisea 70-15] gi|145018707|gb|EDK02986.1| MGG_00402 [Magnaporthe grisea 70-15]
  misc_feature (3)..(295): NCBI GI: 242760774 Blast Desc: short-chain dehydrogenase, [Talaromyces stipitatus ATCC 10500] gi|218723253|gb|EED22670.1| short-chain dehydrogenase, [Talaromyces stipitatus ATCC 10500]
  misc_feature (103)..(318): NCBI GI: 154313450 Blast Desc: BC1G_05422 [Botryotinia fuckeliana B05.10] gi|150849491|gb|EDN24684.1| BC1G_05422 [Botryotinia fuckeliana B05.10]
  misc_feature (6)..(307): NCBI GI: 218751933 Blast Desc: dehydrogenase/reductase [Mycobacterium tuberculosis GM 1503]
  misc_feature (6)..(307): NCBI GI: 15607444 Blast Desc: dehydrogenase/reductase [Mycobacterium tuberculosis H37Rv] gi|15839688|ref|NP_334725.1| short chain dehydrogenase/reductase family oxidoreductase [Mycobacterium BCG
  misc_feature (6)..(307): NCBI GI: 254230672 Blast Desc: TBCG_00299 [Mycobacterium tuberculosis C] gi|124599731|gb|EAY58741.1| TBCG_00299 [Mycobacterium tuberculosis C]
  misc_feature (5)..(314): NCBI GI: 172054974 Blast Desc: glucose/ribitol short chain dehydrogenase/reductase family protein [Cyanothece sp. ATCC 51142] gi|171701255|gb|ACB54235.1| glucose/ribitol short chain family
  misc_feature (5)..(303): NCBI GI: 126658757 Blast Desc: dehydrogenase/reductase [Cyanothece sp. CCY0110] gi|126620019|gb|EAZ90743.1| dehydrogenase/reductase [Cyanothece sp. CCY0110]
  misc_feature (4)..(276): SWISSPROT Homolog: EC 1.3.1.33 Protochlorophyllide reductase
MAFKKTILVTGGTVNLGYHAAHEIAKTHPDTLVVISSRSDKEKAAEKINQSLGQKNTVYMPLDLGDLSNVRKFAETWSEKQYPPIQALLLNAGLQFPGDVQHTVDGIEATFGINHVGGALLFHLLCPFLAPDARIVLTSSGTHDPAQHSGLPDAIYNNAEELAHPTPVTSQYPGRQRYATSKLCNILWTYALDRHLKEQGSQVTVNAFDPGLMPGSGLAREASGIEKFFWMRVLPHIIPLLRLFLFANIHSPQASGKNLARVAIEPSLAVVSGKYFEMRQDIKSSKDSYDISKQDDLWRWTVDYLAKGDEKEKFEQLK

SEQ ID NO: 36646 - DNA, 897 bp, Muscodor strobelii
  misc_feature: SGI EST ID NO. CUFF.87430.0
  misc_feature: Variant of the nucleotide sequence at SEQ ID NO 36644
agaaggacgacatttcctacacttggaacaatgtcttcattgcatttccattgaagacaaacacatattaccttcttcgtttacctacatagctacaacgcatcctgatagccaaagtacttctcgtaacatcacatatcattctctaaatatccagtatggcattcaaaaaaactattctggttaccggtggtaccgttaatcttggctaccacgcggctcacgagatcgctaagactcatcccgatactctcgttgtcatttcgtctagatccgataaggagaaagctgccgaaaagatcaaccagtctcttggccagaagaacacagtttacatgcctctcgaccttggtgacctgtcaaacgtacggaagttcgcggaaacctggtctgagaaacaatatcctcctatccaagcactgcttctcaatgcaggcctacaattcccaggtgacgttcagcataccgtcgatggcatcgaagcgacattcggtattaaccacgttggcggcgctcttctcttccacctcctctgcccatttcttgctccagatgccaggatagtcctgacttcaagcggtacacacgaccctgcacaacacagcggcctgcctgacgcaatctacaacaatgctgaagagttagcgcacccgactccggtgaccagccagtatccagggcggcagcgatatgcaacaagcaagctttgcaacattctatggacgtatgccttggacagacatcttaaggaacaggggagccaagtcaccgtgaatgcttttgaccccggtttgatgcccggttccggactggcgagggaagcgagtggcatcgagaaattcttctggatgcgcgtcctacctcatatcatcccgctgctacgactgtttctattcg

SEQ ID NO: 36647 - DNA, 2190 bp, Muscodor strobelii
  misc_feature: SGI cDNA ID NO. 572705
  misc_feature: Encodes the peptide sequence at SEQ ID NO 36648
atgtcggaatatgattcgggcgatgacctgctcgacgaaatagatgcggatgaattagttgtttctggtggcaagcatgcactttcatctcctgcgaacgggagttctaataagcgagtaaagcttaatgatgacacggttggagagcaaaaggaaattgagacgatcgccaaagcgctactgaagaagggctttggctacgatgatttccgccatgaacaggctggtgctatcaagtcgacgttgatgggggacaatgtgcttgttatatttcctactggtgctggaaaatccttgtgttatcagattcccggcattgcctttgaaaaacttgacgaagcgggcttaacggatcgggatcccaaagccgcaggtagaggttctgggctcaccgttgttgtatcccctctgattgcactcatgaaagaccaggttgacgcattgaagaaacgtggtatatcagctgcttgtctggattcgacgaagacttatgatgagcagagagaaattaatgctgccatgcgagaagggcgacttaggattctttattgcgcacctgaaaagctcaacaacgagaacttcgttcagagcataatgtgtcttcctggaggcattcgtcttgtggccgttgacgaagcccattgcatctccgagtggggtcactcatttcggccagactatctgaaagttgcacgatttgttcaagaaaccagagctgaacgcgtagtgtgtcttacagccactgctacgccacgtgttgcggaggatatctgcaaagccttcaatatcaaggagtcttgtgtgtttcgtacaccgccgtatagaccgaatttggagctgaatgttgaagttctcgccgaggtggacgagaagtttccgaagcttctgcagtttctcgcagatcaccaaggccccagtctcgtgtatgttacacttcaacgtgaagccgaagaacttgccaaggagctttgcaaacacaagcttagtgctgctgcgttccatgctggcttacctactccggcgaaaaccaaaatccaagacgagtttatgggcggctccatccgcattgttgtggctactatagcctttggtatgggcattgacaagtcggacattcgaaatattgtgcattacaatattccgagcactattgaggaatactctcagcagatcggaagagctggacgagatggccgacccagcacgtgcttggtgtatctgtgcaacggtgatttttggatgagagaaaacttcgcacgaggcgatctaccgtctcggcagtctctccaaaaactttttgaagacgtttttttcagccagcaagtcgttaagttgccagacggcagcgaagtaattaagctctcccagttcgcgctaggtaaagagtatgacattcgaccaagtccgctgagtatcattctggcaacagttgaactccggtacggcctgattcgagctatcacccctgagtatagctcctaccaattcgaggccatgcctggatactacgcgattgcaaaggctgaaaagtctgctgaagcaaaagccatctctctacatgccaaaaaggcaaagaagtggtacagcatcgatgtcagctcgacagccaatcagtctaatctgtttcgcaacgatatcatcagaaagctcaatgaattcaacgacaagggtctcatcaagctgaaagcaagtggtgtcgaaaatcgttataagattctcaagaagttaccaaagacggccaaggaagtcagagccattactgatcagttgcatgcggagctatcgaagaaagaaggcgacgaaatgaagcgctttgaagctgtcgttggcctatttctaggccggcagtgtttcgcgcatgctcttgccgtctatttcgggacaaaactaccttcagggaagtccaagtgcggacattgctctttttgtgcgacaggcaagcagcttatattaccaccgaaaccgaagtctcctatcgaccttagtggaatccgcaagattctcacactttgtgatgtccgggatgacccacgatttttggctcgagttgcgttcggcatcaaaagtccacgagtctcgcaacttggactagacaaacagaagatctttgggtcgctggaagatcatgattttgagtctctgttgaaagaattcaccaaggcctgcgaggcatctggatataaagcttga

SEQ ID NO: 36648 - protein, 729 aa, Muscodor strobelii
  misc_feature: SGI Peptide ID NO. 572705
  misc_feature (71)..(257): Pfam Id: PF00270 Pfam Desc: DEAD/DEAH box helicase
  misc_feature (322)..(398): Pfam Id: PF00271 Pfam Desc: Helicase conserved C-terminal domain
  misc_feature (56)..(713): NCBI GI: 116202363 Blast Desc: CHGG_09066 [Chaetomium globosum CBS 148.51] gi|88177584|gb|EAQ85052.1| CHGG_09066 [Chaetomium globosum CBS 148.51]
  misc_feature (1)..(726): NCBI GI: 116191391 Blast Desc: CHGG_05413 [Chaetomium globosum CBS 148.51] gi|88181326|gb|EAQ88794.1| CHGG_05413 [Chaetomium globosum CBS 148.51]
  misc_feature (1)..(712): NCBI GI: 171676356 Blast Desc: protein product [Podospora anserina] gi|170936244|emb|CAP60903.1| protein product [Podospora anserina]
  misc_feature (3)..(723): NCBI GI: 256723260 Blast Desc: NECHADRAFT_97234 [Nectria haematococca mpVI 77-13-4]
  misc_feature (3)..(723): NCBI GI: 46115154 Blast Desc: FG03419.1 [Gibberella zeae PH-1]
  misc_feature (1)..(722): NCBI GI: 116200892 Blast Desc: CHGG_10991 [Chaetomium globosum CBS 148.51] gi|88175705|gb|EAQ83173.1| CHGG_10991 [Chaetomium globosum CBS 148.51]
  misc_feature (3)..(723): NCBI GI: 261359136 Blast Desc: ATP-dependent DNA helicase recQ [Verticillium albo-atrum VaMs.102]
  misc_feature (6)..(725): NCBI GI: 169620560 Blast Desc: SNOG_13480 [Phaeosphaeria nodorum SN15] gi|111057807|gb|EAT78927.1| SNOG_13480 [Phaeosphaeria nodorum SN15]
  misc_feature (31)..(726): NCBI GI: 189194187 Blast Desc: ATP-dependent DNA helicase recQ [Pyrenophora tritici-repentis Pt-1C-BFP] gi|187978996|gb|EDU45622.1| ATP-dependent DNA helicase recQ [Pyrenophora tritici-repentis
  misc_feature (57)..(729): NCBI GI: 170085093 Blast Desc: [Laccaria bicolor S238N-H82] gi|164651322|gb|EDR15562.1| [Laccaria bicolor S238N-H82]
MSEYDSGDDLLDEIDADELVVSGGKHALSSPANGSSNKRVKLNDDTVGEQKEIETIAKALLKKGFGYDDFRHEQAGAIKSTLMGDNVLVIFPTGAGKSLCYQIPGIAFEKLDEAGLTDRDPKAAGRGSGLTVVVSPLIALMKDQVDALKKRGISAACLDSTKTYDEQREINAAMREGRLRILYCAPEKLNNENFVQSIMCLPGGIRLVAVDEAHCISEWGHSFRPDYLKVARFVQETRAERVVCLTATATPRVAEDICKAFNIKESCVFRTPPYRPNLELNVEVLAEVDEKFPKLLQFLADHQGPSLVYVTLQREAEELAKELCKHKLSAAAFHAGLPTPAKTKIQDEFMGGSIRIVVATIAFGMGIDKSDIRNIVHYNIPSTIEEYSQQIGRAGRDGRPSTCLVYLCNGDFWMRENFARGDLPSRQSLQKLFEDVFFSQQVVKLPDGSEVIKLSQFALGKEYDIRPSPLSIILATVELRYGLIRAITPEYSSYQFEAMPGYYAIAKAEKSAEAKAISLHAKKAKKWYSIDVSSTANQSNLFRNDIIRKLNEFNDKGLIKLKASGVENRYKILKKLPKTAKEVRAITDQLHAELSKKEGDEMKRFEAVVGLFLGRQCFAHALAVYFGTKLPSGKSKCGHCSFCATGKQLILPPKPKSPIDLSGIRKILTLCDVRDDPRFLARVAFGIKSPRVSQLGLDKQKIFGSLEDHDFESLLKEFTKACEASGYKA

SEQ ID NO: 36649 - DNA, 1939 bp, Muscodor strobelii
  misc_feature: SGI EST ID NO. CUFF.87473.0
  misc_feature: Variant of the nucleotide sequence at SEQ ID NO 36647
tgaagttctcgccgaggtggacgagaagtttccgaagcttctgcagtttctcgcagatcaccaaggccccagtctcgtgtatgttacacttcaacgtgaagccgaagaacttgccaaggagctttgcaaacacaagcttagtgctgctgcgttccatgctggcttacctactccggcgaaaaccaaaatccaagacgagtttatgggcggctccatccgcattgttgtggctactatagcctttggtatgggcattgacaagtcggacattcgaaatattgtgcattacaatattccgagcactattgaggaatactctcagcagatcggaagagctggacgagatggccgacccagcacgtgcttggtgtatctgtgcaacggtgatttttggatgagagaaaacttcgcacgaggcgatctaccgtctcggcagtctctccaaaaactttttgaagacgtttttttcagccagcaagtcgttaagttgccagacggcagcgaagtaattaagctctcccagttcgcgctaggtaaagagtatgacattcgaccaagtccgctgagtatcattctggcaacagttgaactccggtacggcctgattcgagctatcacccctgagtatagctcctaccaattcgaggccatgcctggatactacgcgattgcaaaggctgaaaagtctgctgaagcaaaagccatctctctacatgccaaaaaggcaaagaagtggtacagcatcgatgtcagctcgacagccaatcagtctaatctgtttcgcaacgatatcatcagaaagctcaatgaattcaacgacaagggtctcatcaagctgaaagcaagtggtgtcgaaaatcgttataagattctcaagaagttaccaaagacggccaaggaagtcagagccattactgatcagttgcatgcggagctatcgaagaaagaaggcgacgaaatgaagcgctttgaagctgtcgttggcctatttctaggccggcagtgtttcgcgcatgctcttgccgtctatttcgggacaaaactaccttcagggaagtccaagtgcggacattgctctttttgtgcgacaggcaagcagcttatattaccaccgaaaccgaagtctcctatcgaccttagtggaatccgcaagattctcacactttgtgatgtccgggatgacccacgatttttggctcgagttgcgttcggcatcaaaagtccacgagtctcgcaacttggactagacaaacagaagatctttgggtcgctggaagatcatgattttgagtctctgttgaaagaattcaccaaggcctgcgaggcatctggatataaagcttgatgcgcaacttagctgtatgacgatatctgattgcggggtgatagcactctagatgtatgctcaagtcactatcacatgttggggctacaaacggcagtgaaggcagtactggagcgcaagacggatagaccggtgcttgatctgcatgcttcttaaacaaactgggaatttgaggagatccagatatctaatgacggcgggagaataggaaattacagaaaagttgtctaccgttgatggacatgtcctgcttccccaagctctagataacaccgtccattgatctccccgaactttggccagcttatacatgagatcagattggggtctcgcccaagaagcaattagtgtctcctctgacgatcaaattccagttattgggcgtaaaaagctataacagagacaactgcgtatcagttgggggtctggagatgtccaatgtacaatgtataacactgcaaagatatttaatagaagtcaagcgtgacttacctgtccctgagccatacttgaattatcaggcacaggacagtagccgactaggtacgccatggcctcggcgatgttaccgctgaactcttgtaggaaacctaa

SEQ ID NO: 36650 - DNA, 1035 bp, Muscodor strobelii
  misc_feature: SGI cDNA ID NO. 572706
  misc_feature: Encodes the peptide sequence at SEQ ID NO 36651
atgtctgcaaatcttgaaagtgcggctgcattcgaaaccagtgtcttaggtttcctttaccgacaatggatcgcgcgtcgacccccgattccgatcgggactaatctcaactcacaagttgcaataattacaggctccaatagtggattaggtcttgaggctggtcgtcaattgcttcgcctcggtctctcgcatcttattgtagccgttcgatcgcaagcaaagggagagaaggcagccgaaggcttgcaacgcgaattttctaacgcccagatttccgtctggtcactcgatatggagtcatacgtctcgatcacggactttgtagagagatgcaagtcactgcctaggatcgatgttgcactcctgaatgctggactgtcaggcggaccggaatacaaaaccacagagggcacaggacacgagcacagctttcaaatcaactacttgtccacgatgctccttgctatccttttactacctattttgaaggcgaagagagcctttgactccaagccgccggtgctctccattgtgacatcggacactgcgtattggcaaaagctcgagactccgggtccgttgttggcgcaattcgataaaccaaatacttacgagccgttcctgtggtacggaagagccaagcttcttcaaatactgtttatcagcaagcttgcacaagaggtcaatgcagatgatgtgatcatcaatcttgctaatccaggcctttgcgatagtggatttttacggaatgacggcactaccatgtcaatattctggactttggttttcgggatttttaaaactgccgtcgccagatctgtggatgccggtgcaagtacgtatgtggatgctgttgttctgaaaggacaagagagtcacgggagttatgttagcgactgggcgattaaaccgtatccgcagctgttgtacacacaagagggtgtagacgtacgagaaagattgtgggaggagacgatggaagagcttaattttgtaggtgcatcagacataattaagcacttgcaagattaa

SEQ ID NO: 36651 - protein, 344 aa, Muscodor strobelii
  misc_feature: SGI Peptide ID NO. 572706
  misc_feature (39)..(172): Pfam Id: PF00106 Pfam Desc: short chain dehydrogenase
  misc_feature (39)..(126): Pfam Id: PF00106 Pfam Desc: short chain dehydrogenase
  misc_feature (1)..(344): NCBI GI: 242773363 Blast Desc: short-chain dehydrogenase/reductase family protein, [Talaromyces stipitatus ATCC 10500] gi|218721844|gb|EED21262.1| short-chain dehydrogenase/reductase family protein, [Talaromyces
  misc_feature (1)..(335): NCBI GI: 39974993 Blast Desc: MGG_00357 [Magnaporthe grisea 70-15] gi|145018753|gb|EDK03032.1| MGG_00357 [Magnaporthe grisea 70-15]
  misc_feature (1)..(342): NCBI GI: 238492577 Blast Desc: short-chain dehydrogenase/reductase family protein, [Aspergillus flavus NRRL3357] gi|220696019|gb|EED52361.1| short-chain dehydrogenase/reductase family protein, [Aspergillus
  misc_feature (1)..(342): NCBI GI: 70986064 Blast Desc: short-chain dehydrogenase/reductase family protein [Aspergillus fumigatus Af293] gi|66846161|gb|EAL86494.1| short-chain dehydrogenase/reductase family protein, [Aspergillus
  misc_feature (1)..(342): NCBI GI: 159128334 Blast Desc: short-chain dehydrogenase/reductase family protein, [Aspergillus fumigatus A1163]
  misc_feature (1)..(340): NCBI GI: 46116774 Blast Desc: FG04229.1 [Gibberella zeae PH-1]
  misc_feature (1)..(340): NCBI GI: 256725584 Blast Desc: NECHADRAFT_94266 [Nectria haematococca mpVI 77-13-4]
  misc_feature (1)..(332): NCBI GI: 256720903 Blast Desc: NECHADRAFT_50515 [Nectria haematococca mpVI 77-13-4]
  misc_feature (1)..(330): NCBI GI: 46103007 Blast Desc: FG00073.1 [Gibberella zeae PH-1]
  misc_feature (14)..(343): NCBI GI: 256730051 Blast Desc: NECHADRAFT_82657 [Nectria haematococca mpVI 77-13-4]
MSANLESAAAFETSVLGFLYRQWIARRPPIPIGTNLNSQVAIITGSNSGLGLEAGRQLLRLGLSHLIVAVRSQAKGEKAAEGLQREFSNAQISVWSLDMESYVSITDFVERCKSLPRIDVALLNAGLSGGPEYKTTEGTGHEHSFQINYLSTMLLAILLLPILKAKRAFDSKPPVLSIVTSDTAYWQKLETPGPLLAQFDKPNTYEPFLWYGRAKLLQILFISKLAQEVNADDVIINLANPGLCDSGFLRNDGTTMSIFWTLVFGIFKTAVARSVDAGASTYVDAVVLKGQESHGSYVSDWAIKPYPQLLYTQEGVDVRERLWEETMEELNFVGASDIIKHLQD

SEQ ID NO: 36652 - DNA, 1644 bp, Muscodor strobelii
  misc_feature: SGI cDNA ID NO. 572707
  misc_feature: Encodes the peptide sequence at SEQ ID NO 36653
atggttagcgcaccggcactacgatcgagggctcgtagggagcgggacgaaattgagatggcgttgatggagggcccggtcttcgagaaagtgaaatggtatagggagcctcatctcttgaagctctacggctgggcagtgatcttgatcatgggaagtgtcacaacaggttacgatggcatgttggtcaacacttctcagcagattgatcgttggaaggaatacttccctcgcacacaggttgggccaaacaacccacaggctgttgcagatagttggctcggtcttttggtgaacattttcaatgtcgggagtgtcgtcagtttcttcattacaccatatattgcggaccactggggacggaagatctgtatagcgattgggtgcacgatcatgatcggtggtggtgtgttggctgcatttgcaaatcaataccagatgtatgtcgctggtagatttctctccggatttggcaacagtttgactcagatggcatcacctctcctgcttaccgagatctgtcatccgcaacaccgtggtccagtcacagcaatttacaattgtctttggaatcttggggcgctcatggtagcttggatagcctggggaacatcacgagtacaaagtgattggtcctggcgatcaatcacagtcgcacagacgatgccgtctctgatcatgcttacattcatctactggataccagagagccccagatatctcatgtcgaaagatcgccaccgagaggcactcgatattctagccaaataccacgccggtggaaggaaacgagacctgcttgttcaattcgaataccgagagattaaagaaacactggcgattgagaaacaagtctctcaatccgctggctatctggatttcattcggacaaggggcaaccgttggcgtctggctattctggtgtctttgggtgtcatatcccagtatagtggtaatgcactgttctcgaactacatcgatgccatttatgaaggcgcaggaatcacagaccagaacaagaaactcgcgataagcggcggcaaaacgatccttgatcttattgtcacggtattagcagccctaaatgtcgatagatttggacgacgcccactattcttgctctccatttccggaatggtcatctcatttgctagttggacggtttgtggagctatatacgagggctcaaacctcgaaaatcttgtcgcaggatgggctcaattgatcttcatttggctcttcggtatcttctacgacatcgggttctcgggcatgctgattgcttacgcccttgaagtcttacctttcagtctccgcgccaaaggcatgatgatcatgaacatcaccgtacaggcgatattagcattaagtaaccagacgaacaagatcgcgtggaatagactcccgaagcactggtacttcatgcttttctatacggtctgggatttcctcgagctagttttcgtatatttcttttacgtcgagacaaaaggaccaacactcgaagaaatcgcgcgtatttttgacggcgtagatgcgcccgtagcgaacatcaatattcgacaagtcgagaaagaaatccatgccctagagcatgacgccgcatcaataccagaggcacagtattatcctggggcgttttga

SEQ ID NO: 36653 - protein, 547 aa, Muscodor strobelii
  misc_feature: SGI Peptide ID NO. 572707
  misc_feature (44)..(458): Pfam Id: PF07690 Pfam Desc: Major Facilitator Superfamily
  misc_feature (45)..(508): Pfam Id: PF00083 Pfam Desc: Sugar (and other) transporter
  misc_feature (92)..(198): Pfam Id: PF07690 Pfam Desc: Major Facilitator Superfamily
  misc_feature (6)..(533): NCBI GI: 171682982 Blast Desc: protein product [Podospora anserina] gi|170941450|emb|CAP67102.1| protein product [Podospora anserina]
  misc_feature (11)..(539): NCBI GI: 115386538 Blast Desc: conserved [Aspergillus terreus NIH2624] gi|114190808|gb|EAU32508.1| conserved [Aspergillus terreus NIH2624]
  misc_feature (11)..(529): NCBI GI: 119473893 Blast Desc: MFS hexose transporter, [Neosartorya fischeri NRRL 181] gi|119406975|gb|EAW16925.1| MFS hexose transporter, [Neosartorya fischeri NRRL 181]
  misc_feature (5)..(532): NCBI GI: 261361535 Blast Desc: MFS hexose transporter [Verticillium albo-atrum VaMs.102]
  misc_feature (17)..(533): NCBI GI: 39976289 Blast Desc: MGG_05929 [Magnaporthe grisea 70-15] gi|145011807|gb|EDJ96463.1| MGG_05929 [Magnaporthe grisea 70-15]
  misc_feature (24)..(529): NCBI GI: 121712210 Blast Desc: MFS hexose transporter, [Aspergillus clavatus NRRL 1] gi|119401872|gb|EAW12294.1| MFS hexose transporter, [Aspergillus clavatus NRRL 1]
  misc_feature (8)..(534): NCBI GI: 46121949 Blast Desc: FG05352.1 [Gibberella zeae PH-1]
  misc_feature (8)..(533): NCBI GI: 256724948 Blast Desc: [Nectria haematococca mpVI 77-13-4]
  misc_feature (11)..(539): NCBI GI: 70985968 Blast Desc: MFS hexose transporter [Aspergillus fumigatus Af293] gi|66846117|gb|EAL86450.1| MFS hexose transporter, [Aspergillus fumigatus Af293] gi|159128378|gb|EDP53493.1| MFS hexose fumigatus
  misc_feature (11)..(531): NCBI GI: 255954533 Blast Desc: Pc21g09830 [Penicillium chrysogenum Wisconsin 54-1255] gi|211589730|emb|CAP95880.1| Pc21g09830 [Penicillium chrysogenum Wisconsin 54-1255]
MVSAPALRSRARRERDEIEMALMEGPVFEKVKWYREPHLLKLYGWAVILIMGSVTTGYDGMLVNTSQQIDRWKEYFPRTQVGPNNPQAVADSWLGLLVNIFNVGSVVSFFITPYIADHWGRKICIAIGCTIMIGGGVLAAFANQYQMYVAGRFLSGFGNSLTQMASPLLLTEICHPQHRGPVTAIYNCLWNLGALMVAWIAWGTSRVQSDWSWRSITVAQTMPSLIMLTFIYWIPESPRYLMSKDRHREALDILAKYHAGGRKRDLLVQFEYREIKETLAIEKQVSQSAGYLDFIRTRGNRWRLAILVSLGVISQYSGNALFSNYIDAIYEGAGITDQNKKLAISGGKTILDLIVTVLAALNVDRFGRRPLFLLSISGMVISFASWTVCGAIYEGSNLENLVAGWAQLIFIWLFGIFYDIGFSGMLIAYALEVLPFSLRAKGMMIMNITVQAILALSNQTNKIAWNRLPKHWYFMLFYTVWDFLELVFVYFFYVETKGPTLEEIARIFDGVDAPVANINIRQVEKEIHALEHDAASIPEAQYYPGAF

SEQ ID NO: 36654 - DNA, 882 bp, Muscodor strobelii
  misc_feature: SGI cDNA ID NO. 572708
  misc_feature: Elevated expression when VOC is produced
  misc_feature: Encodes the peptide sequence at SEQ ID NO 36655
atgtacacggcgacggcgacggcgtctattgaggctgcgcgtgcgacggcgctgacgcttagtccgacgagtgatgtgaaggggaagagctttgatcggtttgttacgatctttttggagaatcaggattttgatattgcttatggggatccaaacttaaaggcactagcagaccagggcatactgctcgacaactatttctccgtcacacaccccagccagcctaactacgtcgccacgggaggtggcagtacaaatggaatcatctcggatagcttccaccggatcagcgcagacgttgagactattgctgatctgctcgatgctgggggtgtgagctggagtttgtaccaggaggacatgccgtattctgggttccagggtgattacgttaatcagaagaatggtgcaaatgattatgtcagaaagcacaatccgttgataagctacgattccgtggctacggatgtgaacaaactagcgaagagcaagaacttcactgtctttgagagcgatctatcaaaaaatacgcttccccaatggatgtttatcacgcctaatatgacaaacgacggccacgacagcgatataacaacagccgggtcctgggccggacgctttcttccaccgcttctagagaacaagaacttcaattcagatagaacactcattgttctgacgtttgacgagtgcgagaattaccttgcggagaatcgcgtcatggctgtgttgctcggttccgcgatcccggatgataagattgggacgacggactcgacgaagtataatcattatagtttgctcaagactgtcgaggataactggtctctcggggatttgggcgagaatgatgttagtgctacgccttttgttcttgggtga

SEQ ID NO: 36655 - protein, 293 aa, Muscodor strobelii
  misc_feature: SGI Peptide ID NO. 572708
  misc_feature (31)..(278): Pfam Id: PF04185 Pfam Desc: Phosphoesterase family
  misc_feature (53)..(230): Pfam Id: PF04185 Pfam Desc: Phosphoesterase family
  misc_feature (20)..(290): NCBI GI: 115433472 Blast Desc: phosphate-repressible acid phosphatase precursor [Aspergillus terreus NIH2624] gi|114189725|gb|EAU31425.1| phosphate-repressible acid phosphatase precursor [Aspergillus
  misc_feature (21)..(290): NCBI GI: 170113334 Blast Desc: acid phosphatase [Laccaria bicolor S238N-H82] gi|164637228|gb|EDR01515.1| acid phosphatase [Laccaria bicolor S238N-H82]
  misc_feature (15)..(290): NCBI GI: 254585505 Blast Desc: ZYRO0G07480p [Zygosaccharomyces rouxii] gi|238941214|emb|CAR29387.1| ZYRO0G07480p [Zygosaccharomyces rouxii]
  misc_feature (10)..(287): NCBI GI: 39974603 Blast Desc: MGG_00552 [Magnaporthe grisea 70-15] gi|145018547|gb|EDK02826.1| MGG_00552 [Magnaporthe grisea 70-15]
  misc_feature (21)..(292): NCBI GI: 256722770 Blast Desc: [Nectria haematococca mpVI 77-13-4]
  misc_feature (21)..(292): NCBI GI: 46126601 Blast Desc: FG07678.1 [Gibberella zeae PH-1]
  misc_feature (16)..(287): NCBI GI: 37999237 Blast Desc: acid phosphatase [Pholiota nameko] gi|37999239|dbj|BAD00140.1| acid phosphatase [Pholiota nameko]
  misc_feature (26)..(290): NCBI GI: 50551769 Blast Desc: YALI0E00110p [Yarrowia lipolytica] gi|49649228|emb|CAG78938.1| YALI0E00110p [Yarrowia lipolytica]
  misc_feature (8)..(287): NCBI GI: 255934018 Blast Desc: extracellular acid phosphatase PhoA-Penicillium chrysogenum [Penicillium chrysogenum Wisconsin 54-1255] gi|585686|sp|P37274.1|PHOA_PENCH RecName: acid phosphatase; acid
  misc_feature (26)..(290): NCBI GI: 50556948 Blast Desc: YALI0F25773p [Yarrowia lipolytica] gi|49651752|emb|CAG78693.1| YALI0F25773p [Yarrowia lipolytica]
  misc_feature (21)..(287): SWISSPROT Homolog: EC 3.1.3.2 Acid phosphatase
  misc_feature: Useful for introducing or modulating the production of volatile compounds
MYTATATASIEAARATALTLSPTSDVKGKSFDRFVTIFLENQDFDIAYGDPNLKALADQGILLDNYFSVTHPSQPNYVATGGGSTNGIISDSFHRISADVETIADLLDAGGVSWSLYQEDMPYSGFQGDYVNQKNGANDYVRKHNPLISYDSVATDVNKLAKSKNFTVFESDLSKNTLPQWMFITPNMTNDGHDSDITTAGSWAGRFLPPLLENKNFNSDRTLIVLTFDECENYLAENRVMAVLLGSAIPDDKIGTTDSTKYNHYSLLKTVEDNWSLGDLGENDVSATPFVLG

SEQ ID NO: 36656 - DNA, 2121 bp, Muscodor strobelii
  misc_feature: SGI EST ID NO. CUFF.87480.0
  misc_feature: Variant of the nucleotide sequence at SEQ ID NO 36654
cgcgacttaacgccgggttggccgggagaagaggcctaattgggcaagtgtgctggtttgggaagctggggaatttcggctttcgcccacccacttgaactggtctggcctggtcaggcctgttccttgaacacgttattaatgcgcggtgatctactggacggaggtcgcccaatgccctgctggagaatgcgaacgatggcggccgccgagcctcaacaagggcaggtggttgatggtggcgcgggaaatgagtctgggtaggtggtggagtgcttgcgtagacgtaggtaaggactaggggataggtagatatatagacggaggtgagctgtggtgaaagggagtctgggaattgatagttcaaggcattggaggtccatttggctcatttgtttcttgaggagtgagaagatatagagagttattgatcgtgggcggtgaggaattgacaggttaattatagctgaggtttagtctttacctcggtctctcccacgtttgatcgcactgttgcttctgcgtcagcttcgcgcgtcgagttttccggactccgcttactgtttgaaaaagtcaagggaaatcaatcgagctgcagagtgaagttacctagtcgaaatgggcaacggacagagctcgacgacgtcggtggaccccggcgccatgtacacggcgacggcgacggcgtctattgaggctgcgcgtgcgacggcgctgacgcttagtccgacgagtgatgtgaaggggaagagctttgatcggtttgttacgatctttttggagaatcaggattttgatattgcttatggggatccaaacttaaaggcactagcagaccagggcatactgctcgacaactatttctccgtcacacaccccagccagcctaactacgtcgccacgggaggtggcagtacaaatggaatcatctcggatagcttccaccggatcagcgcagacgttgagactattgctgatctgctcgatgctgggggtgtgagctggagtttgtaccaggaggacatgccgtattctgggttccagggtgattacgttaatcagaagaatggtgcaaatgattatgtcagaaagcacaatccgttgataagctacgattccgtggctacggatgtgaacaaactagcgaagagcaagaacttcactgtctttgagagcgatctatcaaaaaatacgcttccccaatggatgtttatcacgcctaatatgacaaacgacggccacgacagcgatataacaacagccgggtcctgggccggacgctttcttccaccgcttctagagaacaagaacttcaattcagatagaacactcattgttctgacgtttgacgagtgcgagaattaccttgcggagaatcgcgtcatggctgtgttgctcggttccgcgatcccggatgataagattgggacgacggactcgacgaagtataatcattatagtttgctcaagactgtcgaggataactggtctctcggggatttgggcgagaatgatgttagtgctacgccttttgttcttgggtgatttaggcacatataggagccagggtgctctcctgaactccatatagataattcaaagccatggctattctcaaaatcgtttcaggaagtgccatagttctgagaacgtgtttgagagatcgtgttgaggactcgggacttttacgtaacaccaactctccactatacgggatagagggagggaaagggaattttacctggttagaagaagcgaccgaaatatattcttcgatatcatcttgtagaacatatctacatgcgacagacccgcgctagaccgcgtcagcttaattgtgaggctgtttactgaggttgacgacggtatttcagcttggtgttttcattcgcttacacgacccaaagactgcactcgcgatagtgtcaagtagggtcggtaaggcacgtaatccggaggaatgcaagtcatacagcaaaacgctgtctgggctagctattgactctgatgcctacccgacttgcatccacatgttgtcggaattgaaggcaatcagacccgaacccacgaaggatgtcaaaatcgctcttcattcgcgtcggacgtgaggaaggaggtgat

SEQ ID NO: 36657 - DNA, 2817 bp, Muscodor strobelii
  misc_feature: SGI cDNA ID NO. 572709
  misc_feature: Encodes the peptide sequence at SEQ ID NO 36658
atgcccgctcggcggagcatcaagcgggagccgcaggacccttcccctgcccctgttccttctgccccttccaatactattatggctcctccgtttaggaatctacgtaccagtactcgagagaacactatcgacgcacagtctgcagctgtttctttccacagatcacttgctccttctgcggagacacgtcgtcaacaagacgatgatcatgagcccatgttcctcgagatgagggcaaagcccaatggtagcttccaggacgagccaccatccacacagaatgcgaactcttcgttcgctcaccagagcttcgttcatcccacttttaccgacattggaatgaagctacgtgcgttcaacgatgttcatggcaatctccaacgccttggtgttgcaaatgaggcagcggcaaagctccctgaacttgtcttggttggtgatcagtctgccggaaaatccagtctgatgtgcggtatcgctcgtgtcgacatcccaagaagtgcgggagtcggcacccgttgtccactgcacattcagctttccgacaacaaccactggagctgtaccgtggcgttgcagatggattatgattttgaacccaggggacctattcgaaaatcagacgtcaccaacgccaacccctttcctccttgggtgaaaaggacccatcgagagaccaagcttttcaagactatttataatccaaacgagattgaagaggtcctgagatgggctcaagttgccatattgaatcctaccactagccacgagttgtacatccctggtgaaggagctgtcgccaaagacacggacctcacagttgcaactcgagatgctgctgcccaattctctccgaaccttatttcgcttgagattagagcgccggacgcctttaatctaagcttctacgatcttcccggtgtcttcttgtctcctgatcaagaagaagacgagtatatcgtcaaagttgtcagaaatctgacaaaagcctatgttcagagtgaaacagcaatcatcatgtgggctttgccgatgaatgccgacccagagaattcgatctctctaggtattattcgcgaggcaagagcatcagatcgtacaattggcatcatgactaaagcggatatgctgggtgctgaagactgtgatcaatggcttgcgatgtttagaggacagaagcagtcggttggccatggattttttgcaacttcaagacctcccaaggaggatgatgcgagcaaatgggaggaattgttcttcgcccgagaaattggccaatggcctgtctccttcgccgaatatcaagacagatgtggtgtcgatcgattgagtcaatacatctcggtccagcttggtaatgcttttgccaaaagcctacctcaaaccaaatatcgagtcttacagcgcttgagggaaatccaacatcagctttctggtctaccagaattgcctcacaatgtcgagcatgaggtgaagagaagtctacacgaatttctgttccgcatgaagatggcgatcaaggactcaaccttttcgtcagaatggagcaaactcaactgtcaatttcgtgacgtgatccttaagattaaacccacctgtcgcgtcaaggagccggaggcacagacaatagatttgtcggacgcggacacagaggtgtcagctgtgacgccttcgaaacgaccacgtcctagcgactcgacagtccgccagactccgaccagcaagaggatccgaccggaagtcaacgaagccacgcctgtgaagcaagagggcttcttgacgccaactgcgttgaatggtatcagggcccaatctgtcattaatggtggcggcccggctatgaacatgagcagcccgttttggggcttccgcaacctcggacgcttggcgatggacattagagatatcagagctgaagtacgaaggaaacagcgacccggaatgcctcgcgacctcgtccctgacgaagtacgggagactttgtgtctaaacgcagtacgaaaatgggaccgacctctagataaatacgtggacgaaacagagaagctcttgaagcaagtcacgaatcaagttcttgaagagtcgcttggggttctccgtcgccgccttatcttcaaagaatgtcaagctcatctcaccgagtttatcgactctgcagttgctagccaacgcgcccgcctggtagacatgtttgaagccgagacatatcaaatatacatgatgaacgaagatgtgttccgtcgctacaaggcgcaagaattggacggtctacgtcgagcccgcgcgatataccgacttaaagcggtcgctcgattagagtggaattataatatcaaacaactcgacgagatgactgaagaagagaaggcctttgaggcaaaaacatttaatacccacctcccgaagatgggccaagatcctttcgaaactgaaatagaggttgccgcttttgttcgcggttattatttgacggcagccaaccgatttgttgaaggtgccaccatgagcgtgaactcgttcctgtttcgtacggtcggtgggactcagctcgatatgttcatggacaatggtctgcgcatttctgatgcaaatgcctaccagcatcttatggaggaggatgaaaggaccgcgagacttcgtgaccagctgaaagagaagatcgacaggctgtccgaagcaatggccagtatcaatgggctggagacatcatcgggaagcggcagtaacagtggcctttccaacggtacccttcagcgagagcctaccatcgagcttgacggcgaagatgatattatggacgcagacgacgtttaa

SEQ ID NO: 36658 - protein, 938 aa, Muscodor strobelii
  misc_feature: SGI Peptide ID NO. 572709
  misc_feature (52)..(911): NCBI GI: 46121947 Blast Desc: FG05351.1 [Gibberella zeae PH-1]
  misc_feature (52)..(907): NCBI GI: 256724949 Blast Desc: [Nectria haematococca mpVI 77-13-4]
  misc_feature (55)..(902): NCBI GI: 116203035 Blast Desc: CHGG_09402 [Chaetomium globosum CBS 148.51] gi|88177920|gb|EAQ85388.1| CHGG_09402 [Chaetomium globosum CBS 148.51]
  misc_feature (66)..(915): NCBI GI: 171682774 Blast Desc: protein product [Podospora anserina] gi|170941346|emb|CAP66996.1| protein product [Podospora anserina]
  misc_feature (7)..(914): NCBI GI: 85091189 Blast Desc: NCU05936 [Neurospora crassa OR74A] gi|28920165|gb|EAA29544.1| [Neurospora crassa OR74A]
  misc_feature (34)..(910): NCBI GI: 145603586 Blast Desc: MGG_05937 [Magnaporthe grisea 70-15] gi|145011797|gb|EDJ96453.1| MGG_05937 [Magnaporthe grisea 70-15]
  misc_feature (135)..(893): NCBI GI: 154310903 Blast Desc: BC1G_06430 [Botryotinia fuckeliana B05.10] gi|150851229|gb|EDN26422.1| BC1G_06430 [Botryotinia fuckeliana B05.10]
  misc_feature (14)..(891): NCBI GI: 156034298 Blast Desc: SS1G_13452 [Sclerotinia sclerotiorum 1980] gi|154698855|gb|EDN98593.1| SS1G_13452 [Sclerotinia sclerotiorum 1980]
  misc_feature (90)..(906): NCBI GI: 225679118 Blast Desc: interferon-induced GTP-binding protein Mx2 [Paracoccidioides brasiliensis Pb03]
  misc_feature (90)..(906): NCBI GI: 226282880 Blast Desc: dynamin family protein [Paracoccidioides brasiliensis Pb01]
MPARRSIKREPQDPSPAPVPSAPSNTIMAPPFRNLRTSTRENTIDAQSAAVSFHRSLAPSAETRRQQDDDHEPMFLEMRAKPNGSFQDEPPSTQNANSSFAHQSFVHPTFTDIGMKLRAFNDVHGNLQRLGVANEAAAKLPELVLVGDQSAGKSSLMCGIARVDIPRSAGVGTRCPLHIQLSDNNHWSCTVALQMDYDFEPRGPIRKSDVTNANPFPPWVKRTHRETKLFKTIYNPNEIEEVLRWAQVAILNPTTSHELYIPGEGAVAKDTDLTVATRDAAAQFSPNLISLEIRAPDAFNLSFYDLPGVFLSPDQEEDEYIVKVVRNLTKAYVQSETAIIMWALPMNADPENSISLGIIREARASDRTIGIMTKADMLGAEDCDQWLAMFRGQKQSVGHGFFATSRPPKEDDASKWEELFFAREIGQWPVSFAEYQDRCGVDRLSQYISVQLGNAFAKSLPQTKYRVLQRLREIQHQLSGLPELPHNVEHEVKRSLHEFLFRMKMAIKDSTFSSEWSKLNCQFRDVILKIKPTCRVKEPEAQTIDLSDADTEVSAVTPSKRPRPSDSTVRQTPTSKRIRPEVNEATPVKQEGFLTPTALNGIRAQSVINGGGPAMNMSSPFWGFRNLGRLAMDIRDIRAEVRRKQRPGMPRDLVPDEVRETLCLNAVRKWDRPLDKYVDETEKLLKQVTNQVLEESLGVLRRRLIFKECQAHLTEFIDSAVASQRARLVDMFEAETYQIYMMNEDVFRRYKAQELDGLRRARAIYRLKAVARLEWNYNIKQLDEMTEEEKAFEAKTFNTHLPKMGQDPFETEIEVAAFVRGYYLTAANRFVEGATMSVNSFLFRTVGGTQLDMFMDNGLRISDANAYQHLMEEDERTARLRDQLKEKIDRLSEAMASINGLETSSGSGSNSGLSNGTLQREPTIELDGEDDIMDADDV

SEQ ID NO: 36659 - DNA, 3919 bp, Muscodor strobelii
  misc_feature: SGI EST ID NO. CUFF.87477.0
  misc_feature: Variant of the nucleotide sequence at SEQ ID NO 36657
caccaacacatcatacccccctgtccgccagtcgccctcaagacttagatagtgctgccgcagcgactgctagcaaccactaacagctgcctgaggttgaagttgatgcatgttcttacctgttgatcattgttgccctcgacttctttcctactcacccacatcttgttgccccaatgctcttgcatattgcgcagactcggccttgggaaatacaatagttggtgttgcaacttactgactctcactcaaccttttcgtcttgacatccattccccactttcctacctcatatacatacacctgaagcagctttgtctctctcttcaggctctgaaagacgaatatctgtaacaccagccttcacttgttcttgcatctattcgccttgatcaacaactgcattgtgaagcattttgagctctccccgcgacaacttacaacttcgtcagtgggaacacacccgtacatcatatttattcggggtgcagcatcctcttttacttcaggtacctgactgttgaacattggaatcatcagactcaactcaaatcaccaatcaaatacatcgtgctcttgttacagacacaactccgtcgccaatcatgcccgctcggcggagcatcaagcgggagccgcaggacccttcccctgcccctgttccttctgccccttccaatactattatggctcctccgtttaggaatctacgtaccagtactcgagagaacactatcgacgcacagtctgcagctgtttctttccacagatcacttgctccttctgcggagacacgtcgtcaacaagacgatgatcatgagcccatgttcctcgagatgagggcaaagcccaatggtagcttccaggacgagccaccatccacacagaatgcgaactcttcgttcgctcaccagagcttcgttcatcccacttttaccgacattggaatgaagctacgtgcgttcaacgatgttcatggcaatctccaacgccttggtgttgcaaatgaggcagcggcaaagctccctgaacttgtcttggttggtgatcagtctgccggaaaatccagtctgatgtgcggtatcgctcgtgtcgacatcccaagaagtgcgggagtcggcacccgttgtccactgcacattcagctttccgacaacaaccactggagctgtaccgtggcgttgcagatggattatgattttgaacccaggggacctattcgaaaatcagacgtcaccaacgccaacccctttcctccttgggtgaaaaggacccatcgagagaccaagcttttcaagactatttataatccaaacgagattgaagaggtcctgagatgggctcaagttgccatattgaatcctaccactagccacgagttgtacatccctggtgaaggagctgtcgccaaagacacggacctcacagttgcaactcgagatgctgctgcccaattctctccgaaccttatttcgcttgagattagagcgccggacgcctttaatctaagcttctacgatcttcccggtgtcttcttgtctcctgatcaagaagaagacgagtatatcgtcaaagttgtcagaaatctgacaaaagcctatgttcagagtgaaacagcaatcatcatgtgggctttgccgatgaatgccgacccagagaattcgatctctctaggtattattcgcgaggcaagagcatcagatcgtacaattggcatcatgactaaagcggatatgctgggtgctgaagactgtgatcaatggcttgcgatgtttagaggacagaagcagtcggttggccatggattttttgcaacttcaagacctcccaaggaggatgatgcgagcaaatgggaggaattgttcttcgcccgagaaattggccaatggcctgtctccttcgccgaatatcaagacagatgtggtgtcgatcgattgagtcaatacatctcggtccagcttggtaatgcttttgccaaaagcctacctcaaaccaaatatcgagtcttacagcgcttgagggaaatccaacatcagctttctggtctaccagaattgcctcacaatgtcgagcatgaggtgaagagaagtctacacgaatttctgttccgcatgaagatggcgatcaaggactcaaccttttcgtcagaatggagcaaactcaactgtcaatttcgtgacgtgatccttaagattaaacccacctgtcgcgtcaaggagccggaggcacagacaatagatttgtcggacgcggacacagaggtgtcagctgtgacgccttcgaaacgaccacgtcctagcgactcgacagtccgccagactccgaccagcaagaggatccgaccggaagtcaacgaagccacgcctgtgaagcaagagggcttcttgacgccaactgcgttgaatggtatcagggcccaatctgtcattaatggtggcggcccggctatgaacatgagcagcccgttttggggcttccgcaacctcggacgcttggcgatggacattagagatatcagagctgaagtacgaaggaaacagcgacccggaatgcctcgcgacctcgtccctgacgaagtacgggagactttgtgtctaaacgcagtacgaaaatgggaccgacctctagataaatacgtggacgaaacagagaagctcttgaagcaagtcacgaatcaagttcttgaagagtcgcttggggttctccgtcgccgccttatcttcaaagaatgtcaagctcatctcaccgagtttatcgactctgcagttgctagccaacgcgcccgcctggtagacatgtttgaagccgagacatatcaaatatacatgatgaacgaagatgtgttccgtcgctacaaggcgcaagaattggacggtctacgtcgagcccgcgcgatataccgacttaaagcggtcgctcgattagagtggaattataatatcaaacaactcgacgagatgactgaagaagagaaggcctttgaggcaaaaacatttaatacccacctcccgaagatgggccaagatcctttcgaaactgaaatagaggttgccgcttttgttcgcggttattatttgacggcagccaaccgatttgttgaaggtgccaccatgagcgtgaactcgttcctgtttcgtacggtcggtgggactcagctcgatatgttcatggacaatggtctgcgcatttctgatgcaaatgcctaccagcatcttatggaggaggatgaaaggaccgcgagacttcgtgaccagctgaaagagaagatcgacaggctgtccgaagcaatggccagtatcaatgggctggagacatcatcgggaagcggcagtaacagtggcctttccaacggtacccttcagcgagagcctaccatcgagcttgacggcgaagatgatattatggacgcagacgacgtttaatttgtcgcttttgaagcacgggaaagctgctacgatggactcgcacgatacccagttttgatattcgatgactctgacttgagatgatccgtctctttctggatccgctctgatgatgtacaattaactctctttgctagctcgcgcggttagctagagagattgtctgcgatatgtgtcaaaaaaatgtttggacggaaaaggtgtttggtaggacacttcaatggatctgttgattcacgcaaatttcggaaaaatccggcgagggagagagagtctgttcttgtgacttagatcaaccggatgctaaggccacccggcttctaatcgataataagttcctggcggacagacgcttccttggaaagcattgtagcaatgcgttatcataggatcgtcaatggctgtctaggaatatggctgcatgatgagctcttttccgttctgtagctagctcgatagcaactgaagatatctgaagcattctcatgcccgtc

SEQ ID NO: 36660 - DNA, 888 bp, Muscodor strobelii
  misc_feature: SGI cDNA ID NO. 572710
  misc_feature: Encodes the peptide sequence at SEQ ID NO 36661
atggccccgcctgtccaggctactcgcgatggcggcgcagcatcgtctttcgttagattctggaatcactcctatgcgcccgactacctcggcttcgctgccctcctcaccgcctacatcctcatcgtcttcctcgtcacgccctttcatcgcatgttctacatcaacaacctcgacatcgccttcccccatgctgcagtcgagcgagtccccgtctggctgaatgtcgtctacgccgcattcataccgctaggcattctcatactctataactccatatcccgcgcctccttccacaagcaccacaacgctatcctcgggctggctgtcgccctggccctgtcgtccttcctcaccgacgttgtcaagaatactgtcggccgcccgcgacccgacttgatcgcccgctgcaagcccgccgccggcaccaagcccaatgttctcgtcaccatcgacgtctgcaccgagacagaccaccataccctccacgatggctggcgctcctttccctcaggacactccagcttctccttcagtgggctgggctacctggcctgctttctggccggccagctgagaatctttcgtgacaaaaaggacctcggtcgagccttggtgtgtcttgcgcctttgattggcgctgccatgatcgccatcagccgttgcgaggattaccgccacgatgtttatgacgtctgtacggggtcgctgctgggaatcacggtcggcttctggagctaccgtcgctattggcgtaggctgggtagtcgcgagtgcaatgaaccttatccccttcctggtactgagctggaagatcgccaaggctggcagagagtgcgcgacgaagaggaaggcggtcccatcttgggccgaaacgcagggagttga

SEQ ID NO: 36661 - protein, 295 aa, Muscodor strobelii
  misc_feature: SGI Peptide ID NO. 572710
  misc_feature (104)..(255): Pfam Id: PF01569 Pfam Desc: PAP2 superfamily
  misc_feature (24)..(286): NCBI GI: 46121977 Blast Desc: FG05366.1 [Gibberella zeae PH-1]
  misc_feature (7)..(284): NCBI GI: 145612918 Blast Desc: MGG_12462 [Magnaporthe grisea 70-15] gi|145020007|gb|EDK04235.1| MGG_12462 [Magnaporthe grisea 70-15]
  misc_feature (8)..(284): NCBI GI: 156047531 Blast Desc: SS1G_09506 [Sclerotinia sclerotiorum 1980] gi|154693901|gb|EDN93639.1| SS1G_09506 [Sclerotinia sclerotiorum 1980]
  misc_feature (12)..(294): NCBI GI: 171682780 Blast Desc: protein product [Podospora anserina] gi|170941349|emb|CAP66999.1| protein product [Podospora anserina]
  misc_feature (24)..(294): NCBI GI: 116203059 Blast Desc: CHGG_09414 [Chaetomium globosum CBS 148.51] gi|88177932|gb|EAQ85400.1| CHGG_09414 [Chaetomium globosum CBS 148.51]
  misc_feature (12)..(295): NCBI GI: 242789490 Blast Desc: PAP2 domain protein [Talaromyces stipitatus ATCC 10500] gi|218717958|gb|EED17378.1| PAP2 domain protein [Talaromyces stipitatus ATCC 10500]
  misc_feature (12)..(294): NCBI GI: 226292050 Blast Desc: diacylglycerol pyrophosphate phosphatase [Paracoccidioides brasiliensis Pb18]
  misc_feature (12)..(294): NCBI GI: 226282782 Blast Desc: diacylglycerol pyrophosphate phosphatase [Paracoccidioides brasiliensis Pb01]
  misc_feature (12)..(284): NCBI GI: 212534186 Blast Desc: PAP2 domain protein [Penicillium marneffei ATCC 18224] gi|210069648|gb|EEA23738.1| PAP2 domain protein [Penicillium marneffei ATCC 18224]
  misc_feature (12)..(284): NCBI GI: 212534188 Blast Desc: PAP2 domain protein [Penicillium marneffei ATCC 18224] gi|210069649|gb|EEA23739.1| PAP2 domain protein [Penicillium marneffei ATCC 18224]
  misc_feature (35)..(283): SWISSPROT Homolog: EC 3.1.3.4 Phosphatidate phosphatase
MAPPVQATRDGGAASSFVRFWNHSYAPDYLGFAALLTAYILIVFLVTPFHRMFYINNLDIAFPHAAVERVPVWLNVVYAAFIPLGILILYNSISRASFHKHHNAILGLAVALALSSFLTDVVKNTVGRPRPDLIARCKPAAGTKPNVLVTIDVCTETDHHTLHDGWRSFPSGHSSFSFSGLGYLACFLAGQLRIFRDKKDLGRALVCLAPLIGAAMIAISRCEDYRHDVYDVCTGSLLGITVGFWSYRRYWRRLGSRECNEPYPLPGTELEDRQGWQRVRDEEEGGPILGRNAGS

SEQ ID NO: 36662 - DNA, 1730 bp, Muscodor strobelii
  misc_feature: SGI EST ID NO. CUFF.87483.2
  misc_feature: Variant of the nucleotide sequence at SEQ ID NO 36660
gggccatccctccatccaatgctcaacatgtcctccacgcagcagtgttagtacttacatagtaatcctacctccacacgtctcgccttgccatgctgtggaacgcattccgagctgtacgtggacggtgactagctacaatggccccgcctgtccaggctactcgcgatggcggcgcagcatcgtctttcgttagattctggaatcactcctatgcgcccgactacctcggcttcgctgccctcctcaccgcctacatcctcatcgtcttcctcgtcacgccctttcatcgcatgttctacatcaacaacctcgacatcgccttcccccatgctgcagtcgagcgagtccccgtctggctgaatgtcgtctacgccgcattcataccgctaggcattctcatactctataactccatatcccgcgcctccttccacaagcaccacaacgctatcctcgggctggctgtcgccctggccctgtcgtccttcctcaccgacgttgtcaagaatactgtcggccgcccgcgacccgacttgatcgcccgctgcaagcccgccgccggcaccaagcccaatgttctcgtcaccatcgacgtctgcaccgagacagaccaccataccctccacgatggctggcgctcctttccctcaggacactccagcttctccttcagtgggctgggctacctggcctgctttctggccggccagctgagaatctttcgtgacaaaaaggacctcggtcgagccttggtgtgtcttgcgcctttgattggcgctgccatgatcgccatcagccgttgcgaggattaccgccacgatgtttatgacgtctgtacggggtcgctgctgggaatcacggtcggcttctggagctaccgtcgctattggcgtaggctgggtagtcgcgagtgcaatgaaccttatccccttcctggtactgagctggaagatcgccaaggctggcagagagtgcgcgacgaagaggaaggcggtcccatcttgggccgaaacgcagggagttgaatgtcttgtagcaattggtgtctgtaagtacagaataagataagaatcgctaccggagttgaactaaaatatggcctcaaagagtataggtttctttggctgggagatacacccatatatgcgctacaacttggaaaatgcccgtcctgcaacgacctgccattttcacttgctgatatcatctcattgaatcagagctagttggataggagaggctgggaaattcacatacatggttgtatctatcacatctgcgtcaaaataagctgatgatttagagtagtttttacctactatgcacacatacacattctgctcagagaaacaagaaactacgtagctcctgacaagtgaatttcgagctgttttcaaaagaatctcaagatgttgtaccctggcacgagacatgattgtgtattgtgcctgagttctacccaagagatccgatatctccagtgctattacctacttatctctctagtatcgggtgaggagggaagctacctgacgtattgaaagttgaaagtggcagttgcatcgttcctgacatcgtactttcagttaggcagaaaccaagcactgagctgaaaggtgccacccgcacctgcctttcccttggcaccgtggcaagatgagaacattgggagagttgtgcacgacttcacgaaagattcacgaattaccatacaaaaatgtatgggc

SEQ ID NO: 36663 - DNA, 1743 bp, Muscodor strobelii
  misc_feature: SGI cDNA ID NO. 572711
  misc_feature: Reduced expression when VOC is produced
  misc_feature: Encodes the peptide sequence at SEQ ID NO 36664
atgttgaagtcgacgtacaagccgtcggccaacgtccagcgccctctgcccccgggctggacagaacacaaagctcccagcggccatacctactactacaacgagaccacaaagcagtccacctacacccgccccgagtccagtcctgcacccccgccgccgacaaatccaaatccacacgccagtcacttccagtactcccaagtacccaacctcgccgaccctgccaccgccaatgccttcctcgctcagtacgatcccgcccaccagcgccatgcccaagcctccaactctcgcggcgggcgcggaggacatcggggaggccgcgatggagggggttcaccgcgaccacagcccaacgacaagcccaagtccaaggtcgccatccccggttgcgaaccctggatcctagtatacacaaagtatggccgtcgcttcgcttacaatcccgtcaagaacgccagctactggaggatcccggacaagattatgcagggcgtcctcgagttggacatcaaggggatcaaagacaaggccggcaccatagatatagacaacgcgagcccatctgccgcgactcccactgctgacgaccagaacaccgcccagtccaatgaggccgaagagcaggctgaagacttggccgattatggttcagactacgaagaggtagaggtcacagacgacgaggatggcgctgatggggagaacgcggagggaaacgacgacaacgacgagcgcccctccaaacgccaacgcaccgaggaccccgcccaagacatgcctgtcgagttcaacgaggaggacatcgctttccagctacaagccatgggcgaggaatacggcctagatccaggagaatacgatgacgggaaccccgaagactggcccgaaggcgcagaaggtgtccccttctcagaagaagacgcgaaggccctgttcaaggatctcctcgaggatcacaataccaacccatactcgccgtgggataatctaatcgaaaccggccgtctcatcgaagacacgcgctacacagtcctcgacaccatgaaggcacgaaaagaagtctacgaagagtggagtcgagagcgcatccagatcctcaaagaacagcgcgcaacggcagagaagaaggatccaagaataccgtatatggcattcctggaacaaaaggcaacaccgaaactatactggcctgaattccgccgcaaatacaagaaagaagacccgatgcgcgattcgtcgctcagtgatcgggacagggaaaagtggtatagggagtacatcggcaaattaaagctcccgcaagagacgcgcaaaaaggaattgacaaacttgctgaaagaaatacctctgcgcctactcaacaacaagacactacccgaaaatctgccaagtcagataacagcagatgtacgcttcattgctctcgagcccaaagctcgcgacccaatggtgaaggcctacatacaatctcttcccgcgccgccagatgcagatgaggcagatgaggacgaagcagccaggaaagcgagggaggaccgcaagaagcgggaaaaggctctggcggagcgcgagcgcgttgttgcagaggagaggaagaggtctgagaagcagctaagatatgggaaggcagcgctgagagaggaggagagagagctcgagaaggctatgcaagttgggaagaaaggactgcaaagtcagctgcttgctggtagagatcaaaatgctgaggcttcgtaa

SEQ ID NO: 36664 - protein, 580 aa, Muscodor strobelii
  misc_feature: SGI Peptide ID NO. 572711
  misc_feature (16)..(45): Pfam Id: PF00397 Pfam Desc: WW domain
  misc_feature (309)..(360): Pfam Id: PF01846 Pfam Desc: FF domain
  misc_feature (1)..(570): NCBI GI: 39946364 Blast Desc: MGG_08329 [Magnaporthe grisea 70-15] gi|145020024|gb|EDK04252.1| MGG_08329 [Magnaporthe grisea 70-15]
  misc_feature (1)..(579): NCBI GI: 46121979 Blast Desc: FG05367.1 [Gibberella zeae PH-1]
  misc_feature (1)..(578): NCBI GI: 261361471 Blast Desc: FF domain-containing protein [Verticillium albo-atrum VaMs.102]
  misc_feature (1)..(575): NCBI GI: 116203307 Blast Desc: CHGG_09538 [Chaetomium globosum CBS 148.51] gi|88178056|gb|EAQ85524.1| CHGG_09538 [Chaetomium globosum CBS 148.51]
  misc_feature (1)..(572): NCBI GI: 154298455 Blast Desc: BC1G_11412 [Botryotinia fuckeliana B05.10] gi|150858008|gb|EDN33200.1| BC1G_11412 [Botryotinia fuckeliana B05.10]
  misc_feature (1)..(572): NCBI GI: 156042277 Blast Desc: SS1G_11689 [Sclerotinia sclerotiorum 1980] gi|154696072|gb|EDN95810.1| SS1G_11689 [Sclerotinia sclerotiorum 1980]
  misc_feature (2)..(569): NCBI GI: 171682952 Blast Desc: protein product [Podospora anserina] gi|170941435|emb|CAP67086.1| protein product [Podospora anserina]
  misc_feature (1)..(571): NCBI GI: 119470084 Blast Desc: FF domain protein [Neosartorya fischeri NRRL 181] gi|119406166|gb|EAW16117.1| FF domain protein [Neosartorya fischeri NRRL 181]
  misc_feature (1)..(569): NCBI GI: 255932235 Blast Desc: Pc12g08440 [Penicillium chrysogenum Wisconsin 54-1255] gi|211582293|emb|CAP80471.1| Pc12g08440 [Penicillium chrysogenum Wisconsin 54-1255]
  misc_feature (1)..(572): NCBI GI: 226282847 Blast Desc: FF domain-containing protein [Paracoccidioides brasiliensis Pb01]
  misc_feature: Useful for introducing or modulating the production of volatile compounds
MLKSTYKPSANVQRPLPPGWTEHKAPSGHTYYYNETTKQSTYTRPESSPAPPPPTNPNPHASHFQYSQVPNLADPATANAFLAQYDPAHQRHAQASNSRGGRGGHRGGRDGGGSPRPQPNDKPKSKVAIPGCEPWILVYTKYGRRFAYNPVKNASYWRIPDKIMQGVLELDIKGIKDKAGTIDIDNASPSAATPTADDQNTAQSNEAEEQAEDLADYGSDYEEVEVTDDEDGADGENAEGNDDNDERPSKRQRTEDPAQDMPVEFNEEDIAFQLQAMGEEYGLDPGEYDDGNPEDWPEGAEGVPFSEEDAKALFKDLLEDHNTNPYSPWDNLIETGRLIEDTRYTVLDTMKARKEVYEEWSRERIQILKEQRATAEKKDPRIPYMAFLEQKATPKLYWPEFRRKYKKEDPMRDSSLSDRDREKWYREYIGKLKLPQETRKKELTNLLKEIPLRLLNNKTLPENLPSQITADVRFIALEPKARDPMVKAYIQSLPAPPDADEADEDEAARKAREDRKKREKALAERERVVAEERKRSEKQLRYGKAALREEERELEKAMQVGKKGLQSQLLAGRDQNAEAS

SEQ ID NO: 36665 - DNA, 3648 bp, Muscodor strobelii
  misc_feature: SGI EST ID NO. CUFF.87536.0
  misc_feature: Variant of the nucleotide sequence at SEQ ID NO 36663
gcgctagagttcattctttattttacatctctgtatttttcctctctggtttacggcgcccttccaacctgtcgcgttttgactcgccgctcgatcttagtttggtgcatcttctgcctcagcgtcggcttgcgcagggatgtcgacaagatgttgaagtcgacgtacaagccgtcggccaacgtccagcgccctctgcccccgggctggacagaacacaaagctcccagcggccatacctactactacaacgagaccacaaagcagtccacctacacccgccccgagtccagtcctgcacccccgccgccgacaaatccaaatccacacgccagtcacttccagtactcccaagtacccaacctcgccgaccctgccaccgccaatgccttcctcgctcagtacgatcccgcccaccagcgccatgcccaagcctccaactctcgcggcgggcgcggaggacatcggggaggccgcgatggagggggttcaccgcgaccacagcccaacgacaagcccaagtccaaggtcgccatccccggttgcgaaccctggatcctagtatacacaaagtatggccgtcgcttcgcttacaatcccgtcaagaacgccagctactggaggatcccggacaagattatgcagggcgtcctcgagttggacatcaaggggatcaaagacaaggccggcaccatagatatagacaacgcgagcccatctgccgcgactcccactgctgacgaccagaacaccgcccagtccaatgaggccgaagagcaggctgaagacttggccgattatggttcagactacgaagaggtagaggtcacagacgacgaggatggcgctgatggggagaacgcggagggaaacgacgacaacgacgagcgcccctccaaacgccaacgcaccgaggaccccgcccaagacatgcctgtcgagttcaacgaggaggacatcgctttccagctacaagccatgggcgaggaatacggcctagatccaggagaatacgatgacgggaaccccgaagactggcccgaaggcgcagaaggtgtccccttctcagaagaagacgcgaaggccctgttcaaggatctcctcgaggatcacaataccaacccatactcgccgtgggataatctaatcgaaaccggccgtctcatcgaagacacgcgctacacagtcctcgacaccatgaaggcacgaaaagaagtctacgaagagtggagtcgagagcgcatccagatcctcaaagaacagcgcgcaacggcagagaagaaggatccaagaataccgtatatggcattcctggaacaaaaggcaacaccgaaactatactggcctgaattccgccgcaaatacaagaaagaagacccgatgcgcgattcgtcgctcagtgatcgggacagggaaaagtggtatagggagtacatcggcaaattaaagctcccgcaagagacgcgcaaaaaggaattgacaaacttgctgaaagaaatacctctgcgcctactcaacaacaagacactacccgaaaatctgccaagtcagataacagcagatgtacgcttcattgctctcgagcccaaagctcgcgacccaatggtgaaggcctacatacaatctcttcccgcgccgccagatgcagatgaggcagatgaggacgaagcagccaggaaagcgagggaggaccgcaagaagcgggaaaaggctctggcggagcgcgagcgcgttgttgcagaggagaggaagaggtctgagaagcagctaagatatgggaaggcagcgctgagagaggaggagagagagctcgagaaggctatgcaagttgggaagaaaggactgcaaagtcagctgcttgctggtagagatcaaaatgctgaggcttcgtaagaataccaaagtcacttctttcagcactatgcaatgccgcaaccataggctcgagagaaattataacaccatttgatacccagctattaattatcacaatttggaagtatctcgtgggtcgggtcatcaatgtctgtcctcgatatggattgcttattgtgtaaggtgtactgctgcacaatttcccgccgcgtcacaaaagcagccttcggcgagcacattcaagaatcttatagaaaacgtcgactgtcactcacaccgaatgagtcaaggaccgacgaatcatcattcatctggggcctgagaggacttcactgtatattcagccttacttgcccacaaagagttgtaaggggctgatagcggaggtgacatcaacccagaggacaatgatgacaaaccgcggcatatacacgcgatccgtagacggtatcaattacccacttcggcatcgtagctctgaatagtgcaacccctccgaacccctcaccttcaaccgtatcggctccggattccccgatgacgacaatgaattgttttcccaagtctacgattttttcttcctgcctagtttgataaacataaataatctgcggtcttctaaattttgttgttcaattcgcctcataccaattactactaccgccaagaaatagcacatatccctgacgcacaatggcatcgaaccctcccgcgcaatgctgcactataggtgtgaagcatgaaggcacgccctcgggcgccgacatcaagatcggtccccaagccgcatacctagcgactcccgacccggccaaggcgcacaaagacgccgccgtcctgtatatcccagacatcatcgggatttgggaaaacagcaagctcatggccgatcaatatgcggccaacggctatctcaccgtgatcccggatatcttcaacggggacccggtgcctctaaatcgtccggagggcttcgacttcccgaagtggatggcgggcgggagcacgggagacaatccccacggggcggagcagatcgatgagatcgtcgtccgtgccatcgagtggttgaagaaggaacacgggatcacgaagcttgccgcttccggatattgtctcggtgccaagtacgtagcgcgccacttcaaggacgggatcaacgtggcattcttcgcacatccgagctacgtaaccgaggacgagctcaagggcttccagggcccgctgtccatcgccgccgcggagacggaccagatcttcaccaagccgctgcgcgatctgtccgaggtcgtgttgaaggagagcggtcgcccgtatcagattaatctgtactctggcacggagcacggattttccgtgcgagcggatatcaccaagaaacatgctaggttcgcgaaggaacaggcgtttattcaggctgttacttggtttgatacttggctgcttgactaatggatgatgagagtggggttggttggggaatttcgtggagtgacggaagtgaaataaggtgctgcttgagttgatacgtgttctgctgatcgggtaatgatatgactttgataaagactgtgttgagttccgtgtatgtaggtgggtatgtatgaggattctttcggtcgcagatattgtgatgtgaacttacccatacgctagatgcgagggtggcgggatagaagatatgatttcatactatatctattatactatatttatggcattgtgcgcttgtctacgcgcgtacggccagctcatcatagtttcttacaaggg

SEQ ID NO: 36666 - DNA, 759 bp, Muscodor strobelii
  misc_feature: SGI cDNA ID NO. 572712
  misc_feature: Encodes the peptide sequence at SEQ ID NO 36667
atggcatcgaaccctcccgcgcaatgctgcactataggtgtgaagcatgaaggcacgccctcgggcgccgacatcaagatcggtccccaagccgcatacctagcgactcccgacccggccaaggcgcacaaagacgccgccgtcctgtatatcccagacatcatcgggatttgggaaaacagcaagctcatggccgatcaatatgcggccaacggctatctcaccgtgatcccggatatcttcaacggggacccggtgcctctaaatcgtccggagggcttcgacttcccgaagtggatggcgggcgggagcacgggagacaatccccacggggcggagcagatcgatgagatcgtcgtccgtgccatcgagtggttgaagaaggaacacgggatcacgaagcttgccgcttccggatattgtctcggtgccaagtacgtagcgcgccacttcaaggacgggatcaacgtggcattcttcgcacatccgagctacgtaaccgaggacgagctcaagggcttccagggcccgctgtccatcgccgccgcggagacggaccagatcttcaccaagccgctgcgcgatctgtccgaggtcgtgttgaaggagagcggtcgcccgtatcagattaatctgtactctggcacggagcacggattttccgtgcgagcggatatcaccaagaaacatgctaggttcgcgaaggaacaggcgtttattcaggctgttacttggtttgatacttggctgcttgactaa

SEQ ID NO: 36667 - protein, 252 aa, Muscodor strobelii
  misc_feature: SGI Peptide ID NO. 572712
  misc_feature (30)..(250): Pfam Id: PF01738 Pfam Desc: Dienelactone hydrolase family
  misc_feature (30)..(220): Pfam Id: PF01738 Pfam Desc: Dienelactone hydrolase family
  misc_feature (1)..(251): NCBI GI: 171682912 Blast Desc: protein product [Podospora anserina] gi|170941415|emb|CAP67066.1| protein product [Podospora anserina]
  misc_feature (1)..(251): NCBI GI: 145612938 Blast Desc: MGG_08330 [Magnaporthe grisea 70-15] gi|145020023|gb|EDK04251.1| MGG_08330 [Magnaporthe grisea 70-15]
  misc_feature (1)..(251): NCBI GI: 154294473 Blast Desc: BC1G_13839 [Botryotinia fuckeliana B05.10] gi|150844679|gb|EDN19872.1| BC1G_13839 [Botryotinia fuckeliana B05.10]
  misc_feature (1)..(251): NCBI GI: 116203303 Blast Desc: dienelactone hydrolase [Chaetomium globosum CBS 148.51] gi|88178054|gb|EAQ85522.1| dienelactone hydrolase [Chaetomium globosum CBS 148.51]
  misc_feature (1)..(251): NCBI GI: 156032942 Blast Desc: SS1G_13877 [Sclerotinia sclerotiorum 1980] gi|154699279|gb|EDN99017.1| SS1G_13877 [Sclerotinia sclerotiorum 1980]
  misc_feature (1)..(251): NCBI GI: 46110699 Blast Desc: FG02231.1 [Gibberella zeae PH-1]
  misc_feature (1)..(251): NCBI GI: 38505505 Blast Desc: dienelactone hydrolase [Chaetomium globosum] gi|45504710|gb|AAS66899.1| dienelactone hydrolase [Chaetomium globosum]
  misc_feature (1)..(250): NCBI GI: 85096706 Blast Desc: NCU07127 [Neurospora crassa OR74A] gi|28921797|gb|EAA31074.1| NCU07127 [Neurospora crassa OR74A]
  misc_feature (1)..(251): NCBI GI: 256724912 Blast Desc: NECHADRAFT_58709 [Nectria haematococca mpVI 77-13-4]
  misc_feature (1)..(246): NCBI GI: 46126527 Blast Desc: FG07641.1 [Gibberella zeae PH-1]
MASNPPAQCCTIGVKHEGTPSGADIKIGPQAAYLATPDPAKAHKDAAVLYIPDIIGIWENSKLMADQYAANGYLTVIPDIFNGDPVPLNRPEGFDFPKWMAGGSTGDNPHGAEQIDEIVVRAIEWLKKEHGITKLAASGYCLGAKYVARHFKDGINVAFFAHPSYVTEDELKGFQGPLSIAAAETDQIFTKPLRDLSEVVLKESGRPYQINLYSGTEHGFSVRADITKKHARFAKEQAFIQAVTWFDTWLLD

SEQ ID NO: 36668 - DNA, 3648 bp, Muscodor strobelii; identical to SEQ ID NO: 36665
  misc_feature: SGI EST ID NO. CUFF.87536.0
  misc_feature: Variant of the nucleotide sequence at SEQ ID NO 36666

SEQ ID NO: 36669 - DNA, 681 bp, Muscodor strobelii
  misc_feature: SGI cDNA ID NO. 572713
  misc_feature: Encodes the peptide sequence at SEQ ID NO 36670
atgaagccctcagctgttctacccgtcctggcagcggttgcaaaggctgccccaagtgatatgctagaggaacgccaaagctgtcccggtgtatatgttttcggtgctcgtgagactacagcacctcaaggctatggtaccgctggtggtcttgtgaacatggtcacggccgcatactcagggagccaagcttctgcaattgtctatcctgcttgcggtggacagtcgtcatgcggcggagcgagctacgactcgtcggcatcgcagggaaccgctgccgtcgttaaggccgtcacagacctgaatagcagatgcccaaacacaaagatcgtcctgatcggctattcgcagggcggccagatcatggacaacgccctttgcggcggatctggcgccaccctcaccgggaacgctctcgcagctgtaaaggcagccattttcatgggtgaccctcacaacgtcgctggcttgccgtacaatgtcggcacatgcacagcgggtggctttgcggcccgtcccagcggcttcaagtgctcacccgccaatccgtctattatcaagtcctattgcgactcgactgacccgtattgttgcaatgggaatgatgccaactcgcatcaacaatatgtcaacaagtatggcagtcaagctttggcattcatcaagtcccttttgggctag

SEQ ID NO: 36670 - protein, 226 aa, Muscodor strobelii
  misc_feature: SGI Peptide ID NO. 572713
  misc_feature (26)..(226): Pfam Id: PF01083 Pfam Desc: Cutinase
  misc_feature (1)..(226): NCBI GI: 39973415 Blast Desc: MGG_01146 [Magnaporthe grisea 70-15] gi|145017881|gb|EDK02160.1| MGG_01146 [Magnaporthe grisea 70-15]
  misc_feature (1)..(226): NCBI GI: 116197290 Blast Desc: conserved [Chaetomium globosum CBS 148.51] gi|88181156|gb|EAQ88624.1| conserved [Chaetomium globosum CBS 148.51]
  misc_feature (7)..(225): NCBI GI: 85091086 Blast Desc: acetylxylan esterase precursor [Neurospora crassa OR74A] gi|28920112|gb|EAA29494.1| acetylxylan esterase precursor [Neurospora crassa OR74A]
  misc_feature (1)..(225): NCBI GI: 171676688 Blast Desc: protein product [Podospora anserina] gi|170936411|emb|CAP61068.1| protein product [Podospora anserina]
  misc_feature (1)..(223): NCBI GI: 189200274 Blast Desc: acetylxylan esterase precursor [Pyrenophora tritici-repentis Pt-1C-BFP] gi|187983573|gb|EDU49061.1| acetylxylan esterase precursor [Pyrenophora tritici-repentis
  misc_feature (22)..(225): NCBI GI: 169624840 Blast Desc: SNOG_15684 [Phaeosphaeria nodorum SN15] gi|111055939|gb|EAT77059.1| SNOG_15684 [Phaeosphaeria nodorum SN15]
  misc_feature (1)..(225): NCBI GI: 70985713 Blast Desc: acetyl xylan esterase (Axe1) [Aspergillus fumigatus Af293] gi|66845991|gb|EAL86324.1| acetyl xylan esterase (Axe1), [Aspergillus fumigatus Af293] gi|159128503|gb|EDP53618.1| acetyl
  misc_feature (1)..(225): NCBI GI: 85081067 Blast Desc: acetylxylan esterase precursor [Neurospora crassa OR74A] gi|28881447|emb|CAD70564.1| [Neurospora crassa] gi|28917729|gb|EAA27421.1| acetylxylan esterase precursor crassa
  misc_feature (1)..(225): NCBI GI: 119473547 Blast Desc: acetyl xylan esterase (Axe1), [Neosartorya fischeri NRRL 181] gi|119406802|gb|EAW16752.1| acetyl xylan esterase (Axe1), [Neosartorya fischeri NRRL 181]
  misc_feature (5)..(225): NCBI GI: 156051031 Blast Desc: SS1G_08104 [Sclerotinia sclerotiorum 1980] gi|154692503|gb|EDN92241.1| SS1G_08104 [Sclerotinia sclerotiorum 1980]
  misc_feature (24)..(226): SWISSPROT Homolog: EC 3.1.1.72 Acetylxylan esterase
MKPSAVLPVLAAVAKAAPSDMLEERQSCPGVYVFGARETTAPQGYGTAGGLVNMVTAAYSGSQASAIVYPACGGQSSCGGASYDSSASQGTAAVVKAVTDLNSRCPNTKIVLIGYSQGGQIMDNALCGGSGATLTGNALAAVKAAIFMGDPHNVAGLPYNVGTCTAGGFAARPSGFKCSPANPSIIKSYCDSTDPYCCNGNDANSHQQYVNKYGSQALAFIKSLLG

SEQ ID NO: 36671 - DNA, 774 bp, Muscodor strobelii
  misc_feature: SGI cDNA ID NO. 572714
  misc_feature: Reduced expression when VOC is produced
  misc_feature: Encodes the peptide sequence at SEQ ID NO 36672
atggctagaaccgaaaaaccctcattcaactcgcgtctggctcccactgtcgatatcgaggcatcaccccgccaggtaattctcaatggaatagacaagagtttccaagaaccgagtgattatctcactacgcggcagctcctctatatccttggtcctcatagtgtgggtgctgctattttgtctggcgccataaacttcgctatcgctgttggcttatacgggaccacgaaccagaagatccacctatttcagtttcccaatccattactgggcgatgcggtggtcactattattctccaatgtatcatcacttggctgatagagctcatcctggtaaatcttgatctcaataacggggctattcagcccgttgggagttactcggaaccctcgaatcgtttagtacgatggtttttgttcctggaccgtgaaaaggtccagccgcggcgacatatcgtgctccgatggatggaattcgtgttctggcaggggttcaggggcttcattgtctctgtcctctcattcgctctattcgttggtcctacaattgggtttttgacattggttggaacaccaagcggcaaagactgggagtatacagccaaattacgcccaggaattgagaactggaagccaatggtcttcaaagctatacttggtgctagtcttggtttgttgacgacaccgctatacgctctgttttggatgacgaggtgcggatggggtctgctgaacaacgagaaaaactatggcgagagacccggcagctag

SEQ ID NO: 36672 - protein, 257 aa, Muscodor strobelii
  misc_feature: SGI Peptide ID NO. 572714
  misc_feature (16)..(244): NCBI GI: 261361511 Blast Desc: conserved [Verticillium albo-atrum VaMs.102]
  misc_feature (38)..(253): NCBI GI: 46110639 Blast Desc: FG02201.1 [Gibberella zeae PH-1]
  misc_feature (32)..(242): NCBI GI: 256724870 Blast Desc: NECHADRAFT_58684 [Nectria haematococca mpVI 77-13-4]
  misc_feature (3)..(241): NCBI GI: 171682266 Blast Desc: protein product [Podospora anserina] gi|170941092|emb|CAP66742.1| protein product [Podospora anserina]
  misc_feature (2)..(243): NCBI GI: 145611222 Blast Desc: MGG_00576 [Magnaporthe grisea 70-15] gi|145018523|gb|EDK02802.1| MGG_00576 [Magnaporthe grisea 70-15]
  misc_feature (55)..(241): NCBI GI: 19075288 Blast Desc: conserved fungal protein [Schizosaccharomyces pombe] gi|74582465|sp|O74505.1|YJD2_SCHPO RecName: Full=Uncharacterized protein C594.02c gi|3560219|emb|CAA20661.1| conserved fungal
  misc_feature (46)..(237): NCBI GI: 213406093 Blast Desc: conserved [Schizosaccharomyces japonicus yFS275] gi|212001865|gb|EEB07525.1| conserved [Schizosaccharomyces japonicus yFS275]
  misc_feature (43)..(242): NCBI GI: 254585553 Blast Desc: ZYRO0G08030p [Zygosaccharomyces rouxii] gi|238941238|emb|CAR29411.1| ZYRO0G08030p [Zygosaccharomyces rouxii]
  misc_feature (47)..(242): NCBI GI: 156840875 Blast Desc: Kpol_1044p16 [Vanderwaltozyma polyspora DSM 70294] gi|156114441|gb|EDO15957.1| Kpol_1044p16 [Vanderwaltozyma polyspora DSM 70294]
  misc_feature (54)..(163): NCBI GI: 164658788 Blast Desc: MGL_2315 [Malassezia globosa CBS 7966] gi|159104415|gb|EDP43305.1| MGL_2315 [Malassezia globosa CBS 7966]
  misc_feature: Useful for introducing or modulating the production of volatile compounds
MARTEKPSFNSRLAPTVDIEASPRQVILNGIDKSFQEPSDYLTTRQLLYILGPHSVGAAILSGAINFAIAVGLYGTTNQKIHLFQFPNPLLGDAVVTIILQCIITWLIELILVNLDLNNGAIQPVGSYSEPSNRLVRWFLFLDREKVQPRRHIVLRWMEFVFWQGFRGFIVSVLSFALFVGPTIGFLTLVGTPSGKDWEYTAKLRPGIENWKPMVFKAILGASLGLLTTPLYALFWMTRCGWGLLNNEKNYGERPGS

SEQ ID NO: 36673 - DNA, 2350 bp, Muscodor strobelii
  misc_feature: SGI EST ID NO. CUFF.87530.0
  misc_feature: Variant of the nucleotide sequence at SEQ ID NO 36671
caaaaaaggacgaagtgccatgggcgtcagtaatatctttgtgccgctacctctcggatagaaatgaggctgttgtagtgttaggaccatcacatattagctttaactataggatgcctttgtgcgatatatagttgttgccaaacggtcgaacagcgtaaactacagtgtctagatcagcgtcaacatatgtgtccatccagtgctttgcaaatgggactacgcctttatatttgcctacataatacttattagagtacgcaccaagtacacgtgccttctccagtttgagttggattccacgtgtctcaaccatgcagagcgaccttcaatcaatcctcagtttggcgtatacacaccgatccccgaacaggtaaatgtgccaaatcagaggaggaagaccactcaatcgtcgtactcatacgccagccagcctatagcatagctatgagaaaacaatgccgcctctcgatgttgcaaggggacggtcgttcgtacatgagggcatttgggttgtcagggaggtggggcagagcctggtgttggcggcgggaactagaacctcgtgtcgacaatgaagagctacgtaaagcatctagagcagatcggagcgttaattgaatgcacgtaatggcatgacagtgcgacttatcacgaatataataaatgaaggttgagcgtctccatgaacgttttgatcttgtccaggtagcaacgagaggtgtcaccagtttactcctcagactgtgacccattcggttattaagtaacacaatgaccaaagcagtcgtgatagtgacgggcggtaacgtcacgatagtgtcgcatgcgtattcgcaagttactgccccttactaataagcatatccccgtagtaatttccaaatctgatgacaaggtccctgcatgacgggaggcgatccaccgcccaattcggaagcctttacaccccaaaatctccgattcatcaccatctcggaatcttaatatcaaatccttctcactccgatttccgaatatcgcggcgacgagcagcatagtatactcccgaaatcgaaaccaaatcataggaaagcaagctcgataatatactaagtagtaatggtagcaatgatgaaaagacatggattgacgcccaggcaccaacatacggcaagaccaggttaggcattctaagtggaccgggatgctcggacgtgtacgctagatccgcagtattatacacgagtgccgctgacaattaagcaaaagtctcgtgatggagttaccaatcgctggccaactgaaaagcgatttcccgactgtccggtccgatctttgtgtgaaattcttccttgctctcgagtctcgacagctttcctgataccttaaagagttctttgtcccacctggtccttgtcatgtctctttaagtgcgctatatacagttttagatcacctaagcctcggcgggcaacaggccggtaacaccggacaaccatggctagaaccgaaaaaccctcattcaactcgcgtctggctcccactgtcgatatcgaggcatcaccccgccaggtaattctcaatggaatagacaagagtttccaagaaccgagtgattatctcactacgcggcagctcctctatatccttggtcctcatagtgtgggtgctgctattttgtctggcgccataaacttcgctatcgctgttggcttatacgggaccacgaaccagaagatccacctatttcagtttcccaatccattactgggcgatgcggtggtcactattattctccaatgtatcatcacttggctgatagagctcatcctggtaaatcttgatctcaataacggggctattcagcccgttgggagttactcggaaccctcgaatcgtttagtacgatggtttttgttcctggaccgtgaaaaggtccagccgcggcgacatatcgtgctccgatggatggaattcgtgttctggcaggggttcaggggcttcattgtctctgtcctctcattcgctctattcgttggtcctacaattgggtttttgacattggttggaacaccaagcggcaaagactgggagtatacagccaaattacgcccaggaattgagaactggaagccaatggtcttcaaagctatacttggtgctagtcttggtttgttgacgacaccgctatacgctctgttttggatgacgaggtgcggatggggtctgctgaacaacgagaaaaactatggcgagagacccggcagctagtcgaattagcagggttttaacatcaacagaactataaggcgcgattgctcatcataaatgtacataatcaatacactgagattatgttttgccggct

SEQ ID NO: 36674 - DNA, 1110 bp, Muscodor strobelii
  misc_feature: SGI cDNA ID NO. 572715
  misc_feature: Elevated expression when VOC is produced
  misc_feature: Encodes the peptide sequence at SEQ ID NO 36675
atgggtctctcaattcgagaaatcaaggcattaggggactttccagactattcgatacttacagacgtgccgattcccaatgcataccatgagttcgacatcaataaagccatagcgaggccgtatcgcccgttcagatgggcgtatcatcagacaatgtctctcacgaagctcgaaacagactggtggatcgagctcgagtccacatacaaagagcgcatcgcacagcgcaaagagctatacgaaaagcacggtaccgcagtcttacaatggctcccaggatcagagttggcgtgtaaagaactcatggaaatggcgatacagttcatctgcgcgagatatccgcagtatttcgtgttatccgaagacaaggtacacttcgaaaacaagatcttaggtgttgttgccaatattaaggaaaaacatcctttactcgtacttcttgaccatgtccctgaggacttcgccatcatgctgcgcgatcctgagacgggatattatttattccgtgcgggtatgatatgctcagctctaggatggaatgttgagagcaagattgggatgaagctccatgagattcatgagcctattccggattataaagagaaaatgcaattcagcatggatagattcttctccaaaatgccaaccaacaagccgatccagcgtgggtcatggggtctcgaggtcgatgagcctctctacatgccaccgggcgaccctcacgcagaataccgcaactatcaagacccaagctggacccgatcgcgcatgaacctgcgcgtcgactggcagacactacgacggatgccgctctcaggaggcatcgtgttcaacttcaaagcccttttcactcctctggaagaattccggaacgagccatatatacctagtttgatcctcaaggttctgaccgagggcaagaaggagatcatgcagtataagaacacgtggcatacggaacatgtcgtgataccggcgcttcgagaatacgagaaagaacagaagggaagtggattaatagagcaggattgggagcctcatacacttgaacagagtccattctttccgggatgggaagagaagtggcatgcgcagcaggggttttga

SEQ ID NO: 36675 - protein, 369 aa, Muscodor strobelii
  misc_feature: SGI Peptide ID NO. 572715
  misc_feature (2)..(369): NCBI GI: 70998000 Blast Desc: conserved [Aspergillus fumigatus Af293] gi|66851368|gb|EAL91694.1| conserved [Aspergillus fumigatus Af293] gi|159126532|gb|EDP51648.1| conserved [Aspergillus A1163]
  misc_feature (2)..(369): NCBI GI: 119479509 Blast Desc: NFIA_078260 [Neosartorya fischeri NRRL 181] gi|119407937|gb|EAW17886.1| conserved [Neosartorya fischeri NRRL 181]
  misc_feature (2)..(369): NCBI GI: 121713076 Blast Desc: conserved [Aspergillus clavatus NRRL 1] gi|119402302|gb|EAW12723.1| conserved [Aspergillus clavatus NRRL 1]
  misc_feature (1)..(369): NCBI GI: 242790537 Blast Desc: conserved [Talaromyces stipitatus ATCC 10500] gi|218718160|gb|EED17580.1| conserved [Talaromyces stipitatus ATCC 10500]
  misc_feature (2)..(369): NCBI GI: 145237678 Blast Desc: An07g04040 [Aspergillus niger] gi|134075960|emb|CAK48154.1| protein product [Aspergillus niger]
  misc_feature (2)..(369): NCBI GI: 240109641 Blast Desc: CPC735_031460 [Coccidioides posadasii C735 delta SOWgp]
  misc_feature (2)..(369): NCBI GI: 119183568 Blast Desc: CIMG_06702 [Coccidioides immitis RS]
  misc_feature (1)..(369): NCBI GI: 169780652 Blast Desc: [Aspergillus oryzae RIB40] gi|83773530|dbj|BAE63657.1| protein product [Aspergillus oryzae]
  misc_feature (1)..(369): NCBI GI: 238505160 Blast Desc: conserved [Aspergillus flavus NRRL3357] gi|220689923|gb|EED46273.1| conserved [Aspergillus flavus NRRL3357]
  misc_feature (1)..(369): NCBI GI: 212534566 Blast Desc: conserved [Penicillium marneffei ATCC 18224] gi|210069838|gb|EEA23928.1| conserved [Penicillium marneffei ATCC 18224]
  misc_feature: Useful for introducing or modulating the production of volatile compounds
MGLSIREIKALGDFPDYSILTDVPIPNAYHEFDINKAIARPYRPFRWAYHQTMSLTKLETDWWIELESTYKERIAQRKELYEKHGTAVLQWLPGSELACKELMEMAIQFICARYPQYFVLSEDKVHFENKILGVVANIKEKHPLLVLLDHVPEDFAIMLRDPETGYYLFRAGMICSALGWNVESKIGMKLHEIHEPIPDYKEKMQFSMDRFFSKMPTNKPIQRGSWGLEVDEPLYMPPGDPHAEYRNYQDPSWTRSRMNLRVDWQTLRRMPLSGGIVFNFKALFTPLEEFRNEPYIPSLILKVLTEGKKEIMQYKNTWHTEHVVIPALREYEKEQKGSGLIEQDWEPHTLEQSPFFPGWEEKWHAQQGF

SEQ ID NO: 36676 - DNA, 1019 bp, Muscodor strobelii
  misc_feature: SGI EST ID NO. CUFF.87513.0
  misc_feature: Variant of the nucleotide sequence at SEQ ID NO 36674
tcgaaacagactggtggatcgagctcgagtccacatacaaagagcgcatcgcacagcgcaaagagctatacgaaaagcacggtaccgcagtcttacaatggctcccaggatcagagttggcgtgtaaagaactcatggaaatggcgatacagttcatctgcgcgagatatccgcagtatttcgtgttatccgaagacaaggtacacttcgaaaacaagatcttaggtgttgttgccaatattaaggaaaaacatcctttactcgtacttcttgaccatgtccctgaggacttcgccatcatgctgcgcgatcctgagacgggatattatttattccgtgcgggtatgatatgctcagctctaggatggaatgttgagagcaagattgggatgaagctccatgagattcatgagcctattccggattataaagagaaaatgcaattcagcatggatagattcttctccaaaatgccaaccaacaagccgatccagcgtgggtcatggggtctcgaggtcgatgagcctctctacatgccaccgggcgaccctcacgcagaataccgcaactatcaagacccaagctggacccgatcgcgcatgaacctgcgcgtcgactggcagacactacgacggatgccgctctcaggaggcatcgtgttcaacttcaaagcccttttcactcctctggaagaattccggaacgagccatatatacctagtttgatcctcaaggttctgaccgagggcaagaaggagatcatgcagtataagaacacgtggcatacggaacatgtcgtgataccggcgcttcgagaatacgagaaagaacagaagggaagtggattaatagagcaggattgggagcctcatacacttgaacagagtccattctttccgggatgggaagagaagtggcatgcgcagcaggggttttgagagattgagggtgatgaacgtcgcgggcggtctgatttcagacactcgagaatggaattagcatagcaaagaatacaagag

SEQ ID NO: 36677 - DNA, 1530 bp, Muscodor strobelii
  misc_feature: SGI cDNA ID NO. 572716
  misc_feature: Encodes the peptide sequence at SEQ ID NO 36678
atgccggataggatgagcccagagccacagtgcgattcctgcaagaagactttcaaacagagatcgtctcttgtacggcatgctaagaagtgcaccctcgagcccacacctagttctcgacaaaaggcatgccggacagtcaatggagcaccacaacccgtgcccacttcaaactccgagccagactctaaccagagtcacggcgtcggacccaggccactaccaaatccaacccttaccgggcttggaccagtagagggtcatgcagacactcatacgactatctgtggctacctagactttccaacagacttcaggttcataccaccagcagaaagttcaagtcgtctggcaactcaaggcttctatcctcggcttctaccctcggtcgaagccgatctcgtgcaagagatcacagaatccagtgcttctagctcacatacaacacctaatgaaagccatggatactccagtagtaccacagctgatacagatccccattctattcaatcccacacagcagcggacataccgaggctcgtcactccgatcctagatgatcgcgatgtcttcatgtgcagagagtcagtcctgactataaactccggatcggaggaagaagtcgagccatggatcctcgcactggccgctcggccagcacacccagatcctgtcgatgtcgtgaatcacagtagtatgactctattccgcgcttttcggtcatggccccgtatgctggcaaagggaattcagttaccgcccatcatccacttcttccaatttggaaacggaggagacctgtggagttgcgatagagcaccaaggccccttgggaaatgtattacactctgcaagatgtgggttgggcaggccgagggatcgagtaagatcgttcaggaggctgttagggctgagatcgagaatatactatctacttatcgcgaatacgacgcacccacccttttagcagcaatccaatccctcatcatcctactcctcctcctaatcttcccctccaacagccaaacaacactcagtgccctgccacatggaatcttctcgcacttccaaatcctagcctactacgccctaaaaatgggcatggtcctccaagaagaagcagagcacacccgcccaccctggcgcgtatgggcacacatcgaagcaaaacgccggacgctcgtagcgctgtatttcttccactgggcgtacagcgtgtaccaagggacgcggcacttcaactgtcttgaactgggcaggatgttggctccggggccgaagtatctgtggcaggctactgacgagaagacatggaataatctgtatatgagatggctcgcgcaatgggatgggagggagattgttcaggcggagttcttcttggtggataggggcccggttatggataagcgcgttgagatgtggcttgaggatgctgatgagctggggtttctgatgttgagtatcatgaatggtgcacagcgcgatttgtcgctgattccgggtgctgagtcgcattttgttggatga

SEQ ID NO: 36678 - protein, 509 aa, Muscodor strobelii
  misc_feature: SGI Peptide ID NO. 572716
  misc_feature (10)..(495): NCBI GI: 225557437 Blast Desc: conserved [Ajellomyces capsulatus G186AR]
  misc_feature (10)..(495): NCBI GI: 154274752 Blast Desc: [Ajellomyces capsulatus NAm1] gi|150414667|gb|EDN10029.1| [Ajellomyces capsulatus NAm1]
  misc_feature (225)..(495): NCBI GI: 240278074 Blast Desc: C6 finger domain-containing protein [Ajellomyces capsulatus H143]
  misc_feature (219)..(499): NCBI GI: 261205516 Blast Desc: C6 finger domain-containing protein [Ajellomyces dermatitidis SLH14081] gi|239592554|gb|EEQ75135.1| C6 finger domain-containing protein [Ajellomyces dermatitidis SLH14081] C6
  misc_feature (227)..(490): NCBI GI: 226292093 Blast Desc: conserved [Paracoccidioides brasiliensis Pb18]
  misc_feature (227)..(489): NCBI GI: 225681193 Blast Desc: conserved [Paracoccidioides brasiliensis Pb03]
  misc_feature (140)..(488): NCBI GI: 116208742 Blast Desc: CHGG_03664 [Chaetomium globosum CBS 148.51] gi|88184261|gb|EAQ91729.1| CHGG_03664 [Chaetomium globosum CBS 148.51]
  misc_feature (316)..(492): NCBI GI: 226282741 Blast Desc: conserved [Paracoccidioides brasiliensis Pb01]
  misc_feature (238)..(489): NCBI GI: 255939768 Blast Desc: Pc16g02830 [Penicillium chrysogenum Wisconsin 54-1255] gi|211585276|emb|CAP92953.1| Pc16g02830 [Penicillium chrysogenum Wisconsin 54-1255]
  misc_feature (156)..(489): NCBI GI: 145248968 Blast Desc: An14g01970 [Aspergillus niger] gi|134081497|emb|CAK41934.1| protein product [Aspergillus niger]
MPDRMSPEPQCDSCKKTFKQRSSLVRHAKKCTLEPTPSSRQKACRTVNGAPQPVPTSNSEPDSNQSHGVGPRPLPNPTLTGLGPVEGHADTHTTICGYLDFPTDFRFIPPAESSSRLATQGFYPRLLPSVEADLVQEITESSASSSHTTPNESHGYSSSTTADTDPHSIQSHTAADIPRLVTPILDDRDVFMCRESVLTINSGSEEEVEPWILALAARPAHPDPVDVVNHSSMTLFRAFRSWPRMLAKGIQLPPIIHFFQFGNGGDLWSCDRAPRPLGKCITLCKMWVGQAEGSSKIVQEAVRAEIENILSTYREYDAPTLLAAIQSLIILLLLLIFPSNSQTTLSALPHGIFSHFQILAYYALKMGMVLQEEAEHTRPPWRVWAHIEAKRRTLVALYFFHWAYSVYQGTRHFNCLELGRMLAPGPKYLWQATDEKTWNNLYMRWLAQWDGREIVQAEFFLVDRGPVMDKRVEMWLEDADELGFLMLSIMNGAQRDLSLIPGAESHFVG

SEQ ID NO: 36679 - DNA, 2242 bp, Muscodor strobelii
  misc_feature: SGI EST ID NO. CUFF.87526.1
  misc_feature: Variant of the nucleotide sequence at SEQ ID NO 36677
taggtagtatggtattggggaactacaactcccgagatccgaatccgtttccaagcattgtatttgctctagagtataacgaactgtgcgctatcaccgatttagtcatagcacacgagcaagatgccggataggatgagcccagagccacagtgcgattcctgcaagaagactttcaaacagagatcgtctcttgtacggcatgctaagaagtgcaccctcgagcccacacctagttctcgacaaaaggcatgccgtaactgcacaaaagcaaaagcccggtgtgaccttcaacgaccatcgtgttctcgttgtatatctcgagatactagctgtaattatgttcgcccagttaggacagtcaatggagcaccacaacccgtgcccacttcaaactccgagccagactctaaccagagtcacggcgtcggacccaggccactaccaaatccaacccttaccgggcttggaccagtagagggtcatgcagacactcatacgactatctgtggctacctagactttccaacagacttcaggttcataccaccagcagaaagttcaagtcgtctggcaactcaaggcttctatcctcggcttctaccctcggtcgaagccgatctcgtgcaagagatcacagaatccagtgcttctagctcacatacaacacctaatgaaagccatggatactccagtagtaccacagctgatacagatccccattctattcaatcccacacagcagcggacataccgaggctcgtcactccgatcctagatgatcgcgatgtcttcatgtgcagagagtcagtcctgactataaactccggatcggaggaagaagtcgagccatggatcctcgcactggccgctcggccagcacacccagatcctgtcgatgtcgtgaatcacagtagtatgactctattccgcgcttttcggtcatggccccgtatgctggcaaagggaattcagttaccgcccatcatccacttcttccaatttggaaacggaggagacctgtggagttgcgatagagcaccaaggccccttgggaaatgtattacactctgcaagatgtgggttgggcaggccgagggatcgagtaagatcgttcaggaggctgttagggctgagatcgagaatatactatctacttatcgcgaatacgacgcacccacccttttagcagcaatccaatccctcatcatcctactcctcctcctaatcttcccctccaacagccaaacaacactcagtgccctgccacatggaatcttctcgcacttccaaatcctagcctactacgccctaaaaatgggcatggtcctccaagaagaagcagagcacacccgcccaccctggcgcgtatgggcacacatcgaagcaaaacgccggacgctcgtagcgctgtatttcttccactgggcgtacagcgtgtaccaagggacgcggcacttcaactgtcttgaactgggcaggatgttggctccggggccgaagtatctgtggcaggctactgacgagaagacatggaataatctgtatatgagatggctcgcgcaatgggatgggagggagattgttcaggcggagttcttcttggtggataggggcccggttatggataagcgcgttgagatgtggcttgaggatgctgatgagctggggtttctgatgttgagtatcatgaatggtgcacagcgcgatttgtcgctgattccgggtgctgagtcgcattttgttggatgagcgagggtattaaaaataaaggttgattacgtgttgggcgattgttgttaggaaaggattcagaccaaaactcccctctttatagcgttgcttattttccgtctcggtgtcacgatcacaataaattgagatcgaggaaatgacggtcttcacacgtgggttaatcagagcacctatctatagacacatataataaacacgcacttggtttgccattcttcgttgctacggtcgcaagtgtgtcgggtgttgcgcaggaggtcatcacagcaatggatatccatgaaatcgcaaaatccgaccaagtgcaagaaaaccagtcaaatggattcaaatgctgtaaaaatgcatatgccagtgccagatgagaccaaaaagacatacaagccaaaaagggcaaaaaaaaaaagaaaaaaaaagaaggtagccaccgccaggaatcgagcctggtactcctcggtatccgggaggccaaagctaagtaaactca

SEQ ID NO: 36680 - DNA, 1488 bp, Muscodor strobelii
  misc_feature: SGI cDNA ID NO. 572717
  misc_feature: Encodes the peptide sequence at SEQ ID NO 36681
atgccggataggatgagcccagagccacagtgcgattcctgcaagaagactttcaaacagagatcgtctcttgtacggcatgctaagaagtgcaccctcgagcccacacctagttctcgacaaaaggcatgccggacagtcaatggagcaccacaacccgtgcccacttcaaactccgagccagactctaaccagagtcacggcgtcggacccaggccactaccaaatccaacccttaccgggcttggaccagtagagggtcatgcagacactcatacgactatctgtggctacctagactttccaacagacttcaggttcataccaccagcagaaagttcaagtcgtctggcaactcaaggcttctatcctcggcttctaccctcggtcgaagccgatctcgtgcaagagatcacagaatccagtgcttctagctcacatacaacacctaatgaaagccatggatactccagtagtaccacagctgatacagatccccattctattcaatcccacacagcagcggacataccgaggctcgtcactccgatcctagatgatcgcgatgtcttcatgtgcagagagtcagtcctgactataaactccggatcggaggaagaagtcgagccatggatcctcgcactggccgctcggccagcacacccagatcctgtcgatgtcgtgaatcacagtagtatgactctattccgcgcttttcggtcatggccccgtatgctggcaaagggaattcagttaccgcccatcatccacttcttccaatttggaaacggaggagacctgtggagttgcgatagagcaccaaggccccttgggaaatgtattacactctgcaagatgtgggttgggcaggccgagggatcgagtaagatcgttcaggaggctgttagggctgagatcgagaatatactatctacttatcgcgaatacgacgcacccacccttttagcagcaatccaatccctcatcatcctactcctcctcctaatcttcccctccaacagccaaacaacactcagtgccctgccacatggaatcttctcgcacttccaaatcctagcctactacgccctaaaaatgggcatggtcctccaagaagaagcagagcacacccgcccaccctggcgcgtatgggcacacatcgaagcaaaacgccggacgctcgtagcgctgtatttcttccactgggcgtacagcgtgtaccaagggacgcggcacttcaactgtcttgaactgggcaggatgttggctccggggccgaagtatctgtggcaggctactgacgagaagacatggaataatctgtatatgagatggctcgcgcaatgggatgggagggagattgttcaggcggagttcttcttggtggataggggcccggttatggataagcgcgttgagatgtggcttgaggatgctgatgagctggggtttctgatgttgagtatcagtgagtccccccttttgtga

SEQ ID NO: 36681 - protein, 495 aa, Muscodor strobelii
  misc_feature: SGI Peptide ID NO. 572717
  misc_feature (10)..(486): NCBI GI: 225557437 Blast Desc: conserved [Ajellomyces capsulatus G186AR]
  misc_feature (10)..(486): NCBI GI: 154274752 Blast Desc: [Ajellomyces capsulatus NAm1] gi|150414667|gb|EDN10029.1| [Ajellomyces capsulatus NAm1]
  misc_feature (225)..(486): NCBI GI: 240278074 Blast Desc: C6 finger domain-containing protein [Ajellomyces capsulatus H143]
  misc_feature (219)..(486): NCBI GI: 261205516 Blast Desc: C6 finger domain-containing protein [Ajellomyces dermatitidis SLH14081] gi|239592554|gb|EEQ75135.1| C6 finger domain-containing protein [Ajellomyces dermatitidis SLH14081] C6
  misc_feature (227)..(489): NCBI GI: 226292093 Blast Desc: conserved [Paracoccidioides brasiliensis Pb18]
  misc_feature (227)..(490): NCBI GI: 225681193 Blast Desc: conserved [Paracoccidioides brasiliensis Pb03]
  misc_feature (140)..(488): NCBI GI: 116208742 Blast Desc: CHGG_03664 [Chaetomium globosum CBS 148.51] gi|88184261|gb|EAQ91729.1| CHGG_03664 [Chaetomium globosum CBS 148.51]
  misc_feature (316)..(494): NCBI GI: 226282741 Blast Desc: conserved [Paracoccidioides brasiliensis Pb01]
  misc_feature (238)..(489): NCBI GI: 255939768 Blast Desc: Pc16g02830 [Penicillium chrysogenum Wisconsin 54-1255] gi|211585276|emb|CAP92953.1| Pc16g02830 [Penicillium chrysogenum Wisconsin 54-1255]
  misc_feature (156)..(490): NCBI GI: 145248968 Blast Desc: An14g01970 [Aspergillus niger] gi|134081497|emb|CAK41934.1| protein product [Aspergillus niger]
MPDRMSPEPQCDSCKKTFKQRSSLVRHAKKCTLEPTPSSRQKACRTVNGAPQPVPTSNSEPDSNQSHGVGPRPLPNPTLTGLGPVEGHADTHTTICGYLDFPTDFRFIPPAESSSRLATQGFYPRLLPSVEADLVQEITESSASSSHTTPNESHGYSSSTTADTDPHSIQSHTAADIPRLVTPILDDRDVFMCRESVLTINSGSEEEVEPWILALAARPAHPDPVDVVNHSSMTLFRAFRSWPRMLAKGIQLPPIIHFFQFGNGGDLWSCDRAPRPLGKCITLCKMWVGQAEGSSKIVQEAVRAEIENILSTYREYDAPTLLAAIQSLIILLLLLIFPSNSQTTLSALPHGIFSHFQILAYYALKMGMVLQEEAEHTRPPWRVWAHIEAKRRTLVALYFFHWAYSVYQGTRHFNCLELGRMLAPGPKYLWQATDEKTWNNLYMRWLAQWDGREIVQAEFFLVDRGPVMDKRVEMWLEDADELGFLMLSISESPLL

SEQ ID NO: 36682 - DNA, 2242 bp, Muscodor strobelii; identical to SEQ ID NO: 36679
  misc_feature: SGI EST ID NO. CUFF.87526.1
  misc_feature: Variant of the nucleotide sequence at SEQ ID NO 36680

SEQ ID NO: 36683 - DNA, 1905 bp, Muscodor strobelii
  misc_feature: SGI cDNA ID NO. 572718
  misc_feature: Reduced expression when VOC is produced
  misc_feature: Encodes the peptide sequence at SEQ ID NO 36684
atggctgctaccgcccctctgcagaccttcgcgcgtcgcagcgcactattgcccactcgctcgagactcgcccgacaaatttgtagagcatcgtattcctcctcgcctttatcgccttcatctcgcccactacgtgccgcgtctgctgctatccccactgctcgctcatctttgcgtaccttcacaacaactcatgcccggtgtttggccagtgccgaggagagcttcgatcccaaatcaatcgagcgcgagagcgatgaggtcgatgtttgcattgtaggaggaggcccggctggattgagtgctgccattcgcttgaagcagcttgccaacgatgcaggcaatgaagaattcagagtcctgctactcgagaaggccggcgaaatcggtgcgcatattgtgtctggcgcagtcatacagcctactgctataaatgagctctttcccgactggcttgacgagaacaacgaaaaccgcttccagcatgctacacccgccggtaacgacaagatgcgattcctgacccagtccgctgccatcccgatccccgctcctccgcaaatgacgaatcatggcaattacatcgtgagcttgaacgagtttaccaagtggctgggcgagcgagcagaggaggttggcgttgaggtctaccctggtttcgcggcgtccgaggtcatttaccagcctgatggatccgtgaaaggagtcgcaacgaatgatttgggcatcggccgtgatggaaagcccaaggatagcttcgaaaggggcatggaattccacgccagagtgactatgtttgccgaaggctgtcacggcagcttaacgaaacaagtcatcaacaaatttgatctaagaagggatagccagcaccagacctatggtctaggtgtcaaggaggtctgggagattgaaccggaaaaattcaagaagggagaaattacccactctctgggatatccattgccctatgatacctacggaggagcctggatgtaccatttcggagagaacctggtcagcattggcctagttactgccttggactacacaaatccctggctatctccatatggggagttccagaagttaaagcaacatcctctctacaaatccgtcctcgaaggcgggaaatgcctctcttacggtgcaagagccttggttgaaggaggctttcagtccattcccaaggtcgctttccccggtggcgctctgattggcgattccgccggcttcgtcaacgtgcccaaagtcaaaggtactcacaatgccatgaagtcgggcatgttggctgctgaagctgcctggactgcgctcacgggcggcgatcaaggctctgtcttcctctacgactacgaagaaagccttcgaaagtcttcaatctggaaggagctaaaggaggtcagaaacatgagaccatctttccacagccccttaggtgtctatggtggtgtcatgtactctggcttggaagcatacgtgctcaagggtcgcgtgccttggaccttgaagcacaagcaccacgaccattccgctaccaaacctgcagacaagtgcaagaagattgaatatcccaagccggacggcaagatttcttttgatatcttgacaagcgtatcacgaacaggtacaaatcacgaggaggatcaaccagttcacctccaggtggcagactgggatgctcatgccgttgagacgtggcccgcttacaaaggcctggagaaccggttctgccccgcaggcgtgtacgaatacgtcgaagacgagtcgaagccaaatggcgttcgatttcaaattaatgctcaaaattgcattcactgcaagacttgcgatatcaaggcaccgcatcaagacatcaactggcaagtgccccagggcggagaaggacccaaatactacatgacataa

SEQ ID NO: 36684 - protein, 634 aa, Muscodor strobelii
  misc_feature: SGI Peptide ID NO. 572718
  misc_feature (89)..(436): Pfam Id: PF01266 Pfam Desc: FAD dependent oxidoreductase
  misc_feature (479)..(588): Pfam Id: PF05187 Pfam Desc: Electron transfer flavoprotein-ubiquinone oxidoreductase
  misc_feature (89)..(132): Pfam Id: PF01266 Pfam Desc: FAD dependent oxidoreductase
  misc_feature (89)..(108): Pfam Id: PF00890 Pfam Desc: FAD binding domain
  misc_feature (87)..(103): Pfam Id: PF01494 Pfam Desc: FAD binding domain
  misc_feature (88)..(130): Pfam Id: PF03486 Pfam Desc: HI0933-like protein
  misc_feature (89)..(134): Pfam Id: PF07992 Pfam Desc: Pyridine nucleotide-disulphide oxidoreductase
  misc_feature (1)..(634): NCBI GI: 116202169 Blast Desc: CHGG_08969 [Chaetomium globosum CBS 148.51] gi|88177487|gb|EAQ84955.1| CHGG_08969 [Chaetomium globosum CBS 148.51]
  misc_feature (1)..(634): NCBI GI: 170674513 Blast Desc: electron transfer flavoprotein [Epichloe festucae]
  misc_feature (2)..(634): NCBI GI: 154292701 Blast Desc: electron transfer flavoprotein-ubiquinone oxidoreductase [Botryotinia fuckeliana B05.10] gi|150845817|gb|EDN21010.1| electron transfer oxidoreductase
  misc_feature (1)..(634): NCBI GI: 156053451 Blast Desc: SS1G_06893 [Sclerotinia sclerotiorum 1980] gi|154704671|gb|EDO04410.1| SS1G_06893 [Sclerotinia sclerotiorum 1980]
  misc_feature (1)..(634): NCBI GI: 261359580 Blast Desc: electron transfer flavoprotein-ubiquinone oxidoreductase [Verticillium albo-atrum VaMs.102]
  misc_feature (37)..(634): NCBI GI: 85096214 Blast Desc: NCU04768 [Neurospora crassa OR74A] gi|28921700|gb|EAA30981.1| NCU04768 [Neurospora crassa OR74A] gi|39979212|emb|CAE85583.1| flavoprotein-ubiquinone [Neurospora
  misc_feature (12)..(602): NCBI GI: 145614238 Blast Desc: conserved [Magnaporthe grisea 70-15] gi|145021179|gb|EDK05308.1| conserved [Magnaporthe grisea 70-15]
  misc_feature (1)..(601): NCBI GI: 46128095 Blast Desc: FG08425.1 [Gibberella zeae PH-1]
  misc_feature (1)..(634): NCBI GI: 121705500 Blast Desc: electron transfer flavoprotein-ubiquinone oxidoreductase [Aspergillus clavatus NRRL 1] gi|119399159|gb|EAW09587.1| electron transfer oxidoreductase NRRL
  misc_feature (21)..(634): NCBI GI: 212526966 Blast Desc: electron transfer flavoprotein-ubiquinone oxidoreductase [Penicillium marneffei ATCC 18224] gi|210073038|gb|EEA27125.1| electron transfer oxidoreductase ATCC
  misc_feature (59)..(634): SWISSPROT Homolog: EC 1.5.5.1 Electron-transferring-flavoprotein dehydrogenase
  misc_feature: Useful for introducing or modulating the production of volatile compounds
MAATAPLQTFARRSALLPTRSRLARQICRASYSSSPLSPSSRPLRAASAAIPTARSSLRTFTTTHARCLASAEESFDPKSIERESDEVDVCIVGGGPAGLSAAIRLKQLANDAGNEEFRVLLLEKAGEIGAHIVSGAVIQPTAINELFPDWLDENNENRFQHATPAGNDKMRFLTQSAAIPIPAPPQMTNHGNYIVSLNEFTKWLGERAEEVGVEVYPGFAASEVIYQPDGSVKGVATNDLGIGRDGKPKDSFERGMEFHARVTMFAEGCHGSLTKQVINKFDLRRDSQHQTYGLGVKEVWEIEPEKFKKGEITHSLGYPLPYDTYGGAWMYHFGENLVSIGLVTALDYTNPWLSPYGEFQKLKQHPLYKSVLEGGKCLSYGARALVEGGFQSIPKVAFPGGALIGDSAGFVNVPKVKGTHNAMKSGMLAAEAAWTALTGGDQGSVFLYDYEESLRKSSIWKELKEVRNMRPSFHSPLGVYGGVMYSGLEAYVLKGRVPWTLKHKHHDHSATKPADKCKKIEYPKPDGKISFDILTSVSRTGTNHEEDQPVHLQVADWDAHAVETWPAYKGLENRFCPAGVYEYVEDESKPNGVRFQINAQNCIHCKTCDIKAPHQDINWQVPQGGEGPKYYMT

SEQ ID NO: 36685 - DNA, 2555 bp, Muscodor strobelii
  misc_feature: SGI EST ID NO. CUFF.87540.0
  misc_feature: Variant of the nucleotide sequence at SEQ ID NO 36683
cgcaggtactctgtattttacctcgggacagagcagctcacatgatggtgggaggaattgaaggaatccgatgtcatcactgccgttgtcggtaccacacagacaaaactttctacggaagcttcgattcatgggcgtaacctcgcaattgccacagctcttttacttgtgcaatcgtgtgccaactttgcttctttgggccatgttatctattgctatactgtaattgctcattgtctgctctactggctaggtagtcattggtgtcgttgtcgaaattgcccacactttataattgtaggcggcgcgacgatggctgctaccgcccctctgcagaccttcgcgcgtcgcagcgcactattgcccactcgctcgagactcgcccgacaaatttgtagagcatcgtattcctcctcgcctttatcgccttcatctcgcccactacgtgccgcgtctgctgctatccccactgctcgctcatctttgcgtaccttcacaacaactcatgcccggtgtttggccagtgccgaggagagcttcgatcccaaatcaatcgagcgcgagagcgatgaggtcgatgtttgcattgtaggaggaggtatataatcctgctgtaggcttgatcggttacttgtgaacgctaatgtgctatgaccacgcaggcccggctggattgagtgctgccattcgcttgaagcagcttgccaacgatgcaggcaatgaagaattcagagtcctgctactcgagaaggccggcgaaatcggtgcgcatattgtgtctggcgcagtcatacagcctactgctataaatgagctctttcccgactggcttgacgagaacaacgaaaaccgcttccagcatgctacacccgccggtaacgacaagatgcgattcctgacccagtccgctgccatcccgatccccgctcctccgcaaatgacgaatcatggcaattacatcgtgagcttgaacgagtttaccaagtggctgggcgagcgagcagaggaggttggcgttgaggtctaccctggtttcgcggcgtccgaggtcatttaccagcctgatggatccgtgaaaggagtcgcaacgaatgatttgggcatcggccgtgatggaaagcccaaggatagcttcgaaaggggcatggaattccacgccagagtgactatgtttgccgaaggctgtcacggcagcttaacgaaacaagtcatcaacaaatttgatctaagaagggatagccagcaccagacctatggtctaggtgtcaaggaggtctgggagattgaaccggaaaaattcaagaagggagaaattacccactctctgggatatccattgccctatgatacctacggaggagcctggatgtaccatttcggagagaacctggtcagcattggcctagttactgccttggactacacaaatccctggctatctccatatggggagttccagaagttaaagcaacatcctctctacaaatccgtcctcgaaggcgggaaatgcctctcttacggtgcaagagccttggttgaaggaggctttcagtccattcccaaggtcgctttccccggtggcgctctgattggcgattccgccggcttcgtcaacgtgcccaaagtcaaaggtactcacaatgccatgaagtcgggcatgttggctgctgaagctgcctggactgcgctcacgggcggcgatcaaggctctgtcttcctctacgactacgaagaaagccttcgaaagtcttcaatctggaaggagctaaaggaggtcagaaacatgagaccatctttccacagccccttaggtgtctatggtggtgtcatgtactctggcttggaagcatacgtgctcaagggtcgcgtgccttggaccttgaagcacaagcaccacgaccattccgctaccaaacctgcagacaagtgcaagaagattgaatatcccaagccggacggcaagatttcttttgatatcttgacaagcgtatcacgaacaggtacaaatcacgaggaggatcaaccagttcacctccaggtggcagactgggatgctcatgccgttgagacgtggcccgcttacaaaggcctggagaaccggttctgccccgcaggcgtgtacgaatacgtcgaagacgagtcgaagccaaatggcgttcgatttcaaattaatgctcaaaattgcattcactgcaagacttgcgatatcaaggcaccgcatcaagacatcaactggcaagtgccccagggcggagaaggacccaaatactacatgacataaaactctttattaggggcataggagttagcttgagttattgttgtggtgattatatccatggttacagcatgatgcaaagtgtgaaagatcggtgttggttcaactcaggctgcgaacatggttcattgtacatattggcatctatacgcacatacacatatacatgacatagggatgaaaaaatcaatcaatcgtattatgactatccctatcgtcgcatagctatctgacgacgagagaaactgccttgtgcttcccgatgagagatgctcca

SEQ ID NO: 36686 - DNA, 447 bp, Muscodor strobelii
  misc_feature: SGI cDNA ID NO. 572719
  misc_feature: Elevated expression when VOC is produced
  misc_feature: Encodes the peptide sequence at SEQ ID NO 36687
atgaagaacttcggaactattctaatgatcttggcggctgccgcctcctactccgtgacggcacttccagctcctggcatagagccaacctggatccaagcccgcagtaatggccctaaatttgaggccctcgaggttcgagagccgaaacgcaagcaccataagggcaatggggccaacaacaataacaacaatggcgccggtaccaatgtgggtaacggtaccgcaacagccgtatctggcgctgctagtggtgctgcgagcggcgctcctgcggccacaagttctgctgccgctgataccggcaataataacaataatggcaacaataataacggcaacggtaacaagaacaagaataacctcctcgacgagatcgaagctcaagctcaaggcggggatctgcttacggcgctggagggtctgctctcaaaggacgcacaatag

SEQ ID NO: 36687 - protein, 148 aa, Muscodor strobelii
  misc_feature: SGI Peptide ID NO. 572719
  misc_feature: Useful for introducing or modulating the production of volatile compounds
MKNFGTILMILAAAASYSVTALPAPGIEPTWIQARSNGPKFEALEVREPKRKHHKGNGANNNNNNGAGTNVGNGTATAVSGAASGAASGAPAATSSAAADTGNNNNNGNNNNGNGNKNKNNLLDEIEAQAQGGDLLTALEGLLSKDAQ

SEQ ID NO: 36688 - DNA, 1381 bp, Muscodor strobelii
  misc_feature: SGI EST ID NO. CUFF.87519.0
  misc_feature: Variant of the nucleotide sequence at SEQ ID NO 36686
aaagtcactgaccccaacacggtttgtggatcttatcgcaatatgttaatgtctaaagctccatgaaccgccttcagcttcacatctaacctggtgattgacgtctatactcagctttgatccgcgataatcacttatttttaggctttgcgggagtttcaacacccagcttatagaatcagatattgtaaaacatcagagaaactgccgcttgtcagaggctcgacacttctgatggtttcttggccatctcatctagccaggcatctagaagcatgttgacatgtgctgaataaataagatgacctcgcgctgatctcttggaatcttggctttcttcctcactcacccacgtggtagtttagtagttcgttggtgaagcttcattcttccacatcttccctcttgacttcagagctgtgctctattttcccgttcttatacaagtctgagacttgcgagcagcgctccacaccattacacgctaccgaatattgactattctttcttataccatacacatatttcaagatgaagaacttcggaactattctaatgatcttggcggctgccgcctcctactccgtgacggcacttccagctcctggcatagagccaacctggatccaagcccgcagtaatggccctaaatttgaggccctcgaggttcgagagccgaaacgcaagcaccataagggcaatggggccaacaacaataacaacaatggcgccggtaccaatgtgggtaacggtaccgcaacagccgtatctggcgctgctagtggtgctgcgagcggcgctcctgcggccacaagttctgctgccgctgataccggcaataataacaataatggcaacaataataacggcaacggtaacaagaacaagaataacctcctcgacgagatcgaagctcaagctcaaggcggggatctgcttacggcgctggagggtctgctctcaaaggacgcacaatagacatcatcataccggtctcgagcctatcattcgtatacgacaactctcctggtaatggagagtcagtcgagtgtatcacggacatcaaacaaggcttgaaaaagccttgactcgagaacacttgagccgtgtattggagctatcgcgtgacagaattgtctcaagagaagaagaggaagaaaaaaacaaaaatctcacatataccccagagcttttagtacaccacaatatgtcttacgtctaggctctcctgtggatagagcatcacgttaattcttagttcaaattgatatcatcttgatgtgctaagcctcgttgaccatgtcattcgtgaggtgttaggcatcccttatttgagtaacgaattcatattacatagtacggccagcaagtcgtcaaaaac

SEQ ID NO: 36689 - DNA, 828 bp, Muscodor strobelii
  misc_feature: SGI cDNA ID NO. 572720
  misc_feature: Encodes the peptide sequence at SEQ ID NO 36690
atgtctttttcacagcagtcttcgtcccaaatcctcaagactctctctgacgacttcgcttggggtctcaacatggagaacccaatcacctcccacccctcgactgccgctcaggctcagggtttcttcgctcctggctctctctccttccctggaggtcatgcgaccatggacacgcatgatggccagctcgtgcacggcgcccagcaaggtggccaagctgtcaacggaaccggggtgactcccgcgacccctgccgcgactcccgctgcagcttctaatggaagcggcttgactcctaccttgcaaaacatcgtcgccacggtcaacctggactgccgtctggacctgaagacgatcgctctgcatgcgcgcaacgctgagtacaatcccaagcgtttcgctgccgtcatcatgcgcatccgcgagccgaagaccaccgctctgatcttcgcctctggcaagatggtcgttactggcgccaagtcggaggatgactccaagctggcctcgcgcaagtacgcccgcatcatccagaagctcggcttcaatgccaagttcacggacttcaagatccagaatattgtcggctcctgcgacatcaagttccccatccgtcttgagggcttggcttcgcgccaccacaatttcagctcctacgagcctgagttgttccctggtctgatctaccgcatgatcaagcccaagattgtgctcctgatttttgtctctggcaagattgtcttgactggtgccaaggtccgcgaggagatctaccaggccttcgagatgatctaccctgtcttgcaagacttccgaaaagtctag

SEQ ID NO: 36690 - protein, 275 aa, Muscodor strobelii
  misc_feature: SGI Peptide ID NO. 572720
  misc_feature (187)..(273): Pfam Id: PF00352 Pfam Desc: Transcription factor TFIID (or TATA-binding protein, TBP)
  misc_feature (97)..(182): Pfam Id: PF00352 Pfam Desc: Transcription factor TFIID (or TATA-binding protein, TBP)
  misc_feature (29)..(275): NCBI GI: 119491905 Blast Desc: RNA polymerase I and III transcription factor complex component Tbp, [Neosartorya fischeri NRRL 181] gi|119411607|gb|EAW21550.1| RNA polymerase I and III factor Tbp,
  misc_feature (29)..(275): NCBI GI: 169770491 Blast Desc: [Aspergillus oryzae RIB40] gi|238487092|ref|XP_002374784.1| transcription factor TFIID [Aspergillus flavus NRRL3357] gi|83767574|dbj|BAE57713.1| protein
  misc_feature (29)..(275): NCBI GI: 115396162 Blast Desc: TATA-box binding protein [Aspergillus terreus NIH2624] gi|114193289|gb|EAU34989.1| TATA-box binding protein [Aspergillus terreus NIH2624]
  misc_feature (29)..(275): NCBI GI: 3122925 Blast Desc: TBP_EMENI RecName: Full=TATA-box-binding protein; AltName: Full=TATA-box factor; AltName: Full=TATA-binding factor; AltName: Full=TATA sequence-binding protein; Short=TBP; AltName:
  misc_feature (29)..(274): NCBI GI: 242782217 Blast Desc: RNA polymerase I and III transcription factor complex component Tbp, [Talaromyces stipitatus ATCC 10500] gi|242782222|ref|XP_002479957.1| RNA polymerase I and III factor
  misc_feature (29)..(274): NCBI GI: 212526960 Blast Desc: RNA polymerase I and III transcription factor complex component Tbp, [Penicillium marneffei ATCC 18224] gi|212526962|ref|XP_002143638.1| RNA polymerase I and III factor
  misc_feature (29)..(269): NCBI GI: 70999782 Blast Desc: RNA polymerase I and III transcription factor complex component Tbp [Aspergillus fumigatus Af293] gi|66852245|gb|EAL92570.1| RNA polymerase I and III transcription
  misc_feature (29)..(275): NCBI GI: 39953935 Blast Desc: conserved [Magnaporthe grisea 70-15] gi|145021181|gb|EDK05310.1| conserved [Magnaporthe grisea 70-15]
  misc_feature (29)..(274): NCBI GI: 145252384 Blast Desc: An16g03940 [Aspergillus niger] gi|134083254|emb|CAK46825.1| protein product [Aspergillus niger]
  misc_feature (29)..(274): NCBI GI: 261194208 Blast Desc: transcription initiation factor TFIID-2 [Ajellomyces dermatitidis SLH14081] gi|239588523|gb|EEQ71166.1| transcription initiation factor TFIID-2 [Ajellomyces dermatitidis SLH14081]
MSFSQQSSSQILKTLSDDFAWGLNMENPITSHPSTAAQAQGFFAPGSLSFPGGHATMDTHDGQLVHGAQQGGQAVNGTGVTPATPAATPAAASNGSGLTPTLQNIVATVNLDCRLDLKTIALHARNAEYNPKRFAAVIMRIREPKTTALIFASGKMVVTGAKSEDDSKLASRKYARIIQKLGFNAKFTDFKIQNIVGSCDIKFPIRLEGLASRHHNFSSYEPELFPGLIYRMIKPKIVLLIFVSGKIVLTGAKVREEIYQAFEMIYPVLQDFRKV

SEQ ID NO: 36691 - DNA, 2702 bp, Muscodor strobelii
  misc_feature: SGI EST ID NO. CUFF.87639.3
  misc_feature: Variant of the nucleotide sequence at SEQ ID NO 36689
ccacgaaggaggctggcttcgaaaaattataagaagacgcgacctcccctcaacttccgattgtttcgaaaagccttgcgccgaagtccggaccgaacgtcccccaatccctcaccaccatacatctccacctatcaccagccttacgtaatatctgccagtcctcccagctgccaggttttccgattgcgtctggcattcttcatttttaataatagtattcctcagctcctgtgctggttgccgtcattcacttgtcactggcgacccacatttcccacctgactacatcagcaagcaaacaatcccgtttgctgccgcacgtcattctccacaaataatcactgcctacatcgtcacccttggctttggtcattgcccctccaacaacctctcgtctccccctcctcttgattgcacttcaatcaaccctcccgttgattgtcgcctctcaagtgttgcatctttgcgctgcttctacgacccccctgctcaccttgtcggtattgtctaatagacattcaacgccggaaacagcataaggaatccaagccttttcggccttccttcctttgttccattgtccaccgaccgcataagggactcgagccgccgcccagaccgcacacgactcctcctacctagatcctcgtcatctacacacatctcatacgatctctcctttcgccgcacaggtcatagtgcagcgttgcctagaaaaagcctactatccatagacttgcctcggaagctccagttcgacgaaataatcagctggtcttccctcgtcttccgcgcgttgtccgtcgtcgcaaagatattcgagacgcatccgtcaagtgttgaatcggttagatccccgacctcgacgataccctctcagctccttgcgcttcgcacctcgttcagaagactccgatcctgtcgtgtcgattgaacccatcgagactcgatcgttgactttgcaacccgtgccttgtgtgctctattgatttgtgccgatcgttatcccaagatcgattcatccaatccatccatataaaaagaatactgcagtgctggggacacattgacttgttgatctccacattcaatcgcagtcttcgtcccaaatcctcaagactctctctgacgacttcgcttggggtctcaacatggagaacccaatcacctcccacccctcgactgccgctcaggctcagggtttcttcgctcctggctctctctccttccctggaggtcatgcgaccatggacacgcatgatggccagctcgtgcacggcgcccagcaaggtggccaagctgtcaacggaaccggggtgactcccgcgacccctgccgcgactcccgctgcagcttctaatggaagcggcttgactcctaccttgcaaaacatcgtcgccacggtcaacctggactgccgtctggacctgaagacgatcgctctgcatgcgcgcaacgctgagtacaatcccaagcgtttcgctgccgtcatcatgcgcatccgcgagccgaagaccaccgctctgatcttcgcctctggcaagatggtcgttactggcgccaagtcggaggatgactccaagctggcctcgcgcaagtacgcccgcatcatccagaagctcggcttcaatgccaagttcacggacttcaagatccagaatattgtcggctcctgcgacatcaagttccccatccgtcttgagggcttggcttcgcgccaccacaatttcagctcctacgagcctgagttgttccctggtctgatctaccgcatgatcaagcccaagattgtgctcctgatttttgtctctggcaagattgtcttgactggtgccaaggtccgcgaggagatctaccaggccttcgagatgatctaccctgtcttgcaagacttccgaaaagtctagacatcgtgtgctttggcaagccacagggtcccacaaaccccaagcacatcatcttagatcatgtcggctgtccaagacatctagagatcactcgtcggcatctgtataacgccacacacttgatgacattacgactttccccaaaatgacacaggaagctccttcggcggcttctctccttgtgtctttgtaacattgctttcctctttcttaattgcattgcaccggcgtttctttacaggaaggaccaggcggaacagtttcttcacagaaaacgtctataaagacctggtcggacaaacaatagattgcgtggccgcattcttcgacgacacatgcgctggtcgagggtgccgttttaatctgcacaggggacgaaagggggaaaaaaaacctggtgtcgtagccgaaaggtcggaggggttgtgcacaccaggagagtttggaggaggggaatgatcttatcagcgcaaaagagtctgtggatcatgtccgggattgcactgaagctctgctttacacaggaacataggtactggccgcacacagcgcatgaattaccgcgaggttccctcatcactgttgcttgcatgcttgtgtcctgcagtgctctggtcagaagcgttatgcgtgctctgtttgtttgctttccctgattgcgaatgacaccacgctgcctttctgccatgttcagtaaaaagaacaaaacaagtcgtagccgagaggacctctttcgtagagaataccatctgctatgaccacaacttaccgtgtcccattgttgccaatttc

SEQ ID NO: 36692 - DNA, 1521 bp, Muscodor strobelii
  misc_feature: SGI cDNA ID NO. 572721
  misc_feature: Reduced expression when VOC is produced
  misc_feature: Encodes the peptide sequence at SEQ ID NO 36693
atgactgcggccgcggacccgaaaacaactaagaaagaggagttcaaggcaccaaaaagtatcctcatagtcggctcaggcgtcttcggcctaagcacagctctctcccttacgagtcgtcccgagatcccaaaagacacagagatcaccatcatcgaccgatccccagaagaaggcgtattccccgcgcgagacgcctcgtccatcgactcctcgcgaatcatccgcgccgactacgcagacttcgcctacgcggctctagcctccgaggcgcaagcccactggcgcaaagaccatctcaccgatcccgactccctcggcggtagcggtcgatacaccgagtccggcctcctgctcggcgcagacaacggcgacgatggcgcaacgacgcgccctgatggacatcccacgggcctgggatacgcaaaacggagctgggtgaatgcactggccctcgcacatacagagggtcggccactaaattctatccgtctcgccggattctcctgggccgtggcaaggatgggtcgaacggagggagaatgggcagactgggcatatctcaacacaagcgcaggctgggccgatgcagaagccagcatgcaatggctctacgaacgcgtactctcgacaaaacgcgtgaaattcataaatgggaccgtcacgcaactcgagaccacctcgtcagacaagccccaacgcatatcaggcgtcaagttatcaggcgaccgtaccttcacagccgacctcgtaatcctcgcaaccggcgcctggacaccgaccctcctcgacctcgaaggccaggcgattgcgacaggccaatgcctagcctacctgcagctcaccgaggacgaacaagagaagctaaaggacatgcccgtgtgcctcaacctcacagacggctgcttcataatcccgccacgaaaccgcgtcctcaagatcgcccgtcattcatacggctacttgaatccctcgactcccacaaccaaccccctcactcccgcgtcctcctctcccaccgaagaagcctctaagaacaccaactgccctcaaaaacccatctcccaacccctaacccacctaacaaacccctctctccaaatcccacacgaaggcataaccgacctgcgccgcgccctaaagcgcttcatcccgtggtccgacctctccacccgacccttcctacaaacaaaactctgctggtacaccgacacggcaacaggggactggataatcacctaccacccatcctacccaaatctcttcatcgccacaggcggctcagggcacgcattcaaattcctccccatcatcggcgaaaaagtcgtagactgtctcatcggcaaccccccaaaagccttcgttgaaaaatggaagtggaaaggcggtaaaaagggtgtcccaggggaaacccaagacgcggagaagacgctggaagatatactgtcgacagaagatggaagtcgtgggggtaagcctggactcattctacgggacgagatggcgaaaagcggtcaatga

SEQ ID NO: 36693 - protein, 506 aa, Muscodor strobelii
  misc_feature: SGI Peptide ID NO. 572721
  misc_feature (20)..(445): Pfam Id: PF01266 Pfam Desc: FAD dependent oxidoreductase
  misc_feature (202)..(256): Pfam Id: PF01134 Pfam Desc: Glucose inhibited division protein A
  misc_feature (18)..(504): NCBI GI: 171681968 Blast Desc: protein product [Podospora anserina] gi|170940943|emb|CAP66593.1| protein product [Podospora anserina]
  misc_feature (25)..(504): NCBI GI: 85096226 Blast Desc: NCU04771 [Neurospora crassa OR74A] gi|28921703|gb|EAA30984.1| conserved [Neurospora crassa OR74A] gi|39979210|emb|CAE85581.1| related to fructosyl amino acid
  misc_feature (14)..(503): NCBI GI: 170674515 Blast Desc: fructosyl-amino acid oxidase [Epichloe festucae]
  misc_feature (18)..(504): NCBI GI: 39953926 Blast Desc: MGG_08877 [Magnaporthe grisea 70-15] gi|145021182|gb|EDK05311.1| MGG_08877 [Magnaporthe grisea 70-15]
  misc_feature (17)..(503): NCBI GI: 46128101 Blast Desc: FG08428.1 [Gibberella zeae PH-1]
  misc_feature (17)..(503): NCBI GI: 256733558 Blast Desc: [Nectria haematococca mpVI 77-13-4]
  misc_feature (18)..(504): NCBI GI: 145252386 Blast Desc: An16g03950 [Aspergillus niger] gi|134083255|emb|CAK46826.1| protein product [Aspergillus niger]
  misc_feature (18)..(503): NCBI GI: 258563650 Blast Desc: conserved [Uncinocarpus reesii 1704] gi|237908077|gb|EEP82478.1| conserved [Uncinocarpus reesii 1704]
  misc_feature (18)..(503): NCBI GI: 226284151 Blast Desc: sarcosine oxidase [Paracoccidioides brasiliensis Pb01]
  misc_feature (18)..(503): NCBI GI: 67537610 Blast Desc: AN4975.2 [Aspergillus nidulans FGSC A4] gi|40741863|gb|EAA61053.1| AN4975.2 [Aspergillus nidulans FGSC A4] gi|259482152|tpe|CBF76360.1| TPA: fructosyl amino acid FGSC
  misc_feature (186)..(447): SWISSPROT Homolog: EC 1.5.3.7 L-pipecolate oxidase
  misc_feature: Useful for introducing or modulating the production of volatile compounds
MTAAADPKTTKKEEFKAPKSILIVGSGVFGLSTALSLTSRPEIPKDTEITIIDRSPEEGVFPARDASSIDSSRIIRADYADFAYAALASEAQAHWRKDHLTDPDSLGGSGRYTESGLLLGADNGDDGATTRPDGHPTGLGYAKRSWVNALALAHTEGRPLNSIRLAGFSWAVARMGRTEGEWADWAYLNTSAGWADAEASMQWLYERVLSTKRVKFINGTVTQLETTSSDKPQRISGVKLSGDRTFTADLVILATGAWTPTLLDLEGQAIATGQCLAYLQLTEDEQEKLKDMPVCLNLTDGCFIIPPRNRVLKIARHSYGYLNPSTPTTNPLTPASSSPTEEASKNTNCPQKPISQPLTHLTNPSLQIPHEGITDLRRALKRFIPWSDLSTRPFLQTKLCWYTDTATGDWIITYHPSYPNLFIATGGSGHAFKFLPIIGEKVVDCLIGNPPKAFVEKWKWKGGKKGVPGETQDAEKTLEDILSTEDGSRGGKPGLILRDEMAKSGQ

SEQ ID NO: 36694 - DNA, 1889 bp, Muscodor strobelii
  misc_feature: SGI EST ID NO. CUFF.87707.1
  misc_feature: Variant of the nucleotide sequence at SEQ ID NO 36692
cccatattatataaatctactggttgatatcaattcaggtatctcggctttgaattgcgtatcgatcgtatctcgcattgagcatctcatgtcatcttacgtgtgcccaataccatctctcccaagaggggcagcagcccctccagtgccagacatcgacttttcgaccgacaacgcggccgaaaagatgactgcggccgcggacccgaaaacaactaagaaagaggagttcaaggcaccaaaaagtatcctcatagtcggctcaggcgtcttcggcctaagcacagctctctcccttacgagtcgtcccgagatcccaaaagacacagagatcaccatcatcgaccgatccccagaagaaggcgtattccccgcgcgagacgcctcgtccatcgactcctcgcgaatcatccgcgccgactacgcagacttcgcctacgcggctctagcctccgaggcgcaagcccactggcgcaaagaccatctcaccgatcccgactccctcggcggtagcggtcgatacaccgagtccggcctcctgctcggcgcagacaacggcgacgatggcgcaacgacgcgccctgatggacatcccacgggcctgggatacgcaaaacggagctgggtgaatgcactggccctcgcacatacagagggtcggccactaaattctatccgtctcgccggattctcctgggccgtggcaaggatgggtcgaacggagggagaatgggcagactgggcatatctcaacacaagcgcaggctgggccgatgcagaagccagcatgcaatggctctacgaacgcgtactctcgacaaaacgcgtgaaattcataaatgggaccgtcacgcaactcgagaccacctcgtcagacaagccccaacgcatatcaggcgtcaagttatcaggcgaccgtaccttcacagccgacctcgtaatcctcgcaaccggcgcctggacaccgaccctcctcgacctcgaaggccaggcgattgcgacaggccaatgcctagcctacctgcagctcaccgaggacgaacaagagaagctaaaggacatgcccgtgtgcctcaacctcacagacggctgcttcataatcccgccacgaaaccgcgtcctcaagatcgcccgtcattcatacggctacttgaatccctcgactcccacaaccaaccccctcactcccgcgtcctcctctcccaccgaagaagcctctaagaacaccaactgccctcaaaaacccatctcccaacccctaacccacctaacaaacccctctctccaaatcccacacgaaggcataaccgacctgcgccgcgccctaaagcgcttcatcccgtggtccgacctctccacccgacccttcctacaaacaaaactctgctggtacaccgacacggcaacaggggactggataatcacctaccacccatcctacccaaatctcttcatcgccacaggcggctcagggcacgcattcaaattcctccccatcatcggcgaaaaagtcgtagactgtctcatcggcaaccccccaaaagccttcgttgaaaaatggaagtggaaaggcggtaaaaagggtgtcccaggggaaacccaagacgcggagaagacgctggaagatatactgtcgacagaagatggaagtcgtgggggtaagcctggactcattctacgggacgagatggcgaaaagcggtcaatgattaagtgggaggtagtatacaagtagaatatacaaatattaatgatgaatgtacatgtagaaaggttcatttatgtgactgtagcggaatcaaggaacaatccattgagaaggtgactgtgtcaagccattgttcaaacacatatatccaacaaggagaaacccaagcatcactatgaaaa

SEQ ID NO: 36695 - DNA, 2424 bp, Muscodor strobelii
  misc_feature: SGI cDNA ID NO. 572722
  misc_feature: Encodes the peptide sequence at SEQ ID NO 36696
atgtcgagcaacgccaaactagacgatttccctgacgtcgaatccaagcttcagaagcccaccaaacaatctgccttcgagaagcagaaagcagaagcagaagccaagcgcaagcgagaagccgccgagaccgctgctgtctacgagagctttgtcaagagcttcgataacgacgatgatgacgacgaagacaccagtatctttgcgcgaaactcccaccagaatagtgcttcatcaggacgccctccgccttcatttggtgctgcgggcggtcacggcaggagacattttggggcatcaaacactggcacaggattgaagagtggaccaggctctctgggccccgtgcctatggcgtacggaagaaagaaccaagatgtgttccagcagaaaaaaggctacgaggaaggaagtgggagattgggtttccgtgacgaggacatcatcagtggaccaccatcgaaaaccaagggagtgtcaagagctttcaacactagtgatgacgaaggtgaggcacgttctcgagatgtagcagaagagaaggcttttgcgcgaccaactttgcgattgtccaatctaccgcccagaacatcgccaggtgtggtcaaggctctgatacccgcgagcctggttgtggagaacgtcaagatcttaccatcaacctccggagggagcgagagaaagtccgttgccgccattgtcacattatccacagagactccagctgccgatatcgattcggctgtaagctccttgcagaacagatatcttggctatggcttctatttgtctttacataggcatctatcttccgccgtctcatctacggcagtatcaggccctacgtcttcatcaacatcacatcccttcggagccaagccagttccacaagccaatgacaacgccccataccaacagccaggtggtttccatcgagggttcgcaccgccaaccaactacagtctgggcggcggaccaatatcgaaaactattctacacgttccagtgcaagctcccggcgacataaaacagatcaaactcattcataaggttgtagagtcggtgttggaacacggacccgaattcgaggccctactcttgtcacgaccggatgtacagaaagatgagaaatgggcttggatctgggacgcccgcagcgaaggtggcgtctggtatcgctggcgtctgtgggaagtggttactggtggccaagcaaatgacaaccgaccaggcaaatacctaccgctcttcgaggggagtcatgcatggaagatgcccgaaaagcgtttagctttcgagtataccactggtgttgacgaattcatatccgaccctgagtacacctcgtccgatgaagaggatttcgaggaagaaggaaacaaggcagcagggaatgcagaacacgacaaaaagtacctcaatccattggacaaggcaaagctgacccacctactggcacggctcccaactgctattgcaaggataagaaaaggcgatattgcccgggtcactgctttcgcgatcctgcattcaagtcgaggagcagacgaaatagccgaagccattgtagcgaacgtcataaagccgctatcacagacatctgcaaatccagacttcatgcgaaatgccccgaacgatgaacttcccgaaccaacgacagtagaggatgcagtcacaaagacagctgagacgcaagacacgagtggtgctagcctggtcggtctctacgtgatcagcgacattttgtcttcatccgctacaagtggcgtacggcacgcgtggcgttaccgccaactcttcgagacttctctcaagcggagccaagcgtttgagactctcggacttcttgcggaacgtttgaactggggccgactacgagtggagaaatggaagcgtagcgtaggactaattctgagcttatgggaaggctggtgtgccttcccaaccgacgctcagcaatttttctcagagactttcgaaaatcccccaggtgccaagaaagaagaactagccgaggatggacccaagaaaggtggtaaatggaagactgtcgaggcgagagcttcagcgcccggcgataaaggagggtttctgccggtctcgactgcgccggatgctgacagacatggcggcgagatgggcgacgccacatccgacgtggacggcgagatgatggatgaggacgcagatatgatggacgtggaacttgacagtgacatcgatggtgtacctatggatgatgaggaggacggtatgccgatggatcaagatcccagccccccggacgttgcggaagcagacgatcgcgttccaggcccggccactgcaaatgagacggactccaagctagctcaacagccgaggaaacgtatgagagccgtagacatgtttgcagactccgatagctcagatcatggcaactga

SEQ ID NO: 36696 - protein, 807 aa, Muscodor strobelii
  misc_feature: SGI Peptide ID NO. 572722
  misc_feature (1)..(804): NCBI GI: 170674516 Blast Desc: coatamer subunit protein [Epichloe festucae]
  misc_feature (1)..(807): NCBI GI: 256734072 Blast Desc: NECHADRAFT_67410 [Nectria haematococca mpVI 77-13-4]
  misc_feature (2)..(802): NCBI GI: 85096230 Blast Desc: NCU04772 [Neurospora crassa OR74A] gi|28921704|gb|EAA30985.1| [Neurospora crassa OR74A] gi|39979209|emb|CAE85580.1| conserved [Neurospora crassa]
  misc_feature (1)..(804): NCBI GI: 46128105 Blast Desc: FG08430.1 [Gibberella zeae PH-1]
  misc_feature (3)..(802): NCBI GI: 171681970 Blast Desc: protein product [Podospora anserina] gi|170940944|emb|CAP66594.1| protein product [Podospora anserina]
  misc_feature (1)..(802): NCBI GI: 145614242 Blast Desc: MGG_08876 [Magnaporthe grisea 70-15] gi|145021183|gb|EDK05312.1| MGG_08876 [Magnaporthe grisea 70-15]
  misc_feature (3)..(804): NCBI GI: 156053053 Blast Desc: SS1G_06694 [Sclerotinia sclerotiorum 1980] gi|154704472|gb|EDO04211.1| SS1G_06694 [Sclerotinia sclerotiorum 1980]
  misc_feature (3)..(804): NCBI GI: 154318377 Blast Desc: BC1G_03356 [Botryotinia fuckeliana B05.10] gi|150842879|gb|EDN18072.1| BC1G_03356 [Botryotinia fuckeliana B05.10]
  misc_feature (1)..(802): NCBI GI: 159127587 Blast Desc: conserved [Aspergillus fumigatus A1163]
  misc_feature (1)..(802): NCBI GI: 119491837 Blast Desc: NFIA_066830 [Neosartorya fischeri NRRL 181] gi|119411573|gb|EAW21516.1| conserved [Neosartorya fischeri NRRL 181]
MSSNAKLDDFPDVESKLQKPTKQSAFEKQKAEAEAKRKREAAETAAVYESFVKSFDNDDDDDEDTSIFARNSHQNSASSGRPPPSFGAAGGHGRRHFGASNTGTGLKSGPGSLGPVPMAYGRKNQDVFQQKKGYEEGSGRLGFRDEDIISGPPSKTKGVSRAFNTSDDEGEARSRDVAEEKAFARPTLRLSNLPPRTSPGVVKALIPASLVVENVKILPSTSGGSERKSVAAIVTLSTETPAADIDSAVSSLQNRYLGYGFYLSLHRHLSSAVSSTAVSGPTSSSTSHPFGAKPVPQANDNAPYQQPGGFHRGFAPPTNYSLGGGPISKTILHVPVQAPGDIKQIKLIHKVVESVLEHGPEFEALLLSRPDVQKDEKWAWIWDARSEGGVWYRWRLWEVVTGGQANDNRPGKYLPLFEGSHAWKMPEKRLAFEYTTGVDEFISDPEYTSSDEEDFEEEGNKAAGNAEHDKKYLNPLDKAKLTHLLARLPTAIARIRKGDIARVTAFAILHSSRGADEIAEAIVANVIKPLSQTSANPDFMRNAPNDELPEPTTVEDAVTKTAETQDTSGASLVGLYVISDILSSSATSGVRHAWRYRQLFETSLKRSQAFETLGLLAERLNWGRLRVEKWKRSVGLILSLWEGWCAFPTDAQQFFSETFENPPGAKKEELAEDGPKKGGKWKTVEARASAPGDKGGFLPVSTAPDADRHGGEMGDATSDVDGEMMDEDADMMDVELDSDIDGVPMDDEEDGMPMDQDPSPPDVAEADDRVPGPATANETDSKLAQQPRKRMRAVDMFADSDSSDHGN

SEQ ID NO: 36697 - DNA, 3745 bp, Muscodor strobelii
  misc_feature: SGI EST ID NO. CUFF.87566.0
  misc_feature: Variant of the nucleotide sequence at SEQ ID NO 36695
cttgattccataattcattggcaaagctccttcctttgtcattcccaaaatcacagtgttgtctccttaatgggtgcaaggagtgtggtcagccggatacgacgcggcattgggacgtagcgcgcgaacaaggagctcccaaagaaaaaacacgtcttgcgcctctggcctcgcgtccgcagtcacgatgtcgagcaacgccaaactagacgatttccctgacgtcgaatccaagcttcagaagcccaccaaacaatctgccttcgagaagcagaaagcagaagcagaagccaagcgcaagcgagaagccgccgagaccgctgctgtctacgagagctttgtcaagagcttcgataacgacgatgatgacgacgaagacaccagtatctttgcgcgaaactcccaccagaatagtgcttcatcaggacgccctccgccttcatttggtgctgcgggcggtcacggcaggagacattttggggcatcaaacactggcacaggattgaagagtggaccaggctctctgggccccgtgcctatggcgtacggaagaaagaaccaagatgtgttccagcagaaaaaaggctacgaggaaggaagtgggagattgggtttccgtgacgaggacatcatcagtggaccaccatcgaaaaccaagggagtgtcaagagctttcaacactagtgatgacgaaggtgaggcacgttctcgagatgtagcagaagagaaggcttttgcgcgaccaactttgcgattgtccaatctaccgcccagaacatcgccaggtgtggtcaaggctctgatacccgcgagcctggttgtggagaacgtcaagatcttaccatcaacctccggagggagcgagagaaagtccgttgccgccattgtcacattatccacagagactccagctgccgatatcgattcggctgtaagctccttgcagaacagatatcttggctatggcttctatttgtctttacataggcatctatcttccgccgtctcatctacggcagtatcaggccctacgtcttcatcaacatcacatcccttcggagccaagccagttccacaagccaatgacaacgccccataccaacagccaggtggtttccatcgagggttcgcaccgccaaccaactacagtctgggcggcggaccaatatcgaaaactattctacacgttccagtgcaagctcccggcgacataaaacagatcaaactcattcataaggttgtagagtcggtgttggaacacggacccgaattcgaggccctactcttgtcacgaccggatgtacagaaagatgagaaatgggcttggatctgggacgcccgcagcgaaggtggcgtctggtatcgctggcgtctgtgggaagtggttactggtggccaagcaaatgacaaccgaccaggcaaatacctaccgctcttcgaggggagtcatgcatggaagatgcccgaaaagcgtttagctttcgagtataccactggtgttgacgaattcatatccgaccctgagtacacctcgtccgatgaagaggatttcgaggaagaaggaaacaaggcagcagggaatgcagaacacgacaaaaagtacctcaatccattggacaaggcaaagctgacccacctactggcacggctcccaactgctattgcaaggataagaaaaggcgatattgcccgggtcactgctttcgcgatcctgcattcaagtcgaggagcagacgaaatagccgaagccattgtagcgaacgtcataaagccgctatcacagacatctgcaaatccagacttcatgcgaaatgccccgaacgatgaacttcccgaaccaacgacagtagaggatgcagtcacaaagacagctgagacgcaagacacgagtggtgctagcctggtcggtctctacgtgatcagcgacattttgtcttcatccgctacaagtggcgtacggcacgcgtggcgttaccgccaactcttcgagacttctctcaagcggagccaagcgtttgagactctcggacttcttgcggaacgtttgaactggggccgactacgagtggagaaatggaagcgtagcgtaggactaattctgagcttatgggaaggctggtgtgccttcccaaccgacgctcagcaatttttctcagagactttcgaaaatcccccaggtgccaagaaagaagaactagccgaggatggacccaagaaaggtggtaaatggaagactgtcgaggcgagagcttcagcgcccggcgataaaggagggtttctgccggtctcgactgcgccggatgctgacagacatggcggcgagatgggcgacgccacatccgacgtggacggcgagatgatggatgaggacgcagatatgatggacgtggaacttgacagtgacatcgatggtgtacctatggatgatgaggaggacggtatgccgatggatcaagatcccagccccccggacgttgcggaagcagacgatcgcgttccaggcccggccactgcaaatgagacggactccaagctagctcaacagccgaggaaacgtatgagagccgtagacatgtttgcagactccgatagctcagatcatggcaactgagatgctagatgagatgtctgaaacacaacacttcggcaatcggaaatcatgccgatcacatcaagatagccgcccgtcgtccatctggattcttaccgaacggttggtttcgcgacgtgtagagaaaccttgctacatcgtcttgcaaactcaattcgcatcgagctgagaatgtcagccctgttgtatctcgacaacgccactatcgtcatcgctcaggaaccattgcgacttggacgataacgcatgtagcgcgacttacatgcgtgattcgacaccttacctagaacggagtagtcatggaataatcgtgcaaacggcaactagcctcgccagcctcgtacgatcctatatctatgctgtttcgtcattggctcctttgagtactcgaaccttgtacgatgagtccaacacctgcactacatagaccgactctcgtcttccatcactttggattcatgatgctccgcgatgatgacttaccgggagatcagtatctacagggcacgcgggagcgacggagcaggttgtgcttttaaacactagggttgaacattgctatgggttgattgatcagaatatcaagaactcaagagtgcacatttccatggcgtcgatgcgctgacgagatgacctagagaccgaacaagtacggatatcgcacgatttacctagttgatgagactgtccgttacatggtatgacgtacgtacggaaagatcctgatgtccaggccaggcaaaagtccagggactaataagctgaaaaatcggggcttagtggcttacgggtcgagaccctgatggcatgcctactagatcgtgtctcccctttctctgtgtgtgacgcttgttttgtggggatccgggacggaggccggttcgtgcaaatcagacgggagcaacgatacccctctttcaatccctcaacaacacgcgaagaggtggacggcatgagctcttgtgatgggctatgtctaatcacagagtctggcatatgatcggtcacaggttggcctgtggaagcgtcaacatctgacaagggctgactaacaagctcctgatagttgttgattagatacacagattataatataggttcaatgagatcacatatagctagtgttatcacgac

SEQ ID NO: 36698 - DNA, 1212 bp, Muscodor strobelii
  misc_feature: SGI cDNA ID NO. 572723
  misc_feature: Encodes the peptide sequence at SEQ ID NO 36699
atgagtttaccaagggtggagcaagtccgcatggccaatggaaagacattggaccttgtgtttaccaacggaggtgtttttctcaaagggaagaaagtggcatgccacgaatgcaaaaaaggtcaccggtcctcgaaatgctctcatgcaggccaaaaactattggaatatgtcaacccacctggccgacctgcgaatgcgaagcaaagcgcacacgagaagcccgtcgtcatcgcactgcatgcttataagatctataagtcagacggagtaacgttgagacccgatgtcgatcattccaccaggtcgaaggtgagacgacccagacagcggaggcaatcgcctagacacaaaggcgcaggtcaagctgccggacccccaacgggccgtcccgtcaatcttaatgcccaggcgatgccagacggtctccctcggccagcaatgcattacaatgaattccctctctatccagacgtggggttcgcagctgagccttcgacatacgtaccgaatggggaatctaggccagaggcgcacttagtcggagagggacttggcattctcaacgaccctctcttgggcgacatgttcacgggcttgggtatcccagggcatgcccagacacatattaacgatgatgttcctggccggaatggctgccgatgtgctggatgcagcatgaacatctctagttacgggccaaagatacaggctgctatgaacgagtctcaaggggataccccgaccttgggcagttcaccagcgggctcagagaggcccaactcagcaatgtcagctcctatgccagctcctatgccagttcccagcatggcttatcaccaattcggatctactcctcctgagtatccaacggcgaatggtgtctatggcagccccggcaatcatggcaatgtagagcagggaaatctcggagcgaactatggtactcccactgcctggaacaactcctcagcacagctttctcctgctcctttcacaggacccttcgacagtgtcaacgcagcatcgccaggtttcaatcgggggttcatgggcgagccagcacaatctcccgttcactcggggcatggttttgacgtgccaatgccagcaccaacgccaatccccaatcatggattcatgggcaattcgaaccagtttcctggtcccggtaatatgcctgttctgaatggaaactggatgtgggcataa

SEQ ID NO: 36699 - protein, 403 aa, Muscodor strobelii
  misc_feature: SGI Peptide ID NO. 572723
  misc_feature (26)..(65): Pfam Id: PF00649 Pfam Desc: Copper fist DNA binding domain
  misc_feature (27)..(180): NCBI GI: 170674517 Blast Desc: copper-sensing transcription factor [Epichloe festucae]
  misc_feature (27)..(64): NCBI GI: 261359574 Blast Desc: grisea protein [Verticillium albo-atrum VaMs.102]
  misc_feature (27)..(64): NCBI GI: 256734071 Blast Desc: NECHADRAFT_91927 [Nectria haematococca mpVI 77-13-4]
MSLPRVEQVRMANGKTLDLVFTNGGVFLKGKKVACHECKKGHRSSKCSHAGQKLLEYVNPPGRPANAKQSAHEKPVVIALHAYKIYKSDGVTLRPDVDHSTRSKVRRPRQRRQSPRHKGAGQAAGPPTGRPVNLNAQAMPDGLPRPAMHYNEFPLYPDVGFAAEPSTYVPNGESRPEAHLVGEGLGILNDPLLGDMFTGLGIPGHAQTHINDDVPGRNGCRCAGCSMNISSYGPKIQAAMNESQGDTPTLGSSPAGSERPNSAMSAPMPAPMPVPSMAYHQFGSTPPEYPTANGVYGSPGNHGNVEQGNLGANYGTPTAWNNSSAQLSPAPFTGPFDSVNAASPGFNRGFMGEPAQSPVHSGHGFDVPMPAPTPIPNHGFMGNSNQFPGPGNMPVLNGNWMWA

SEQ ID NO: 36700 - DNA, 894 bp, Muscodor strobelii
  misc_feature: SGI cDNA ID NO. 572724
  misc_feature: Encodes the peptide sequence at SEQ ID NO 36701
atgaagaccgcgcacgtcacgattctatcgagcctcattgctcaagctctcggccatggatatatctaccgtatcattgcggacaacacggtatatccaggatgggatatcttcatcgatcctagcatgaagccgacgccttcccgtatcgcatatggtggcggtactaccggtccagtgatcgatgtgacgagcccggacatggcttgtaacactgtacataatccggctccgggttccatcgccgaggtccgcgcaggtagaaacattactttcttctggtcacattggctgtacagtcacaaagggcctatcacagcatggatggcgccttatgaaggcgccgtcgccgatgtgaatgtgaacgagttagaatttgtcaaattcacggaagacacggtggacaagaatggcatctgggctaatgttcgcatgatagataataacaacggcagctttaccgcacagattcctgctgatatcaaaccgggcaattatatcattcgcaatgagattatcgcattacatttcgcgctgaacgtatcactagcaggcttcccagttggtccccaattttacatgacttgcttcaacttcaaggttacgggtgatggcacagcaactcctgctggcgccaagttccccggcgcgtacaagctcgaggaaccaggcttccacttcaatgtcagttccaattcaactgattatcctcccgtcggtcctcctgtgtacgtcagcaggatttcggcccaactagagccgaaagagcgtgtggtgatcagtccgacaggaactggtaatgctacgcaggataaccagtactatcagtggcagtatacggcacttaagaatcagggagatatcacctcttattttgactctatcggtggctga

SEQ ID NO: 36701 - protein, 297 aa, Muscodor strobelii
  misc_feature: SGI Peptide ID NO. 572724
  misc_feature (1)..(238): Pfam Id: PF03443 Pfam Desc: Glycosyl hydrolase family 61
  misc_feature (77)..(229): Pfam Id: PF03443 Pfam Desc: Glycosyl hydrolase family 61
  misc_feature (1)..(171): NCBI GI: 116203395 Blast Desc: CHGG_09581 [Chaetomium globosum CBS 148.51] gi|88175709|gb|EAQ83177.1| CHGG_09581 [Chaetomium globosum CBS 148.51]
  misc_feature (9)..(244): NCBI GI: 169855585 Blast Desc: CC1G_02195 [Coprinopsis cinerea okayama7#130] gi|116504541|gb|EAU87436.1| CC1G_02195 [Coprinopsis cinerea okayama7#130]
  misc_feature (1)..(244): NCBI GI: 70994524 Blast Desc: endoglucanase [Aspergillus fumigatus Af293] gi|66849674|gb|EAL90002.1| endoglucanase, [Aspergillus fumigatus Af293] gi|159125047|gb|EDP50164.1| endoglucanase, [Aspergillus
  misc_feature (2)..(241): NCBI GI: 115384548 Blast Desc: endoglucanase IV precursor [Aspergillus terreus NIH2624] gi|114196513|gb|EAU38213.1| endoglucanase IV precursor [Aspergillus terreus NIH2624]
  misc_feature (1)..(244): NCBI GI: 119500958 Blast Desc: endoglucanase, [Neosartorya fischeri NRRL 181] gi|119415401|gb|EAW25339.1| endoglucanase, [Neosartorya fischeri NRRL 181]
  misc_feature (9)..(244): NCBI GI: 75859132 Blast Desc: AN9524.2 [Aspergillus nidulans FGSC A4] gi|40747584|gb|EAA66740.1| AN9524.2 [Aspergillus nidulans FGSC A4] gi|259485823|tpe|CBF83171.1| TPA: endo-1,4-beta-glucanase,
  misc_feature (6)..(271): NCBI GI: 67526107 Blast Desc: AN3511.2 [Aspergillus nidulans FGSC A4] gi|40739882|gb|EAA59072.1| AN3511.2 [Aspergillus nidulans FGSC A4]
  misc_feature (2)..(244): NCBI GI: 121706932 Blast Desc: endoglucanase, [Aspergillus clavatus NRRL 1] gi|119399827|gb|EAW10253.1| endoglucanase, [Aspergillus clavatus NRRL 1]
  misc_feature (1)..(267): NCBI GI: 256724486 Blast Desc: NECHADRAFT_54993 [Nectria haematococca mpVI 77-13-4]
  misc_feature (1)..(244): NCBI GI: 154305677 Blast Desc: BC1G_07653 [Botryotinia fuckeliana B05.10] gi|150853172|gb|EDN28364.1| BC1G_07653 [Botryotinia fuckeliana B05.10]
  misc_feature (64)..(244): SWISSPROT Homolog: EC 3.2.1.4 Cellulase
MKTAHVTILSSLIAQALGHGYIYRIIADNTVYPGWDIFIDPSMKPTPSRIAYGGGTTGPVIDVTSPDMACNTVHNPAPGSIAEVRAGRNITFFWSHWLYSHKGPITAWMAPYEGAVADVNVNELEFVKFTEDTVDKNGIWANVRMIDNNNGSFTAQIPADIKPGNYIIRNEIIALHFALNVSLAGFPVGPQFYMTCFNFKVTGDGTATPAGAKFPGAYKLEEPGFHFNVSSNSTDYPPVGPPVYVSRISAQLEPKERVVISPTGTGNATQDNQYYQWQYTALKNQGDITSYFDSIGG

SEQ ID NO: 36702 - DNA, 1227 bp, Muscodor strobelii
  misc_feature: SGI cDNA ID NO. 572725
  misc_feature: Encodes the peptide sequence at SEQ ID NO 36703
atggatcaatcaagtcgggatcataggcgcaggagcgagtctcctcgcaaacgaccgcgacagcacgcagactcgcctgagcgccacgtgcgtaggcggactcgcgatgatttcccgcggatgaactctcaatcgccaccacgaaatgcttccgagaatgcgcgccatcatagacgcgaacgggaacgcgtagacagcgggaggaatagccgggatgaggctgaaagaaaacggcgtcatagcagaggggcgcgtcaaggccagcgcgggtcgtcgtcctcgcatcagcgtcacaaccatcatgaggaccaccggcgtcgtcaccggcctgaaatatctgagaactcagtcgcattgccttgtgatgcccgcgctttatcgcgatcatcagacctagcggccttccgcccactatttgcgcggtatctcgacatacaaaagcaaattgacattgctacactcgaggagcgtgaggttcgcgggcgctggaagagttttgttgccaagtggaataatgcagaattggcggaagggtggtatcgtcccgagacctaccaagatgctttgctggactccagggaagaccaaaagtcagccgaaaaggcaatgtccccgaattcacagcttcagcatgtgtcacatgatcaaggtggcaagtatatctcagaagcgtcagataacgaagaggattacggcccaacacttcccagtcatgcacaatatccctccgaacggagtaacaccgatgcgtctaggcatggtcctggtattccgagcctcactgatctgacgtatcgggatgagatcaaagctgcagacatcgaggaagctcgttctgcattgcgactccaacgaaaagctgatcgcttactgcagaaagaaagactcgaagacttggcaccaaaagctgcggcaggctcacatgaaagaaagatggagaagcggatagatgtccggaacagcaacaaggcattcgccgaagctaagacaagtaatgatgcgcccgaaatgaatgattcggagctaatgggcgagggtggtggcgtagaggagtacaagaaaatgaagagggaggcagatagacgaaagaatgaaagagaggtcagaagggaggaaatcgagagagcgaagaaagaggaaagggacgaaagaatcagggagtatagagaaagggaagcaggaaccgtggacatgctgagagagattgcgaaagcgaggtttggttag

SEQ ID NO: 36703 - protein, 408 aa, Muscodor strobelii
  misc_feature: SGI Peptide ID NO. 572725
  misc_feature (113)..(408): NCBI GI: 46128109 Blast Desc: FG08432.1 [Gibberella zeae PH-1]
  misc_feature (117)..(408): NCBI GI: 256734070 Blast Desc: NECHADRAFT_35844 [Nectria haematococca mpVI 77-13-4]
  misc_feature (119)..(408): NCBI GI: 85096247 Blast Desc: NCU04776 [Neurospora crassa OR74A] gi|28921708|gb|EAA30989.1| [Neurospora crassa OR74A] gi|39979205|emb|CAE85576.1| related to RNA helicase HEL117
  misc_feature (81)..(408): NCBI GI: 242782288 Blast Desc: conserved [Talaromyces stipitatus ATCC 10500] gi|218720116|gb|EED19535.1| conserved [Talaromyces stipitatus ATCC 10500]
  misc_feature (102)..(408): NCBI GI: 238838183 Blast Desc: conserved [Microsporum canis CBS 113480]
  misc_feature (98)..(408): NCBI GI: 189211765 Blast Desc: conserved [Pyrenophora tritici-repentis Pt-1C-BFP] gi|187979410|gb|EDU46036.1| conserved [Pyrenophora tritici-repentis Pt-1C-BFP]
  misc_feature (116)..(408): NCBI GI: 170674518 Blast Desc: 17A8-11 [Epichloe festucae]
  misc_feature (99)..(408): NCBI GI: 255936893 Blast Desc: Pc13g10530 [Penicillium chrysogenum Wisconsin 54-1255] gi|211584093|emb|CAP92122.1| Pc13g10530 [Penicillium chrysogenum Wisconsin 54-1255]
  misc_feature (138)..(408): NCBI GI: 212526986 Blast Desc: conserved [Penicillium marneffei ATCC 18224] gi|210073048|gb|EEA27135.1| conserved [Penicillium marneffei ATCC 18224]
  misc_feature (101)..(408): NCBI GI: 240108345 Blast Desc: CPC735_006910 [Coccidioides posadasii C735 delta SOWgp]
MDQSSRDHRRRSESPRKRPRQHADSPERHVRRRTRDDFPRMNSQSPPRNASENARHHRRERERVDSGRNSRDEAERKRRHSRGARQGQRGSSSSHQRHNHHEDHRRRHRPEISENSVALPCDARALSRSSDLAAFRPLFARYLDIQKQIDIATLEEREVRGRWKSFVAKWNNAELAEGWYRPETYQDALLDSREDQKSAEKAMSPNSQLQHVSHDQGGKYISEASDNEEDYGPTLPSHAQYPSERSNTDASRHGPGIPSLTDLTYRDEIKAADIEEARSALRLQRKADRLLQKERLEDLAPKAAAGSHERKMEKRIDVRNSNKAFAEAKTSNDAPEMNDSELMGEGGGVEEYKKMKREADRRKNEREVRREEIERAKKEERDERIREYREREAGTVDMLREIAKARFG

SEQ ID NO: 36704 - DNA, 2869 bp, Muscodor strobelii
  misc_feature: SGI EST ID NO. CUFF.87569.0
  misc_feature: Variant of the nucleotide sequence at SEQ ID NO 36702
ttcgcgtgttgctagtaactacgatatcagtgtgcactaaacctgttacaaccagacttccactgccgccaagactcttataaatgactatagatgctttatggagagccatgtcagtgtagactttgctcagtgcgcaaaggtagtagtagcccctgtcgcaatcagaatccgggcgcacagccgttaagccacagtctttcactcgcgttgattatttgttgcaacgagccactttgaaattgaaatagatgcgatacgtaaaaccagcctgcgcgtcgcgctatgatgaaggcgaaggtggtttgcaatgaggagtgattgaaccaacttccagccgcctcaacaccccaggatgtccaacaattggcccagttgccattggcaacagtcctttgcgactaacagaacatcacttctgacgtacagctccagtcatgattgcgttgcggctgagcaccgcagcaacccgatttctcgccggccgttgcacatcaccagtcccagcaaccatgtacttcccacgacaacaccccgcaaacacaagcctttatgaatcccaataatatggtcgctcattgcccgtagtgggcttatggtcgaatggtgtgtttcaatactttattccttgaaatactagttcgaatcgccggagtcgaggcaatttccaatttttcaagataaatttctattttttttttcttcccctcggtccgatgtagttttcatttgagagcgtgaatccaaatgaagtgctgttttcaagaattcctttgttcattcgtgcgctcggttgtatcgctttggatcaagggcaaggcttgtatcgagtcattatgtcgggtcctcgacatagctcatcattgaggcgtgcattgatgacaattcgattgcgatgtttgacgcgcaagtcatcggaatagtgtaacggagtctattgtgactgtctgtgaaacgcaggacacatagaacgtgacgtggtaacccgatgacaatgttgtgacgccatcatctttccagcctcccccaagcctatttgggcaagagtgtgagatgcagcagaaacggcgacctgcatgcagacttctagaataccaacgaggaggaaggctaggacttcggccgctttgccgatatcagatcatgatgctggtacggagataggccggcgattcgactgtgacagcaagcgcccatacccacgcccttcagcttgcgcgcgacctttcggtgccgagcaagcgccttagatctgcatgtagcgtcgcattgccgtcacggttgtatgtcgtgcagaggtcgcgacgttgtaagcactattttcgggtggttgcattgaatcgttggggtcgctggggaatgctagttcgctcgtgcaactttaattgcacgccaacgttggtgggagggcatttacttccttcaccaacttctcgtcctgattgattggtcgctcgacaacatcgcgagcaggtgcgcgtctcggcgcactggctatattactgcggcatatatcttggcacagccgtaatggatcaatcaagtcgggatcataggcgcaggagcgagtctcctcgcaaacgaccgcgacagcacgcagactcgcctgagcgccacgtgcgtaggcggactcgcgatgatttcccgcggatgaactctcaatcgccaccacgaaatgcttccgagaatgcgcgccatcatagacgcgaacgggaacgcgtagacagcgggaggaatagccgggatgaggctgaaagaaaacggcgtcatagcagaggggcgcgtcaaggccagcgcgggtcgtcgtcctcgcatcagcgtcacaaccatcatgaggaccaccggcgtcgtcaccggcctgaaatatctgagaactcagtcgcattgccttgtgatgcccgcgctttatcgcgatcatcagacctagcggccttccgcccactatttgcgcggtatctcgacatacaaaagcaaattgacattgctacactcgaggagcgtgaggttcgcgggcgctggaagagttttgttgccaagtggaataatgcagaattggcggaagggtggtatcgtcccgagacctaccaagatgctttgctggactccagggaagaccaaaagtcagccgaaaaggcaatgtccccgaattcacagcttcagcatgtgtcacatgatcaaggtggcaagtatatctcagaagcgtcagataacgaagaggattacggcccaacacttcccagtcatgcacaatatccctccgaacggagtaacaccgatgcgtctaggcatggtcctggtattccgagcctcactgatctgacgtatcgggatgagatcaaagctgcagacatcgaggaagctcgttctgcattgcgactccaacgaaaagctgatcgcttactgcagaaagaaagactcgaagacttggcaccaaaagctgcggcaggctcacatgaaagaaagatggagaagcggatagatgtccggaacagcaacaaggcattcgccgaagctaagacaagtaatgatgcgcccgaaatgaatgattcggagctaatgggcgagggtggtggcgtagaggagtacaagaaaatgaagagggaggcagatagacgaaagaatgaaagagaggtcagaagggaggaaatcgagagagcgaagaaagaggaaagggacgaaagaatcagggagtatagagaaagggaagcaggaaccgtggacatgctgagagagattgcgaaagcgaggtttggttagatgtcaggtagaatgatctgattatctggtattagtgcccgtaggtaatagaaactaagaaatcatctctcgctctcaatgaggtcaccgttacacttagtatcaatttgcc

SEQ ID NO: 36705 - DNA, 1518 bp, Muscodor strobelii
  misc_feature: SGI cDNA ID NO. 572726
  misc_feature: Encodes the peptide sequence at SEQ ID NO 36706
atgccttcagcggtagaaacagagcccgagggcgatcagaggagtaccgacagcgccaacaacaatagcagcagcagcagccacatgaaccagcaacattctgagaaagaatgggacgccatgtatccgcatattattcgcctgtacctaggcgaacagcttatacttggcgaagtaatgcggattatggaggactggagcagtcagtctatgtacaagaaacgtataagcaagtggcagcttcacaaatacaagcgcagagcccgctctgccgctgagccaaccccttcgatagaaacagccgagtctcccgctgtaagacgaacctcgtccattgcacgtagaccgacctccgcaagtttgccgcctcaggttgcggacctagagatggattctgccgtacaggctctgctagcgaatatgcgacgtctgtcgctgatgcacaatgctccaagtcgagattctcctggagatcaccaactagacaaggaagttggtctcacaccatcggggatcctcggcgtatcacaaatgtatttggcatttgccctgggctcaacattgtttgttaggggacatggtcagctggctgggaaagctgtacgcaaagctttcctgatgctggaggacattatcaagcatgcacacttcggcttggactgggtcattatagatttactgtacgactttgcttctcgaggccaacacgaactctacacggcattcgtggcgcatctagctaatctagcgcacgttctgctacctaatcaccatcctctgcatcggattgcggagcagcttttacgctatgggaatgacgaacgtggagatattatcactttacttcagcgtgtgtattttcatcagatcgacgctgtccagtccgaccccgaggttcgcaacttgatcacatcacagaaccgacctatccataacgcgctcttgacctcagaacatattgacgccgacacagcgcttgtgatacggggtattcgagccgtgcatgatgaactcgagaggcaaaaggacctatctcttccatcctccccagttccatctcctgcgacatctcctccatcgactcctgcattttcgcacacaggtggcagcgagggccgcgacatgatgcttctcccgaaatttgttgaagagcgcgcgaaacgatcgatggcgcggatgagagacaatcctgacccccttgttttaggcgtagccgatcgtctttatttcaccgagtacttccctgatcttgttgatctatacaaattgaaaggaacagtgcgccaaaatgagatcgatggagactggtttagcgctatacaagcgcagagaacggtcatcgagatcctcaaagagaaatgggctgcagatcagttgggtttgatccgagagctctgggctctcatgaggttgttagagtctgcgggtgttgcacaagagcaaattgacgcggtcaatttcgaagctctggaagttacaagagatcttctgaaagacattcctgatgatgccccttga

SEQ ID NO: 36706 - protein, 505 aa, Muscodor strobelii
  misc_feature: SGI Peptide ID NO. 572726
  misc_feature (178)..(291): NCBI GI: 46108404 Blast Desc: FG01084.1 [Gibberella zeae PH-1]
  misc_feature (56)..(267): NCBI GI: 256720694 Blast Desc: [Nectria haematococca mpVI 77-13-4]
  misc_feature (31)..(254): NCBI GI: 256735141 Blast Desc: NECHADRAFT_74679 [Nectria haematococca mpVI 77-13-4]
  misc_feature (36)..(299): NCBI GI: 171680052 Blast Desc: protein product [Podospora anserina] gi|170939652|emb|CAP64879.1| protein product [Podospora anserina]
MPSAVETEPEGDQRSTDSANNNSSSSSHMNQQHSEKEWDAMYPHIIRLYLGEQLILGEVMRIMEDWSSQSMYKKRISKWQLHKYKRRARSAAEPTPSIETAESPAVRRTSSIARRPTSASLPPQVADLEMDSAVQALLANMRRLSLMHNAPSRDSPGDHQLDKEVGLTPSGILGVSQMYLAFALGSTLFVRGHGQLAGKAVRKAFLMLEDIIKHAHFGLDWVIIDLLYDFASRGQHELYTAFVAHLANLAHVLLPNHHPLHRIAEQLLRYGNDERGDIITLLQRVYFHQIDAVQSDPEVRNLITSQNRPIHNALLTSEHIDADTALVIRGIRAVHDELERQKDLSLPSSPVPSPATSPPSTPAFSHTGGSEGRDMMLLPKFVEERAKRSMARMRDNPDPLVLGVADRLYFTEYFPDLVDLYKLKGTVRQNEIDGDWFSAIQAQRTVIEILKEKWAADQLGLIRELWALMRLLESAGVAQEQIDAVNFEALEVTRDLLKDIPDDAP

SEQ ID NO: 36707 - DNA, 4224 bp, Muscodor strobelii
  misc_feature: SGI EST ID NO. CUFF.87588.0
  misc_feature: Variant of the nucleotide sequence at SEQ ID NO 36705
caaacgttcaatgacgaaataagtctaccagggttgatccttgcaatgtaccgacggcttccagcaactcgccgcgtctgtcgcgtctgtcgccagtttgctgacgagcacctgtcatccggtgtttggtctggcccaagggccggacgttgacggggcgtatgtacagcaccaagagctgtaagcatccgaccacgtgcagatatcagagtattactgcagcctcgtcacggcgccctccgcaatgtgcatatccagggttcgcagcatagtactcgaaacacgccgccaagaagtcggggacaaaccaagagcagacctcataggcccatcttcacgcaccatcacaaacaaagattatgtcattgcaggcttctaagtaagcataattagacaattgagattatctaagagtcggcgaatggaccgagatgaaccatcccttcgggtcggggatgacatggtcgacctgcctacatctgcagccgaggcccagtagacgaagatatgacggatgatacatccgcgagacgaggaaagcatcgtatttcacgatgcgtttgaggctgccggaatggacgagagaatcaacttggagaatctttgtagtttttaaacgacttcgtaaagagcccaatcgctacagaaatcgcatgagaattcgttgtcaaatggaatacaattcggatttttcgataatacaaattccgtcgacggtgtaatagttagcgatagaccgattaggtatgtgcaattgcttggcgcggtcataagcttcttgaacaccggcaatttgcgagggctttacggccgtacggccggaactagaaggctgcgatatcgtaaggctagcaacgacttgacaatttaggctcggtccgtggacaagctgaagcctcgtgttgtcaattcgagatgggcgagagtgcccttttcgaagaatttgagaagctagtcgaatggtggaaatattccggaatgacgcaaagcagcggcgcagtttgtcgttttcgcaataacgtttggccttcggcttctcgccaatcccatgcttggatctgtatcgttagctgctgcatccttcgaggcacgatcctcgacccgccgcgcttgtgaatctctaagcgcagaatccccaagtccgacctaccacaatcctgaccttggagcactggcccacgtaaaggattcaaagccagccgtgcgtcgctaggtagttgacttgggccgggatggggcggagattccacaatcactcggacgacatggtagccctacactaccggtcccgccgttaatccaccgttgtctggtctcttccctgcttgacataccatctccggcagtccaggtccgcggtcgccaggagcctgtgtggtgcttccaagcattcagctcacccatggtgtttcattgggcgacattacgagaactgccgaactctcctcaaatctcaaatcgatctcgtgggccacgggcaaaactggaaacggccacgacgggtgaattacatggtgcgtctccgggtgctgtgccgcacggcaagtgccatgaccatctcacatatgcctgcaccctgaagcctgccagactggaggctgcagttgatgatcctagctttgctgaagacataggtgctaaggcccgactttgcctcgacaaagggccggggtaacacatccgtcaagcatgatttgctgcatcattatctaaggttgatgtagtccctgagccacgttccgctcgttaatcatcgatccataggctacaatggtaacggcttggcgacattctccatttgccaactagccgcccaagcgccccaggcgagcacgcacgaaaatgtcattcgatacgcaagacatacaggggttcgtattagaaaggattacactggccaacgtgtgagttcatagctgggtcaatcctcctgaaaagattaactaagctggcaaatccagcgatactgacaaacttgatataacaacaagatggaagcgaacaattttttcagtagcagtctcgtgttgcgttcattctgttcctcatcattgatacggagatacttgagcttgaaacccgcaagtaacattaataccgtcaggggcaacggttatcacaccctcgtctcgaagctacaccaaaataagaaaactggtataattactagcccacttataacgcgccggcgggatgcgggggaggaccagcagattgaagtcgcctacaatggataataaaggcagcagagaacccagcgcatcatcccatgatcatcatgattccccaaatcccacaatgccttcagcggtagaaacagagcccgagggcgatcagaggagtaccgacagcgccaacaacaatagcagcagcagcagccacatgaaccagcaacattctgagaaagaatgggacgccatgtatccgcatattattcgcctgtacctaggcgaacagcttatacttggcgaagtaatgcggattatggagtcagtctatgtacaagaaacgtataagcaagtggcagcttcacaaatacaagcgcagagcccgctctgccgctgagccaaccccttcgatagaaacagccgagtctcccgctgtaagacgaacctcgtccattgcacgtagaccgacctccgcaagtttgccgcctcaggttgcggacctagagatggattctgccgtacaggctctgctagcgaatatgcgacgtctgtcgctgatgcacaatgctccaagtcgagattctcctggagatcaccaactagacaaggaagttggtctcacaccatcggggatcctcggcgtatcacaaatgtatttggcatttgccctgggctcaacattgtttgttaggggacatggtcagctggctgggaaagctgtacgcaaagctttcctgatgctggaggacattatcaagcatgcacacttcggcttggactgggtcattatagatttactgtacgactttgcttctcgaggccaacacgaactctacacggcattcgtggcgcatctagctaatctagcgcacgttctgctacctaatcaccatcctctgcatcggattgcggagcagcttttacgctatgggaatgacgaacgtggagatattatcactttacttcagcgtgtgtattttcatcagatcgacgctgtccagtccgaccccgaggttcgcaacttgatcacatcacagaaccgacctatccataacgcgctcttgacctcagaacatattgacgccgacacagcgcttgtgatacggggtattcgagccgtgcatgatgaactcgagaggcaaaaggacctatctcttccatcctccccagttccatctcctgcgacatctcctccatcgactcctgcattttcgcacacaggtggcagcgagggccgcgacatgatgcttctcccgaaatttgttgaagagcgcgcgaaacgatcgatggcgcggatgagagacaatcctgacccccttgttttaggcgtagccgatcgtctttatttcaccgagtacttccctgatcttgttgatctatacaaattgaaaggaacagtgcgccaaaatgagatcgatggagactggtttagcgctatacaagcgcagagaacggtcatcgagatcctcaaagagaaatgggctgcagatcagttgggtttgatccgagagctctgggctctcatgaggttgttagagtctgcgggtgttgcacaagagcaaattgacgcggtcaatttcgaagctctggaagttacaagagatcttctgaaagacattcctgatgatgccccttgagaatatggcaacgacagccttcggatcagagccgtgctaggcgtaaatgcttcaatattgtctaccggagttgcgtcttcgaactcccacatccgaaaagcactggccacttcctctatggaatgctcgatgcgcgtagattgtgtcgaatctgaattgttcgttcgaagacagcacactccctatctacagagatagcgagtttagttcaacgcttcccctcagcatcatgcacaggctagagagaaagaggaacgaaagcaaacacctacatgtataaagaatgtacgactgaacgttaaatgtattagtatagcgagaaagcatcgaagcggcgttaaatgcatagcatagcgaatgagtgttaattagaggacgagacggagagtagaaagagacaatcggacagcccgttttcg

SEQ ID NO: 36708 - DNA, 1584 bp, Muscodor strobelii
  misc_feature: SGI cDNA ID NO. 572727
  misc_feature: Reduced expression when VOC is produced
  misc_feature: Encodes the peptide sequence at SEQ ID NO 36709
atggcagccgaggtggcaccgctgcaacagctgaagctgccctcggggccttcacccgtttctgcggagcagaagtactggacgacgttcaagaaccagctcatcattccgacgccaacggaggcgcccgtgacgcacatcaccaacccatccggccccgacaacgacctgttcgccgtcaccgccggcccgcgcgtccaactttactcgataaggacgaggaagctggtcaagaccttcactcggttcggagacattgcccgcagcggagagatccggcgcgatgggcgcatcatcgtcgccggccaggacgacggcaagattcaggtgttcgacgtcaagtccagagctatcctcaagacgtggacacagcacaagcagcccgtatggacaaccaaattctccccgacagacctcacaacactcatgagcgcgtccgacgacaaatctgtccgtctgtgggatttgcccagctccgaaagcacatctatattccaaggccacaacgactacgtccgctgcggcgagttcatgcccggcaccacaaacctcctagtctctggctcctatgatcagaccgtccgtctctgggaccccagaacaccccgttcctcggtcatgtgcttcaagcacgccgcccccatcgaggacgtcctacctctctcttcgggaacgaccgtcctcgcatccgccgaaaaccaaatctccgtcctcgacctcgtcgccgccaagccccagcacatcattacaaatcaccagaagaccgtcacatccctctccattgccttcaatggccgacgagtcgtatcaggctctctggacggtcacatcaaggtcttcgagacaaccggctggaacgtcgtcgccggcgccaaatacccatcccccatcctcgccgtatccgtcatcacagctggctcaaaccaagatgaccgacatctagcagtcggcatgcaatccggtgtcctctccctacggacccgtctcacaggcccagaagcgagcaaagagcgcgaacgcgagaaggaaatgcaggcgctgttgagcgggaacatagccagccacgacaaaaagaacctcaagcggaagaaacgtgccgccgatacgaagcgtttggatatggtcggtgaaggcgcagacgtggtaatagccaatgacctctcccgtcccaagcgcgaacagccatggcagaaagacctgcgacatggacgcttcccctcagctcttgacagagtcctagatcccgagtcgaaagaccactctccgctcactgtccttacggtcctcgtagcgcttcgccatagaagtgcgctgagagacgcgctagagggaagggacgagattacggttcagccgatactcaaatgggtgcagaagcatatctgcgaccccagatatgtcagtgtctgcaccgatgttgcgacgcatctactggatttatatgtggagttcttagacgggagtgaggagctcgcgaatgggtttagggtcttgcataggagggttaggatggaggtggatcgcgctcaggtcgctatacagactaggggtatgcttgagagtcttttggttgctgttgaatga

SEQ ID NO: 36709 - protein, 527 aa, Muscodor strobelii
  misc_feature: SGI Peptide ID NO. 572727
  misc_feature (159)..(198): Pfam Id: PF00400 Pfam Desc: WD domain, G-beta repeat
  misc_feature (243)..(281): Pfam Id: PF00400 Pfam Desc: WD domain, G-beta repeat
  misc_feature (116)..(155): Pfam Id: PF00400 Pfam Desc: WD domain, G-beta repeat
  misc_feature (370)..(522): Pfam Id: PF09384 Pfam Desc: U3 small nucleolar RNA C terminal
  misc_feature (1)..(526): NCBI GI: 46137089 Blast Desc: FG10060.1 [Gibberella zeae PH-1]
  misc_feature (1)..(527): NCBI GI: 154294786 Blast Desc: BC1G_13608 [Botryotinia fuckeliana B05.10] gi|150844566|gb|EDN19759.1| BC1G_13608 [Botryotinia fuckeliana B05.10]
  misc_feature (1)..(527): NCBI GI: 156055264 Blast Desc: SS1G_04983 [Sclerotinia sclerotiorum 1980] gi|154702768|gb|EDO02507.1| SS1G_04983 [Sclerotinia sclerotiorum 1980]
  misc_feature (1)..(523): NCBI GI: 116197599 Blast Desc: CHGG_06955 [Chaetomium globosum CBS 148.51] gi|88178234|gb|EAQ85702.1| CHGG_06955 [Chaetomium globosum CBS 148.51]
  misc_feature (1)..(525): NCBI GI: 85089640 Blast Desc: NCU09843 [Neurospora crassa OR74A] gi|28919353|gb|EAA28805.1| NCU09843 [Neurospora crassa OR74A]
  misc_feature (1)..(522): NCBI GI: 119191115 Blast Desc: CIMG_05605 [Coccidioides immitis RS]
  misc_feature (1)..(522): NCBI GI: 240107443 Blast Desc: WD domain, G-beta repeat containing protein [Coccidioides posadasii C735 delta SOWgp]
  misc_feature (1)..(527): NCBI GI: 39942098 Blast Desc: MGG_03129 [Magnaporthe grisea 70-15] gi|145015897|gb|EDK00387.1| MGG_03129 [Magnaporthe grisea 70-15]
  misc_feature (1)..(522): NCBI GI: 145237942 Blast Desc: An07g05380 [Aspergillus niger] gi|134076095|emb|CAK39454.1| protein product [Aspergillus niger]
  misc_feature (1)..(522): NCBI GI: 171694437 Blast Desc: protein product [Podospora anserina] gi|170947167|emb|CAP73972.1| protein product [Podospora anserina]
  misc_feature: Useful for introducing or modulating the production of volatile compounds
MAAEVAPLQQLKLPSGPSPVSAEQKYWTTFKNQLIIPTPTEAPVTHITNPSGPDNDLFAVTAGPRVQLYSIRTRKLVKTFTRFGDIARSGEIRRDGRIIVAGQDDGKIQVFDVKSRAILKTWTQHKQPVWTTKFSPTDLTTLMSASDDKSVRLWDLPSSESTSIFQGHNDYVRCGEFMPGTTNLLVSGSYDQTVRLWDPRTPRSSVMCFKHAAPIEDVLPLSSGTTVLASAENQISVLDLVAAKPQHIITNHQKTVTSLSIAFNGRRVVSGSLDGHIKVFETTGWNVVAGAKYPSPILAVSVITAGSNQDDRHLAVGMQSGVLSLRTRLTGPEASKEREREKEMQALLSGNIASHDKKNLKRKKRAADTKRLDMVGEGADVVIANDLSRPKREQPWQKDLRHGRFPSALDRVLDPESKDHSPLTVLTVLVALRHRSALRDALEGRDEITVQPILKWVQKHICDPRYVSVCTDVATHLLDLYVEFLDGSEELANGFRVLHRRVRMEVDRAQVAIQTRGMLESLLVAVE

SEQ ID NO: 36710 - DNA, 2098 bp, Muscodor strobelii
  misc_feature: SGI EST ID NO. CUFF.87599.0
  misc_feature: Variant of the nucleotide sequence at SEQ ID NO 36708
aatggggtctggtttgttacctaacagcagttgaccagcttggggaagattccctgacttcaaggtgctggttgtatcgataagttcccttgctagcttatcggcgtctggcaggtacattagctcactgataggtggtggggcatctgagatgtcgctggacgtccccgaaaaaaaagttgccggattgaagctgttctgtctattgtcacgaccgtttcgcaacggcaattgagcaaggatggcagccgaggtggcaccgctgcaacagctgaagctgccctcggggccttcacccgtttctgcggagcagaagtactggacgacgttcaagaaccagctcatcattccgacgccaacggaggcgcccgtgacgcacatcaccaacccatccggccccgacaacgacctgttcgccgtcaccgccggcccgcgcgtccaactttactcgataaggacgaggaagctggtcaagaccttcactcggttcggagacattgcccgcagcggagagatccggcgcgatgggcgcatcatcgtcgccggccaggacgacggcaagattcaggtgttcgacgtcaagtccagagctatcctcaagacgtggacacagcacaagcagcccgtatggacaaccaaattctccccgacagacctcacaacactcatgagcgcgtccgacgacaaatctgtccgtctgtgggatttgcccagctccgaaagcacatctatattccaaggccacaacgactacgtccgctgcggcgagttcatgcccggcaccacaaacctcctagtctctggctcctatgatcagaccgtccgtctctgggaccccagaacaccccgttcctcggtcatgtgcttcaagcacgccgcccccatcgaggacgtcctacctctctcttcgggaacgaccgtcctcgcatccgccgaaaaccaaatctccgtcctcgacctcgtcgccgccaagccccagcacatcattacaaatcaccagaagaccgtcacatccctctccattgccttcaatggccgacgagtcgtatcaggctctctggacggtcacatcaaggtcttcgagacaaccggctggaacgtcgtcgccggcgccaaatacccatcccccatcctcgccgtatccgtcatcacagctggctcaaaccaagatgaccgacatctagcagtcggcatgcaatccggtgtcctctccctacggacccgtctcacaggcccagaagcgagcaaagagcgcgaacgcgagaaggaaatgcaggcgctgttgagcgggaacatagccagccacgacaaaaagaacctcaagcggaagaaacgtgccgccgatacgaagcgtttggatatggtcggtgaaggcgcagacgtggtaatagccaatgacctctcccgtcccaagcgcgaacagccatggcagaaagacctgcgacatggacgcttcccctcagctcttgacagagtcctagatcccgagtcgaaagaccactctccgctcactgtccttacggtcctcgtagcgcttcgccatagaagtgcgctgagagacgcgctagagggaagggacgagattacggttcagccgatactcaaatgggtgcagaagcatatctgcgaccccagatatgtcagtgtctgcaccgatgttgcgacgcatctactggatttatatgtggagttcttagacgggagtgaggagctcgcgaatgggtttagggtcttgcataggagggttaggatggaggtggatcgcgctcaggtcgctatacagactaggggtatgcttgagagtcttttggttgctgttgaatgacgcgatactctttcatctgcaggttgattgttcgaaaaggatcttgaggatgtgaggattagtggggagagaaagatagtgtgagagtggaaggaagaaggaggaggtctgtcttgcattgcgacggcgttcatggtttatttgctagtataggataggaaaaagggaaaagaggtgtactctataccaataccatgacccaatagaataaattttatagcttgtctatctaagtttctttcctttcttgaagatgcagcaagtagtatccag

SEQ ID NO: 36711 - DNA, 228 bp, Muscodor strobelii
  misc_feature: SGI cDNA ID NO. 572728
  misc_feature: Encodes the peptide sequence at SEQ ID NO 36712
atggttcgagctatcaaggggacgttggtcgagtgcgacccctcaatcaaatcaatcatcctcgcaatcgatagcgagcacaatgattatgtcattgaagacttggacgacaatcacttgctcatcaaagatgtcatggtgcagcagctgaaagcgaggctggaggaccggctgaaagaaaccgtcccgatcataggggatgactcaggttcagacaatgacaagtag

SEQ ID NO: 36712 - protein, 75 aa, Muscodor strobelii
  misc_feature: SGI Peptide ID NO. 572728
  misc_feature (1)..(67): Pfam Id: PF06331 Pfam Desc: Transcription factor TFIIH complex subunit Tfb5
  misc_feature (1)..(72): NCBI GI: 261351996 Blast Desc: RNA polymerase II transcription factor B subunit 5 [Verticillium albo-atrum VaMs.102]
  misc_feature (1)..(72): NCBI GI: 156065805 Blast Desc: SS1G_00913 [Sclerotinia sclerotiorum 1980] gi|154691772|gb|EDN91510.1| SS1G_00913 [Sclerotinia sclerotiorum 1980]
  misc_feature (1)..(72): NCBI GI: 46136925 Blast Desc: FG09978.1 [Gibberella zeae PH-1]
  misc_feature (1)..(56): NCBI GI: 85541641 Blast Desc: FG09978.1 [Gibberella zeae PH-1]
  misc_feature (1)..(61): NCBI GI: 85099974 Blast Desc: NCU06646 [Neurospora crassa OR74A] gi|74622801|sp|Q8X0V0.1|TFB5_NEUCR RecName: Full=RNA polymerase II transcription factor B subunit 5; AltName: Full=General and 5;
  misc_feature (1)..(72): NCBI GI: 154301781 Blast Desc: [Botryotinia fuckeliana B05.10] gi|150855704|gb|EDN30896.1| [Botryotinia fuckeliana B05.10]
  misc_feature (1)..(73): NCBI GI: 171692051 Blast Desc: protein product [Podospora anserina] gi|170945974|emb|CAP72775.1| protein product [Podospora anserina]
  misc_feature (1)..(62): NCBI GI: 261196081 Blast Desc: DNA repair protein Rex1 [Ajellomyces dermatitidis SLH14081] gi|239587577|gb|EEQ70220.1| DNA repair protein Rex1 [Ajellomyces dermatitidis SLH14081] gi|239614527|gb|EEQ91514.1|
  misc_feature (1)..(62): NCBI GI: 154270784 Blast Desc: DNA repair protein Rex1 [Ajellomyces capsulatus NAm1] gi|150409820|gb|EDN05260.1| DNA repair protein Rex1 [Ajellomyces capsulatus NAm1] gi|225554990|gb|EEH03284.1| RNA polymerase II B
  misc_feature (1)..(62): NCBI GI: 226285579 Blast Desc: RNA polymerase II transcription factor B subunit 5 [Paracoccidioides brasiliensis Pb01]
MVRAIKGTLVECDPSIKSIILAIDSEHNDYVIEDLDDNHLLIKDVMVQQLKARLEDRLKETVPIIGDDSGSDNDK

SEQ ID NO: 36713 - DNA, 1037 bp, Muscodor strobelii
  misc_feature: SGI EST ID NO. CUFF.87614.0
  misc_feature: Variant of the nucleotide sequence at SEQ ID NO 36711
ttcattcgtcattccatcttccattgacgcaccgacatctaaattacccagacgtcaatacaaccggtaacagaaaccacattccaagatccgagaagtctggactcgcgtaacgaaattgcaagcgacagcaagctctctgctttgccgagatggttcgagctatcaaggggacgttggtcgagtgcgacccctcaatcaaatcaatcatcctcgcaatcgatagcgagcacaatgattatgtcattgaagacttggacgacaatcacttgctcatcaaagatgtcatggtgcagcagctgaaagcgaggctggaggaccggctgaaagaaaccgtcccgatcataggggatgactcaggttcagacaatgacaagtagtaaagaggcaagatcagaagaagcatcaagtatggcgttgatcagacaggtttcactactggctatgataaaaagtacatgataccccaatacagaattcgttctctcctatgcaacgctataacttctcaaacgtcggtttcgtcttcttaagaccagagagcatggctttgcccatatcttcagactgcaccatcccggcattccagacagccgtatattgcaagcctagcatcgtgttaggactgtgaataatgaggaaacaatgtgttcacttactgtctgcaacggtgttatctctagcgtgatttaagatgtgtttagtgccctggacagcaatagggcttttggtagccatcagagatgcaagcttgatagcagcctcgactgccttagccttattctcgtgcacctggctgacgaatccgacggcaagagcctcgtcggctccgaagaatcttgcagatagtgtaacctccttgacccatgagtgattgccaacgattttggggagtcggcttagggttccgatatctgcagcaatgccgatgtcgacttcctttacggacagtttggtgtccttggatgctatccttacgtctgcgcagcatgccatatcgatagcaagaccaattgcaatgccatgtaaagcaacga

SEQ ID NO: 36714 - DNA, 858 bp, Muscodor strobelii
  misc_feature: SGI cDNA ID NO. 572729
  misc_feature: Encodes the peptide sequence at SEQ ID NO 36715
atggcgacaccactagagggatacacaggctataagcacttcctgatctcatcaccagccgaatatgtggtattggtccagacaaaccggccggagaagctaaatgcatttttcgaggcgatgtggctagagctaggagcgatcttcaacaaaatatcacatgacccgaacgtccgcgccgttgttttctcagccgttggagagaaggccttcacagctggcttagatgtgcaagctgctagctccggaggcgctctgtcgacacagggtgggaaagaagatgttggaagattaatgacgaagctcagacgccatatctacgagtttcaggactgtattagtgcgattgagagatgtgaaaagcctgtgatcgttgctttacatggcattgcaattggtcttgctatcgatatggcatgctgcgcagacgtaaggatagcatccaaggacaccaaactgtccgtaaaggaagtcgacatcggcattgctgcagatatcggaaccctaagccgactccccaaaatcgttggcaatcactcatgggtcaaggaggttacactatctgcaagattcttcggagccgacgaggctcttgccgtcggattcgtcagccaggtgcacgagaataaggctaaggcagtcgaggctgctatcaagcttgcatctctgatggctaccaaaagccctattgctgtccagggcactaaacacatcttaaatcacgctagagataacaccgttgcagacagcttgcaatatacggctgtctggaatgccgggatggtgcagtctgaagatatgggcaaagccatgctctctggtcttaagaagacgaaaccgacgtttgagaagttatag

SEQ ID NO: 36715 - protein, 285 aa, Muscodor strobelii
  misc_feature: SGI Peptide ID NO. 572729
  misc_feature (24)..(208): Pfam Id: PF00378 Pfam Desc: Enoyl-CoA hydratase/isomerase family
  misc_feature (108)..(208): Pfam Id: PF00378 Pfam Desc: Enoyl-CoA hydratase/isomerase family
  misc_feature (24)..(94): Pfam Id: PF00378 Pfam Desc: Enoyl-CoA hydratase/isomerase family
  misc_feature (6)..(285): NCBI GI: 171692049 Blast Desc: protein product [Podospora anserina] gi|170945973|emb|CAP72774.1| protein product [Podospora anserina]
  misc_feature (11)..(285): NCBI GI: 154301791 Blast Desc: BC1G_10047 [Botryotinia fuckeliana B05.10] gi|150855709|gb|EDN30901.1| BC1G_10047 [Botryotinia fuckeliana B05.10]
  misc_feature (11)..(285): NCBI GI: 242822222 Blast Desc: enoyl-CoA hydratase/isomerase family protein [Talaromyces stipitatus ATCC 10500] gi|218712763|gb|EED12188.1| enoyl-CoA hydratase/isomerase family protein [Talaromyces ATCC
  misc_feature (8)..(285): NCBI GI: 70998905 Blast Desc: enoyl-CoA hydratase/isomerase family protein [Aspergillus fumigatus Af293] gi|66851811|gb|EAL92136.1| enoyl-CoA hydratase/isomerase family protein [Aspergillus Af293]
  misc_feature (8)..(285): NCBI GI: 119490276 Blast Desc: enoyl-CoA hydratase/isomerase family protein [Neosartorya fischeri NRRL 181] gi|119411170|gb|EAW21113.1| enoyl-CoA hydratase/isomerase family protein [Neosartorya NRRL
  misc_feature (8)..(285): NCBI GI: 212546859 Blast Desc: enoyl-CoA hydratase/isomerase family protein [Penicillium marneffei ATCC 18224] gi|210065103|gb|EEA19198.1| enoyl-CoA hydratase/isomerase family protein [Penicillium ATCC
  misc_feature (9)..(285): NCBI GI: 156065795 Blast Desc: SS1G_00908 [Sclerotinia sclerotiorum 1980] gi|154691767|gb|EDN91505.1| SS1G_00908 [Sclerotinia sclerotiorum 1980]
  misc_feature (11)..(285): NCBI GI: 169606866 Blast Desc: SNOG_06483 [Phaeosphaeria nodorum SN15] gi|111065194|gb|EAT86314.1| SNOG_06483 [Phaeosphaeria nodorum SN15]
  misc_feature (5)..(285): NCBI GI: 85099978 Blast Desc: NCU06647 [Neurospora crassa OR74A] gi|18307432|emb|CAD21495.1| DELTA3, 5-DELTA2, 4-DIENOYL-COA ISOMERASE PRECURSOR (ECH1) [Neurospora crassa] NCU06647 crassa
  misc_feature (4)..(285): NCBI GI: 116180180 Blast Desc: CHGG_00718 [Chaetomium globosum CBS 148.51] gi|88185015|gb|EAQ92483.1| CHGG_00718 [Chaetomium globosum CBS 148.51]
  misc_feature (23)..(279): SWISSPROT Homolog: EC 4.2.1.55 3-hydroxybutyryl-CoA dehydratase
MATPLEGYTGYKHFLISSPAEYVVLVQTNRPEKLNAFFEAMWLELGAIFNKISHDPNVRAVVFSAVGEKAFTAGLDVQAASSGGALSTQGGKEDVGRLMTKLRRHIYEFQDCISAIERCEKPVIVALHGIAIGLAIDMACCADVRIASKDTKLSVKEVDIGIAADIGTLSRLPKIVGNHSWVKEVTLSARFFGADEALAVGFVSQVHENKAKAVEAAIKLASLMATKSPIAVQGTKHILNHARDNTVADSLQYTAVWNAGMVQSEDMGKAMLSGLKKTKPTFEKL

SEQ ID NO: 36716 - DNA, 1192 bp, Muscodor strobelii
  misc_feature: SGI EST ID NO. CUFF.87615.2
  misc_feature: Variant of the nucleotide sequence at SEQ ID NO 36714
caaacgtcgaaactacgatatgtaagggttcatttcattcaattcaacgcataagcaacacaagataaagcaagttcggaacttgttgccatattttcggagtctcttttcgtgcaaatcaatctaagaaactcatctcatagactcgagacaaaatggcgacaccactagagggatacacaggctataagcacttcctgatctcatcaccagccgaatatgtggtattggtccagacaaaccggccggagaagctaaatgcatttttcgaggcgatgtggctagagctaggagcgatcttcaacaaaatatcacatgacccgaacgtccgcgccgttgttttctcagccgttggagagaaggccttcacagctggcttagatgtgcaagctgctagctccggaggcgctctgtcgacacagggtgggaaagaagatgttggaagattaatgacgaagctcagacgccatatctacgagtttcaggactgtattagtgcgattgagagatgtgaaaagcctgtgatcgttgctttacatggcattgcaattggtcttgctatcgatatggcatgctgcgcagacgtaaggatagcatccaaggacaccaaactgtccgtaaaggaagtcgacatcggcattgctgcagatatcggaaccctaagccgactccccaaaatcgttggcaatcactcatgggtcaaggaggttacactatctgcaagattcttcggagccgacgaggctcttgccgtcggattcgtcagccaggtgcacgagaataaggctaaggcagtcgaggctgctatcaagcttgcatctctgatggctaccaaaagccctattgctgtccagggcactaaacacatcttaaatcacgctagagataacaccgttgcagacagcttgcaatatacggctgtctggaatgccgggatggtgcagtctgaagatatgggcaaagccatgctctctggtcttaagaagacgaaaccgacgtttgagaagttatagcgttgcataggagagaacgaattctgtattggggtatcatgtactttttatcatagccagtagtgaaacctgtctgatcaacgccatacttgatgcttcttctgatcttgcctctttactacttgtcattgtctgaacctgagtcatcccctatgatcgggacggtttctttcagccgc

SEQ ID NO: 36717 - DNA, 630 bp, Muscodor strobelii
  misc_feature: SGI cDNA ID NO. 572730
  misc_feature: Elevated expression when VOC is produced
  misc_feature: Encodes the peptide sequence at SEQ ID NO 36718
atggcgccagcactacaattaagaaatctaggaggtaccgaccccgaagacgacaacgactctaccagcccatttacatatgttctgattccaattatcatcatcggcgtactggtcgctctcacaacttgctaccgtctgcgacggcgtcgtgtcactgtgcgtacagttgatacaaatttcgctgaaggtgatggccggcgccgtaccgtcatccatggacctaacggcgtcgtcattgtttcgcaggagggacagaatggaggcagagcaaggagagcaggaagacgtcttggtttcggtgtagggagcagggaggagggactgaatgagctcggagaggcaccgcctgcatatgcagctgagggcccgaagcccccgggcgcagaaaacatcgagctccagtcctattcgcaggctgcacccgaagctggcacgagtttcagcccaccaggttatgcaactgattctgagcaacgtgcaaccgaggcagacacgggcagtagttcgagagtgggagaaacgagtgcttctgaacagccgacgacaacaactccagctacgacgagaagtgaatcaccagtgaatggacctactacaccaccacgggcccacttaccgccaagctag

SEQ ID NO: 36718 - protein, 209 aa, Muscodor strobelii
  misc_feature: SGI Peptide ID NO. 572730
  misc_feature: Useful for introducing or modulating the production of volatile compounds
MAPALQLRNLGGTDPEDDNDSTSPFTYVLIPIIIIGVLVALTTCYRLRRRRVTVRTVDTNFAEGDGRRRTVIHGPNGVVIVSQEGQNGGRARRAGRRLGFGVGSREEGLNELGEAPPAYAAEGPKPPGAENIELQSYSQAAPEAGTSFSPPGYATDSEQRATEADTGSSSRVGETSASEQPTTTTPATTRSESPVNGPTTPPRAHLPPS

SEQ ID NO: 36719 - DNA, 1041 bp, Muscodor strobelii
  misc_feature: SGI cDNA ID NO. 572731
  misc_feature: Elevated expression when VOC is produced
  misc_feature: Encodes the peptide sequence at SEQ ID NO 36720
atgtcggtcctttcagatcttcccaagatgacctaccggttcttaggccgctctggtcttcaggtctctgctatttctcttggtggctggctgacgtatggtggttacacggaggatgaaaagacattcgagtgcatgaaagctgcttttgactgcggtgtcaacttctttgattgcgctgaagcctacggcgctggcaagtctgaagaagtgatgggacaggctatcaagaaatacggctggaaacgcaatggtctcgtcatctcaaccaagatatacttcggcgcagcctacggcgacaatccagtgaacaacaaaggcctatcacgaaaacacattgtcgagggcatggatgccgcgctcaagcgtctgggactagagtacgtagatctggtctacgcgcaccgacccgatcggcaaacacccatggaagagacagttcgcgctttcaatcaccttatcaacacaggcaaggccttctactggggaacatcagaatggaacgcagatgaaatcgcctctgcgtggcgttacgcagataagctcggtctgattgggcccgtcatggagcaaccttgctacaacatgctgcagcgtgagaaagtcgaactcgaatatgcgcatttgtaccgagagaccggcctcggtctcactatcttctcgcctctacgccagggtatattgtcggggaagtataaggatggagtcccagaggactcacgctttgcgaaggaagaagttgacttcgtgaaagggttctggcagcgcacagggaaggaaatgtgggatgggattgtgaagcaagtcaatgagctacagcctattgctgatgaactagggatcaagatgagtacgcttgccctggcctgggtccttaagaatcccaatgtcagctcggcgatcacgggcgcaagtagtaaggagcaggtctttgagaatgttaaggcggtggaggccgtggacaagttgacagatgagattatggagaggattgataagatattgggcaataagccaccggctgttgttccccggttttaa

SEQ ID NO: 36720 - protein, 346 aa, Muscodor strobelii
  misc_feature: SGI Peptide ID NO. 572731
  misc_feature (16)..(336): Pfam Id: PF00248 Pfam Desc: Aldo/keto reductase family
  misc_feature (1)..(346): NCBI GI: 145603234 Blast Desc: MGG_13188 [Magnaporthe grisea 70-15] gi|145011506|gb|EDJ96162.1| MGG_13188 [Magnaporthe grisea 70-15]
  misc_feature (1)..(346): NCBI GI: 116197645 Blast Desc: CHGG_06978 [Chaetomium globosum CBS 148.51] gi|88178257|gb|EAQ85725.1| CHGG_06978 [Chaetomium globosum CBS 148.51]
  misc_feature (1)..(346): NCBI GI: 261351745 Blast Desc: voltage-gated potassium channel beta-1 subunit [Verticillium albo-atrum VaMs.102]
  misc_feature (1)..(346): NCBI GI: 171694413 Blast Desc: protein product [Podospora anserina] gi|170947155|emb|CAP73960.1| protein product [Podospora anserina]
  misc_feature (1)..(345): NCBI GI: 242789580 Blast Desc: voltage-gated K channel beta subunit, [Talaromyces stipitatus ATCC 10500] gi|218717978|gb|EED17398.1| voltage-gated K channel beta subunit, [Talaromyces stipitatus ATCC 10500]
  misc_feature (10)..(346): NCBI GI: 82779924 Blast Desc: K+ channel protein [Gibberella zeae]
  misc_feature (1)..(345): NCBI GI: 156065799 Blast Desc: SS1G_00910 [Sclerotinia sclerotiorum 1980] gi|154691769|gb|EDN91507.1| SS1G_00910 [Sclerotinia sclerotiorum 1980]
  misc_feature (6)..(346): NCBI GI: 242791292 Blast Desc: aldo/keto reductase, [Talaromyces stipitatus ATCC 10500] gi|218718317|gb|EED17737.1| aldo/keto reductase, [Talaromyces stipitatus ATCC 10500]
  misc_feature (3)..(337): NCBI GI: 154301787 Blast Desc: BC1G_10045 [Botryotinia fuckeliana B05.10] gi|150855707|gb|EDN30899.1| BC1G_10045 [Botryotinia fuckeliana B05.10]
  misc_feature (10)..(346): NCBI GI: 255956203 Blast Desc: Pc21g18620 [Penicillium chrysogenum Wisconsin 54-1255] gi|211590565|emb|CAP96759.1| Pc21g18620 [Penicillium chrysogenum Wisconsin 54-1255]
  misc_feature (19)..(332): SWISSPROT Homolog: EC 1.1.1.91 Aryl-alcohol dehydrogenase (NADP(+))
  misc_feature: Useful for introducing or modulating the production of volatile compounds
MSVLSDLPKMTYRFLGRSGLQVSAISLGGWLTYGGYTEDEKTFECMKAAFDCGVNFFDCAEAYGAGKSEEVMGQAIKKYGWKRNGLVISTKIYFGAAYGDNPVNNKGLSRKHIVEGMDAALKRLGLEYVDLVYAHRPDRQTPMEETVRAFNHLINTGKAFYWGTSEWNADEIASAWRYADKLGLIGPVMEQPCYNMLQREKVELEYAHLYRETGLGLTIFSPLRQGILSGKYKDGVPEDSRFAKEEVDFVKGFWQRTGKEMWDGIVKQVNELQPIADELGIKMSTLALAWVLKNPNVSSAITGASSKEQVFENVKAVEAVDKLTDEIMERIDKILGNKPPAVVPRF

SEQ ID NO: 36721 - DNA, 3425 bp, Muscodor strobelii
  misc_feature: SGI EST ID NO. CUFF.87619.1
  misc_feature: Variant of the nucleotide sequence at SEQ ID NO 36719
aacggaccgtctgactgaaatgaccagattctgtttctgatttgttgacatggtgattgcgagacgttggcgacgggcatagaatgggcttagaattacagtacggagagagatataaagggctgtggctttttgccttacttgttccttcgtaactaaatatttatttccttcgtagacaattgagatcacgattcccaagtacttattgagaatagagaggaatcacactatatgcacaggaagaaacacatcagaaagcagaatgtcggtcctttcagatcttcccaagatgacctaccggttcttaggccgctctggtcttcaggtctctgctatttctcttggtggctggctgacgtatggtggttacacggaggatgaaaagacattcgagtgcatgaaagctgcttttgactgcggtgtcaacttctttgattgcgctgaagcctacggcgctggcaagtctgaagaagtgatgggacaggctatcaagaaatacggctggaaacgcaatggtctcgtcatctcaaccaagatatacttcggcgcagcctacggcgacaatccagtgaacaacaaaggcctatcacgaaaacacattgtcgagggcatggatgccgcgctcaagcgtctgggactagagtacgtagatctggtctacgcgcaccgacccgatcggcaaacacccatggaagagacagttcgcgctttcaatcaccttatcaacacaggcaaggccttctactggggaacatcagaatggaacgcagatgaaatcgcctctgcgtggcgttacgcagataagctcggtctgattgggcccgtcatggagcaaccttgctacaacatgctgcagcgtgagaaagtcgaactcgaatatgcgcatttgtaccgagagaccggcctcggtctcactatcttctcgcctctacgccagggtatattgtcggggaagtataaggatggagtcccagaggactcacgctttgcgaaggaagaagttgacttcgtgaaagggttctggcagcgcacagggaaggaaatgtgggatgggattgtgaagcaagtcaatgagctacagcctattgctgatgaactagggatcaagatgagtacgcttgccctggcctgggtccttaagaatcccaatgtcagctcggcgatcacgggcgcaagtagtaaggagcaggtctttgagaatgttaaggcggtggaggccgtggacaagttgacagatgagattatggagaggattgataagatattgggcaataagccaccggctgttgttccccggttttaagaaggccattgatgatggcaggatatgtcccctgcttggctcttcaatgaggctgtagatataaacaggagaatacatgcgtgttagacttgctggatgctcccttttcgaccagtcacatcgacgctaatcaaagagaccctgaggaacgttgattattgtatgaatgttcatatatgtatgaattcatgtggtcctctatagtacagtacattcagcatgtacgcgggcatgttgcccgaaaacgccaatcatttccgttttccttcccttgagatgcaatgcaatacgaaaggagctctaaatcaaagctccttgtaaaatggtatcatcaacatgtaaagtaaaaactcccaccctgtccactgtcgtctatcggtgtccatactgctcatgccgaccgtcagttctccactcatggtcagcgatgatatcccgtgtggcgcaagatgagcgcacatatcgtagtccttcagctttaatctcgtatctgtctcttcatagtcgtcattatcgatcttcttgatgatggatatttagtcatctctttcgtaattgctggatcctcctctgggttcccggaaagtccgtacaccaggctgcacaaggcggcaatgatgtatgtgatacacacgtgctctttcgtcaaggttctagcttggcggtaagtgggcccgtggtggtgtagtaggtccattcactggtgattcacttctcgtcgtagctggagttgttgtcgtcggctgttcagaagcactcgtttctcccactctcgaactactgcccgtgtctgcctcggttgcacgttgctcagaatcagttgcataacctggtgggctgaaactcgtgccagcttcgggtgcagcctgcgaataggactggagctcgatgttttctgcgcccgggggcttcgggccctcagctgcatatgcaggcggtgcctctccgagctcattcagtccctcctccctgctccctacaccgaaaccaagacgtcttcctgctctccttgctctgcctccattctgtccctcctgcgaaacaatgacgacgccgttaggtccatggatgacggtacggcgccggccatcaccttcagcgaaatttgtatcaactgtacgcacagtgacacgacgccgtcgcagacggtagcaagttgtgagagcgaccagtacgccgatgatgataattggaatcagaacatatgtaaatgggctggtagagtcgttgtcgtcttcggggtcggtacctcctagatttcttaattgtagtgctggcgccattgtgagaacgtgttgtgttagttgccttgtgatgacaaggacggtgtgggtcgtttaagacgtcggcgggttgaagtggcgatgagacagcgtgaagataccagaacgcagcgaccgtgaggggaaatcagtggtgacttccctgcctctttaggacagaagcgcaagtaggtagagtaagcagatcgcaaaccagattcaaatcgagcggtgaatctcgttcatgcaatcataaatgtcttggatttgatgtagaatggtctgatgctgtgatgagtggcagactgcaagatttgtgcagctagcacacttgagtgacgcagctggcgcgaccgttgagcgggtgattaaggtactgtcaattgtggtcgagacactgagtgcagatcatctatcgtcaagtcctacacgtggacaattattactagtaggaaacgaaagcagcgtcttatgcaggaaccgcgtcgtgtaataggatataagtagagacaagtgaaggattgtaagagatgcacacggaggagcgcgagcttcacctaatgtatgatgaggagattccagaaccctggaagcattgctcaactgttagggattcaatagcttggagtttgttcactaacagtcggcactgaggatggcttagaggggtaattccaaatcgcgcgagacgagattgacgtcgcggttgctcaattgaccataacaccagccccccaagagagcttggaatttgataatttgtattgccgtcactggaccacataacattggcaggtgcgcaaactgcacgtcggggcactgcagaccgcaactacatttatgaatacagactttta

SEQ ID NO: 36722 - DNA, 951 bp, Muscodor strobelii
  misc_feature: SGI cDNA ID NO. 572732
  misc_feature: Encodes the peptide sequence at SEQ ID NO 36723
atgcggatctattatataagagctgtcaagtttgcccatagagaaggggatcatgcccttgccgagcatctcatgcaatatgggggatggagtgaaagtgacgaacatgttggcgaccgcctagatactttggatttttatgcatatttcacttatgacgagcacagacacgagtggcacgcgaacagcgcccattactgtgttcgatccgagaagtgggaagaaagagggcacagagactgcatttgttcaccgtccgctggagaggacatctcaaccgatgagtacactgatgaggaagatcttagtgaatctgaatcaggcatgtgccacagcaaatctaccggctcgcttacaactagaggtcgcgaaactggtacaacagcccgacctgaagtcatcaacgacagccatacactgactagcttcgttaattttgatattgtcgacgatggattgatgggttacagcctggattgggaacctcctccggacaacaaccttgactttcagtctgacgtgatgacatacgacgataacgtctttgggtcaacccatgcctcaaatgttacaggtgccaatggcgagattccgacttatggttccaatatatcaacaagaattgaggacctcggtgacgaaccgctgggcgtctctccgccagttaacagcacaagctctgagcttggaactggtatggacacgatcatggacgatgtagccaatgacgtcgaggcagaacatcactcggaggagctatcaatgcagttgatgaacacggaagcagccgatacctggcagtatcgacaattctcatacgtgaccgagagattctcatacgtgaccgagagctatgctgaggcagcacaaatagaaggcagatatcctacccggatggattgggagggcccgtactggggaggcgatgctcctgaaattgatgatatttga

SEQ ID NO: 36723 - protein, 316 aa, Muscodor strobelii
  misc_feature: SGI Peptide ID NO. 572732
MRIYYIRAVKFAHREGDHALAEHLMQYGGWSESDEHVGDRLDTLDFYAYFTYDEHRHEWHANSAHYCVRSEKWEERGHRDCICSPSAGEDISTDEYTDEEDLSESESGMCHSKSTGSLTTRGRETGTTARPEVINDSHTLTSFVNFDIVDDGLMGYSLDWEPPPDNNLDFQSDVMTYDDNVFGSTHASNVTGANGEIPTYGSNISTRIEDLGDEPLGVSPPVNSTSSELGTGMDTIMDDVANDVEAEHHSEELSMQLMNTEAADTWQYRQFSYVTERFSYVTESYAEAAQIEGRYPTRMDWEGPYWGGDAPEIDDI

SEQ ID NO: 36724 - DNA, 274 bp, Muscodor strobelii
  misc_feature: SGI EST ID NO. CUFF.87611.0
  misc_feature: Variant of the nucleotide sequence at SEQ ID NO 36722
gggaacctcctccggacaacaaccttgactttcagtctgacgtgatgacatacgacgataacgtctttgggtcaacccatgcctcaaatgttacaggtgccaatggcgagattccgacttatggttccaatatatcaacaagaattgaggacctcggtgacgaaccgctgggcgtctctccgccagttaacagcacaagctctgagcttggaactggtatggacacgatcatggacgatgtagccaatgacgtcgaggcagaacatcactcgga

SEQ ID NO: 36725 - DNA, 3102 bp, Muscodor strobelii
  misc_feature: SGI cDNA ID NO. 572733
  misc_feature: Encodes the peptide sequence at SEQ ID NO 36726
atggccggacccgcccccaccgattttcaattcccaaacaattcattctttaatatctacaatgatgccgctgtcatcacttctaatctgcccgccctccccggcgggcaatgcaattatattgacctaagccacggcgccaatggtcagaaatgtggatgtcgccgcttctggagtcgcagcgcaatgtccacgccgaccagagcatcgccgacgggatatcctcccggacatggtcatggatatgaggatcagaccgcttggtgcatgtgttcgcatcatgcctgttaccatgatgacgttcgcgaatctcagactcctatccagactccagttcagatgcttcccattgccgcgccgccggttgataccaatggtcaggagaatgagaggccccgtaccaatcgggagccacttacacccgttgtcccggatttgtctctcaagcttccttattccctaggccaacccgaagggttttatacgtttactgatagtggcgctttccagccgctgcctgcgctggagggcgctgtcgcggaaccagatgttgtcgcagagccgtcccgggaaccatcgatccctgataccttggactgggccaatcttgttcagtcgacgcccgatcaatctttttctttacccccaattcctagtcaatgcttgatgccctcgcaaccaagctcaacgacatcatccgcccggatacgttatctcaagcctttcggcgggaagggacttcaaacactcagtggtgttaagcccaaggcgcttgaacctctgcaggagaatcgccggagcgcgacgcctgtggatgaggacgccactgagactgatacagatcagtctgttgtcgacgagggacaaactgtcaccaatactcccaggtctacaaaatatgtgaatgcatcacaaagacaggcggagacttccgctactggcgtgagtcgcgaagcttttcagttgctgtcgcacacagtcaatggccacgagcagcgcatcgagaaccttgagtgtatatctttctctgcggctgctcatgatttatgccatgacaagcatgacaacgctgacttgagagtcactgagctcgagtctcgcgtggaagaagtcgagaagatgctcaatgatagtgccagtgtcgcgtcaagtcacaataggtctaggcatcatggagccgacgaccgaagtgtggtgtctgtctcgactagttcaggtagctatatcatggatcgcgctgagctctatagtgagcttcaggacctgcgagcccaactcagccagcttcaaggactgtcatctttcccctctcttaaacatccttgggaggtcgaggtcatattccttcccttccctctccagaatgtgtggtcggaggcacgggagttcagtagccagcgcctgtcaggtagcggtgctctggacgccgacccatggacacagctgcctaacagctcgtcgcctatcgagccgcaatcgcccaatttcaatgagtgggctggccctgaggttgagtcggattggctcctcggtcgagcatgttcgtctgataacatgattggtcaaagattgaagagtcgagggttggtgaagaatgtcagcgtctgtggcccagatgccagaagtgtatctcaggctatcgcagatgcgtttggtacgctcttccggacattctcgcgcatgcagggcaatgtacaccatggctctacagtgcataaccgtatggccaagtttctaggtctgcagtcgccatttgtcccacttcgaaagatgcataaggactctcgccttcggtttctcaccccggctgagatggttacgcctgtttcatggactgtcgagttcctctcttcaagtgtcgttatgaagtcgaatggtatacatcgtctcttcatcacacaccctgaagcatatcttcaagatcatgaggcgtatgagcatggctggacatggcagcgtcttcgggaactcagtcgagtctatgcagactcgcaaagcagtcaagaggtacccgaaggcgatgcgaaagaagaatgctggacttggaatgcagtactcgatgagcaggctccgacgatccctgtccctcgaaccaccatgcagctcaacagcatgcaacctccccccctcgacttgcaacagtctgcacagccagattggcgaggcatgacggcttcgtcgcaagacatttatgtcgacgccagggccacgactccatcacttccaactcaacgttcttctcgagctcagtcgcctgctttacgagaacgtagatcgtctaagcctccgcatatccggacgacttcagtgcctcctcctcttcaaacgctgtcttcgccaggacctgccaaacggcgtgtgatatcatacgctcatccatatgagcgacgctcttcaatccagcctcaacggtcggcgctcacagtagctcagatggctgggttaagtaaacgtcgcacacgctcaccatcgatccgcagtcgcttgaaccggtttacgccgcgttggagtactgcttcgccaagtccgatgcctgaagctttcgcagctcgaggtacaacgcctttctatgcgacgccgtacagcaatgcaccaccggtagatacacgaccaaatcacaatgaacctatcaccgttgacgaggatgacgactttgattttaacgaaagcggcagcgaaattgacgtgtataatgataatgacgaggacgagatcatgagcgaagaacaagatgatgacgataacagttcgatggccgatcttggtactccgtaccacatgcaacaggagtcgtggcaagatggtcagggaccaaacttacctgaagatgagccgtggccgggcatcgaagacgaagaaaaccacgatcccgatacagattcgggcgttgaggtcaatgtgcatgttgatgccgatgccatggtcgacgatgaggaaggagatgcaagaacaccaggtgccttccaagttgatcacgatgctcaaagtcagggatcgagtgttccgagcgaatacccgagcaatgagccaccatggactaccagtggcaggtcgcaagagttcagggtgtttgaggatcagggcaggagcagaagcaggtaa

SEQ ID NO: 36726 - protein, 1033 aa, Muscodor strobelii
  misc_feature: SGI Peptide ID NO. 572733
  misc_feature (17)..(1027): NCBI GI: 256732199 Blast Desc: NECHADRAFT_93712 [Nectria haematococca mpVI 77-13-4]
  misc_feature (13)..(1026): NCBI GI: 46137465 Blast Desc: FG10248.1 [Gibberella zeae PH-1]
  misc_feature (8)..(1029): NCBI GI: 261351781 Blast Desc: conserved [Verticillium albo-atrum VaMs.102]
  misc_feature (6)..(932): NCBI GI: 116197627 Blast Desc: CHGG_06969 [Chaetomium globosum CBS 148.51] gi|88178248|gb|EAQ85716.1| CHGG_06969 [Chaetomium globosum CBS 148.51]
  misc_feature (1)..(1026): NCBI GI: 39942116 Blast Desc: MGG_03138 [Magnaporthe grisea 70-15] gi|145015886|gb|EDK00376.1| MGG_03138 [Magnaporthe grisea 70-15]
  misc_feature (6)..(864): NCBI GI: 171694429 Blast Desc: protein product [Podospora anserina] gi|170947163|emb|CAP73968.1| protein product [Podospora anserina]
  misc_feature (6)..(865): NCBI GI: 85099439 Blast Desc: NCU08966 [Neurospora crassa OR74A] gi|28922312|gb|EAA31552.1| [Neurospora crassa OR74A]
  misc_feature (36)..(1027): NCBI GI: 156055424 Blast Desc: SS1G_05064 [Sclerotinia sclerotiorum 1980] gi|154702848|gb|EDO02587.1| SS1G_05064 [Sclerotinia sclerotiorum 1980]
  misc_feature (187)..(1025): NCBI GI: 154302589 Blast Desc: BC1G_09871 [Botryotinia fuckeliana B05.10] gi|150855360|gb|EDN30552.1| BC1G_09871 [Botryotinia fuckeliana B05.10]
  misc_feature (323)..(844): NCBI GI: 169600601 Blast Desc: SNOG_03142 [Phaeosphaeria nodorum SN15] gi|160705476|gb|EAT89873.2| SNOG_03142 [Phaeosphaeria nodorum SN15]
MAGPAPTDFQFPNNSFFNIYNDAAVITSNLPALPGGQCNYIDLSHGANGQKCGCRRFWSRSAMSTPTRASPTGYPPGHGHGYEDQTAWCMCSHHACYHDDVRESQTPIQTPVQMLPIAAPPVDTNGQENERPRTNREPLTPVVPDLSLKLPYSLGQPEGFYTFTDSGAFQPLPALEGAVAEPDVVAEPSREPSIPDTLDWANLVQSTPDQSFSLPPIPSQCLMPSQPSSTTSSARIRYLKPFGGKGLQTLSGVKPKALEPLQENRRSATPVDEDATETDTDQSVVDEGQTVTNTPRSTKYVNASQRQAETSATGVSREAFQLLSHTVNGHEQRIENLECISFSAAAHDLCHDKHDNADLRVTELESRVEEVEKMLNDSASVASSHNRSRHHGADDRSVVSVSTSSGSYIMDRAELYSELQDLRAQLSQLQGLSSFPSLKHPWEVEVIFLPFPLQNVWSEAREFSSQRLSGSGALDADPWTQLPNSSSPIEPQSPNFNEWAGPEVESDWLLGRACSSDNMIGQRLKSRGLVKNVSVCGPDARSVSQAIADAFGTLFRTFSRMQGNVHHGSTVHNRMAKFLGLQSPFVPLRKMHKDSRLRFLTPAEMVTPVSWTVEFLSSSVVMKSNGIHRLFITHPEAYLQDHEAYEHGWTWQRLRELSRVYADSQSSQEVPEGDAKEECWTWNAVLDEQAPTIPVPRTTMQLNSMQPPPLDLQQSAQPDWRGMTASSQDIYVDARATTPSLPTQRSSRAQSPALRERRSSKPPHIRTTSVPPPLQTLSSPGPAKRRVISYAHPYERRSSIQPQRSALTVAQMAGLSKRRTRSPSIRSRLNRFTPRWSTASPSPMPEAFAARGTTPFYATPYSNAPPVDTRPNHNEPITVDEDDDFDFNESGSEIDVYNDNDEDEIMSEEQDDDDNSSMADLGTPYHMQQESWQDGQGPNLPEDEPWPGIEDEENHDPDTDSGVEVNVHVDADAMVDDEEGDARTPGAFQVDHDAQSQGSSVPSEYPSNEPPWTTSGRSQEFRVFEDQGRSRSR

SEQ ID NO: 36727 - DNA, 5074 bp, Muscodor strobelii
  misc_feature: SGI EST ID NO. CUFF.87724.1
  misc_feature: Variant of the nucleotide sequence at SEQ ID NO 36725
ctcccgcttcatcttggcccgcgaacacatccctgcctggcggacgcctcttattcgtcatcttgaagggcacagcgcgttgagtgcatcgcgtcttgtcgtgtgccgccgtcaactttgtgtcaagtgaggacagagtgaggatgtcggttgtctgcctgttctgaggcattacggttaacggctcggcctggtttgacaccatctctcgggcagaatatgcaatatctgatgccactctcgatgctgatgaggtgggaggattccattttgagtcactccacacgtaggctgtactcgtacacctgcaagacggtgattgagcgagtgactgagttgttgtatccacacccttcgacgtgaggtgttctgctgtcaaatacaccctgtcacaccctgtccccaaaaaggcgatgcccaaccccaccaacgtcgacttcccgtccgacatccatccttgactcttagaccagagcttcgactcccactcttccatcccacccatcttgaaccaatcccgcccaggcgcctcacttttgcgaacctcaatactccttcagccctcatcagtcacccttcaccttgctacttagttatatagccttcttgtatttaagttctcaactccccaatctatagtcaaatcgccttagctttatatcttgtcgtatcaccaaccgcgttgccatgtactagatatccccgaatcgcgcgacccagcggtgtctgaggcaccgtcgctctcgcaagggttccaacatcctccatcgccgcgcagcagcgcaataaataccaagccatccccatcgccttgcgcccgcgcacgacactcctccatcttttataaatctccaatgcttgcgaacagcgcgccaaatgctcaatggccggacccgcccccaccgattttcaattcccaaacaattcattctttaatatctacaatgatgccgctgtcatcacttctaatctgcccgccctccccggcgggcaatgcaattatattgacctaagccacggcgccaatggtcagaaatgtggatgtcgccgcttctggagtcgcagcgcaatgtccacgccgaccagagcatcgccgacgggatatcctcccggacatggtcatggatatgaggatcagaccgcttggtgcatgtgttcgcatcatgcctgttaccatgatgacgttcgcgaatctcagactcctatccagactccagttcagatgcttcccattgccgcgccgccggttgataccaatggtcaggagaatgagaggccccgtaccaatcgggagccacttacacccgttgtcccggatttgtctctcaagcttccttattccctaggccaacccgaagggttttatacgtttactgatagtggcgctttccagccgctgcctgcgctggagggcgctgtcgcggaaccagatgttgtcgcagagccgtcccgggaaccatcgatccctgataccttggactgggccaatcttgttcagtcgacgcccgatcaatctttttctttacccccaattcctagtcaatgcttgatgccctcgcaaccaagctcaacgacatcatccgcccggatacgttatctcaagcctttcggcgggaagggacttcaaacactcagtggtgttaagcccaaggcgcttgaacctctgcaggagaatcgccggagcgcgacgcctgtggatgaggacgccactgagactgatacagatcagtctgttgtcgacgagggacaaactgtcaccaatactcccaggtctacaaaatatgtgaatgcatcacaaagacaggcggagacttccgctactggcgtgagtcgcgaagcttttcagttgctgtcgcacacagtcaatggccacgagcagcgcatcgagaaccttgagtgtatatctttctctgcggctgctcatgatttatgccatgacaagcatgacaacgctgacttgagagtcactgagctcgagtctcgcgtggaagaagtcgagaagatgctcaatgatagtgccagtgtcgcgtcaagtcacaataggtctaggcatcatggagccgacgaccgaagtgtggtgtctgtctcgactagttcaggtagctatatcatggatcgcgctgagctctatagtgagcttcaggacctgcgagcccaactcagccagcttcaaggactgtcatctttcccctctcttaaacatccttgggaggtcgaggtcatattccttcccttccctctccagaatgtgtggtcggaggcacgggagttcagtagccagcgcctgtcaggtagcggtgctctggacgccgacccatggacacagctgcctaacagctcgtcgcctatcgagccgcaatcgcccaatttcaatgagtgggctggccctgaggttgagtcggattggctcctcggtcgagcatgttcgtctgataacatgattggtcaaagattgaagagtcgagggttggtgaagaatgtcagcgtctgtggcccagatgccagaagtgtatctcaggctatcgcagatgcgtttggtacgctcttccggacattctcgcgcatgcagggcaatgtacaccatggctctacagtgcataaccgtatggccaagtttctaggtctgcagtcgccatttgtcccacttcgaaagatgcataaggactctcgccttcggtttctcaccccggctgagatggttacgcctgtttcatggactgtcgagttcctctcttcaagtgtcgttatgaagtcgaatggtatacatcgtctcttcatcacacaccctgaagcatatcttcaagatcatgaggcgtatgagcatggctggacatggcagcgtcttcgggaactcagtcgagtctatgcagactcgcaaagcagtcaagaggtacccgaaggcgatgcgaaagaagaatgctggacttggaatgcagtactcgatgagcaggctccgacgatccctgtccctcgaaccaccatgcagctcaacagcatgcaacctccccccctcgacttgcaacagtctgcacagccagattggcgaggcatgacggcttcgtcgcaagacatttatgtcgacgccagggccacgactccatcacttccaactcaacgttcttctcgagctcagtcgcctgctttacgagaacgtagatcgtctaagcctccgcatatccggacgacttcagtgcctcctcctcttcaaacgctgtcttcgccaggacctgccaaacggcgtgtgatatcatacgctcatccatatgagcgacgctcttcaatccagcctcaacggtcggcgctcacagtagctcagatggctgggttaagtaaacgtcgcacacgctcaccatcgatccgcagtcgcttgaaccggtttacgccgcgttggagtactgcttcgccaagtccgatgcctgaagctttcgcagctcgaggtacaacgcctttctatgcgacgccgtacagcaatgcaccaccggtagatacacgaccaaatcacaatgaacctatcaccgttgacgaggatgacgactttgattttaacgaaagcggcagcgaaattgacgtgtataatgataatgacgaggacgagatcatgagcgaagaacaagatgatgacgataacagttcgatggccgatcttggtactccgtaccacatgcaacaggagtcgtggcaagatggtcagggaccaaacttacctgaagatgagccgtggccgggcatcgaagacgaagaaaaccacgatcccgatacagattcgggcgttgaggtcaatgtgcatgttgatgccgatgccatggtcgacgatgaggaaggagatgcaagaacaccaggtgccttccaagttgatcacgatgctcaaagtcagggatcgagtgttccgagcgaatacccgagcaatgagccaccatggactaccagtggcaggtcgcaagagttcagggtgtttgaggatcagggcaggagcagaagcaggtaatcgtggcctgaatcacgcgtcgcgtcacctgctggagttcctccggctgagccaatcaaagacaggggactgaggtggatacgatgtgttaacaagtgacctgtcaatttatgacaatagactcgttagactcgagccaggtgcaagttcgccgtgaacggcacttgtgcgagacagacattgttcttggacaggggtctctctcggccaagcttttctaggcacggcttttggatttttcaggatcgattcattatcttttggagctgactgtttcggcgcttggcgttttgagaggcatatctttactccagattacttttagggcgtacatcacgggatcgaggcataggagatgagattacgaattgcgagattagacgaggcgttggggcgtatctttgcatgcacactttttatacccttttcctacatagcttttgaggattgacttttggagagtcatgatgaagctgttcatgcatgcacgcacttatcacacatacacacacatgacatgcgaaatacgacatgagagcaccgcatgcatgctcgaagggtgcacatacataccggatacgatatgatacgagataccccgtcgctgaggaagtcgaatcttgcttgcttgggagagtggtagatggatagatagagaggagagagatggagaggagatgggaagatgagaagatagctccctacttttgtagatctaaattattttcgatatgcattgctctacggggtacggtggaacttgaaacttcagtgaaggaatgtcgggttagagtgtcttggcaggctggtgatgcttgcttacctcacaatcagacgtttcgattgtcatgaagataggtgacgcattcatatgtacacatccgtagtatctctcaaggaccttacgaaattattcgaagtcaagccgtttaaggtggcgtgaggtaccaaaccctcaacctattcggtccatgcgtactatcgaatcgctaattcatatctatacaatacgctgagtataattcactttatatcaccatcctaatttaaggcctagaacaagacaatactatcatgctctaatgaaac

SEQ ID NO: 36728 - DNA, 1719 bp, Muscodor strobelii
  misc_feature: SGI cDNA ID NO. 572734
  misc_feature: Reduced expression when VOC is produced
  misc_feature: Encodes the peptide sequence at SEQ ID NO 36729
atggctttccatcagccgacagcccgccaggctgcaccgcgccctttccggccggctctggaggatgaaggactgaaccatccccagccggccgtgacccagcccgtcgacgagtcccagacgtgggtcttgttctcgccggcaaccgatgctggcactacgacattatacctaaccaccagccaaaagtcagacataacgccaggtcgctcgcgcttgagcgaccttgggagcttaaatagcctcgtccgctccgatgtgagtggcgtgcggcagccgtccgactcttttatcaacgcagccgacgaggacgaagacctcgaactggacagccttgacagccacctccccgaatttcgatctaccccggacttcttcaactcctcatctttgccccatgcagcgcctattgttccagctcacgatgggctgggctctttccggctggagcaagagggcatgggttctgaggtgcagaacaggatatacgcgttcgagcgctttaacccgcgtcggactaagaggaggcgcgaaagtttagagcaggtccaactcgaaatggagagcgaagaagtccaagaaatggaaaagatgcgcaggatagaaacctggcgtctggaacagagccggtatcttctcgacgacatacagaaagaaacccggaggcggcggagatcaatagctagtgcagcgaccccgcgaaacacggatgcgttggcggaagacaatgcgctatcgggtgccgtaggcggagcggacttgggaagtagagaagaagagtggcacgaccagaaccctgccgatgtgacgggcgagcgagaaggcttatggggtagaataacacggaaggtcattcaagacctcatgggcatcgatgataagatgctatcaattctcttcggcgaagctctaccggatgaagatgatcttgcaaccacgcccaaggcatccatgatggcaacagccgaggccagtacgttacctgaagcatcgcgcattcatagctggcagacaaagatgctggagcgagtagctacagaactgggcatgcttgttcatcagctctcggaacaccctggcgctttctcgacattcagcaaggtgcaacaaatgcccatcccctatgccggcttgcctgcaatccctgaaagtgccaatgatcggttaactcgggcggctataaatgagccagcgtctacaattcccgagttcaagcccacaatcccgtccacgacacgaccaatcgatgtaccacgaacccgccgggactctgctcatagtagaccgccccaggccgaaacgagtggatccgcattcacacaagaggaatgggaacaagacctggacatccgcttagttttccggtatctacgatcgcgcttcctaagtcgatctactagtaacaatggactttctggcgcctcacacatgactacttcgaattcgcaagacctggcctctaaggtggcccgagttcggcagcaccacccactagtgtctcgatcgcgcaccatggagagacgcaagtccaaggcaacgatagcatcaaacgcggtactactcagacctgcgtcaagctgtgcgagccaaagcactcggcgatcggtgcgaaggagcagtgcctcgtcgtctcggcactactgggacatcggcgggtccgtaggcacgggctccatggttgctacgacgggccctatggggagctggggtgaggtttaa

SEQ ID NO: 36729 - protein, 572 aa, Muscodor strobelii
  misc_feature: SGI Peptide ID NO. 572734
  misc_feature (1)..(572): NCBI GI: 171694427 Blast Desc: protein product [Podospora anserina] gi|170947162|emb|CAP73967.1| protein product [Podospora anserina]
  misc_feature (1)..(572): NCBI GI: 116197629 Blast Desc: CHGG_06970 [Chaetomium globosum CBS 148.51] gi|88178249|gb|EAQ85717.1| CHGG_06970 [Chaetomium globosum CBS 148.51]
  misc_feature (1)..(572): NCBI GI: 256732200 Blast Desc: NECHADRAFT_41550 [Nectria haematococca mpVI 77-13-4]
  misc_feature (1)..(572): NCBI GI: 261351754 Blast Desc: conserved [Verticillium albo-atrum VaMs.102]
  misc_feature (1)..(572): NCBI GI: 46137463 Blast Desc: FG10247.1 [Gibberella zeae PH-1]
  misc_feature (1)..(550): NCBI GI: 85099435 Blast Desc: NCU08965 [Neurospora crassa OR74A] gi|28922311|gb|EAA31551.1| [Neurospora crassa OR74A]
  misc_feature (36)..(558): NCBI GI: 156056302 Blast Desc: SS1G_05503 [Sclerotinia sclerotiorum 1980] gi|154703287|gb|EDO03026.1| SS1G_05503 [Sclerotinia sclerotiorum 1980]
  misc_feature (1)..(572): NCBI GI: 145246618 Blast Desc: An12g04880 [Aspergillus niger] gi|134080276|emb|CAK97179.1| [Aspergillus niger]
  misc_feature (38)..(572): NCBI GI: 67539828 Blast Desc: AN6084.2 [Aspergillus nidulans FGSC A4] gi|40738869|gb|EAA58059.1| AN6084.2 [Aspergillus nidulans FGSC A4] gi|259479729|tpe|CBF70217.1| TPA: conserved [Aspergillus FGSC
  misc_feature (1)..(572): NCBI GI: 242764841 Blast Desc: conserved [Talaromyces stipitatus ATCC 10500] gi|218724049|gb|EED23466.1| conserved [Talaromyces stipitatus ATCC 10500]
  misc_feature: Useful for introducing or modulating the production of volatile compounds
MAFHQPTARQAAPRPFRPALEDEGLNHPQPAVTQPVDESQTWVLFSPATDAGTTTLYLTTSQKSDITPGRSRLSDLGSLNSLVRSDVSGVRQPSDSFINAADEDEDLELDSLDSHLPEFRSTPDFFNSSSLPHAAPIVPAHDGLGSFRLEQEGMGSEVQNRIYAFERFNPRRTKRRRESLEQVQLEMESEEVQEMEKMRRIETWRLEQSRYLLDDIQKETRRRRRSIASAATPRNTDALAEDNALSGAVGGADLGSREEEWHDQNPADVTGEREGLWGRITRKVIQDLMGIDDKMLSILFGEALPDEDDLATTPKASMMATAEASTLPEASRIHSWQTKMLERVATELGMLVHQLSEHPGAFSTFSKVQQMPIPYAGLPAIPESANDRLTRAAINEPASTIPEFKPTIPSTTRPIDVPRTRRDSAHSRPPQAETSGSAFTQEEWEQDLDIRLVFRYLRSRFLSRSTSNNGLSGASHMTTSNSQDLASKVARVRQHHPLVSRSRTMERRKSKATIASNAVLLRPASSCASQSTRRSVRRSSASSSRHYWDIGGSVGTGSMVATTGPMGSWGEV

SEQ ID NO: 36730 - DNA, 3518 bp, Muscodor strobelii
  misc_feature: SGI EST ID NO. CUFF.87727.0
  misc_feature: Variant of the nucleotide sequence at SEQ ID NO 36728
cctcatcagcttcgagacagaccggaactgcaacgtagattaaaatgtgagcacagcatgccttgaaatgacagatgtactacgcggtcactgattcagctgatgcaataactattgaactcttgcagaaccgacaaccgccgacaagttggaagatcataagctgacggaacggttgtaaccgtcttgcgcaggcgggcagggagaattacggcttatcgcatcatacaagcggtatcttacgtaggtgcgtcagaggtgggaaccggtttggcttaggtgatgcaaggcgggcgggactagacagcaaagggcctgggtcaagcagttgagtggcgcccacccagccgccaacaaggcccaacgaagcgcccccaacaacaatcagcagtgggctagtgggacacaccacctcgacacccagaccggagccaacgtccctggggacgttccacgcgactgctttgtcgactaatataggggatcatcaacactgcgcgccccatctcgagacaagcgacggccggaacaggtgacaccaacatcagcgatcctttactggtttgcctcccgccgcccttaccaactgtgtctctccttctcctttgaccactgtctttcccctcggtatggtgatcatctagagacatattccaactgctggaagagctagtagcttgtctacccctcgccgtagcttatcggcgccaagcagtgggagtgtcccggctcgccaggtgctcctgatcacacgatacctctctacctttacttcgatactaacacgctcaaaaacacaaccactaactttgacaacatcgtcatttgtctcattgtctcggtacttatctcgatgccattccagtagtgaaagtgatataatccggccgaataattctctgttgtcgagacaaagcgcgtcaactaagcaagtggcattacgacatagctgccgctgggtatcgccccggctggccgactcgtatactcaagttcacctctcgatttgcagcaatcggcgcacagcatggctttccatcagccgacagcccgccaggctgcaccgcgccctttccggccggctctggaggatgaaggactgaaccatccccagccggccgtgacccagcccgtcgacgagtcccagacgtgggtcttgttctcgccggcaaccgatgctggcactacgacattatacctaaccaccagccaaaagtcagacataacgccaggtcgctcgcgcttgagcgaccttgggagcttaaatagcctcgtccgctccgatgtgagtggcgtgcggcagccgtccgactcttttatcaacgcagccgacgaggacgaagacctcgaactggacagccttgacagccacctccccgaatttcgatctaccccggacttcttcaactcctcatctttgccccatgcagcgcctattgttccagctcacgatgggctgggctctttccggctggagcaagagggcatgggttctgaggtgcagaacaggatatacgcgttcgagcgctttaacccgcgtcggactaagaggaggcgcgaaagtttagagcaggtccaactcgaaatggagagcgaagaagtccaagaaatggaaaagatgcgcaggatagaaacctggcgtctggaacagagccggtatcttctcgacgacatacagaaagaaacccggaggcggcggagatcaatagctagtgcagcgaccccgcgaaacacggatgcgttggcggaagacaatgcgctatcgggtgccgtaggcggagcggacttgggaagtagagaagaagagtggcacgaccagaaccctgccgatgtgacgggcgagcgagaaggcttatggggtagaataacacggaaggtcattcaagacctcatgggcatcgatgataagatgctatcaattctcttcggcgaagctctaccggatgaagatgatcttgcaaccacgcccaaggcatccatgatggcaacagccgaggccagtacgttacctgaagcatcgcgcattcatagctggcagacaaagatgctggagcgagtagctacagaactgggcatgcttgttcatcagctctcggaacaccctggcgctttctcgacattcagcaaggtgcaacaaatgcccatcccctatgccggcttgcctgcaatccctgaaagtgccaatgatcggttaactcgggcggctataaatgagccagcgtctacaattcccgagttcaagcccacaatcccgtccacgacacgaccaatcgatgtaccacgaacccgccgggactctgctcatagtagaccgccccaggccgaaacgagtggatccgcattcacacaagaggaatgggaacaagacctggacatccgcttagttttccggtatctacgatcgcgcttcctaagtcgatctactagtaacaatggactttctggcgcctcacacatgactacttcgaattcgcaagacctggcctctaaggtggcccgagttcggcagcaccacccactagtgtctcgatcgcgcaccatggagagacgcaagtccaaggcaacgatagcatcaaacgcggtactactcagacctgcgtcaagctgtgcgagccaaagcactcggcgatcggtgcgaaggagcagtgcctcgtcgtctcggcactactgggacatcggcgggtccgtaggcacgggctccatggttgctacgacgggccctatggggagctggggtgaggtttaacgactgagtcatgaattgaccaattgtatatcacaatctttcctgaacgtacactggaattttcttgtatattatgtaccatgatatcacgcgccgttatatgaagctttggaataggaaatatcaactcggtagaattggaccgaattgcacagtttgatggccgagatgctaccgactcagatgcaagtataaggagaccaaaaccattacatctaggttcattggacaatggagactctattaagtctgcaaacaggctgtttatagaatacgaaatagtcttctcctacctctcggtgacatctcacagtgatctacgtccggggtgagtccgagaatgagataaaaatacccgagtgtttgtctaataaggccgggcgggctgatccgccttgttttgccccttgagaactatgactcttactcctgcactctgctgtgttgcgccgatgcttatagaactcgaaagattcagtcgcctcataggatgaatggccattactggagattgatatgcaaggtgcgcttatgatcacataaatttaacttttgaaagagagatgagtttgccctgaataattgagtggccagcaatatttattgtattcttacggtgaaggatatcatgttaggatgaagttgtttcactagaggtttcctcacacagactaagtcacttctcgagagtagactcaagtctctagtgctgtacttggcggtgtacacggagcagcaactcacctcgagacttgtcgagcgtgcattcgac

SEQ ID NO: 36731 - DNA, 660 bp, Muscodor strobelii
  misc_feature: SGI cDNA ID NO. 572735
  misc_feature: Reduced expression when VOC is produced
  misc_feature: Encodes the peptide sequence at SEQ ID NO 36732
atggctcgtcgtcccgcccgctgctaccgatactgcaagaacaagccgtatcccaagtcccgcttcaaccgtggtgtacccgaccccaagatccgcatcttcgatcttggccgcaagcgcgccaacgtcgacgacttcccgctatgcatccacatggtctccaacgagtacgagcagctgagctctgaggccctcgaggccgcccgtatctgcgccaacaagtacctcgtcaagaacaccggaaaggaaggtttccatctccgcgtccgcgcccacccctaccacgtcgttcgcatcaacaagatgttgtcttgcgccggtgccgatagactgcagaccggtatgcgtggtgcctggggcaagcccaacggaaccgtcgcccgtgtcaacatcggccagattctcctcagcgtccgcacccgtgactccaaccgtgctttcgctctcgaggctctccgccgctccatgtacaagttccccggccgccagaagatcatcatctccaagaactggggcttcacccccctccgccgtgaggagtatctcgagaagaaggccgccggccacctgctctccgacggtgcctacgtccagttcttgtccaacaagggcaagctcgctgagaacatgaagcgtttccccgatgctttcaccgcttag

SEQ ID NO: 36732 - protein, 219 aa, Muscodor strobelii
  misc_feature: SGI Peptide ID NO. 572735
  misc_feature (5)..(167): Pfam Id: PF00252 Pfam Desc: Ribosomal protein L16p/L10e
  misc_feature (1)..(219): NCBI GI: 116197633 Blast Desc: conserved [Chaetomium globosum CBS 148.51] gi|88178251|gb|EAQ85719.1| conserved [Chaetomium globosum CBS 148.51]
  misc_feature (1)..(219): NCBI GI: 256732201 Blast Desc: [Nectria haematococca mpVI 77-13-4]
  misc_feature (1)..(219): NCBI GI: 85099431 Blast Desc: 60S ribosomal protein L10 [Neurospora crassa OR74A] gi|28922310|gb|EAA31550.1| 60S ribosomal protein L10 [Neurospora crassa OR74A]
  misc_feature (1)..(219): NCBI GI: 171694425 Blast Desc: protein product [Podospora anserina] gi|170947161|emb|CAP73966.1| protein product [Podospora anserina]
  misc_feature (1)..(219): NCBI GI: 39942112 Blast Desc: MGG_03136 [Magnaporthe grisea 70-15] gi|145015889|gb|EDK00379.1| MGG_03136 [Magnaporthe grisea 70-15]
  misc_feature (1)..(219): NCBI GI: 46137461 Blast Desc: FG10246.1 [Gibberella zeae PH-1]
  misc_feature (1)..(219): NCBI GI: 58257449 Blast Desc: 60S ribosomal protein L10-A-like protein [Magnaporthe grisea]
  misc_feature (1)..(218): NCBI GI: 261351755 Blast Desc: 60S ribosomal protein L10 [Verticillium albo-atrum VaMs.102]
  misc_feature (1)..(217): NCBI GI: 154302810 Blast Desc: 60S ribosomal protein L10 [Botryotinia fuckeliana B05.10] gi|156056300|ref|XP_001594074.1| 60S ribosomal protein L10-A [Sclerotinia sclerotiorum 1980] gi|150855267|gb|EDN30459.1|
  misc_feature (1)..(217): NCBI GI: 28797723 Blast Desc: ribosomal L10 protein [Paracoccidioides brasiliensis] gi|226282565|gb|EEH38131.1| 60S ribosomal protein L10-B [Paracoccidioides brasiliensis Pb01]
  misc_feature: Useful for introducing or modulating the production of volatile compounds
MARRPARCYRYCKNKPYPKSRFNRGVPDPKIRIFDLGRKRANVDDFPLCIHMVSNEYEQLSSEALEAARICANKYLVKNTGKEGFHLRVRAHPYHVVRINKMLSCAGADRLQTGMRGAWGKPNGTVARVNIGQILLSVRTRDSNRAFALEALRRSMYKFPGRQKIIISKNWGFTPLRREEYLEKKAAGHLLSDGAYVQFLSNKGKLAENMKRFPDAFTA

SEQ ID NO: 36733 - DNA, 1064 bp, Muscodor strobelii
  misc_feature: SGI EST ID NO. CUFF.87751.1
  misc_feature: Variant of the nucleotide sequence at SEQ ID NO 36731
agacagtcacgggcggatgaccaatcactgcgcaccagatcgccccaccattttgtgactcgcctgctttgaaatcaagtctgcgtttttgccatctccgggtcttcaaagaggtcggatcccgtcgacatcatcccctcggacaacacacaccacaacaccaccatctacgtcaccccacgaggcataccgtcaagatggctcgtcgtcccgcccgctgctaccgatactgcaagaacaagccgtatcccaagtcccgcttcaaccgtggtgtacccgaccccaagatccgcatcttcgatcttggccgcaagcgcgccaacgtcgacgacttcccgctatgcatccacatggtctccaacgagtacgagcagctgagctctgaggccctcgaggccgcccgtatctgcgccaacaagtacctcgtcaagaacaccggaaaggaaggtttccatctccgcgtccgcgcccacccctaccacgtcgttcgcatcaacaagatgttgtcttgcgccggtgccgatagactgcagaccggtatgcgtggtgcctggggcaagcccaacggaaccgtcgcccgtgtcaacatcggccagattctcctcagcgtccgcacccgtgactccaaccgtgctttcgctctcgaggctctccgccgctccatgtacaagttccccggccgccagaagatcatcatctccaagaactggggcttcacccccctccgccgtgaggagtatctcgagaagaaggccgccggccacctgctctccgacggtgcctacgtccagttcttgtccaacaagggcaagctcgctgagaacatgaagcgtttccccgatgctttcaccgcttagagggtcatttctgtcatgttgtaggtcaagcaagtctgggattctgagaggttaggcgtcaatcggttaccatagcactgtcaatagcagtcaacagggatcttgcatttgcacacaaagtacacactggtgtcgtattcttctatatgtgaaactgtgactacatacatgctatttcaactcgcagagcgacggcttataatacgg

SEQ ID NO: 36734 - DNA, 330 bp, Muscodor strobelii
  misc_feature: SGI cDNA ID NO. 572736
  misc_feature: Reduced expression when VOC is produced
  misc_feature: Encodes the peptide sequence at SEQ ID NO 36735
atggcgcccaagaagagcaagaaagatgccaacagcatcaattcgaaattggccttggtgatgaagtcaggcaaagtaacgctcggctacaaatccgcactgaaggctctgcgatctggcaaagctaagctcgtcatcattgcgggaaacacccctcctctccgcaaatccgaactcgagtactacagcatgcttagcaaaacacccgtccaccacttcgagggaacgaatattgaactgggcacttcgcttggtaaattgttcacctgctccacgatgtgcattcttgacgccggtgactccgatatcctcagcgaccagcaggcttaa

SEQ ID NO: 36735 - protein, 109 aa, Muscodor strobelii
  misc_feature: SGI Peptide ID NO. 572736
  misc_feature (11)..(105): Pfam Id: PF01248 Pfam Desc: Ribosomal protein L7Ae/L30e/S12e/Gadd45 family
  misc_feature (1)..(109): NCBI GI: 226282563 Blast Desc: cytosolic large ribosomal subunit protein L30 [Paracoccidioides brasiliensis Pb01]
  misc_feature (1)..(109): NCBI GI: 225681030 Blast Desc: ribosomal protein L30 [Paracoccidioides brasiliensis Pb03] gi|226292277|gb|EEH47697.1| 60S ribosomal protein L30 [Paracoccidioides brasiliensis Pb18]
  misc_feature (1)..(109): NCBI GI: 154281567 Blast Desc: cytosolic large ribosomal subunit protein L30 [Ajellomyces capsulatus NAm1] gi|150411775|gb|EDN07163.1| cytosolic large ribosomal subunit protein L30 [Ajellomyces NAm1]
  misc_feature (1)..(109): NCBI GI: 156056298 Blast Desc: SS1G_05501 [Sclerotinia sclerotiorum 1980] gi|154703285|gb|EDO03024.1| SS1G_05501 [Sclerotinia sclerotiorum 1980]
  misc_feature (1)..(109): NCBI GI: 154302808 Blast Desc: 60S ribosomal protein L30 [Botryotinia fuckeliana B05.10] gi|150855266|gb|EDN30458.1| 60S ribosomal protein L30 [Botryotinia fuckeliana B05.10]
  misc_feature (1)..(109): NCBI GI: 261195114 Blast Desc: cytosolic large ribosomal subunit protein L30 [Ajellomyces dermatitidis SLH14081] gi|239587833|gb|EEQ70476.1| cytosolic large ribosomal subunit protein L30 [Ajellomyces large
  misc_feature (1)..(109): NCBI GI: 261351756 Blast Desc: 60S ribosomal protein L30-1 [Verticillium albo-atrum VaMs.102]
  misc_feature (1)..(108): NCBI GI: 85099427 Blast Desc: 60S ribosomal protein L30 [Neurospora crassa OR74A] gi|52783255|sp|Q7S7F1.1|RL30_NEUCR RecName: Full=60S ribosomal protein L30 gi|28922309|gb|EAA31549.1| 60S ribosomal protein L30
  misc_feature (1)..(105): NCBI GI: 169600625 Blast Desc: SNOG_03154 [Phaeosphaeria nodorum SN15] gi|160705482|gb|EAT89885.2| SNOG_03154 [Phaeosphaeria nodorum SN15]
  misc_feature (1)..(105): NCBI GI: 189191716 Blast Desc: 60S ribosomal protein L30 [Pyrenophora tritici-repentis Pt-1C-BFP] gi|187973803|gb|EDU41302.1| 60S ribosomal protein L30 [Pyrenophora tritici-repentis Pt-1C-BFP]
  misc_feature: Useful for introducing or modulating the production of volatile compounds
MAPKKSKKDANSINSKLALVMKSGKVTLGYKSALKALRSGKAKLVIIAGNTPPLRKSELEYYSMLSKTPVHHFEGTNIELGTSLGKLFTCSTMCILDAGDSDILSDQQA

SEQ ID NO: 36736 - DNA, 1174 bp, Muscodor strobelii
  misc_feature: SGI EST ID NO. CUFF.87805.0
  misc_feature: Variant of the nucleotide sequence at SEQ ID NO 36734
gcggggcccagctgagtgaaccactactgccactggccggccacacacaccacaattcggcgggtcgctctcagaaggaaaaagggtctacgtgaaatcttaattctttgttgcatttgcctagtacacctcgtcaaccacctcccatcgccaaccacttcacccgacgtcaaccaccccaacgcattcgcaatggcgcccaagaagagcaagaaagatgccaacagcatcaattcgaaattggccttggtgatgaagtcaggcaaagtaacgctcggctacaaatccgcactgaaggctctgcgatctggcaaagctaagctcgtcatcattgcgggaaacacccctcctctccgcaaatccgaactcgagtactacagcatgcttagcaaaacacccgtccaccacttcgagggaacgaatgtaagttacaatttttttgtcgcctcattgttctctcctttcgagatgagctatgtacaggcatggcggacttcaccgtctgctgtcctcgcccagagaaaaagcctctccacgggctttggagggtcatgtaatccgctaacctccattgcctgacagattgaactgggcacttcgcttggtaaattgttcacctgctccacgatgtgcattcttgacgccggtgactccgatatcctcagcgaccagcaggcttaagttttaaggtctctggcttccatccacgaaacggcgttcggttttaaggtctcggcaaaaatgacggacggaggatatgatgcctccagtgggtagcagcatcgctgcgaaacctgattatcacgagcaatgaacatatgggcatttggacttccatagctcagatagtgacgtctcaatctgcaggatgggatgtgcatcgtagcatgcacgcagcaattacgactatcaatgatacccaaatacgtattcttttgtgacgattgggaaatcgttgggtcttcatgctgagatatttgaaatgaaagaggcttctgcccggtaccgagataacggttcacatggcattatctattgcatggttagattatagtatcaaagtcgtgtttcgcgaagccatacctaccgacgggtaattgaacgtcggtcacgccgtagattccgggtatcagactcagctgagctcgctgacgaccacatgattgtaatgctc

SEQ ID NO: 36737 - DNA, 1929 bp, Muscodor strobelii
  misc_feature: SGI cDNA ID NO. 572737
  misc_feature: Encodes the peptide sequence at SEQ ID NO 36738
atgtccgccgcgaccaagaagccgagttcctcggcgactccacgggtctcgaccgccgacagcgctcacacgacgccctcgcggccgcagctgaggactaccaccacgcccagtgctgctgcagctaatgcgaccaccaacggcactccgtcaagaacgagatctatccgcgccggcacgcccgtctccgcacgtgctgccgcccaccggtccacatcctcgctgagcatatccaactccatcgatgccgaagcccgcgcagagaccgttgccctcatcgacgatcttaaggaacgtctacacaaagccgacgtcgccgccgagcagtacaggaaacagacagaggtcttgcagtctcgactcgacgaggcgctgaaggaacaggccaagctagaagagagagcccacgagagcgaggagcagatcgaagtcttccggaatgaaaagagagaggccgccagacagatgcgcgagatggaggctatatacgaagccgagcgcagctccatgatgaaggagaaggaagacatgtccaaccgcgaggaagagatgcagaccgtcatcaacaggctgaaagagacgatcaaccagcgcaacgccgaggacgagtttcggcccacaaggcaatccaacaacaattcgcctagtgtcgagagcggcaactttgctcctccttcgtcgcttcaaaggagcgactcgagaaacaactctaagctcatccttcagaaagacaagctcattgagtcgttgcgacttgagctggccgaggcgcagatcaaactagtcgagacagagaatcagggaggcgggcgggtacatgaggttgaacgactgcttatggaagcccgcatggcaaacgcaagactaatggaagataatgagtcgtaccagctgctactccaagagaagactcttcacggtgagttcggcaaaggtgacttcaactacatgggtggagtgtcctccaaccaggatgctctcaatgcgctcgagggaagggatagcacagtcggcgtaccgacgcccggcgggtcgagtctcgccgatgaacttggttccatggccgatgagtctgaattgggcgagccggctagtcaccgcctggaaaccgaattgcgtgctgccaaagaccagaacaaagccttgacgttgtatattaacaagatcatcgaaaggctcttgcagcaccaggagttcgagcatattctggatcaatcgtctgaccctaagccggcggcgaacgtacacaaggatctgcctcccccgccgtctgatggcccaggtgtcggcgcatccctcctacagcgtgctaaatccatcgcaatcggtggcaatgccgctagacccaaaccgcgtccgatgaccatgatacaaccacctgcagcggcgccagaatccgcacacaacaacccggagacggccccgaggatccctataggtctaggacgatctcagagcacccgccggggcggccgaccgatgagcgagcagttcaccggtgcggcggggatcgtgaacgccatgtacaagggtcccgacgggcccttgtcaccagcgctaagcaatcctcgcaactcagcgcagttcttctcgggagtctcaacaccgcgacatacatcctcgggccacggggcccctagtgcgggtaacttccccggcatgcgaagcgagactagcagtgtcagcggggactcgaactcgggagagggcacgaactctagcccgccccgcgctagcagtgggcatgcgagcgtcgcgggctccgagaaggctactacgttcgcggggaataagcctagaccgctgcgtcttgtgcaggagcagactgcggagaagacggagaataaacgggctagctggatgggttgggctgcgtctgcttggaataagcctaaggatgaggggatgggggaacctatccgggagtaa

SEQ ID NO: 36738 - protein, 642 aa, Muscodor strobelii
  misc_feature: SGI Peptide ID NO. 572737
  misc_feature (1)..(642): NCBI GI: 171694421 Blast Desc: protein product [Podospora anserina] gi|170947159|emb|CAP73964.1| protein product [Podospora anserina]
  misc_feature (1)..(642): NCBI GI: 116197637 Blast Desc: CHGG_06974 [Chaetomium globosum CBS 148.51] gi|88178253|gb|EAQ85721.1| CHGG_06974 [Chaetomium globosum CBS 148.51]
  misc_feature (1)..(636): NCBI GI: 154302806 Blast Desc: BC1G_09518 [Botryotinia fuckeliana B05.10] gi|150855265|gb|EDN30457.1| BC1G_09518 [Botryotinia fuckeliana B05.10]
  misc_feature (1)..(642): NCBI GI: 46137457 Blast Desc: FG10244.1 [Gibberella zeae PH-1]
  misc_feature (1)..(634): NCBI GI: 256731807 Blast Desc: NECHADRAFT_93716 [Nectria haematococca mpVI 77-13-4]
  misc_feature (1)..(624): NCBI GI: 39942108 Blast Desc: MGG_03134 [Magnaporthe grisea 70-15] gi|145015891|gb|EDK00381.1| MGG_03134 [Magnaporthe grisea 70-15]
  misc_feature (52)..(511): NCBI GI: 261351863 Blast Desc: conserved [Verticillium albo-atrum VaMs.102]
  misc_feature (52)..(621): NCBI GI: 85099423 Blast Desc: NCU08962 [Neurospora crassa OR74A] gi|28922308|gb|EAA31548.1| conserved [Neurospora crassa OR74A]
  misc_feature (1)..(631): NCBI GI: 240105765 Blast Desc: CPC735_053280 [Coccidioides posadasii C735 delta SOWgp]
  misc_feature (1)..(639): NCBI GI: 145246610 Blast Desc: An12g04840 [Aspergillus niger] gi|134080272|emb|CAK97175.1| protein product [Aspergillus niger]
MSAATKKPSSSATPRVSTADSAHTTPSRPQLRTTTTPSAAAANATTNGTPSRTRSIRAGTPVSARAAAHRSTSSLSISNSIDAEARAETVALIDDLKERLHKADVAAEQYRKQTEVLQSRLDEALKEQAKLEERAHESEEQIEVFRNEKREAARQMREMEAIYEAERSSMMKEKEDMSNREEEMQTVINRLKETINQRNAEDEFRPTRQSNNNSPSVESGNFAPPSSLQRSDSRNNSKLILQKDKLIESLRLELAEAQIKLVETENQGGGRVHEVERLLMEARMANARLMEDNESYQLLLQEKTLHGEFGKGDFNYMGGVSSNQDALNALEGRDSTVGVPTPGGSSLADELGSMADESELGEPASHRLETELRAAKDQNKALTLYINKIIERLLQHQEFEHILDQSSDPKPAANVHKDLPPPPSDGPGVGASLLQRAKSIAIGGNAARPKPRPMTMIQPPAAAPESAHNNPETAPRIPIGLGRSQSTRRGGRPMSEQFTGAAGIVNAMYKGPDGPLSPALSNPRNSAQFFSGVSTPRHTSSGHGAPSAGNFPGMRSETSSVSGDSNSGEGTNSSPPRASSGHASVAGSEKATTFAGNKPRPLRLVQEQTAEKTENKRASWMGWAASAWNKPKDEGMGEPIRE

SEQ ID NO: 36739 - DNA, 2836 bp, Muscodor strobelii
  misc_feature: SGI EST ID NO. CUFF.87681.0
  misc_feature: Variant of the nucleotide sequence at SEQ ID NO 36737
gccacaaacccctttgccccaggtcgggtccgcccagtgaaggacggttttgagggacccatgcccgccccgagagccatgacaaggacagcagacaaaagacttgttggcccttgacacgactcatcagtgcattggactctgtgcgacacagcagccacgagcttggaaagtacatcctaaagctccgagacaatcccccaagtgcagtccccggatcaacaacaataacaacaaacatagcgacatagccagctagtgtcggtaaacgtcaacaagatcgcagcattccacgtgcttgctgtgtatgccacggtgatttcggattgacgcagcaacgacacctgcataccacctctgcgtccgatcgatcgtctatccgcgcatagcgcaaccaacgcaggtaactatatagacttttgggtgtttctgcccctgccttccgccatgtccgccgcgaccaagaagccgagttcctcggcgactccacgggtctcgaccgccgacagcgctcacacgacgccctcgcggccgcagctgaggactaccaccacgcccagtgctgctgcagctaatgcgaccaccaacggcactccgtcaagaacgagatctatccgcgccggcacgcccgtctccgcacgtgctgccgcccaccggtccacatcctcgctgagcatatccaactccatcgatgccgaagcccgcgcagagaccgttgccctcatcgacgatcttaaggaacgtctacacaaagccgacgtcgccgccgagcagtacaggaaacagacagaggtcttgcagtctcgactcgacgaggcgctgaaggaacaggccaagctagaagagagagcccacgagagcgaggagcagatcgaagtcttccggaatgaaaagagagaggccgccagacagatgcgcgagatggaggctatatacgaagccgagcgcagctccatgatgaaggagaaggaagacatgtccaaccgcgaggaagagatgcagaccgtcatcaacaggctgaaagagacgatcaaccagcgcaacgccgaggacgagtttcggcccacaaggcaatccaacaacaattcgcctagtgtcgagagcggcaactttgctcctccttcgtcgcttcaaaggagcgactcgagaaacaactctaagctcatccttcagaaagacaagctcattgagtcgttgcgacttgagctggccgaggcgcagatcaaactagtcgagacagagaatcagggaggcgggcgggtacatgaggttgaacgactgcttatggaagcccgcatggcaaacgcaagactaatggaagataatgagtcgtaccagctgctactccaagagaagactcttcacggtgagttcggcaaaggtgacttcaactacatgggtggagtgtcctccaaccaggatgctctcaatgcgctcgagggaagggatagcacagtcggcgtaccgacgcccggcgggtcgagtctcgccgatgaacttggttccatggccgatgagtctgaattgggcgagccggctagtcaccgcctggaaaccgaattgcgtgctgccaaagaccagaacaaagccttgacgttgtatattaacaagatcatcgaaaggctcttgcagcaccaggagttcgagcatattctggatcaatcgtctgaccctaagccggcggcgaacgtacacaaggatctgcctcccccgccgtctgatggcccaggtgtcggcgcatccctcctacagcgtgctaaatccatcgcaatcggtggcaatgccgctagacccaaaccgcgtccgatgaccatgatacaaccacctgcagcggcgccagaatccgcacacaacaacccggagacggccccgaggatccctataggtctaggacgatctcagagcacccgccggggcggccgaccgatgagcgagcagttcaccggtgcggcggggatcgtgaacgccatgtacaagggtcccgacgggcccttgtcaccagcgctaagcaatcctcgcaactcagcgcagttcttctcgggagtctcaacaccgcgacatacatcctcgggccacggggcccctagtgcgggtaacttccccggcatgcgaagcgagactagcagtgtcagcggggactcgaactcgggagagggcacgaactctagcccgccccgcgctagcagtgggcatgcgagcgtcgcgggctccgagaaggctactacgttcgcggggaataagcctagaccgctgcgtcttgtgcaggagcagactgcggagaagacggagaataaacgggctagctggatgggttgggctgcgtctgcttggaataagcctaaggatgaggggatgggggaacctatccgggagtaattcgcccgttaactgttagacgatacttcacactcccgcatatgtcgaggcgttgggggattggtggctacgcatctacatatatcgaatacccatgagctggagatcttgggacagttttggtggttgtgggatgggtgtatattctgagttgtcaggtttgttggaggcctgtaactatggtaactacctacattgtgcatgtaagggcatgagatgtctgactggcgccggttgcttgattcccgattttaagctggttgattggatgttttgggacgttacactggtgaattagagggctgagatgaaaggaggggtatggtagatgggatgagttgaataaaatatgagatgatgatcttgagaatgactgtgtgacgcgactatgtgggcatgtatgttattgaatgtgtttgcgaattagagggttgcgatgtgaagtgaacgttgagacgag

SEQ ID NO: 36740 - DNA, 774 bp, Muscodor strobelii
  misc_feature: SGI cDNA ID NO. 572738
  misc_feature: Elevated expression when VOC is produced
  misc_feature: Encodes the peptide sequence at SEQ ID NO 36741
atgcctgcaacaacgcagacaacaacgacctcacaagtcgagccgctcatcctttcaatggacgtagtagacgacgactcagtcgaaagcgagtaccgcctgcgcataggagacgacgtgaaatatctcgtcgtctcgcccggcacattcgataaaaacacactgtcctcccccctcaaatccctctctcatctcccatacgacgaagaatggaccgtagcacacatatcacgacaccacacaacaggagacttaaaatactcaacgttaaacctcagcatgatcgggatattccaatggcatagcaaacgagtaaattgtctagagctagtcaaaacgtcagatcttacagcaacgaccttcgaagccctctcaaatttcgtaccctcgcctcatctagcgatcgcaaagatagcgcggttcgagtgggagattcctcgacttgagcgcgagacgagggcatatcaattactagagggttcggggattgcacctcggttcctcgctcatgtccatgagaatggacggatcatgggtctgcttttggagaaggtcgagggccgcgcggcgaccgctagcgatttgggactctgtgaagcggcattgggaaaattacatgggcttgggcatgttcatggaaacttgagcaagcggagcttcttggtcacgggtactgatgtcaggatcattgggcttggatgtttgagggaaaatgctgggccggaggcggctagcgacgaattacagaaattacggtcgatattggcggggtag

SEQ ID NO: 36741 - protein, 257 aa, Muscodor strobelii
  misc_feature: SGI Peptide ID NO. 572738
  misc_feature (29)..(240): NCBI GI: 145249658 Blast Desc: An14g05450 [Aspergillus niger] gi|134081851|emb|CAK42106.1| protein product [Aspergillus niger]
  misc_feature (15)..(248): NCBI GI: 145241175 Blast Desc: An08g11330 [Aspergillus niger] gi|134077763|emb|CAK45804.1| protein product [Aspergillus niger]
  misc_feature (17)..(230): NCBI GI: 238838241 Blast Desc: alpha-galactosidase A [Microsporum canis CBS 113480]
  misc_feature (1)..(256): NCBI GI: 238838412 Blast Desc: alpha-galactosidase A [Microsporum canis CBS 113480]
  misc_feature (7)..(255): NCBI GI: 255951665 Blast Desc: Pc23g00320 [Penicillium chrysogenum Wisconsin 54-1255] gi|211904220|emb|CAP79526.1| Pc23g00320 [Penicillium chrysogenum Wisconsin 54-1255]
  misc_feature (99)..(195): NCBI GI: 261356123 Blast Desc: conserved [Verticillium albo-atrum VaMs.102]
  misc_feature (25)..(255): NCBI GI: 121708726 Blast Desc: conserved [Aspergillus clavatus NRRL 1] gi|119400376|gb|EAW10802.1| conserved [Aspergillus clavatus NRRL 1]
  misc_feature (9)..(226): NCBI GI: 256726110 Blast Desc: [Nectria haematococca mpVI 77-13-4]
  misc_feature (40)..(255): NCBI GI: 169617574 Blast Desc: SNOG_11969 [Phaeosphaeria nodorum SN15] gi|111059261|gb|EAT80381.1| SNOG_11969 [Phaeosphaeria nodorum SN15]
  misc_feature (11)..(255): NCBI GI: 255952865 Blast Desc: Pc21g01140 [Penicillium chrysogenum Wisconsin 54-1255] gi|211588896|emb|CAP95011.1| Pc21g01140 [Penicillium chrysogenum Wisconsin 54-1255]
  misc_feature: Useful for introducing or modulating the production of volatile compounds
MPATTQTTTTSQVEPLILSMDVVDDDSVESEYRLRIGDDVKYLVVSPGTFDKNTLSSPLKSLSHLPYDEEWTVAHISRHHTTGDLKYSTLNLSMIGIFQWHSKRVNCLELVKTSDLTATTFEALSNFVPSPHLAIAKIARFEWEIPRLERETRAYQLLEGSGIAPRFLAHVHENGRIMGLLLEKVEGRAATASDLGLCEAALGKLHGLGHVHGNLSKRSFLVTGTDVRIIGLGCLRENAGPEAASDELQKLRSILAG

SEQ ID NO: 36742 - DNA, 1762 bp, Muscodor strobelii
  misc_feature: SGI EST ID NO. CUFF.87676.0
  misc_feature: Variant of the nucleotide sequence at SEQ ID NO 36740
tctaacttcaagagcgactacggccgacagccttgaccgatcatggatcccttgccttggctgcgtgacgaggtcgtactcttatagggtgtagatgtctcagcgatatcaccgatatgaacccgtcatagcgctgaccggagcgtgggatgcaaccttatagtcccattggatgcgaccagatttatcaaacaaagcatcccgagtaggtggttcactgatggtcggctgtatacaagtggcgcagcattcctaccaacatacaggagatgtagacctcgacctttgaccaggctgcattccagtcttccttcatatacagccaggctgaggagaaggcggtccaaaacgcattcgatagaggagctcatcgcaacctgcgtccacgttgaatgtgtagacaaagccaccgtctcatagactatctctttcattcttagtcaaggcttcacgtgcctctggatacgtcgtacaagggcaatccttacaaacgacagacgcatcgccccgtcccgtagccgtagaaatagttcaaaatgcctgcaacaacgcagacaacaacgacctcacaagtcgagccgctcatcctttcaatggacgtagtagacgacgactcagtcgaaagcgagtaccgcctgcgcataggagacgacgtgaaatatctcgtcgtctcgcccggcacattcgataaaaacacactgtcctcccccctcaaatccctctctcatctcccatacgacgaagaatggaccgtagcacacatatcacgacaccacacaacaggagacttaaaatactcaacgttaaacctcagcatgatcgggatattccaatggcatagcaaacgagtaaattgtctagagctagtcaaaacgtcagatcttacagcaacgaccttcgaagccctctcaaatttcgtaccctcgcctcatctagcgatcgcaaagatagcgcggttcgagtgggagattcctcgacttgagcgcgagacgagggcatatcaattactagagggttcggggattgcacctcggttcctcgctcatgtccatgagaatggacggatcatgggtctgcttttggagaaggtcgagggccgcgcggcgaccgctagcgatttgggactctgtgaagcggcattgggaaaattacatgggcttgggcatgttcatggaaacttgagcaagcggagcttcttggtcacgggtactgatgtcaggatcattgggcttggatgtttgagggaaaatgctgggccggaggcggctagcgacgaattacagaaattacggtcgatattggcggggtagactgaagataagaagtaggaagcaattccggtcgattttgaatttgctgtgctaaacttaacacagcaggagaatttctcttatagcgatcctggttttatatgtcgtggggcgaatggggttggtcgcaaatatcgacgaatttggtcgttgaaggatggaaaacatcaatgcacggcgatatcggtttcgagataaggcaataagacctgggaattttcctgttaatactaggaaggtcagagactgccggccggtcgtggggcaatggattgtattcaataggtctctattaccatgtagcaatagtccggatatgatactccttgcgatgtaacatcaacttcgcgttctcgccccctactccatgtactcatcaaggcactgcttgaaatgaataccagcataatacatgtatatagatgagagatagaatgacgaaagtcgaagaa

SEQ ID NO: 36743 - DNA, 1602 bp, Muscodor strobelii
  misc_feature: SGI cDNA ID NO. 572739
  misc_feature: Reduced expression when VOC is produced
  misc_feature: Encodes the peptide sequence at SEQ ID NO 36744
atgttgctttgtgtcatcactgtattatctgcactagctgtgtcagggtcatgggcggcacaaaatcctcatggcaaggctaaaaagtattcctttgcgaagagagcatcatcagtacaatcccgctctgcaagaaattccgtgagcgacttcaagcatttgacaaacaagacggcgccatttgctgtgaatggcactggtattccggaagtgaactacaatgtcggcgagtcctatgccggaactcttccaatcacagacaactcgacagatccgaatcagcttttcttctggttcttcccatcaaataattctgccgctgacaatgagatcgtcatctggctgaacggcgggccaggatgcagctcactcgatggattctttcaagagaacggaccattcctctggctctcaggaacatattcgccgatggagaatcccttttcatggcacaagctaaccaatatgatttgggttgaccagcctgttggcgttggtctagggtcgtttgatccggcctatccccgtacgcttaagagcgagaatgatgtggctcgtgactttgccggcttctggaagaacttcatcaacacttttgactttcaaggccgggatgtttacctgacaggcgagagctacgctggtcagtatgtaccatatatcgcatctcactttttagatctgaacgacaccgactactacagcgtgaagggcattcagatcaacgatcctagcatcgccgatgatgaagtttcaattagcgcacctgctacgcagtaccttcataacaatttgaacctattcaatctcaatcagtctaccatcgatactgtcgacaaacaagatgaagcttgcggctatacctcatggctcaatgatgccttgacattcccgcctaaagggaagatcgaacctccgggatgtcgtaagggcgacccatgggacacgattacaaacgctgcgctgtgggtcaatccgtgcttcaacttctatcatgtcacagactactgcccatatctatgggatgagttgggctttccgtcgcttggctggggaccaaacaactactttaaccgaagcgacgtacagacggctcttaatctgaagaaacccgcctcgtacgctatctgcggcgacgatacacttggtcccattggacggtctgatccaagttcttggagcattctccctagtgtcatcgaaagaacaaacaacgtggttgtcgggaacggtaatctggatttcctcctgatcactaacggcactcttgcggctcttaacaatatgacgtttaatggggcccagggtttccaggaagcgcccagcgacaagtttttcgtaccatatagtgatagcttatacaagacatatgagcttatccaatatgaggagaccatccccgctataccagttggacttcctggcggagctggttattatggggtcacgcatacagagcgcggtttgacgtgggtgactgttgatctagctgggcatcaaatcccgcaatatgttcctggtgctggttatcggcagctagagttccttctcgggcgtatcgatagcctgagcgatcccggagagttcacgatacctgtttga

SEQ ID NO: 36744 - protein, 533 aa, Muscodor strobelii
  misc_feature: SGI Peptide ID NO. 572739
  misc_feature (69)..(518): Pfam Id: PF00450 Pfam Desc: Serine carboxypeptidase
  misc_feature (5)..(530): NCBI GI: 40850666 Blast Desc: carboxypeptidase 4 [Aspergillus fumigatus]
  misc_feature (5)..(530): NCBI GI: 119467005 Blast Desc: serine carboxypeptidase (CpdS), [Neosartorya fischeri NRRL 181] gi|119405461|gb|EAW15412.1| serine carboxypeptidase (CpdS), [Neosartorya fischeri NRRL 181]
  misc_feature (24)..(530): NCBI GI: 156046783 Blast Desc: SS1G_09475 [Sclerotinia sclerotiorum 1980] gi|154693870|gb|EDN93608.1| SS1G_09475 [Sclerotinia sclerotiorum 1980]
  misc_feature (23)..(530): NCBI GI: 121704310 Blast Desc: serine carboxypeptidase (CpdS), [Aspergillus clavatus NRRL 1] gi|119398563|gb|EAW08993.1| serine carboxypeptidase (CpdS), [Aspergillus clavatus NRRL 1]
  misc_feature (2)..(530): NCBI GI: 169780436 Blast Desc: [Aspergillus oryzae RIB40] gi|83773422|dbj|BAE63549.1| protein product [Aspergillus oryzae]
  misc_feature (1)..(530): NCBI GI: 255945499 Blast Desc: Pc20g10240 [Penicillium chrysogenum Wisconsin 54-1255] gi|211588252|emb|CAP86353.1| Pc20g10240 [Penicillium chrysogenum Wisconsin 54-1255]
  misc_feature (5)..(499): NCBI GI: 159122746 Blast Desc: serine carboxypeptidase (CpdS), [Aspergillus fumigatus A1163]
  misc_feature (5)..(499): NCBI GI: 70981484 Blast Desc: serine carboxypeptidase (CpdS) [Aspergillus fumigatus Af293] gi|66843893|gb|EAL84234.1| serine carboxypeptidase (CpdS), [Aspergillus fumigatus Af293]
  misc_feature (22)..(530): NCBI GI: 242815829 Blast Desc: serine carboxypeptidase (CpdS), [Talaromyces stipitatus ATCC 10500] gi|218714986|gb|EED14409.1| serine carboxypeptidase (CpdS), [Talaromyces stipitatus ATCC 10500]
  misc_feature (3)..(508): NCBI GI: 145232314 Blast Desc: An02g04690 [Aspergillus niger] gi|134056521|emb|CAK44194.1| protein product [Aspergillus niger]
  misc_feature (76)..(451): SWISSPROT Homolog: EC 3.4.16.6 Carboxypeptidase D
  misc_feature: Useful for introducing or modulating the production of volatile compounds
MLLCVITVLSALAVSGSWAAQNPHGKAKKYSFAKRASSVQSRSARNSVSDFKHLTNKTAPFAVNGTGIPEVNYNVGESYAGTLPITDNSTDPNQLFFWFFPSNNSAADNEIVIWLNGGPGCSSLDGFFQENGPFLWLSGTYSPMENPFSWHKLTNMIWVDQPVGVGLGSFDPAYPRTLKSENDVARDFAGFWKNFINTFDFQGRDVYLTGESYAGQYVPYIASHFLDLNDTDYYSVKGIQINDPSIADDEVSISAPATQYLHNNLNLFNLNQSTIDTVDKQDEACGYTSWLNDALTFPPKGKIEPPGCRKGDPWDTITNAALWVNPCFNFYHVTDYCPYLWDELGFPSLGWGPNNYFNRSDVQTALNLKKPASYAICGDDTLGPIGRSDPSSWSILPSVIERTNNVVVGNGNLDFLLITNGTLAALNNMTFNGAQGFQEAPSDKFFVPYSDSLYKTYELIQYEETIPAIPVGLPGGAGYYGVTHTERGLTWVTVDLAGHQIPQYVPGAGYRQLEFLLGRIDSLSDPGEFTIPV

SEQ ID NO: 36745 - DNA, 2823 bp, Muscodor strobelii
  misc_feature: SGI EST ID NO. CUFF.87714.1
  misc_feature: Variant of the nucleotide sequence at SEQ ID NO 36743
cggtaagctgtgttgctgctacaatgctacctaataagtgtggtgtgacgtcttcaatgcatttaacagggcctgagctcaacgatggcgccagcaaatgactcgatgaggaggaagtttgtaggagcacaacgcttcgtgaagtagagtacatatagatagctgacacaggagaagggctatcattctcaggtgttgttgtacttcctagactcttattcagctcagaataattgctgtcgtcgaccatgttgctttgtgtcatcactgtattatctgcactagctgtgtcagggtcatgggcggcacaaaatcctcatggcaaggctaaaaagtattcctttgcgaagagagcatcatcagtacaatcccgctctgcaagaaattccgtgagcgacttcaagcatttgacaaacaagacggcgccatttgctgtgaatggcactggtattccggaagtgaactacaatgtcggcgagtcctatgccggaactcttccaatcacagacaactcgacagatccgaatcagcttttcttctggttcttcccatcaaataattctgccgctgacaatgagatcgtcatctggctgaacggcgggccaggatgcagctcactcgatggattctttcaagagaacggaccattcctctggctctcaggaacatattcgccgatggagaatcccttttcatggcacaagctaaccaatatgatttgggttgaccagcctgttggcgttggtctagggtcgtttgatccggcctatccccgtacgcttaagagcgagaatgatgtggctcgtgactttgccggcttctggaagaacttcatcaacacttttgactttcaaggccgggatgtttacctgacaggcgagagctacgctggtcagtatgtaccatatatcgcatctcactttttagatctgaacgacaccgactactacagcgtgaagggcattcagatcaacgatcctagcatcgccgatgatgaagtttcaattagcgcacctgctacgcagtaccttcataacaatttgaacctattcaatctcaatcagtctaccatcgatactgtcgacaaacaagatgaagcttgcggctatacctcatggctcaatgatgccttgacattcccgcctaaagggaagatcgaacctccgggatgtcgtaagggcgacccatgggacacgattacaaacgctgcgctgtgggtcaatccgtgcttcaacttctatcatgtcacagactactgcccatatctatgggatgagttgggctttccgtcgcttggctggggaccaaacaactactttaaccgaagcgacgtacagacggctcttaatctgaagaaacccgcctcgtacgctatctgcggcgacgatacacttggtcccattggacggtctgatccaagttcttggagcattctccctagtgtcatcgaaagaacaaacaacgtggttgtcgggaacggtaatctggatttcctcctgatcactaacggcactcttgcggctcttaacaatatgacgtttaatggggcccagggtttccaggaagcgcccagcgacaagtttttcgtaccatatagtgatagcttatacaagacatatgagcttatccaatatgaggagaccatccccgctataccagttggacttcctggcggagctggttattatggggtcacgcatacagagcgcggtttgacgtgggtgactgttgatctagctgggcatcaaatcccgcaatatgttcctggtgctggttatcggcagctagagttccttctcgggcgtatcgatagcctgagcgatcccggagagttcacgatacctgtttgatcaggtcaagtggacttgggaaggaaattaaagtgatcgcatgcgatatgcatccggacgaaggggactggagagaggaaagctattggtgcgtgtacgtagatggatctatgtaaaaatcgcaaaatctgcctcggtacccctcaagtgccacttatccatcgtgaaccgcagctgacgtgagccgggtctataacttgacctcaagctgcgaggcttgtgagacaccaagtaatttattacagctgtgcgacttgacagcctgtgaactgatctagccgaaacgcaagacaatttccaatcgttgaacgaagattttcgtgggactgttaaacgtgtcgaaacaaatctgtgtctactctgggcatgggcaggaggtgaaagcacgatatgaagaagatacacaggagtcagtccgagatccacgcagagcctggtgggccgaagtctgatagtgcctgtgcctaaaaccaccagggtggggtttcattcgtaccacgtggagttatggataaaattgcagaaggatctttcacgacagcctaccagacaaacatctttttcgccaagaatcggtgactcgctcaaagtccttaaacatcatacgacgaagttccgccagcccgtttcgcatatgcgttgtcaacctaggtaaccaagctgaatggcgctatctagatctctagaagagcgtgacctgtaactaagtggtagttcgtagatcacaataaggatttcataaactaaagattccaagcgtgtaatggggaggtgacctacttattttggtgaactatcccgagatatccgatctgaggatccgacagaatgggaggaggattcgcaactagtgagaacgccaagactagcttttcctaagaatcaaaggcgcagctacccgccagcacgtttctactgatgtgaaacgtgtatgaacgccgcagctgaagcaaaagcaggtcacatttgcctg

SEQ ID NO: 36746 - DNA, 1680 bp, Muscodor strobelii
  misc_feature: SGI cDNA ID NO. 572740
  misc_feature: Encodes the peptide sequence at SEQ ID NO 36747
atgtatcccttggatacctcgggagctgttacttcagaagggatccaaatgcccccaacgctgacgggagcttgcacagagttaaaacgtctccagcatggagatggcactggtctcattgtggtttgcacgcctatgcctcggaagccgcaatccttagtcggcagcgacgactcgctgttccatcggtttctgttctcaagagcactgaaggaagaggagattttcgaagcggccctcgttgcctttttgttcttagcaaagacgtactgtcactttggaatcggcgacctataccaattagtttcatctgtgacggaccgcgaagagaaagcaatccacttgagtgaaacttacgctccccgactctccttcaaccgatgcccagattccgaactctgcaacgaactcagtaccgacgaaactcacctttggacttccgttccagcctccgcctttatacctcccatggccatcgagtcttcaaccaagacgatgtatttcccaaaatatcttcctgatatttccactaaattctgggcaatggaacgcaaggggccgcatggaaaccggccaacttcacaatcggtttcagcctgggccagccaaaggcctaccgatcagcagaagtggacatgtatagtcgccagtgaggatccagccatggctgatatttatcaccgccgattacgtgaacaatttggaagtgataatgatatcacccgtaccaagcttgcctctcattggattgagtgtatccatcttctttaccacataggactcaataatcaacggatcatcgtactagaaagctttcaacgacttaaagaccttaagtatggtaataccgtacggcctgtgctaggtgctgcgcacgcttgtttgacgtatgcgaatcatttggaatatcaagcagaacatctagtatcaatgcgagctgatatagggagatttcccgatccctggcgcattgctcaaccactgtgggtaaaggcaatggagaagtcataccgagcacttatcccacaaattaagaatgcagagcgtgaggctcgcaagaccagagcgctagctatattcggaatgaacactcaggaaatcaacggagccgcttggtcaatcaactactatatcattgcagtagtcccccttactgttacgctggtcttgttgccatttttcctatttgaactcttggaccttagtgttcgccttgtcgctgctatttcaggtcgctgggcgatcttcactagagtggcaacgatctcggtgcttttcctcgcgcatcttagcacagacatctacatctggacacaccgtaatactcgtagtgtttccggcacttgggcctttactattgctatcattttcgtccctgtattacatttatatcctcttttatacaccctgagtctctttctgcgggttcagttacccaagcggttggcgagcaatgagccattatcctacaaaaactcacctgctgtcattctcaacccactcttgaattgggagtatggggcatttgttgcaactctggtgccgtactttgtactggaaaacctctggtttgctcctgctcctggctttgaactaattcctctgggattctatcttgtcgtgttcttaatattaaaagttcgggctcgaggtcatagaccagaagttacaggaggataa

SEQ ID NO: 36747 - protein, 559 aa, Muscodor strobelii
  misc_feature: SGI Peptide ID NO. 572740
MYPLDTSGAVTSEGIQMPPTLTGACTELKRLQHGDGTGLIVVCTPMPRKPQSLVGSDDSLFHRFLFSRALKEEEIFEAALVAFLFLAKTYCHFGIGDLYQLVSSVTDREEKAIHLSETYAPRLSFNRCPDSELCNELSTDETHLWTSVPASAFIPPMAIESSTKTMYFPKYLPDISTKFWAMERKGPHGNRPTSQSVSAWASQRPTDQQKWTCIVASEDPAMADIYHRRLREQFGSDNDITRTKLASHWIECIHLLYHIGLNNQRIIVLESFQRLKDLKYGNTVRPVLGAAHACLTYANHLEYQAEHLVSMRADIGRFPDPWRIAQPLWVKAMEKSYRALIPQIKNAEREARKTRALAIFGMNTQEINGAAWSINYYIIAVVPLTVTLVLLPFFLFELLDLSVRLVAAISGRWAIFTRVATISVLFLAHLSTDIYIWTHRNTRSVSGTWAFTIAIIFVPVLHLYPLLYTLSLFLRVQLPKRLASNEPLSYKNSPAVILNPLLNWEYGAFVATLVPYFVLENLWFAPAPGFELIPLGFYLVVFLILKVRARGHRPEVTGG

SEQ ID NO: 36748 - DNA, 1397 bp, Muscodor strobelii
  misc_feature: SGI EST ID NO. CUFF.87679.0
  misc_feature: Variant of the nucleotide sequence at SEQ ID NO 36746
caggcagcaggaattgtgccgtttgccgccgttttcgcccgtttcacccgatcaaccaccgtctctcagatctcttcagccacttcgacctgccacaccttctccttcgggtctaggccatcacttttgcattgtcctcccttctgcaccaaggttctgcaagtcgactcaacggatttctcgggatagtcccagcaatgtctgttgcaacccacccttccccggttctgggactatcaagtaaaggcgacgccgaggtttcctttgcgctgaatgatttcaaccaactcttgaaagcttattcctgcaagttccgagagcgcatgcctcaatccaatctgcgaaacatgatgcaatacgtaattactccgttttggccgtcagcaactcacaaatttgctgctatattcggaatgaacactcaggaaatcaacggagccgcttggtcaatcaactactatatcattgcagtagtcccccttactgttacgctggtcttgttgccatttttcctatttgaactcttggaccttagtgttcgccttgtcgctgctatttcaggtcgctgggcgatcttcactagagtggcaacgatctcggtgcttttcctcgcgcatcttagcacagacatctacatctggacacaccgtaatactcgtagtgtttccggcacttgggcctttactattgctatcattttcgtccctgtattacatttatatcctcttttatacaccctgagtctctttctgcgggttcagttacccaagcggttggcgagcaatgagccattatcctacaaaaactcacctgctgtcattctcaacccactcttgaattgggagtatggggcatttgttgcaactctggtgccgtactttgtactggaaaacctctggtttgctcctgctcctggctttgaactaattcctctgggattctatcttgtcgtgttcttaatattaaaagttcgggctcgaggtcatagaccagaagttacaggaggataatgtggtatgtatgtctgtataagttttgtagaagaactaatgcgtgacaaactaatgaaatgcaattcaatatcatgaaatgatatttctactggcgcgaggtagtgcgaagctgtactcgggtcgctcggtgccagtctctcagtctcctcagtagcaaacatagattcatcacattctgcattcttgtatgaatatagagtttccgtcacctataaaaggcggacaagtcttggtgacagcttttcttgatggttccacgttcacgtatcgtgcatcataccaagcttcatcacttaagcttgtaggcgcggccagcaaaatatttagtgataaacgtgcgtcccacaagctacctgaaggaacagttcgtcttgcatatcaaag

SEQ ID NO: 36749 - DNA, 2565 bp, Muscodor strobelii
  misc_feature: SGI cDNA ID NO. 572741
  misc_feature: Reduced expression when VOC is produced
  misc_feature: Encodes the peptide sequence at SEQ ID NO 36750
atggccaccaccaccacccgcaagggccccggcctcgaagccagcacctccagtctcacctcgctcgacaacgacaactcggtgccctcgagcgcaaacctcgacacccagaactccaagtggacctccgcctcgacctcgttgaccgcctcgcccgcccagtccagagacacttcgccgacgagaaccaccgccgctgctaagtccggaagagcgagtcggacatccactccctctgcccagtctcggaagaacagcggccacgacaacacgagtcccgtgcgaacgagatctaatgtcactcccgcgcctgccactccccgacaacaactatcctccgccaacacaccaaatctaccgcctccatcgtccagcgagcccgtgctgcgagcgccagtgcccaagaagccctcgacagtccaagacgcatccaaggattcgccccgttggcccatctccccacgactgaagtcgcctccgcccaactttggcagaccgatcgctgcctcctctgctcgcaagaccgagcccgaacctcccgtcatcaatgtccagcgcgccacgccatcgccccatgtggactcgaccccccagcctgcgtcggacaacgaggtggaagatccccatctgtcatctggcataaggactccaggccgcggtccaagcagtggttcctcgatgttggagacggtgcaggaagtgagccagcccaacacccctaggccggggctgagcgcggcgatagaaaaactggaagagacagcagctactcagcgttcggcgtcgactaagaacaatgacacctcaaccacgagttccatcaaggccagccagagtacgactaacagtgagagcgggagcgacagtggaagtgcgaagcccagcaccaggcgaaccagtgccgcggctccaccaccgttgctccatagcaggcagtctagtaccgcgcttaagttcaccggccgtggacagacctcaggcgagagttcatctaggaacatgactgtcgaaaccgaggaagtcaagaatatgccacagctctcgttgaaccccgacattggcagacagggaatcaacggtagcctgcggactcgacccagctcggaaactatcaaacctaagaaggaaaagaagaagcatactaggaagactacctcggttccttcaggcaatgcatcctccaaagcagatatattcgaagccaaagtggccagcgccgtagaagaagctaactcatctgactcggatgaaacgtttgtctacgattccaatccgccagatgcggatcgccctcgccgatttcattcgcgcacgcctagcgcgacatcgatggccagccagctagaccgcaacggcttgagatccattcatgctgtcatggagggtggcgcctataatcatgccgccaagaagaacatgaagttctctaacacgtataccagtaatggaaatgagagtgtccaaggcgacgacgacggtcggggcacagctcgaagtaacgtaggctccggacggggaactgcgcgccatcaccatcatgttggtcgatggggccggaataatggaaatggacatccttcacttttcgataacgaatccccttttccgagtgctcgaaacaagttctcgaatagtaatctgagacaaccgtcgaaccctcccagccctcgattcagtacaaatcctaacagaaactggctatccggcgccaaacgtcaaattgcagtatccaacggctacgatatggacgacacgaccacgggtgccgacgacgagcaaacccctctgctaccccctggctcagttcggtccgcgcgttccaacagagctaggcggaatgcgcccttgagagatcttgagtcacgagcttatcgccagaacccttctttcctgaaccgtttcgccagttgtctagttctcaccgtcatgctcttacttgtcattacgggagccattggtttcatgttcacaacatctcaacctttgaccgatgttaacctcttgaagatcggaaatgtgcttgccagcgagcaggaattaatgttcgatctcagcgtggaagcacacaatcccaacgtcgtggtcgtaatgatcgattccgcggacatcgaggtgtttgcgaagtctccgcacgctggcaatgactctgaatggtggcgtaatccacatggggacgactctttcaccgccactggttcgggacacgacgaggacgattcgactgacgacgaaagttcaccaaacatgcgtcttggcaatatcgtgtcgttcgacagtcctttaacttacgaaggcacattttttcagagtggcctcgcaacttcaacaggcgagctacgtctccctcggcccggaaatactactgatagtggtacggagcgatgggaacgtattttggctgacgagtttactctcatcgtcaaaggcgttctcaagtacaccttgccattgagccagaaagtccgaaaggtaccgatatcgggcaagactgtggtcaagcctaactctgccaacgacccgacactccgaccaaacagtaccgatcccgagatcggtatatactaa

SEQ ID NO: 36750 - protein, 854 aa, Muscodor strobelii
  misc_feature: SGI Peptide ID NO. 572741
  misc_feature (54)..(853): NCBI GI: 171694419 Blast Desc: protein product [Podospora anserina] gi|170947158|emb|CAP73963.1| protein product [Podospora anserina]
  misc_feature (47)..(851): NCBI GI: 46137455 Blast Desc: FG10243.1 [Gibberella zeae PH-1]
  misc_feature (36)..(847): NCBI GI: 256731808 Blast Desc: NECHADRAFT_93717 [Nectria haematococca mpVI 77-13-4]
  misc_feature (42)..(840): NCBI GI: 156055300 Blast Desc: SS1G_05001 [Sclerotinia sclerotiorum 1980] gi|154702786|gb|EDO02525.1| SS1G_05001 [Sclerotinia sclerotiorum 1980]
  misc_feature (392)..(796): NCBI GI: 261351864 Blast Desc: conserved [Verticillium albo-atrum VaMs.102]
  misc_feature (392)..(847): NCBI GI: 116197641 Blast Desc: CHGG_06976 [Chaetomium globosum CBS 148.51] gi|88178255|gb|EAQ85723.1| CHGG_06976 [Chaetomium globosum CBS 148.51]
  misc_feature (334)..(840): NCBI GI: 154297925 Blast Desc: BC1G_12115 [Botryotinia fuckeliana B05.10] gi|150858242|gb|EDN33434.1| BC1G_12115 [Botryotinia fuckeliana B05.10]
  misc_feature (392)..(843): NCBI GI: 85099419 Blast Desc: NCU08961 [Neurospora crassa OR74A] gi|28922307|gb|EAA31547.1| [Neurospora crassa OR74A]
  misc_feature (56)..(851): NCBI GI: 226293749 Blast Desc: conserved [Paracoccidioides brasiliensis Pb18]
  misc_feature (56)..(851): NCBI GI: 225678911 Blast Desc: conserved [Paracoccidioides brasiliensis Pb03]
  misc_feature: Useful for introducing or modulating the production of volatile compounds
MATTTTRKGPGLEASTSSLTSLDNDNSVPSSANLDTQNSKWTSASTSLTASPAQSRDTSPTRTTAAAKSGRASRTSTPSAQSRKNSGHDNTSPVRTRSNVTPAPATPRQQLSSANTPNLPPPSSSEPVLRAPVPKKPSTVQDASKDSPRWPISPRLKSPPPNFGRPIAASSARKTEPEPPVINVQRATPSPHVDSTPQPASDNEVEDPHLSSGIRTPGRGPSSGSSMLETVQEVSQPNTPRPGLSAAIEKLEETAATQRSASTKNNDTSTTSSIKASQSTTNSESGSDSGSAKPSTRRTSAAAPPPLLHSRQSSTALKFTGRGQTSGESSSRNMTVETEEVKNMPQLSLNPDIGRQGINGSLRTRPSSETIKPKKEKKKHTRKTTSVPSGNASSKADIFEAKVASAVEEANSSDSDETFVYDSNPPDADRPRRFHSRTPSATSMASQLDRNGLRSIHAVMEGGAYNHAAKKNMKFSNTYTSNGNESVQGDDDGRGTARSNVGSGRGTARHHHHVGRWGRNNGNGHPSLFDNESPFPSARNKFSNSNLRQPSNPPSPRFSTNPNRNWLSGAKRQIAVSNGYDMDDTTTGADDEQTPLLPPGSVRSARSNRARRNAPLRDLESRAYRQNPSFLNRFASCLVLTVMLLLVITGAIGFMFTTSQPLTDVNLLKIGNVLASEQELMFDLSVEAHNPNVVVVMIDSADIEVFAKSPHAGNDSEWWRNPHGDDSFTATGSGHDEDDSTDDESSPNMRLGNIVSFDSPLTYEGTFFQSGLATSTGELRLPRPGNTTDSGTERWERILADEFTLIVKGVLKYTLPLSQKVRKVPISGKTVVKPNSANDPTLRPNSTDPEIGIY

SEQ ID NO: 36751 - DNA, 4236 bp, Muscodor strobelii
  misc_feature: SGI EST ID NO. CUFF.87733.1
  misc_feature: Variant of the nucleotide sequence at SEQ ID NO 36749
cgcccattcaaccccgtcatcccatgctcccatcttcccagcgatcgattgttgtgttggacacactacccgaatcccctggatgcacgcgacagacaaacaattctctctcattctcattttctcattttctcttgctcgacctcgtccgtctggtctcagctcgacggcaataagcagcttccactcggtccggcactgacttgaactctgtatctacttcaacatacaccatttacagtacacattgcgcagttctcattccgtgccacgctacatcgcatccctgaggcgtctccattgaaaaaaacactggcacactggcagacactacagtacacgccccaaaacagcatagataatctgcacgacgcattgtgtcatccaatccagctgcaattgccagcgaagaggcccgtcccaaagattattacttcctgcttgcatcaacccccagactctcgagccagtcaacatcttgccctccgatcacttctgcatctcttgtctggggaacattggcacattggcacgttgacacaggtcacctttcgattgtcgtatcgtgcgtgggggacgagtgctgcaccagtagcaggagcagcagcatatcagccagtaccagacagcatcagacagcacgaggagccgtaacagcgacacgacagcatcgcaacctaaccaacctcaacagccagtccgggttggcctcaggtcgcatgtccgcctccttgccgtagtgtacgacgatggtcattcctgacgtgagcacacccggcatccactccagctagtccccatcccaccgacggcctgccctctcacagcatcctgaggtccgctgctccacgtagccatggccaccaccaccacccgcaagggccccggcctcgaagccagcacctccagtctcacctcgctcgacaacgacaactcggtgccctcgagcgcaaacctcgacacccagaactccaagtggacctccgcctcgacctcgttgaccgcctcgcccgcccagtccagagacacttcgccgacgagaaccaccgccgctgctaagtccggaagagcgagtcggacatccactccctctgcccagtctcggaagaacagcggccacgacaacacgagtcccgtgcgaacgagatctaatgtcactcccgcgcctgccactccccgacaacaactatcctccgccaacacaccaaatctaccgcctccatcgtccagcgagcccgtgctgcgagcgccagtgcccaagaagccctcgacagtccaagacgcatccaaggattcgccccgttggcccatctccccacgactgaagtcgcctccgcccaactttggcagaccgatcgctgcctcctctgctcgcaagaccgagcccgaacctcccgtcatcaatgtccagcgcgccacgccatcgccccatgtggactcgaccccccagcctgcgtcggacaacgaggtggaagatccccatctgtcatctggcataaggactccaggccgcggtccaagcagtggttcctcgatgttggagacggtgcaggaagtgagccagcccaacacccctaggccggggctgagcgcggcgatagaaaaactggaagagacagcagctactcagcgttcggcgtcgactaagaacaatgacacctcaaccacgagttccatcaaggccagccagagtacgactaacagtgagagcgggagcgacagtggaagtgcgaagcccagcaccaggcgaaccagtgccgcggctccaccaccgttgctccatagcaggcagtctagtaccgcgcttaagttcaccggccgtggacagacctcaggcgagagttcatctaggaacatgactgtcgaaaccgaggaagtcaagaatatgccacagctctcgttgaaccccgacattggcagacagggaatcaacggtagcctgcggactcgacccagctcggaaactatcaaacctaagaaggaaaagaagaagcatactaggaagactacctcggttccttcaggcaatgcatcctccaaagcagatatattcgaagccaaagtggccagcgccgtagaagaagctaactcatctgactcggatgaaacgtttgtctacgattccaatccgccagatgcggatcgccctcgccgatttcattcgcgcacgcctagcgcgacatcgatggccagccagctagaccgcaacggcttgagatccattcatgctgtcatggagggtggcgcctataatcatgccgccaagaagaacatgaagttctctaacacgtataccagtaatggaaatgagagtgtccaaggcgacgacgacggtcggggcacagctcgaagtaacgtaggctccggacggggaactgcgcgccatcaccatcatgttggtcgatggggccggaataatggaaatggacatccttcacttttcgataacgaatccccttttccgagtgctcgaaacaagttctcgaatagtaatctgagacaaccgtcgaaccctcccagccctcgattcagtacaaatcctaacagaaactggctatccggcgccaaacgtcaaattgcagtatccaacggctacgatatggacgacacgaccacgggtgccgacgacgagcaaacccctctgctaccccctggctcagttcggtccgcgcgttccaacagagctaggcggaatgcgcccttgagagatcttgagtcacgagcttatcgccagaacccttctttcctgaaccgtttcgccagttgtctagttctcaccgtcatgctcttacttgtcattacgggagccattggtttcatgttcacaacatctcaacctttgaccgatgttaacctcttgaagatcggaaatgtgcttgccagcgagcaggaattaatgttcgatctcagcgtggaagcacacaatcccaacgtcgtggtcgtaatgatcgattccgcggacatcgaggtgtttgcgaagtctccgcacgctggcaatgactctgaatggtggcgtaatccacatggggacgactctttcaccgccactggttcgggacacgacgaggacgattcgactgacgacgaaagttcaccaaacatgcgtcttggcaatatcgtgtcgttcgacagtcctttaacttacgaaggcacattttttcagagtggcctcgcaacttcaacaggcgagctacgtctccctcggcccggaaatactactgatagtggtacggagcgatgggaacgtattttggctgacgagtttactctcatcgtcaaaggcgttctcaagtacaccttgccattgagccagaaagtccgaaaggtaccgatatcgggcaagactgtggtcaagcctaactctgccaacgacccgacactccgaccaaacagtaccgatcccgagatcggtatatactaaaacccacacagcttgggggcagcctagccctatctacacattttctatgtgcatttactatgattctgtataatgacgagagtatgacctagcattctgggagcctctggcgtttgatttagccttgccgactggacaccgcgaaattgctagagttcgtggttgcaggctggagtcatttgacttttattttatgtttttcgttttgcttttgccggtccagtgtgttccaatagttcaaaagaatggggtgcctgagaaagagagaagtaacatagccacggcgttatttgcacattatattacctctgcgagctcaacgctttctacgcgagggaagagaaaaagactgctgattggagtgacgattgcgactggaagaatcatttagaggggtgtatggcaactgcaacaacccaataccttatttttattacctaggatgacatgagaactattacccagatacccccagacagagaatgaggaaaagaatttggcgcatttggtgctgttgttgatttttgtgttgttgggtgtaattgtatgctttgcgctttgcgatgcatgatggatggactgttaaaatggacgggaatagtggcatagattgggaaaatctttctgggacttcgaatgaaagtgctgatgaatggtggaaacaaggcagaatgggtgcgcgggagagatgagaagggcagaagaagaggggatagagaaggggaagggtgaggacgtgtagattagtgtagatattgtgtgaaaacttacctatctacctaacctacctgcattgatatatatatatatatggc

SEQ ID NO: 36752 - DNA, 2781 bp, Muscodor strobelii
  misc_feature: SGI cDNA ID NO. 572742
  misc_feature: Reduced expression when VOC is produced
  misc_feature: Encodes the peptide sequence at SEQ ID NO 36753
atggccaccaccaccacccgcaagggccccggcctcgaagccagcacctccagtctcacctcgctcgacaacgacaactcggtgccctcgagcgcaaacctcgacacccagaactccaagtggacctccgcctcgacctcgttgaccgcctcgcccgcccagtccagagacacttcgccgacgagaaccaccgccgctgctaagtccggaagagcgagtcggacatccactccctctgcccagtctcggaagaacagcggccacgacaacacgagtcccgtgcgaacgagatctaatgtcactcccgcgcctgccactccccgacaacaactatcctccgccaacacaccaaatctaccgcctccatcgtccagcgagcccgtgctgcgagcgccagtgcccaagaagccctcgacagtccaagacgcatccaaggattcgccccgttggcccatctccccacgactgaagtcgcctccgcccaactttggcagaccgatcgctgcctcctctgctcgcaagaccgagcccgaacctcccgtcatcaatgtccagcgcgccacgccatcgccccatgtggactcgaccccccagcctgcgtcggacaacgaggtggaagatccccatctgtcatctggcataaggactccaggccgcggtccaagcagtggttcctcgatgttggagacggtgcaggaagtgagccagcccaacacccctaggccggggctgagcgcggcgatagaaaaactggaagagacagcagctactcagcgttcggcgtcgactaagaacaatgacacctcaaccacgagttccatcaaggccagccagagtacgactaacagtgagagcgggagcgacagtggaagtgcgaagcccagcaccaggcgaaccagtgccgcggctccaccaccgttgctccatagcaggcagtctagtaccgcgcttaagttcaccggccgtggacagacctcaggcgagagttcatctaggaacatgactgtcgaaaccgaggaagtcaagaatatgccacagctctcgttgaaccccgacattggcagacagggaatcaacggtagcctgcggactcgacccagctcggaaactatcaaacctaagaaggaaaagaagaagcatactaggaagactacctcggttccttcaggcaatggtgagacagaccacttaataccgaaaccaaagctacgacatagttggtcgacaaggtcaatctcttcggcgatggctcggtcgccaaactctcgcggtcaaggatcgtggggtgaaaaggggcgctacagtcctcccgggcagcggttcaagcggccgcaagccaaaaggaccccaagtattgtgaccagtttgctaactcgaggtcctcgtccagcatcctccaaagcagatatattcgaagccaaagtggccagcgccgtagaagaagctaactcatctgactcggatgaaacgtttgtctacgattccaatccgccagatgcggatcgccctcgccgatttcattcgcgcacgcctagcgcgacatcgatggccagccagctagaccgcaacggcttgagatccattcatgctgtcatggagggtggcgcctataatcatgccgccaagaagaacatgaagttctctaacacgtataccagtaatggaaatgagagtgtccaaggcgacgacgacggtcggggcacagctcgaagtaacgtaggctccggacggggaactgcgcgccatcaccatcatgttggtcgatggggccggaataatggaaatggacatccttcacttttcgataacgaatccccttttccgagtgctcgaaacaagttctcgaatagtaatctgagacaaccgtcgaaccctcccagccctcgattcagtacaaatcctaacagaaactggctatccggcgccaaacgtcaaattgcagtatccaacggctacgatatggacgacacgaccacgggtgccgacgacgagcaaacccctctgctaccccctggctcagttcggtccgcgcgttccaacagagctaggcggaatgcgcccttgagagatcttgagtcacgagcttatcgccagaacccttctttcctgaaccgtttcgccagttgtctagttctcaccgtcatgctcttacttgtcattacgggagccattggtttcatgttcacaacatctcaacctttgaccgatgttaacctcttgaagatcggaaatgtgcttgccagcgagcaggaattaatgttcgatctcagcgtggaagcacacaatcccaacgtcgtggtcgtaatgatcgattccgcggacatcgaggtgtttgcgaagtctccgcacgctggcaatgactctgaatggtggcgtaatccacatggggacgactctttcaccgccactggttcgggacacgacgaggacgattcgactgacgacgaaagttcaccaaacatgcgtcttggcaatatcgtgtcgttcgacagtcctttaacttacgaaggcacattttttcagagtggcctcgcaacttcaacaggcgagctacgtctccctcggcccggaaatactactgatagtggtacggagcgatgggaacgtattttggctgacgagtttactctcatcgtcaaaggcgttctcaagtacaccttgccattgagccagaaagtccgaaaggtaccgatatcgggcaagactgtggtcaagcctaactctgccaacgacccgacactccgaccaaacagtaccgatcccgagatcggtatatactaa

SEQ ID NO: 36753 - protein, 926 aa, Muscodor strobelii
  misc_feature: SGI Peptide ID NO. 572742
  misc_feature (55)..(919): NCBI GI: 116197641 Blast Desc: CHGG_06976 [Chaetomium globosum CBS 148.51] gi|88178255|gb|EAQ85723.1| CHGG_06976 [Chaetomium globosum CBS 148.51]
  misc_feature (51)..(915): NCBI GI: 85099419 Blast Desc: NCU08961 [Neurospora crassa OR74A] gi|28922307|gb|EAA31547.1| [Neurospora crassa OR74A]
  misc_feature (464)..(925): NCBI GI: 171694419 Blast Desc: protein product [Podospora anserina] gi|170947158|emb|CAP73963.1| protein product [Podospora anserina]
  misc_feature (334)..(868): NCBI GI: 261351864 Blast Desc: conserved [Verticillium albo-atrum VaMs.102]
  misc_feature (464)..(919): NCBI GI: 256731808 Blast Desc: NECHADRAFT_93717 [Nectria haematococca mpVI 77-13-4]
  misc_feature (464)..(923): NCBI GI: 46137455 Blast Desc: FG10243.1 [Gibberella zeae PH-1]
  misc_feature (440)..(912): NCBI GI: 156055300 Blast Desc: SS1G_05001 [Sclerotinia sclerotiorum 1980] gi|154702786|gb|EDO02525.1| SS1G_05001 [Sclerotinia sclerotiorum 1980]
  misc_feature (440)..(912): NCBI GI: 154297925 Blast Desc: BC1G_12115 [Botryotinia fuckeliana B05.10] gi|150858242|gb|EDN33434.1| BC1G_12115 [Botryotinia fuckeliana B05.10]
  misc_feature (111)..(907): NCBI GI: 189192504 Blast Desc: conserved [Pyrenophora tritici-repentis Pt-1C-BFP] gi|187974197|gb|EDU41696.1| conserved [Pyrenophora tritici-repentis Pt-1C-BFP]
  misc_feature (469)..(925): NCBI GI: 115442926 Blast Desc: conserved [Aspergillus terreus NIH2624] gi|114188139|gb|EAU29839.1| conserved [Aspergillus terreus NIH2624]
  misc_feature: Useful for introducing or modulating the production of volatile compounds
MATTTTRKGPGLEASTSSLTSLDNDNSVPSSANLDTQNSKWTSASTSLTASPAQSRDTSPTRTTAAAKSGRASRTSTPSAQSRKNSGHDNTSPVRTRSNVTPAPATPRQQLSSANTPNLPPPSSSEPVLRAPVPKKPSTVQDASKDSPRWPISPRLKSPPPNFGRPIAASSARKTEPEPPVINVQRATPSPHVDSTPQPASDNEVEDPHLSSGIRTPGRGPSSGSSMLETVQEVSQPNTPRPGLSAAIEKLEETAATQRSASTKNNDTSTTSSIKASQSTTNSESGSDSGSAKPSTRRTSAAAPPPLLHSRQSSTALKFTGRGQTSGESSSRNMTVETEEVKNMPQLSLNPDIGRQGINGSLRTRPSSETIKPKKEKKKHTRKTTSVPSGNGETDHLIPKPKLRHSWSTRSISSAMARSPNSRGQGSWGEKGRYSPPGQRFKRPQAKRTPSIVTSLLTRGPRPASSKADIFEAKVASAVEEANSSDSDETFVYDSNPPDADRPRRFHSRTPSATSMASQLDRNGLRSIHAVMEGGAYNHAAKKNMKFSNTYTSNGNESVQGDDDGRGTARSNVGSGRGTARHHHHVGRWGRNNGNGHPSLFDNESPFPSARNKFSNSNLRQPSNPPSPRFSTNPNRNWLSGAKRQIAVSNGYDMDDTTTGADDEQTPLLPPGSVRSARSNRARRNAPLRDLESRAYRQNPSFLNRFASCLVLTVMLLLVITGAIGFMFTTSQPLTDVNLLKIGNVLASEQELMFDLSVEAHNPNVVVVMIDSADIEVFAKSPHAGNDSEWWRNPHGDDSFTATGSGHDEDDSTDDESSPNMRLGNIVSFDSPLTYEGTFFQSGLATSTGELRLPRPGNTTDSGTERWERILADEFTLIVKGVLKYTLPLSQKVRKVPISGKTVVKPNSANDPTLRPNSTDPEIGIY

SEQ ID NO: 36754 - DNA, 4452 bp, Muscodor strobelii
  misc_feature: SGI EST ID NO. CUFF.87733.0
  misc_feature: Variant of the nucleotide sequence at SEQ ID NO 36752
cgcccattcaaccccgtcatcccatgctcccatcttcccagcgatcgattgttgtgttggacacactacccgaatcccctggatgcacgcgacagacaaacaattctctctcattctcattttctcattttctcttgctcgacctcgtccgtctggtctcagctcgacggcaataagcagcttccactcggtccggcactgacttgaactctgtatctacttcaacatacaccatttacagtacacattgcgcagttctcattccgtgccacgctacatcgcatccctgaggcgtctccattgaaaaaaacactggcacactggcagacactacagtacacgccccaaaacagcatagataatctgcacgacgcattgtgtcatccaatccagctgcaattgccagcgaagaggcccgtcccaaagattattacttcctgcttgcatcaacccccagactctcgagccagtcaacatcttgccctccgatcacttctgcatctcttgtctggggaacattggcacattggcacgttgacacaggtcacctttcgattgtcgtatcgtgcgtgggggacgagtgctgcaccagtagcaggagcagcagcatatcagccagtaccagacagcatcagacagcacgaggagccgtaacagcgacacgacagcatcgcaacctaaccaacctcaacagccagtccgggttggcctcaggtcgcatgtccgcctccttgccgtagtgtacgacgatggtcattcctgacgtgagcacacccggcatccactccagctagtccccatcccaccgacggcctgccctctcacagcatcctgaggtccgctgctccacgtagccatggccaccaccaccacccgcaagggccccggcctcgaagccagcacctccagtctcacctcgctcgacaacgacaactcggtgccctcgagcgcaaacctcgacacccagaactccaagtggacctccgcctcgacctcgttgaccgcctcgcccgcccagtccagagacacttcgccgacgagaaccaccgccgctgctaagtccggaagagcgagtcggacatccactccctctgcccagtctcggaagaacagcggccacgacaacacgagtcccgtgcgaacgagatctaatgtcactcccgcgcctgccactccccgacaacaactatcctccgccaacacaccaaatctaccgcctccatcgtccagcgagcccgtgctgcgagcgccagtgcccaagaagccctcgacagtccaagacgcatccaaggattcgccccgttggcccatctccccacgactgaagtcgcctccgcccaactttggcagaccgatcgctgcctcctctgctcgcaagaccgagcccgaacctcccgtcatcaatgtccagcgcgccacgccatcgccccatgtggactcgaccccccagcctgcgtcggacaacgaggtggaagatccccatctgtcatctggcataaggactccaggccgcggtccaagcagtggttcctcgatgttggagacggtgcaggaagtgagccagcccaacacccctaggccggggctgagcgcggcgatagaaaaactggaagagacagcagctactcagcgttcggcgtcgactaagaacaatgacacctcaaccacgagttccatcaaggccagccagagtacgactaacagtgagagcgggagcgacagtggaagtgcgaagcccagcaccaggcgaaccagtgccgcggctccaccaccgttgctccatagcaggcagtctagtaccgcgcttaagttcaccggccgtggacagacctcaggcgagagttcatctaggaacatgactgtcgaaaccgaggaagtcaagaatatgccacagctctcgttgaaccccgacattggcagacagggaatcaacggtagcctgcggactcgacccagctcggaaactatcaaacctaagaaggaaaagaagaagcatactaggaagactacctcggttccttcaggcaatggtgagacagaccacttaataccgaaaccaaagctacgacatagttggtcgacaaggtcaatctcttcggcgatggctcggtcgccaaactctcgcggtcaaggatcgtggggtgaaaaggggcgctacagtcctcccgggcagcggttcaagcggccgcaagccaaaaggaccccaagtattgtgaccagtttgctaactcgaggtcctcgtccagcatcctccaaagcagatatattcgaagccaaagtggccagcgccgtagaagaagctaactcatctgactcggatgaaacgtttgtctacgattccaatccgccagatgcggatcgccctcgccgatttcattcgcgcacgcctagcgcgacatcgatggccagccagctagaccgcaacggcttgagatccattcatgctgtcatggagggtggcgcctataatcatgccgccaagaagaacatgaagttctctaacacgtataccagtaatggaaatgagagtgtccaaggcgacgacgacggtcggggcacagctcgaagtaacgtaggctccggacggggaactgcgcgccatcaccatcatgttggtcgatggggccggaataatggaaatggacatccttcacttttcgataacgaatccccttttccgagtgctcgaaacaagttctcgaatagtaatctgagacaaccgtcgaaccctcccagccctcgattcagtacaaatcctaacagaaactggctatccggcgccaaacgtcaaattgcagtatccaacggctacgatatggacgacacgaccacgggtgccgacgacgagcaaacccctctgctaccccctggctcagttcggtccgcgcgttccaacagagctaggcggaatgcgcccttgagagatcttgagtcacgagcttatcgccagaacccttctttcctgaaccgtttcgccagttgtctagttctcaccgtcatgctcttacttgtcattacgggagccattggtttcatgttcacaacatctcaacctttgaccgatgttaacctcttgaagatcggaaatgtgcttgccagcgagcaggaattaatgttcgatctcagcgtggaagcacacaatcccaacgtcgtggtcgtaatgatcgattccgcggacatcgaggtgtttgcgaagtctccgcacgctggcaatgactctgaatggtggcgtaatccacatggggacgactctttcaccgccactggttcgggacacgacgaggacgattcgactgacgacgaaagttcaccaaacatgcgtcttggcaatatcgtgtcgttcgacagtcctttaacttacgaaggcacattttttcagagtggcctcgcaacttcaacaggcgagctacgtctccctcggcccggaaatactactgatagtggtacggagcgatgggaacgtattttggctgacgagtttactctcatcgtcaaaggcgttctcaagtacaccttgccattgagccagaaagtccgaaaggtaccgatatcgggcaagactgtggtcaagcctaactctgccaacgacccgacactccgaccaaacagtaccgatcccgagatcggtatatactaaaacccacacagcttgggggcagcctagccctatctacacattttctatgtgcatttactatgattctgtataatgacgagagtatgacctagcattctgggagcctctggcgtttgatttagccttgccgactggacaccgcgaaattgctagagttcgtggttgcaggctggagtcatttgacttttattttatgtttttcgttttgcttttgccggtccagtgtgttccaatagttcaaaagaatggggtgcctgagaaagagagaagtaacatagccacggcgttatttgcacattatattacctctgcgagctcaacgctttctacgcgagggaagagaaaaagactgctgattggagtgacgattgcgactggaagaatcatttagaggggtgtatggcaactgcaacaacccaataccttatttttattacctaggatgacatgagaactattacccagatacccccagacagagaatgaggaaaagaatttggcgcatttggtgctgttgttgatttttgtgttgttgggtgtaattgtatgctttgcgctttgcgatgcatgatggatggactgttaaaatggacgggaatagtggcatagattgggaaaatctttctgggacttcgaatgaaagtgctgatgaatggtggaaacaaggcagaatgggtgcgcgggagagatgagaagggcagaagaagaggggatagagaaggggaagggtgaggacgtgtagattagtgtagatattgtgtgaaaacttacctatctacctaacctacctgcattgatatatatatatatatggc

SEQ ID NO: 36755 - DNA, 2880 bp, Muscodor strobelii
  misc_feature: SGI cDNA ID NO. 572743
  misc_feature: Reduced expression when VOC is produced
  misc_feature: Encodes the peptide sequence at SEQ ID NO 36756
atgacgggcagacgcgacttcctgtcgcagcccgcgcccgagaactatgtcgccggtcttggacgtggtgctacgggtttcaccacccgatcagatctaggacctgcccgggaaggcccatctgaggaccagataaaagaggccctcgcgaagcgcgccgcccagctcggctttggcgatgccgctggtgccaagaagaaggagcaagagaacgacaacgacaacgaacggtatcaagacccggacaacgaagtcggcctcttcgccggcggcatctacgacaaggacgatgacgaggccgatcgcatcttccgcgagatagacgacaagatggacaagcgccgcaagattagaaggttagtgttctcatctccccagtcccagctagttcatagttcatcccgagaaatagttgaacagattaccgacgaaggtcactcctacagggaagcccgcgaaaaggccgagcgggaagaatacgaacgaaagaaccccaagatccagcagcagttcgccgacctcaagcgcggcctcgagagcatcaccgaagacgagtgggctgccctgcccgaggtcggcgatctcaccggcaggaccaagcgagcgagacaggcccgacacgaacgcttctatgccgtccccgacagcgtactggctgctgcgagtaccgcgggtgaaatgggcacaactgtcgctgacgatggcgccgcgtctgggcccgctgcttcgaatggcgggcaagacggaactatgaccaacttcgccaagattggtcaagccagagacaaggtgttgcaagtgaggctggatcaagcgtcaggcaccagtacaacatcgggtagcgcaacgagtgtcgaccccaaggggtacttgacaagtttggccaaatcccagctccccgatagcgcagctgttggtgatatcaaccgtgtgagagagctgaccgaatcagtcatcaagacaaatcccagtcaccctcccggctggatcgcagcagcacgtctcgaggaactggccggcaagatagtacgggctcggaatatcatatcgcgcggatgtgaatactgtccaaagagcgaagacttatggctcgagaatattcggctaaacgataaacacaacgccaagatcatcgccgccaacgccattggcaagaataaccgatcagtcagattatgggtagaggccatgaaattggaggacgatccagcatctaaaaagcgagtcattcggaaagccttagaccacatcccagaatctgaagcattatggaaagaggccgtgaatctggaagaggatcctgacgatgcgcggatactcctcgccaaggccaccgaactgattcctctgtctgtcgatctttggcttgctctagctcgtctggaaacacccgcgaacgcacagaaggttctcaacagagcgcgaaagcagtgtccaacgtcatacgaaatctggattgccgcggccaggctccaagagcaattgggcgagggagaaaaggtcaacgttatgaaacgtgcagcccaagtcttggtcaaggaatcggcgatgccgaaacgcgaggaatggatcacggaagccgagaagtgcgaggtggagggcgcccttatcacttgcggcgcaattatacgagaaaccctcggctacggtctcgacgaagacgacgatcggaaagaagtctggatggaagatgcttcaggatgtatcggtcgcgagatgtacgaaacagcccgtgctatctacgcctacgcattgcgtgttttccctaccagcaaaacgatatggctggcagctgcagaccttgagaggaactatggcaagaaggaagatctattccaagtcttggagaaggctgtcaacgccgttccacactccgaagttttgtggatgatgttggccaaagagaagtggcaggcaggcaaagtggacgacgcgagaatcgtgctcggtagagctttcaggcaaaatcccaacaacgaagatatctggcttgcggccgtgaagctagaagccgagaacaacgagaccgaaaaggctcgtgaactcctcaaacaagcccgtcaagaagcgccaacagatcgcgtatggatgaagagcgtagccttcgaaaggcagctcaataacctcgacaacgcattggatctcgtacagcaagctctaaatctcttcccagcataccccaagctctggatgatgaaaggacaaatctacgaagatctcaacaagcgaccacaagcccgcgaagcctacgcaacaggcgtgaaagccgtaccatcctccgtaccgctatggctgctctttgcacgtctggaggagaaaatgggtctcctccccaaagcccgttcagtgctcgaccgcgcaaggttagcagtgccgaaatcagcagaactctggtgcgaatctgtgcgtctcgagctcagagcaggagacacgaaacaagcctcctccctcatggaacgcgcacgacgcgacgtgccgaagaataaacaaggaccgttatggagcgaacggatatggcatctcacggaacccaaacaacgtaaaccccgcgctgtagaaggcgtaaaagaagcggagaacgatcctgtgctgctcgttgcggttgcgcgtatcttctggggtgagcgccgtctagagaaagcgcagaattggttcgagaaggcgcttgtgagagactcggacttgggtgattcgtgggcgtggtattataagttcttaatagagcatggcacggatgagaagagagatgatgtggtgaagaagtgtgttagtgtggagccgagacatggcgaggtctggcagaggattgctaaggatccgaagaatgctaggaagagtactgaagagatattgaagatggttgctagggagattagctaa

SEQ ID NO: 36756 - protein, 959 aa, Muscodor strobelii
  misc_feature: SGI Peptide ID NO. 572743
  misc_feature (12)..(198): Pfam Id: PF06424 Pfam Desc: PRP1 splicing factor, N-terminal
  misc_feature (12)..(119): Pfam Id: PF06424 Pfam Desc: PRP1 splicing factor, N-terminal
  misc_feature (147)..(198): Pfam Id: PF06424 Pfam Desc: PRP1 splicing factor, N-terminal
  misc_feature (1)..(958): NCBI GI: 154302443 Blast Desc: BC1G_09798 [Botryotinia fuckeliana B05.10] gi|150855287|gb|EDN30479.1| BC1G_09798 [Botryotinia fuckeliana B05.10]
  misc_feature (1)..(958): NCBI GI: 156055314 Blast Desc: SS1G_05008 [Sclerotinia sclerotiorum 1980] gi|154702793|gb|EDO02532.1| SS1G_05008 [Sclerotinia sclerotiorum 1980]
  misc_feature (3)..(958): NCBI GI: 212528810 Blast Desc: mRNA splicing factor (Prp1/Zer1), [Penicillium marneffei ATCC 18224] gi|210073960|gb|EEA28047.1| mRNA splicing factor (Prp1/Zer1), [Penicillium marneffei ATCC 18224]
  misc_feature (5)..(955): NCBI GI: 145612561 Blast Desc: MGG_07213 [Magnaporthe grisea 70-15] gi|145019705|gb|EDK03933.1| MGG_07213 [Magnaporthe grisea 70-15]
  misc_feature (1)..(955): NCBI GI: 225563100 Blast Desc: pre-mRNA-splicing factor [Ajellomyces capsulatus G186AR]
  misc_feature (1)..(955): NCBI GI: 240279926 Blast Desc: pre-mRNA splicing factor [Ajellomyces capsulatus H143]
  misc_feature (1)..(958): NCBI GI: 46137453 Blast Desc: FG10242.1 [Gibberella zeae PH-1]
  misc_feature (3)..(958): NCBI GI: 242765435 Blast Desc: mRNA splicing factor (Prp1/Zer1), [Talaromyces stipitatus ATCC 10500] gi|218724170|gb|EED23587.1| mRNA splicing factor (Prp1/Zer1), [Talaromyces stipitatus ATCC 10500]
  misc_feature (2)..(959): NCBI GI: 145234446 Blast Desc: An02g14650 [Aspergillus niger] gi|134057540|emb|CAK48894.1| protein product [Aspergillus niger]
  misc_feature (1)..(959): NCBI GI: 119193220 Blast Desc: pre-mRNA splicing factor [Coccidioides immitis RS]
  misc_feature: Useful for introducing or modulating the production of volatile compounds
MTGRRDFLSQPAPENYVAGLGRGATGFTTRSDLGPAREGPSEDQIKEALAKRAAQLGFGDAAGAKKKEQENDNDNERYQDPDNEVGLFAGGIYDKDDDEADRIFREIDDKMDKRRKIRRLVFSSPQSQLVHSSSREIVEQITDEGHSYREAREKAEREEYERKNPKIQQQFADLKRGLESITEDEWAALPEVGDLTGRTKRARQARHERFYAVPDSVLAAASTAGEMGTTVADDGAASGPAASNGGQDGTMTNFAKIGQARDKVLQVRLDQASGTSTTSGSATSVDPKGYLTSLAKSQLPDSAAVGDINRVRELTESVIKTNPSHPPGWIAAARLEELAGKIVRARNIISRGCEYCPKSEDLWLENIRLNDKHNAKIIAANAIGKNNRSVRLWVEAMKLEDDPASKKRVIRKALDHIPESEALWKEAVNLEEDPDDARILLAKATELIPLSVDLWLALARLETPANAQKVLNRARKQCPTSYEIWIAAARLQEQLGEGEKVNVMKRAAQVLVKESAMPKREEWITEAEKCEVEGALITCGAIIRETLGYGLDEDDDRKEVWMEDASGCIGREMYETARAIYAYALRVFPTSKTIWLAAADLERNYGKKEDLFQVLEKAVNAVPHSEVLWMMLAKEKWQAGKVDDARIVLGRAFRQNPNNEDIWLAAVKLEAENNETEKARELLKQARQEAPTDRVWMKSVAFERQLNNLDNALDLVQQALNLFPAYPKLWMMKGQIYEDLNKRPQAREAYATGVKAVPSSVPLWLLFARLEEKMGLLPKARSVLDRARLAVPKSAELWCESVRLELRAGDTKQASSLMERARRDVPKNKQGPLWSERIWHLTEPKQRKPRAVEGVKEAENDPVLLVAVARIFWGERRLEKAQNWFEKALVRDSDLGDSWAWYYKFLIEHGTDEKRDDVVKKCVSVEPRHGEVWQRIAKDPKNARKSTEEILKMVAREIS

SEQ ID NO: 36757 - DNA, 3692 bp, Muscodor strobelii
  misc_feature: SGI EST ID NO. CUFF.87717.1
  misc_feature: Variant of the nucleotide sequence at SEQ ID NO 36755
aatatgttgacccaagtcttttgtgaaccttcgacagttagcagccgttcgtaatatggcttaaggtgaatggaccaacttgaagacattagcagcagcggcctggttcttcttggcgggtctctcatatggagatgaagaagtccctccacgcttcgcggatttcgctttacccatgttgggcaacagtcggcagtctgctaaagagatggggcagagacagcagttgaagctgtaataagaggtgtcacttgattatcaaaatcgtccgtatctgtttttcgtcttttttattgtcgcaggccgggatggcaagaccaatgcatggatgtactgaagtgggatgtccattgacggcgcccaactttttattatcgataggataccatcccattaatgctacagtcttcttatcttatctggttttcctaaggtgagtaagggtagctttgcgctagtgccgggtagcttggtccgacgcagaggcagctcgacaagtcgacaggcagaaccagcattttgtcggctcgcagaatcaacatcttttccggccagctgcatctatcatcaccatcaacccagttgtatacgtaacgcaacacaccatcccacctgactgggtcaacaaaggccacgctcatacatcaaaaagcttgaggctgagctggacaggtctgtgcttgcggcgtcgcaatgacgggcagacgcgacttcctgtcgcagcccgcgcccgagaactatgtcgccggtcttggacgtggtgctacgggtttcaccacccgatcagatctaggacctgcccgggaaggcccatctgaggaccagataaaagaggccctcgcgaagcgcgccgcccagctcggctttggcgatgccgctggtgccaagaagaaggagcaagagaacgacaacgacaacgaacggtatcaagacccggacaacgaagtcggcctcttcgccggcggcatctacgacaaggacgatgacgaggccgatcgcatcttccgcgagatagacgacaagatggacaagcgccgcaagattagaagggaagcccgcgaaaaggccgagcgggaagaatacgaacgaaagaaccccaagatccagcagcagttcgccgacctcaagcgcggcctcgagagcatcaccgaagacgagtgggctgccctgcccgaggtcggcgatctcaccggcaggaccaagcgagcgagacaggcccgacacgaacgcttctatgccgtccccgacagcgtactggctgctgcgagtaccgcgggtgaaatgggcacaactgtcgctgacgatggcgccgcgtctgggcccgctgcttcgaatggcgggcaagacggaactatgaccaacttcgccaagattggtcaagccagagacaaggtgttgcaagtgaggctggatcaagcgtcaggcaccagtacaacatcgggtagcgcaacgagtgtcgaccccaaggggtacttgacaagtttggccaaatcccagctccccgatagcgcagctgttggtgatatcaaccgtgtgagagagctgaccgaatcagtcatcaagacaaatcccagtcaccctcccggctggatcgcagcagcacgtctcgaggaactggccggcaagatagtacgggctcggaatatcatatcgcgcggatgtgaatactgtccaaagagcgaagacttatggctcgagaatattcggctaaacgataaacacaacgccaagatcatcgccgccaacgccattggcaagaataaccgatcagtcagattatgggtagaggccatgaaattggaggacgatccagcatctaaaaagcgagtcattcggaaagccttagaccacatcccagaatctgaagcattatggaaagaggccgtgaatctggaagaggatcctgacgatgcgcggatactcctcgccaaggccaccgaactgattcctctgtctgtcgatctttggcttgctctagctcgtctggaaacacccgcgaacgcacagaaggttctcaacagagcgcgaaagcagtgtccaacgtcatacgaaatctggattgccgcggccaggctccaagagcaattgggcgagggagaaaaggtcaacgttatgaaacgtgcagcccaagtcttggtcaaggaatcggcgatgccgaaacgcgaggaatggatcacggaagccgagaagtgcgaggtggagggcgcccttatcacttgcggcgcaattatacgagaaaccctcggctacggtctcgacgaagacgacgatcggaaagaagtctggatggaagatgcttcaggatgtatcggtcgcgagatgtacgaaacagcccgtgctatctacgcctacgcattgcgtgttttccctaccagcaaaacgatatggctggcagctgcagaccttgagaggaactatggcaagaaggaagatctattccaagtcttggagaaggctgtcaacgccgttccacactccgaagttttgtggatgatgttggccaaagagaagtggcaggcaggcaaagtggacgacgcgagaatcgtgctcggtagagctttcaggcaaaatcccaacaacgaagatatctggcttgcggccgtgaagctagaagccgagaacaacgagaccgaaaaggctcgtgaactcctcaaacaagcccgtcaagaagcgccaacagatcgcgtatggatgaagagcgtagccttcgaaaggcagctcaataacctcgacaacgcattggatctcgtacagcaagctctaaatctcttcccagcataccccaagctctggatgatgaaaggacaaatctacgaagatctcaacaagcgaccacaagcccgcgaagcctacgcaacaggcgtgaaagccgtaccatcctccgtaccgctatggctgctctttgcacgtctggaggagaaaatgggtctcctccccaaagcccgttcagtgctcgaccgcgcaaggttagcagtgccgaaatcagcagaactctggtgcgaatctgtgcgtctcgagctcagagcaggagacacgaaacaagcctcctccctcatggaacgcgcacgacgcgacgtgccgaagaataaacaaggaccgttatggagcgaacggatatggcatctcacggaacccaaacaacgtaaaccccgcgctgtagaaggcgtaaaagaagcggagaacgatcctgtgctgctcgttgcggttgcgcgtatcttctggggtgagcgccgtctagagaaagcgcagaattggttcgagaaggcgcttgtgagagactcggacttgggtgattcgtgggcgtggtattataagttcttaatagagcatggcacggatgagaagagagatgatgtggtgaagaagtgtgttagtgtggagccgagacatggcgaggtctggcagaggattgctaaggatccgaagaatgctaggaagagtactgaagagatattgaagatggttgctagggagattagctaaagggcgagagactgcttgtataattcgaggtaaggaatgggtatggtgatggtagatcggcgctcgataagatatcagaattatacggcccgcgtggctgtgggacagacagccaggtgtacgaatgaaagaatgtctttccggaccaattcatgtttcactacgctcccaccgtaaaccgtgaattatacattcatattcctgtcgtg

SEQ ID NO: 36758 - DNA, 1116 bp, Muscodor strobelii
  misc_feature: SGI cDNA ID NO. 572744
  misc_feature: Encodes the peptide sequence at SEQ ID NO 36759
atgggtaaagcgaaatccgcgaagcgtggagggacttcttcatctccatatgagagacccgccaagaagaaccaggccgctgctgctaatgtcttcaagttcacaaaagacttgggtcaacatattctaaagaacccaggtatcgcagaggctattgttcagaaggcctacctgaagccgactgatgtcgtattggaggttggccctggaacgggaaatttgactgttaagatcttagaatcagcgcgcaaagtcatcgccgaggtcaccaaacgagtacaggggaagcctgaacacaaacgacttgaagtagtattgggggatgttatcaagcaagaaacgttgcccgagttcgacgtttgcatatcaaacacgccgtaccagatttcctctcctctggtgttcaaattgttgagaatgcccaagccgccgaggacttgtgtcctcatgttccaaaaggagttcgctttgagactgactgcacggcccggtgactctctctattgccgcctctctgtgaacgctcagttttgggccaagatctcacatgttctgaaagttggtcgggcaaactctggctttaacacatcactttcaccagtccgtccacctccgcaagtcgattcgagcgtggtgagaattgaacccaagatgggcactgagcgccccaatattgcatttgaagagtttgatggtctccttcgaatttgcttcaaccggagaaacaagacattacgagcttcatggttgggcaacaaagaagtgctcaagatggtcgagacgaactacagactatattgcgcgcaaaacgacattcctgtagatgatagtatcgccgaagatgccgataacgacaacgatatggatgttgatgaccaagaggacgagccttccatggacgttgatggcggagacgatgtacctgatttctttgcccaaaaaactgaacagggaagcaagagaccaaagactcgactcgcgcttctaatcaaggagaaagtccgaaagtgtcttgaagacaccgatttagccgagagcagaagttctaaattgcacgagaatgacttcttgagacttcttgcagctttcaatgccgaacatatccatttttcttga

SEQ ID NO: 36759 - protein, 371 aa, Muscodor strobelii
  misc_feature: SGI Peptide ID NO. 572744
  misc_feature (31)..(290): Pfam Id: PF00398 Pfam Desc: Ribosomal RNA adenine dimethylase
  misc_feature (31)..(248): Pfam Id: PF00398 Pfam Desc: Ribosomal RNA adenine dimethylase
  misc_feature (1)..(371): NCBI GI: 156055498 Blast Desc: SS1G_05101 [Sclerotinia sclerotiorum 1980] gi|154702885|gb|EDO02624.1| SS1G_05101 [Sclerotinia sclerotiorum 1980]
  misc_feature (1)..(371): NCBI GI: 256732202 Blast Desc: NECHADRAFT_41763 [Nectria haematococca mpVI 77-13-4]
  misc_feature (1)..(371): NCBI GI: 169625150 Blast Desc: SNOG_15844 [Phaeosphaeria nodorum SN15] gi|111055562|gb|EAT76682.1| SNOG_15844 [Phaeosphaeria nodorum SN15]
  misc_feature (1)..(371): NCBI GI: 189192010 Blast Desc: dimethyladenosine transferase dimethyltransferase [Pyrenophora tritici-repentis Pt-1C-BFP] gi|187973950|gb|EDU41449.1| dimethyladenosine transferase
  misc_feature (1)..(371): NCBI GI: 225563099 Blast Desc: dimethyladenosine transferase dimethyltransferase [Ajellomyces capsulatus G186AR] gi|240279925|gb|EER43430.1| dimethyladenosine transferase dimethyltransferase [Ajellomyces
  misc_feature (1)..(371): NCBI GI: 240105801 Blast Desc: dimethyladenosine transferase, [Coccidioides posadasii C735 delta SOWgp]
  misc_feature (4)..(371): NCBI GI: 85099447 Blast Desc: dimethyladenosine transferase [Neurospora crassa OR74A] gi|28922314|gb|EAA31554.1| dimethyladenosine transferase [Neurospora crassa OR74A]
  misc_feature (37)..(371): NCBI GI: 119193222 Blast Desc: CIMG_00988 [Coccidioides immitis RS]
  misc_feature (1)..(371): NCBI GI: 70987085 Blast Desc: dimethyladenosine transferase [Aspergillus fumigatus Af293] gi|66846654|gb|EAL86986.1| dimethyladenosine transferase [Aspergillus fumigatus Af293] gi|159123206|gb|EDP48326.1| A1163]
  misc_feature (1)..(371): NCBI GI: 119482754 Blast Desc: dimethyladenosine transferase [Neosartorya fischeri NRRL 181] gi|119409560|gb|EAW19508.1| dimethyladenosine transferase [Neosartorya fischeri NRRL 181]
  misc_feature (39)..(233): SWISSPROT Homolog: EC 2.1.1.48 rRNA (adenine-N(6)-)-methyltransferase
MGKAKSAKRGGTSSSPYERPAKKNQAAAANVFKFTKDLGQHILKNPGIAEAIVQKAYLKPTDVVLEVGPGTGNLTVKILESARKVIAEVTKRVQGKPEHKRLEVVLGDVIKQETLPEFDVCISNTPYQISSPLVFKLLRMPKPPRTCVLMFQKEFALRLTARPGDSLYCRLSVNAQFWAKISHVLKVGRANSGFNTSLSPVRPPPQVDSSVVRIEPKMGTERPNIAFEEFDGLLRICFNRRNKTLRASWLGNKEVLKMVETNYRLYCAQNDIPVDDSIAEDADNDNDMDVDDQEDEPSMDVDGGDDVPDFFAQKTEQGSKRPKTRLALLIKEKVRKCLEDTDLAESRSSKLHENDFLRLLAAFNAEHIHFS

SEQ ID NO: 36760 - DNA, 1449 bp, Muscodor strobelii
  misc_feature: SGI EST ID NO. CUFF.87703.0
  misc_feature: Variant of the nucleotide sequence at SEQ ID NO 36758
agtccacctccgcaagtcgattcgagcgtggtgagaattgaacccaagatgggcactgagcgccccaatattgcatttgaagagtttgatggtctccttcgaatttgcttcaaccggagaaacaagacattacgagcttcatggttgggcaacaaagaagtgctcaagatggtcgagacgaactacagactatattgcgcgcaaaacgacattcctgtagatgatagtatcgccgaagatgccgataacgacaacgatatggatgttgatgaccaagaggacgagccttccatggacgttgatggcggagacgatgtacctgatttctttgcccaaaaaactgaacagggaagcaagagaccaaagactcgactcgcgcttctaatcaaggagaaagtccgaaagtgtcttgaagacaccgatttagccgagagcagaagttctaaattgcacgagaatgacttcttgagacttcttgcagctttcaatgccgaacatatccatttttcttgagaccgaaaggaagatagattgcgatacgatgattatgaggcatgtgtaatgtgttcaaggccagtttctggcggccaaggagtatcggcgttaaagtatcgctcacaaggatccaaggctgttatatcctgctgatcaggaagatccttgcatcaggaatggggaataaaggcctgttgtctttcgcaagactacgaaatggggtgggcgagcgaatgataccaatagactagtgcaatgtttaatgatcagaggcaacttcaaaattcacaagaccctatattgactccacgaaatgtcaacataaccacgaagcgcaactcccgctttaccctaaactctgcccttccgactgcctcgctcccgcacaaggggccagccaactaacccgctgctcaacaaaaatctccgtcctgggtctcaacttagtctctagcaaactcgcatcatcaaccgtcccaccgcgaatcgccattaaatccgggaaacccgagcttatgcgatacatgagggttccgcattcagaacaccgggtgttttctaccgtgtttcctgatgcagtctgggtagtctggatagtctggagattggtagataaggacttggtggatgtcgagtgtggtgtgaatgtcttgagattgttgacgccgttgagaatttgtacgcttgaccgcgttacgaggattccggtgctgaagagtgcggatgagagttttcggcaggtgctgcagtggcagttgaatatgtcgattaggtttgggcttgttgttggcttgggagtgttagtgcagttttgggagggtaggatggaggtgaattgggggttgaggggggtactcagggagatggagaggtgatgaagatgaagaggagatgaaggtattggacttacgaatgatagctggactacgccgcaggagcaagttgctgttgctt

SEQ ID NO: 36761 - DNA, 224 bp, Muscodor strobelii
  misc_feature: SGI cDNA ID NO. 572745
  misc_feature: Reduced expression when VOC is produced
  misc_feature: Encodes the peptide sequence at SEQ ID NO 36762
atgctgcagtccacgctgagaacctcgggagcccggctcctgaggaacacctcgcgctcgacgataccctcctcgcgaccatattccctcgccgcccgccgcccgcccgccctggcgtcgcagcgcagacatgcctcggcaatctcgtcgccgccggcgcccaacgactcgttcctgtcgggcagcacggccaactacatcgacgagatgtacatgcagtggaa

SEQ ID NO: 36762 - protein, 74 aa, Muscodor strobelii
  misc_feature: SGI Peptide ID NO. 572745
  misc_feature (6)..(74): NCBI GI: 164424833 Blast Desc: 2-oxoglutarate dehydrogenase E1 component, mitochondrial precursor [Neurospora crassa OR74A] gi|157070681|gb|EAA34012.2| 2-oxoglutarate dehydrogenase E1
  misc_feature (7)..(74): NCBI GI: 16416078 Blast Desc: oxoglutarate dehydrogenase precursor [Neurospora crassa]
  misc_feature (1)..(74): NCBI GI: 156054172 Blast Desc: SS1G_05934 [Sclerotinia sclerotiorum 1980] gi|154703714|gb|EDO03453.1| SS1G_05934 [Sclerotinia sclerotiorum 1980]
  misc_feature (1)..(74): NCBI GI: 261354872 Blast Desc: 2-oxoglutarate dehydrogenase E1 [Verticillium albo-atrum VaMs.102]
  misc_feature (1)..(74): NCBI GI: 116204753 Blast Desc: conserved [Chaetomium globosum CBS 148.51] gi|88176388|gb|EAQ83856.1| conserved [Chaetomium globosum CBS 148.51]
  misc_feature (31)..(74): NCBI GI: 256729411 Blast Desc: [Nectria haematococca mpVI 77-13-4]
  misc_feature (31)..(74): NCBI GI: 46116934 Blast Desc: FG04309.1 [Gibberella zeae PH-1]
  misc_feature (1)..(74): NCBI GI: 171690254 Blast Desc: protein product [Podospora anserina] gi|170945075|emb|CAP71186.1| protein product [Podospora anserina]
  misc_feature (11)..(74): NCBI GI: 154297205 Blast Desc: BC1G_12438 [Botryotinia fuckeliana B05.10] gi|150842965|gb|EDN18158.1| BC1G_12438 [Botryotinia fuckeliana B05.10]
  misc_feature (1)..(74): NCBI GI: 189190882 Blast Desc: 2-oxoglutarate dehydrogenase E1 component, mitochondrial precursor [Pyrenophora tritici-repentis Pt-1C-BFP] gi|187973386|gb|EDU40885.1| 2-oxoglutarate dehydrogenase E1
  misc_feature: Useful for introducing or modulating the production of volatile compounds
MLQSTLRTSGARLLRNTSRSTIPSSRPYSLAARRPPALASQRRHASAISSPPAPNDSFLSGSTANYIDEMYMQW

SEQ ID NO: 36763 - DNA, 1188 bp, Muscodor strobelii
  misc_feature: SGI EST ID NO. CUFF.87740.0
  misc_feature: Variant of the nucleotide sequence at SEQ ID NO 36761
cggcaagacgtgtgtggaggaatgctgcagtagtgaaagtgaagaattgccgaggacgattggaggtatatagtgtcttgaagctacatataggtacattaagcatggctgacagaattcgatgagtagaagtcaagagctgatggtattgttgcatgcaatgggaatgaatggcaggtcaatttgatcctcatttgctcagcagcttgccacggcacgaaccgggccagcgagtaccgaataagaagcaatctattaatggacgagacagggtcgagcaagtgaagagcattatagcctgtaattacatactgcaactgcggcatttgcagctcccattccagctttcatctcaatgctgttatcaggatggggtcaggatgcatgttacagtacgtactgtacgctcggtcgcacccttcaaagttcgaacgcagttataacttatacgtaatacagacgatggtctacgagggcttaaggcaatattcggcaacgtgctcgggagacccgggcggtccagtcccgttacagctacgggctcagtgcaggtgaccgagctgtgctgccgtgctgctgtgcgcgggctgtggttggtagtggacaaattgcttgggggcagctggggccgttggcagcgggtttttcaggcgaggccactgtggatgggtaagtgccagggtgtgtgacgccagggatctggagatctcgtgcatgggcaagtgtcatctgcgtcttaattttcttgattcctctccgtctgcgcttcctcgacgatcttcttaattctcatcctaccaagcctcatctccccaaactgcacagacttactccgccgctcttttatctctttcagtagagagagcttgacagctccaagtggccggtgtaattccttaatctcttcgtctcttttttgtggtgcgcaattcagtttatagcagtgcgttgcagcctggcgccatcatgctgcagtccacgctgagaacctcgggagcccggctcctgaggaacacctcgcgctcgacgataccctcctcgcgaccatattccctcgccgcccgccgcccgcccgccctggcgtcgcagcgcagacatgcctcggcaatctcgtcgccgccggcgcccaacgactcgttcctgtcgggcagcacggccaactacatcgacgagatgtacatgcagtgg

SEQ ID NO: 36764 - DNA, 2115 bp, Muscodor strobelii
  misc_feature: SGI cDNA ID NO. 572746
  misc_feature: Encodes the peptide sequence at SEQ ID NO 36765
atgggctattccgtcggaatgacgctgatgttgattggtgtggggcacatgtggctgcacctcattaagattgctgcttcgattcctcgttgcaagccatcaccgagccgattggagaggcaaccctctcaacatggcgatacctacgggcgctgcagcctacaaaaaaaggacggcattctcactctcacaccagaccagaagtctgtcacatggacgcccaactcggcacccggcggcccaccgaccgtgtctctcattatcgccaacatatcaaatctgcaacaaaccccggacacggctgccaaggtcatgttgaagatcttcgacaagcctccagaagcaccggagcccgtagcctatctgttccacttcaactccccagccgatcccagagctgaggccaacgtaatcagagacttgctgtctaagcttctcgccaatgcgaaagccaacgacccaagtgtcccgagggtcgcatccggatcaggcacgcccgtggcgggtgcttctgctaatggctctggctcggcggcgatgacttttgcgaatgccgccgtcgccaagccgagctcagcacggttgtttgatgatgaagcgttgaaaagtgatatcgtgttacagcagtccctgatgaaggcggatcgcgagttgacccagatgtatatggagggccgcaagaccaagcccgattctatgtcagatgccacgttcaacgcacacttctggtcagccagaatcaatctgctcagatctcacgccatcgagtcgagtcagaagaaagggccttacaacgtgttagcccaagtcaaacccacgctgcaacccagcaccgatcctacgaggcccagcgaattgaagatcaaattcagtgtggagcaaatccaaatgatcatgagccaacatccactagtcaagcgtatctacaacgagaacgtgcccccgttggagacgaacgagttttgggagaggttcttcctcagcaagctgtccaagaagctgagaggagagcgtccgactggtctggaaatggccgataacatctttgacaaatatgacgagtatgaagatattacagccttttcgagcaagcatctctctcagcatgtccctcacatcatcgacttggaaggcaacgaagagaatcagggtggcttcaagggcggcaatcgcaaagacgtggagatgcggccgagaggcagacacgacgtccccatcatccagacgctaaacagtattagtgggaaacttctggccaatgccgtacccaaggacaacgaaccggaaggctctgcgcgtttagatgatgacactttccaagaactttcgttgcgagatttacagggcgatgcagaagaacaccgcatcatgctcaatatcaaagagcagagcagattcttttcgagcgaatcgggtgaagaatcggaaactgcagctctctttgcccgacaaaacccagccaaggtattgagaggtgtacagggagatcttcgtacacttggcgaagacggcgctggtggtatcgccatccatccgtctttgggtatcgacgatgggaatgacagcgacgacgagcaaaacttgcagcctcatgtagggtcacgagattcccgaaagcaagcgcaacaacagatcctcaagagcatgctacaaagaagagagcagctatacggagatgaatcggacgaaacaactcccatgggtctcgatgcggagataacgtctacctgcaatcttactcatgctacgactctagagttcctgcatcagttttggtctgctttccactctggtgatcctgatcgggccgctgagcttggctatttggctgaagctttgaaacgatcgaaagagcggatcaaggctgttggtgaagatgcgaaaaataaacaaaacgagcgggttgagaggtacaagcaagagatctatgaccactataagaagacaggcaggagaattaagcccaatcccaaatccattccacgcactggagaggaggccgagctggctgtagccaagctcatggagcctgttgtcaattctcttgatcgagcaattactacttattccaaagcacttgccgctgagggcattcaggccagtacagaactttga

SEQ ID NO: 36765 - protein, 704 aa, Muscodor strobelii
  misc_feature: SGI Peptide ID NO. 572746
  misc_feature (276)..(339): Pfam Id: PF03909 Pfam Desc: BSD domain
  misc_feature (50)..(127): Pfam Id: PF08567 Pfam Desc: TFIIH p62 subunit, N-terminal domain
  misc_feature (56)..(127): Pfam Id: PF08567 Pfam Desc: TFIIH p62 subunit, N-terminal domain
  misc_feature (50)..(703): NCBI GI: 46116932 Blast Desc: FG04308.1 [Gibberella zeae PH-1]
  misc_feature (91)..(703): NCBI GI: 261354873 Blast Desc: RNA polymerase II transcription factor B subunit 1 [Verticillium albo-atrum VaMs.102]
  misc_feature (50)..(701): NCBI GI: 154297203 Blast Desc: BC1G_12437 [Botryotinia fuckeliana B05.10] gi|150842964|gb|EDN18157.1| BC1G_12437 [Botryotinia fuckeliana B05.10]
  misc_feature (50)..(694): NCBI GI: 116204755 Blast Desc: CHGG_10261 [Chaetomium globosum CBS 148.51] gi|88176389|gb|EAQ83857.1| CHGG_10261 [Chaetomium globosum CBS 148.51]
  misc_feature (50)..(701): NCBI GI: 156054174 Blast Desc: SS1G_05935 [Sclerotinia sclerotiorum 1980] gi|154703715|gb|EDO03454.1| SS1G_05935 [Sclerotinia sclerotiorum 1980]
  misc_feature (50)..(689): NCBI GI: 85074627 Blast Desc: NCU05423 [Neurospora crassa OR74A] gi|30580640|sp|Q9P5N7.1|TFB1_NEUCR RecName: Full= RNA polymerase II transcription factor B subunit 1; AltName: Full=RNA polymerase
  misc_feature (50)..(654): NCBI GI: 171690256 Blast Desc: protein product [Podospora anserina] gi|170945076|emb|CAP71187.1| protein product [Podospora anserina]
  misc_feature (50)..(696): NCBI GI: 121708100 Blast Desc: RNA polymerase II transcription factor, [Aspergillus clavatus NRRL 1] gi|119400177|gb|EAW10603.1| RNA polymerase II transcription factor, [Aspergillus clavatus NRRL 1]
  misc_feature (50)..(696): NCBI GI: 159125416 Blast Desc: RNA polymerase II transcription factor related protein [Aspergillus fumigatus A1163]
  misc_feature (50)..(696): NCBI GI: 70993628 Blast Desc: RNA polymerase II transcription factor related protein [Aspergillus fumigatus Af293] gi|66849295|gb|EAL89623.1| RNA polymerase II transcription factor related protein [Aspergillus
MGYSVGMTLMLIGVGHMWLHLIKIAASIPRCKPSPSRLERQPSQHGDTYGRCSLQKKDGILTLTPDQKSVTWTPNSAPGGPPTVSLIIANISNLQQTPDTAAKVMLKIFDKPPEAPEPVAYLFHFNSPADPRAEANVIRDLLSKLLANAKANDPSVPRVASGSGTPVAGASANGSGSAAMTFANAAVAKPSSARLFDDEALKSDIVLQQSLMKADRELTQMYMEGRKTKPDSMSDATFNAHFWSARINLLRSHAIESSQKKGPYNVLAQVKPTLQPSTDPTRPSELKIKFSVEQIQMIMSQHPLVKRIYNENVPPLETNEFWERFFLSKLSKKLRGERPTGLEMADNIFDKYDEYEDITAFSSKHLSQHVPHIIDLEGNEENQGGFKGGNRKDVEMRPRGRHDVPIIQTLNSISGKLLANAVPKDNEPEGSARLDDDTFQELSLRDLQGDAEEHRIMLNIKEQSRFFSSESGEESETAALFARQNPAKVLRGVQGDLRTLGEDGAGGIAIHPSLGIDDGNDSDDEQNLQPHVGSRDSRKQAQQQILKSMLQRREQLYGDESDETTPMGLDAEITSTCNLTHATTLEFLHQFWSAFHSGDPDRAAELGYLAEALKRSKERIKAVGEDAKNKQNERVERYKQEIYDHYKKTGRRIKPNPKSIPRTGEEAELAVAKLMEPVVNSLDRAITTYSKALAAEGIQASTEL

SEQ ID NO: 36766 - DNA, 1227 bp, Muscodor strobelii
  misc_feature: SGI cDNA ID NO. 572747
  misc_feature: Encodes the peptide sequence at SEQ ID NO 36767
atggaggcaacccgctggccctcagacggctctcgagccacgggcccagatcgtgcagaccagcctagatcaccattatcgaataaatcaaacctcaacgttaccacgtgggaccacaaagactcatctgaaggtctacccagtccgcacgagtccatcttcgacgcggcatgggtgtcaaccagtgacatcgccaaatcgccataccagaccgctcgtcccgcgactcctactatcaaagccctcgacatggacctctttgactgcgactctccactgtcccgcctcgagtctccgtttctatacggtcatggcacggaactcacgcccatccgcgagcagcgcagcatctccaccttcaagaccggccgaacggcagccagtctttcgacatcagacctctcgtccatcatgcacgatgcaccgagtggaaacaagcaagagaacaagattgctcctcctctccgccgccgatcctcctttgaccttgccgacctacccaagcgtgttttcaagaccagagatatcgtacccgaagaacgaccaaagctctgcacactaacctactcccgtccaaaactcatcgaaatccacacatatcctaacaaacccatctacccacctcacaagcgtccagctacacctccacaactagagtcctacaaaaaattctacaagtcttcgaaacccacaaatcccaacaacctctccggtgggtttgaagtgccacgattcagagacgtacgaagtggccatgggaatctgacagctcatccttataatcggctcgcgagagaggaagacaacgcgagaacggataacggcggagagaacaatctcctccgtagacttggtctcagtcccgtaggccaaaatcagtcgtcgaacgaagcgggtccttcgaatcgaccgccaaatccaaatctggtgccttcgaagggcaatcacaagggcggtcagagaagtaggttcatggagccgcaagtagctgagatcgtgaacgctcctgcccacatacttccacaggcacgcatcaatgctgcaggcgatgatctaccttcgaattatgtggatcatcggatctgcaagagttgtcggcacccgaagaaggagaccagctgcgtgagaacgatacttgggagcggagagggttgtagaaggggcgaggaattttgtgggagatgtgtttggaggaggcttgtgcaattctggtgtgttggtacttga

SEQ ID NO: 36767 - protein, 408 aa, Muscodor strobelii
  misc_feature: SGI Peptide ID NO. 572747
MEATRWPSDGSRATGPDRADQPRSPLSNKSNLNVTTWDHKDSSEGLPSPHESIFDAAWVSTSDIAKSPYQTARPATPTIKALDMDLFDCDSPLSRLESPFLYGHGTELTPIREQRSISTFKTGRTAASLSTSDLSSIMHDAPSGNKQENKIAPPLRRRSSFDLADLPKRVFKTRDIVPEERPKLCTLTYSRPKLIEIHTYPNKPIYPPHKRPATPPQLESYKKFYKSSKPTNPNNLSGGFEVPRFRDVRSGHGNLTAHPYNRLAREEDNARTDNGGENNLLRRLGLSPVGQNQSSNEAGPSNRPPNPNLVPSKGNHKGGQRSRFMEPQVAEIVNAPAHILPQARINAAGDDLPSNYVDHRICKSCRHPKKETSCVRTILGSGEGCRRGEEFCGRCVWRRLVQFWCVGT

SEQ ID NO: 36768 - DNA, 9908 bp, Muscodor strobelii
  misc_feature: SGI EST ID NO. CUFF.87746.3
  misc_feature: Variant of the nucleotide sequence at SEQ ID NO 36766
caccggagcccgtagcctatctgttccacttcaactccccagccgatcccagagctgaggccaacgtaatcagagacttgctgtctaagcttctcgccaatgcgaaagccaacgacccaagtgtcccgagggtcgcatccggatcaggcacgcccgtggcgggtgcttctgctaatggctctggctcggcggcgatgacttttgcgaatgccgccgtcgccaagccgagctcagcacggttgtttgatgatgaagcgttgaaaagtgatatcgtgttacagcagtccctgatgaaggcggatcgcgagttgacccagatgtatatggagggccgcaagaccaagcccgattctatgtcagatgccacgttcaacgcacacttctggtcagccagaatcaatctgctcagatctcacgccatcgagtcgagtcagaagaaagggccttacaacgtgttagcccaagtcaaacccacgctgcaacccagcaccgatcctacgaggcccagcgaattgaagatcaaattcagtgtggagcaaatccaaatgatcatgagccaacatccactagtcaagcgtatctacaacgagaacgtgcccccgttggagacgaacgagttttgggagaggttcttcctcagcaagctgtccaagaagctgagaggagagcgtccgactggtctggaaatggccgataacatctttgacaaatatgacgagtatgaagatattacagccttttcgagcaagcatctctctcagcatgtccctcacatcatcgacttggaaggcaacgaagagaatcagggtggcttcaagggcggcaatcgcaaagacgtggagatgcggccgagaggcagacacgacgtccccatcatccagacgctaaacagtattagtgggaaacttctggccaatgccgtacccaaggacaacgaaccggaaggctctgcgcgtttagatgatgacactttccaagaactttcgttgcgagatttacagggcgatgcagaagaacaccgcatcatgctcaatatcaaagagcagagcagattcttttcgagcgaatcgggtgaagaatcggaaactgcagctctctttgcccgacaaaacccagccaaggtattgagaggtgtacagggagatcttcgtacacttggcgaagacggcgctggtggtatcgccatccatccgtctttgggtatcgacgatgggaatgacagcgacgacgagcaaaacttgcagcctcatgtagggtcacgagattcccgaaagcaagcgcaacaacagatcctcaagagcatgctacaaagaagagagcagctatacggagatgaatcggacgaaacaactcccatgggtctcgatgcggagataacgtctacctgcaatcttactcatgctacgactctagagttcctgcatcagttttggtctgctttccactctggtgatcctgatcgggccgctgagcttggctatttggctgaagctttgaaacgatcgaaagagcggatcaaggctgttggtgaagatgcgaaaaataaacaaaacgagcgggttgagaggtacaagcaagagatctatgaccactataagaagacaggcaggagaattaagcccaatcccaaatccattccacgcactggagaggaggccgagctggctgtagccaagctcatggagcctgttgtcaattctcttgatcgagcaattactacttattccaaagcacttgccgctgagggcattcaggccagtacagaactttgagtgccaagggaagctagcgctcgctgctatcaagtgcggtagcgttcagtctaagacgagtaacagtgtaaattagatcgtggtaggcatgtagtccatcccacgagcgggcttccaaactcgagattgcctgaatccaaaaaagaacagagtcggttgacaaggaaattacgacccaatgtgtgcaggtagcatccctcgcgaaaccgaaatagaaaggacaacacggtttctaagtttatggaactcgcagtaccatgcaggctcacattctgtacaaacacgtattctcatcagacctagagcagagatcagaacgaccagtctgcattgcatgcatcaatccccagtttccttcttcagtatgacattttcttgtttggataattgaaaatagtgccataacttttttgatacaaacatggaggcaacccgctggccctcagacggctctcgagccacgggcccagatcgtgcagaccagcctagatcaccattatcgaataaatcaaacctcaacgttaccacgtgggaccacaaagactcatctgaaggtctacccagtccgcacgagtccatcttcgacgcggcatgggtgtcaaccagtgacatcgccaaatcgccataccagaccgctcgtcccgcgactcctactatcaaagccctcgacatggacctctttgactgcgactctccactgtcccgcctcgagtctccgtttctatacggtcatggcacggaactcacgcccatccgcgagcagcgcagcatctccaccttcaagaccggccgaacggcagccagtctttcgacatcagacctctcgtccatcatgcacgatgcaccgagtggaaacaagcaagagaacaagattgctcctcctctccgccgccgatcctcctttgaccttgccgacctacccaagcgtgttttcaagaccagagatatcgtacccgaagaacgaccaaagctctgcacactaacctactcccgtccaaaactcatcgaaatccacacatatcctaacaaacccatctacccacctcacaagcgtccagctacacctccacaactagagtcctacaaaaaattctacaagtcttcgaaacccacaaatcccaacaacctctccggtgggtttgaagtgccacgattcagagacgtacgaagtggccatgggaatctgacagctcatccttataatcggctcgcgagagaggaagacaacgcgagaacggataacggcggagagaacaatctcctccgtagacttggtctcagtcccgtaggccaaaatcagtcgtcgaacgaagcgggtccttcgaatcgaccgccaaatccaaatctggtgccttcgaagggcaatcacaagggcggtcagagaagtaggttcatggagccgcaagtagctgagatcgtgaacgctcctgcccacatacttccacaggcacgcatcaatgctgcaggcgatgatctaccttcgaattatgtggatcatcggatctgcaagagttgtcggcacccgaagaaggagaccagctgcgtgagaacgatacttgggagcggagagggttgtagaaggggcgaggaattttgtgggagatgtgtttggaggaggcttgtgcaattctggtgtgttggtacttgattagagcaaacgcgactgcagatatagggggcgtggtagacattcgtgtaggccggatcgatttggctcggccaggttggcttttagacgagcttttctctttgcaaggagttatcttgtcgagaggacggggttgttctcggtggggaatgctattactgtgtgtctggtcgaacagaggtcggatgttagagtgctgggtttgggaatcgaaagcataggttttgacacacaggcggcgttactattcctaagtattatcatcatgtttctgcacagattgtatcacagcttggggtttgactacctcccagtgttctgtgcgagagcatggaattcgctgagctgtattgacatagcatgtagactcaagctgatgtatgatagactcttatcctcatttttggggttgtagatattttcaggcacgcagagttgaagtctcggtttaggtattgaagtgcagttagcgtttccattgtgcttgtattgtaggagggccttttcaggactacagatgcttaattgtacagctggaaggttcgtatcttccagatgtccataggttgtgcctgctagtcaactcaagcgcaagcatagtcatgaggtcatgccggcatctatgtacgactttgtgcagtttgggaacattgtgcgtgagtcaaaatgtatgtaaccagcggatgtgttctctcaattgcacatatttcgaagcttacaatttctgagttggttaccgagatctactacgaattccacacgagcttggaaccacgcatgctccagttatcccttcatcgttcactatcatatcacaacttgatggtgtaatattctacatgactgctcctttgcggctattaggcgcaaaaccagcaacaatacatcattccttgagagatgtataatcctatttcgatagagagtggccggccaaattaacagcttgatatgcttgattacccaactgtattctgtgtgcaaatgcagttcgcgcaccttggtggaggcttgctcagtgcaagcatcctgagccgaacaggtagcagctcttccagagcccgcctggggtcagcacgtactatttgcgagtacggtacacataaatcttgtgttgacccatccagcatcctattctaaggctttcccggaataatgctctggttcatcccatgctgattctctttcaccgtatctagcctttcttgttcatgtaggaacccgaatacctgtacaatcggatgccagttataaacggctagtgatagttctattggtttaagactcgccgtcgtcaattgagatgaaacgagtcccatcgaaagccttcgttgcttaagtgcttttaattgcaatacggaatgtcgaatgaaccattccctatgctcaagatattgggagtcaatggcacgccttcggagatctaaaatttcccgaagcactcagaagtcatgtcgattgcattcaaggaacctgccaaatagcaattgatccgccaaagaggtactcgcggataataataagcacgcgatacaactcagcctattcccgcaccaatctgatctgttgacccagcatcttcaaagcgcccgcgcgcataaagataagacagacggacagcttgcagcaagcaagcaggtaattctgcctattagcttcgagacctaagccatgtcttttacgacaggctttcggctccggatgcgagcgagacttggccaacgtctgagcgatgcatttgtcattgacaatctgccatctctccggttcattttagggaggtggtcgttgagcggatcgactttgcggtgaggataggagagcggatatggcttgagacagccttctggacttagacttcgtacgttatttcgggttgcattcgatgcaccagataaaggcaggaattcgtgaaatagccctgtggtattactatgaacgggcgcgtaacaatgcaacagagccacgtgccgcggcggagaacattagggcaaggagattttctgaacggtgttcagatcatatcatacgatatgtactgcatcagacaagcatattgaatgcttgctgtacatatatttccacgtcatcaacaccggcaaaggcaataggaataatataagtcaaatatactcatgtactagaatagggcgttaatatatcgaaaagttcgtcagcgggagtcatatacgctactggaaggtatgtgacagaggtgactgttgcaaaacagctgttgtacgcttgtagcattttaataggaatgaataatattatttgtcgacaagcttctcagattatagcactcgtaaccgtcaagtaagttgcaaatgactctgagtcgcacaccatggtatacacctctatattctacaatattcacacgccctaactctactcgcaatgatgccaaagaactgggacgtggaccacaacaagttatactactacatatgtaacaccttctaacgtagatacacaaagggaccaagttgatccttgaagaaaacagcgagttacatatatatcggtcacgcaattcgaccatttattgctatcgacgactgttacacccggttcaaatcttatatgaccattgtgcagacctcttctgaggcaaaaacagttgtatgaacccactatcatcttctcttgcctgtagaggccatgaatattggctgggcgctgcacgaagaactttcacctaccgtttctatagtagttgacttctcttggcttcggtgttgcagcttgaatttagatgcatgaatcaaacacgattctcgtatcttcgtatccggtcaacagttcgcacagtccaagacgtcaaataaactgcttcaacatagaatagtggctcttaaaccatggttccacatgtccactcggtgaagaggtttacgatgatatactattggtcctaaaattccagatattcaacatttcaatggagcttctacatacgagagcgcgcatagtgttgcgctactgggcccatatgccggattatccgtgccggagtattgaaataaatgaaatctgcacattaaggttggctgcaagatcgaggctaggaatcatccaaatctatatctcacaagaagcttggctcggctattgtgccgaaggaaacccaaaatccagggccaagatacaggccggttgagcaactactacatatttcatattcacgtaacattttgcgtcgaatctttcgccctcaatgtacggaagccgtaattttccagtcggcacttcgatgcaacatggtgcctcagctgtgccgttagatcgcagccacaactgtgaccgtagacagggacactgcataccggtgttccaaattctcagtgtagatcagcgaatgtctaatgctctgacgtcgggcttctcaatgtagatagacatgtctctctctctcgtgtgttcgccggggttcgccaaccgttgacggtctcctcgctaacgcaatgcgcaccggcgagaagacatcccttcacgtgcatataacaaacgttgtggtacagatgagtgcattaaacaatgttctctcactgccggggcttgtggagcgcgtagtattgatgacatcctgcagtatgcaacagctactagtcggaagtgactggctatcgaaggctcacaggccgcatgcgtactgtagagaggaacttgagtcagcgagcgttgtcgtcaaatcaaagcctcgagatgattaagccggtcccgaagcctagttgctagtctcgagtgagccaggacacgttgctagagtatacaaaagtggtgacgcattatcagctccacgtcgcaaacagcagataccgtcctaactagaatagataggtggtatatctctggatgcaagattccgctacagtgaaatgagacatgttggtctcatccgaaaaagcgtctcctctcggatatgttccatgtttgcctgacgcttgcacagcattgcaatcgtcggggagtatgtacgtgtatcattatcgtattgaggcagttaatcgacagcgattcgcaaaaaaacgagacattgtcccaaagcggtaggaaactcacctgcagaagattgtcgattgccttctgcatcgatgccaagcatggtgatttggaactgtgcacggggcggcttacttgcctgctcgaatgaatggatgagagtgtttattaaattcatgtaggccattgaggaacgagtagacatctcttgatgccaagatgacatttagacgtcgatcttggcataccagttgtccagagagaaacgtccattttcaaccgctctaataagcccaacgtcgcgctgcgcttattccatccaatctgcaaggaaaggatacgtgatccctgattctttgagcgccgtattccgatgtctgactcgctttccaagttggcaactcaccggagattttaatgcggctctggaatctcgtaaggctgttggggctggaacccgctccaggatcgtttgatgcatgcgaaagatcattcgatgcagcgtataatgaccttgagttgtcggttcctgatagtcccaaagcaaatcccaaagacccaatgaggtccgatcattcagtaacgaggtcatggagtaacgccgaatgagacttgagtatgggttgctcgcagtcgcggaagcattcccgtgtatatatgtcttgcctattcaggcagttgggtagtcctgcgatgttagcgagcaacatcgcttgagtcgcttgacagtgtgcacgcgtatgtcggtataccgtttacctcctctagaaatgaatccatgctggtacgggtcgagctgacaccagccgatcaaaccgatgtttttcttctcgacagccttccgagatgcgataggccatgatggaaaataagcgagactcacaggggcctagtttcggttggtctgcggagtattttcccgacattcgaggaactgtctccgcgtcctttttcacatacagtagaagcttgctatggaagtttggaagggttcttcagatctgtcctaaccgcagggagttgcccagcccgggagaccacttaacttctcccgctattagacgccggggatacccaaacgccaatgcggctcagcacaagcggcaagcggctcgttggtgccagcccaactttagatctcatactattgcaactcaggcgaggctgttgaggcttgtctcggctttgtgacaaacggggggaaaaaatccttatgcaaagttttgcttttttgtacgtaatgttgatagtaaggatctcaatttgtgattagaatatccacaacaccttgctaggtggtgacaaagttcacgatactgtatactataacaacattaagatatttctcacggtgctgaatatttgcttcttttgacccccacctaggtgaatatttgttagttcttggaaaattttcctcggctacgttacctgcccaaagtgccactgcgtttgcccctaagcgacgtgaccagattgtagcacatcaagaaggtaacctctagttccgatttactgcatgtccaaacccaacgaacccagcgacatcgccccaagattgatctaacgatttttattagaaattcacctagcttggcattgctcaagagcggctgtagaccagcgtagcctacctaattagcatttttcaagtagctgcagacaggttagcaacaccgccgctatgcattttaaggagcgttcgacagtaccccagtctttcaccaaatattctctagtgaagatcgcgggtatgcagccactttccatgatatgtgagatgaaatctagattcggagttaattccttactacagtacggtgcatcagagcatatttggccgcatccacacgtgtagggacattcaagccttagaccacagctgaccagcacctaacagcgctgtgtcccagacatttgggtctgctggctgaacgtattgtatacgcgtatacagtagtggccgacgaaactcaacctggcccttcaaaaatactctcgaaaagctagagtgcctcgagtactgggcatccgccgctaatcgagtggtttcctcggaatgacacataactttgttgtttgtctagctgtcaggggctcatttattacgtagaaccagttagcagagtcgaaatggcgccgtttgtcgaccataacactcatggcgaggtgtttatttcgaatttgatggctgaggctccgctcggactgaccggatatgtcatgaaatggggctgctgtggaagtgttttgtcaggtgtcaatcaaagacggcgactgtgttgtaaatgatcttggccggggatgaaatgaatgacatggctaatgactagtcgcaccatcaatctcgcaccgttgcatgaggagtcatgcgatgttgacgatgcttgatgcggtggacgattggaagatggccaggtatctggctttgattggtgtgccggcatgaccgctcctttcggatgagacctgaatccact

SEQ ID NO: 36769 - DNA, 990 bp, Muscodor strobelii
  misc_feature: SGI cDNA ID NO. 572748
  misc_feature: Encodes the peptide sequence at SEQ ID NO 36770
atgggcagattcagttcaaggcgaacctccccgatttactttaacccatccacggacttgtcaccatcatcgtcagatcttgaggactgggacgctgaaacggccatggactcgtcccgtccaccgagctgggttatccctcggactggctcaccattcgtaaatccaccaacattacaagacatactctccgacacagcgccacagccatggactctcagcgcgttcatggcctatctgtcccaaaaccactgcttagaaacattggagtttattctagacgctgaacgttatcgcgctgcctacagtggtgcaactcgacccggatgcttcggaattgagcatctttgcgcactttgggaaaaaatcatcgaggcatacatggtgcctggatcaccaagagaagtcaacattccttaccctgttcgtgatcacctcatccaactcccctgctctccggcaagcccggctagcccagcagaattggatgaagctgttcatattgtgcgggagcttatgaacgattccgttttggtaccctttttagagtctgttgtgcccgtaactgttgaggctcaagaggtagaaaaccttaagcagcgaacacgtttacggattgccaaagagagcagtgtcccatcagacgaatctgtgcactctcccatttccacgttgctccctcttttcggcaaaagaagcactaccagatccaactctgggtctagcggtgactctaacgatgtcgaaatgacagatgacagtatgagtcctggatccagtccggcaggagagccaatgacaccccctacgacgccacctacttccagtgatgcgttcaattcatcaccaaagccccgtaactctggaagcagctggaggaaaatgggcgctaagtttggacttggcaagagaagcaaatcacgatcgaatacttcggctgccgacgtacagactgccaatcccgctcagcaaagccagtcttccttatag

SEQ ID NO: 36770 - protein, 329 aa, Muscodor strobelii
  misc_feature: SGI Peptide ID NO. 572748
  misc_feature (58)..(184): Pfam Id: PF00615 Pfam Desc: Regulator of G protein signaling domain
  misc_feature (1)..(312): NCBI GI: 171690234 Blast Desc: protein product [Podospora anserina] gi|170945065|emb|CAP71176.1| protein product [Podospora anserina]
  misc_feature (57)..(319): NCBI GI: 202958415 Blast Desc: regulator of G-protein signaling [Magnaporthe grisea]
  misc_feature (57)..(314): NCBI GI: 39942132 Blast Desc: MGG_03146 [Magnaporthe grisea 70-15] gi|145015878|gb|EDK00368.1| MGG_03146 [Magnaporthe grisea 70-15]
  misc_feature (4)..(229): NCBI GI: 116204769 Blast Desc: CHGG_10268 [Chaetomium globosum CBS 148.51] gi|88176396|gb|EAQ83864.1| CHGG_10268 [Chaetomium globosum CBS 148.51]
  misc_feature (35)..(311): NCBI GI: 154315796 Blast Desc: BC1G_04470 [Botryotinia fuckeliana B05.10] gi|150846866|gb|EDN22059.1| BC1G_04470 [Botryotinia fuckeliana B05.10]
  misc_feature (27)..(303): NCBI GI: 225560566 Blast Desc: a-agglutinin core protein AGA1 [Ajellomyces capsulatus G186AR]
  misc_feature (50)..(203): NCBI GI: 46116918 Blast Desc: FG04301.1 [Gibberella zeae PH-1]
  misc_feature (19)..(315): NCBI GI: 255938820 Blast Desc: Pc14g01860 [Penicillium chrysogenum Wisconsin 54-1255] gi|211584801|emb|CAP74327.1| Pc14g01860 [Penicillium chrysogenum Wisconsin 54-1255]
  misc_feature (31)..(305): NCBI GI: 226292972 Blast Desc: regulator of G protein signaling domain-containing protein [Paracoccidioides brasiliensis Pb18]
  misc_feature (39)..(305): NCBI GI: 145255721 Blast Desc: An18g06110 [Aspergillus niger] gi|134084657|emb|CAK43335.1| protein product [Aspergillus niger]
MGRFSSRRTSPIYFNPSTDLSPSSSDLEDWDAETAMDSSRPPSWVIPRTGSPFVNPPTLQDILSDTAPQPWTLSAFMAYLSQNHCLETLEFILDAERYRAAYSGATRPGCFGIEHLCALWEKIIEAYMVPGSPREVNIPYPVRDHLIQLPCSPASPASPAELDEAVHIVRELMNDSVLVPFLESVVPVTVEAQEVENLKQRTRLRIAKESSVPSDESVHSPISTLLPLFGKRSTTRSNSGSSGDSNDVEMTDDSMSPGSSPAGEPMTPPTTPPTSSDAFNSSPKPRNSGSSWRKMGAKFGLGKRSKSRSNTSAADVQTANPAQQSQSSL

SEQ ID NO: 36771 - DNA, 2040 bp, Muscodor strobelii
  misc_feature: SGI cDNA ID NO. 572749
  misc_feature: Reduced expression when VOC is produced
  misc_feature: Encodes the peptide sequence at SEQ ID NO 36772
atgtcgagattcgcccgaggaacgcgcttcttgaggcgtctggcactgccagctaccgtggccgccgtcggtggtggtgccctgctgtactcgtaccgtccgatcaatgtgcccggtttcgaaggcccggccgtccctccgcccatatacggtgccgacggcactttcacacttccacgcttccctaaagtgccaacgcggaacgatcaaatcgcggcattgaaaaaggccaagacagaagaagaggaatacgatgtgttggtcattggaggaggcgccacgggtgctggtgtcgctctggatgctatcacaagaggtctgaaggttgccatggtcgagcgtgatgatttcagcagtggcacaagtagcaaaagcaccaagcttgtccacggtggtgtccggtatctggaaaaagctgtctggaacctcgactatgcgcaatacgagctggtcaaggaggctttgaaggagcgcaaatatttcttacagacggcaccgcatctaagcatgtggttgccaatcatgcttcctttggacaaatggtggaaagccccgtactattgggcgggaactaagttctacgattttctggccggtagcgaaggtatcgagagctcatacttcttgacgaggagtaaagcacttgatgcttttcccatgttaaaacctaccgaccttgttggcgcacttgtatactacgatggcgcccacaatgattcgagaatgaacgtatcgcttgctatgactgctgctctctacggagccacgatagtcaatcatgccgaggtcacaagtcttatgaagaacgagcaaggaaggctttgcggtgcgaccgtgaaagatctcatccccgagcgcaatggccgcggttctgaagatatcacagttcgtgctaagtgcatcatcaactgcactggccccttctcggactcgatcagaaaactcgacgaccagacgtgcaaggagatcgtctcccctgcgtccggtgtccatgttatcttgcctggctactacagtccagctaagatgggtctgattgatccctcaacgtcagatggacgtgttattttcttcctaccatggcaaggcaacactatcgcaggtactacggacgagtctgccaagattacacagaatccactacccgatgagaagtctattcagtggattctagatgagatccgacattatctagctcctgaaattcaagttcgccgtggcgatgttctagcagcatggtccggtctgcgacccttggtcaaggaccccaaggctacgaataccgaatccctcgtacgcaaccacctgattgacatttccgattctggcctggtcacgtgtgccggtggtaaatggactacttaccgccagatggccgaggaatgcgtcgatgcagctgttaaagagtttggtctcaagactaagccagttctcaatgcgccgagagtcagcggaacggaagccatagatgatggggctatcctaaacggatcatgccaaacacacaatgtacgattgattggtgcccacggtttcagcaagacgctcttcatcaatctgatccagcacttcggcatcgagaccgaggtcgccaagcacttgacggagagctacggagacagagcctggaccgtggcggccatgtgcaagacgactgatctccgattccccgcccgaggcgagaggatatcaaggctgtacccgtttgttgatggagagattaagtacgccatcagccacgagtacgcgcagactgctgttgatatcctggcgcgacgcacgagattggcgttcttgaatgctcaggctgctctcgagtgtctacctaggatcatcgatatcatgagcgcggagctaaagtgggacaagactcgtgaggagcgagagtggaaagatactgttgcgttccttgaatcaatgggtttgccacagcctatgttgactgcgactcgagcggatgtcgagaagggtaagttggactttagctcctcgctcgagttcaagatgtactcgaggcacgataagcctcttgttgagtag

SEQ ID NO: 36772 - protein, 679 aa, Muscodor strobelii
  misc_feature: SGI Peptide ID NO. 572749
  misc_feature (85)..(456): Pfam Id: PF01266 Pfam Desc: FAD dependent oxidoreductase
  misc_feature (1)..(679): NCBI GI: 164424849 Blast Desc: glycerol-3-phosphate dehydrogenase, mitochondrial precursor [Neurospora crassa OR74A] gi|16416069|emb|CAD01115.1| related to glycerol-3-phosphate dehydrogenase precursor crassa]
  misc_feature (1)..(679): NCBI GI: 39942134 Blast Desc: MGG_03147 [Magnaporthe grisea 70-15] gi|145015877|gb|EDK00367.1| MGG_03147 [Magnaporthe grisea 70-15]
  misc_feature (10)..(676): NCBI GI: 256729207 Blast Desc: NECHADRAFT_71267 [Nectria haematococca mpVI 77-13-4]
  misc_feature (1)..(633): NCBI GI: 171690242 Blast Desc: protein product [Podospora anserina] gi|170945069|emb|CAP71180.1| protein product [Podospora anserina]
  misc_feature (1)..(679): NCBI GI: 116204767 Blast Desc: CHGG_10267 [Chaetomium globosum CBS 148.51] gi|88176395|gb|EAQ83863.1| CHGG_10267 [Chaetomium globosum CBS 148.51]
  misc_feature (10)..(676): NCBI GI: 154316989 Blast Desc: BC1G_03912 [Botryotinia fuckeliana B05.10] gi|150845524|gb|EDN20717.1| BC1G_03912 [Botryotinia fuckeliana B05.10]
  misc_feature (10)..(676): NCBI GI: 156043783 Blast Desc: SS1G_10895 [Sclerotinia sclerotiorum 1980] gi|154695282|gb|EDN95020.1| SS1G_10895 [Sclerotinia sclerotiorum 1980]
  misc_feature (2)..(676): NCBI GI: 145238985 Blast Desc: An08g00210 [Aspergillus niger] gi|134076641|emb|CAK39778.1| protein product [Aspergillus niger]
  misc_feature (8)..(676): NCBI GI: 239609276 Blast Desc: glycerol-3-phosphate dehydrogenase [Ajellomyces dermatitidis ER-3]
  misc_feature (8)..(676): NCBI GI: 261187338 Blast Desc: glycerol-3-phosphate dehydrogenase [Ajellomyces dermatitidis SLH14081] gi|239594715|gb|EEQ77296.1| glycerol-3-phosphate dehydrogenase [Ajellomyces dermatitidis
  misc_feature (52)..(637): SWISSPROT Homolog: EC 1.1.5.3 Glycerol-3-phosphate dehydrogenase
  misc_feature: Useful for introducing or modulating the production of volatile compounds
MSRFARGTRFLRRLALPATVAAVGGGALLYSYRPINVPGFEGPAVPPPIYGADGTFTLPRFPKVPTRNDQIAALKKAKTEEEEYDVLVIGGGATGAGVALDAITRGLKVAMVERDDFSSGTSSKSTKLVHGGVRYLEKAVWNLDYAQYELVKEALKERKYFLQTAPHLSMWLPIMLPLDKWWKAPYYWAGTKFYDFLAGSEGIESSYFLTRSKALDAFPMLKPTDLVGALVYYDGAHNDSRMNVSLAMTAALYGATIVNHAEVTSLMKNEQGRLCGATVKDLIPERNGRGSEDITVRAKCIINCTGPFSDSIRKLDDQTCKEIVSPASGVHVILPGYYSPAKMGLIDPSTSDGRVIFFLPWQGNTIAGTTDESAKITQNPLPDEKSIQWILDEIRHYLAPEIQVRRGDVLAAWSGLRPLVKDPKATNTESLVRNHLIDISDSGLVTCAGGKWTTYRQMAEECVDAAVKEFGLKTKPVLNAPRVSGTEAIDDGAILNGSCQTHNVRLIGAHGFSKTLFINLIQHFGIETEVAKHLTESYGDRAWTVAAMCKTTDLRFPARGERISRLYPFVDGEIKYAISHEYAQTAVDILARRTRLAFLNAQAALECLPRIIDIMSAELKWDKTREEREWKDTVAFLESMGLPQPMLTATRADVEKGKLDFSSSLEFKMYSRHDKPLVE

SEQ ID NO: 36773 - DNA, 6989 bp, Muscodor strobelii
  misc_feature: SGI EST ID NO. CUFF.87803.0
  misc_feature: Variant of the nucleotide sequence at SEQ ID NO 36771
tgcgggagcgtccagggtggtattattcaaggcgcgcgcctcgcgtgtctgatatgaatatgcaacagtaacacaatacgttccagtacagtggctcgccgacctggatgggtcgagagtcaatcgcgaacattcatcaatcaccattgatacatccacgggtgacgcagcttcagcttccccatgttccccgacaacatgcgacggtggtcttcttgcaattgtagaagcagaattgtgccatgcacttttctgattctcaggtgacatcggcggcagcgggtcaatttacggattcatgcagatcttgcgccccgactcggcggttatcgatgctctgataaacactccggccatcaccacgtctgctccactctcaggaatttagacagtccatattttaccgtagctggcataccgccagacccgtatcaccacaaggacggcgtggggagcgccacggccgagacaccgtcatcgttagtctgtgttatcaaagtctagagattgcttccggactttttgccctgctctgcttgcttgctcgcccgtgtctgtcgagcctgtgctgttgcccggtctagcctgcttagtgttgccctcgctgttcttcgttgccttctctttgctattctttgccatctatagccacttaatattgaatttccaaggcgagccgagataagccttgaaaagtggttgtgggagatcaaggtttgaccgggccccattccggcttccgtcaaatttcgacgccgcagattattatagcttgcgctaacatctccaacttcacctgcgtccgtcccctgccaaacctcggtcgcatttactccgaagagtgtgtgatcgcaattcgacttcacacactcctgtgacgttgacacgaattgcagttcgtccggctgcgactacctccttggtcgccatcctatcacgctccacgatcgcccgcgcagtgcactggtagctgccatgtcgagattcgcccgaggaacgcgcttcttgaggcgtctggcactgccagctaccgtggccgccgtcggtggtggtgccctgctgtactcgtaccgtccgatcaatgtgcccggtttcgaaggcccggccgtccctccgcccatatacggtgccgacggcactttcacacttccacgcttccctaaagtgccaacgcggaacgatcaaatcgcggcattgaaaaaggccaagacagaagaagaggaatacgatgtgttggtcattggaggaggcgccacgggtgctggtgtcgctctggatgctatcacaagaggtctgaaggttgccatggtcgagcgtgatgatttcagcagtggcacaagtagcaaaagcaccaagcttgtccacggtggtgtccggtatctggaaaaagctgtctggaacctcgactatgcgcaatacgagctggtcaaggaggctttgaaggagcgcaaatatttcttacagacggcaccgcatctaagcatgtggttgccaatcatgcttcctttggacaaatggtggaaagccccgtactattgggcgggaactaagttctacgattttctggccggtagcgaaggtatcgagagctcatacttcttgacgaggagtaaagcacttgatgcttttcccatgttaaaacctaccgaccttgttggcgcacttgtatactacgatggcgcccacaatgattcgagaatgaacgtatcgcttgctatgactgctgctctctacggagccacgatagtcaatcatgccgaggtcacaagtcttatgaagaacgagcaaggaaggctttgcggtgcgaccgtgaaagatctcatccccgagcgcaatggccgcggttctgaagatatcacagttcgtgctaagtgcatcatcaactgcactggccccttctcggactcgatcagaaaactcgacgaccagacgtgcaaggagatcgtctcccctgcgtccggtgtccatgttatcttgcctggctactacagtccagctaagatgggtctgattgatccctcaacgtcagatggacgtgttattttcttcctaccatggcaaggcaacactatcgcaggtactacggacgagtctgccaagattacacagaatccactacccgatgagaagtctattcagtggattctagatgagatccgacattatctagctcctgaaattcaagttcgccgtggcgatgttctagcagcatggtccggtctgcgacccttggtcaaggaccccaaggctacgaataccgaatccctcgtacgcaaccacctgattgacatttccgattctggcctggtcacgtgtgccggtggtaaatggactacttaccgccagatggccgaggaatgcgtcgatgcagctgttaaagagtttggtctcaagactaagccagttctcaatgcgccgagagtcagcggaacggaagccatagatgatggggctatcctaaacggatcatgccaaacacacaatgtacgattgattggtgcccacggtttcagcaagacgctcttcatcaatctgatccagcacttcggcatcgagaccgaggtcgccaagcacttgacggagagctacggagacagagcctggaccgtggcggccatgtgcaagacgactgatctccgattccccgcccgaggcgagaggatatcaaggctgtacccgtttgttgatggagagattaagtacgccatcagccacgagtacgcgcagactgctgttgatatcctggcgcgacgcacgagattggcgttcttgaatgctcaggctgctctcgagtgtctacctaggatcatcgatatcatgagcgcggagctaaagtgggacaagactcgtgaggagcgagagtggaaagatactgttgcgttccttgaatcaatgggtttgccacagcctatgttgactgcgactcgagcggatgtcgagaagggtaagttggactttagctcctcgctcgagttcaagatgtactcgaggcacgataagcctcttgttgagtagtcagtcgagtaatcaggaactgaatattcagcttcggcttaggcttcccttccttggtctgaacctaatatacgcctgcttttggataaggtagagcataggattgggtcacctctacgcagtaatgatgtgctttccttcctacaactactaatcaaccttgaagagtaggcattgcttggggcgttaggtatataattagatataattcttaggttgtaaatcgagaagttcggtttagtttgtccgcaagtttcgaagtcacattttccatgcatgactcgggcgtatgtaagacctcggcacaagcgtggcgaagtgcacattggatggagcagagcgtctaaagactaatgagtgtcgggacatgaaagtgctgtaaatttcgcaacaaaggtagaaatattcagtgagatagcatgtcattatctgtatcgccattcatatcacttgtttcttgagacatatcacgttatattaagtcacaaagatactggagcgtgttcaaataagagtgaagtgtaccatgcattactatgtacatttgcaggttgatctacttccaaaccctatcacatatatacgatagcctcttttgggcctctttataaacaataacaagcagagcgattagccctgatgctggatattctgatcgtcatgcccttcctgtgaacgccgtgccagtatcatgtgatgatgaatgcctgtctatgatgataacaaagtatgcctttttagaaatttgcaaacgctttcaccgccgaaaagcgaagagtaggtacgccggaggtatgatggatgtaatatgtgacgtgatgattgcccattatgcgaaagctactacaagctcgttgttcatgacacgtgatgagagaatgatgtggtgatgtgacaaagatgattcatccggaattcttcctttcggaagcgtggaacacactacggagcaaactccgattatctcgagatgttctgggttgaacacttcgtggtggaggaagtattctttctgtgttgacgcgataggtgtggaaagaagaggtatgataactgcaaatggctgttgccatgattgaggaaggctttctgcgaacatattccgtttcccagccatacgaatctacttcgcagaatctgcctcggttggtgtcaggtgatgtactggcagtgctagtcgtgctagtggggctgagagcctcatggctaggtgaaggagataattcaacatgattcgaaatgtccacaatgctgctgagtttctctgctgacgacactcgagcaatgccatcggcaggactgtgattgctcatgtctgtgtcaccatctggatcaacctcgagaggctgaagagtctcgggcattggcataaagtgaacaggagacatggccatgcctgaaggcgtttctgagctcggtgaaaagaccgatgcacgcttcacactggactcctctggtacgtcggtcgatactgcgagacgatgtcgcatccggatgttggttttcaccatgcctgatgaatgctgcgatgcgctccgcgcttttgcggccacactacttatctgctctctggatccccgaaggctgggttgatagatgttgaggcccatggacaaatcagtgtcctgggtatcaatagacaagcgtgagttggacgctgaactactgtcatcattgagggtagagagtggataagatagagtgacctgtgacccctataaggaagactggctttgctgagcgggattggcagtctgtacgtcggcagccgaagtattcgatcgtgatttgcttctcttgccaagtccaaacttagcgcccattttcctccagctgcttccagagttacggggctttggtgatgaattgaacgcatcactggaagtaggtggcgtcgtagggggtgtcattggctctcctgccggactggatccaggactcatactgtcatctgtcatttcgacatcgttagagtcaccgctagacccagagttggatctggtagtgcttcttttgccgaaaagagggagcaacgtggaaatgggagagtgcacagattcgtctgatgggacactgctctctttggcaatccgtaaacgtgttcgctgcttaaggttttctacctcttgagcctcaacagttacgggcacaacagactctaaaaagggtaccaaaacggaatcgttcataagctcccgcacaatatgaacagcttcatccaattctgctgggctagccgggcttgccggagagcaggggagttggatgaggtgatcacgaacagggtaaggaatgttgacttctcttggtgatccaggcaccatgtatgcctcgatgattttttcccaaagtgcgcaaagatgctcaattccgaagcatccgggtcgagttgcaccactgtaggcagcgcgataacgttcagcgtctagaataaactccaatgtttctaagcagtggttttgggacagataggccatgaacgcgctgagagtccatggctgtggcgctgtgtcggagagtatgtcttgtaatgttggtggatttacgaatggtgagccagtccgagggataacccagctcggtggacgggacgagtccatggccgtttcagcgtcccagtcctcaagatctgacgatgatggtgacaagtccgtggatgggttaaagtaaatcggggaggttcgccttgaactgaatctgcccattatttcttgggtgaagctagatgacgccaaaagtctgatcgtaatccgtagtctccaatcaagagcaatcgaagctccggcagcgaaagaaaggctaggcaagctcctatatccgtcgtagccggcggcacatcgtcttctcgaacaatatgctctgctggtgaatgctatatgacactgtttggtagtctcttagcggccacctcttatgatccgtaacaagctccgtataggcctccgaccaacggtagatctgtgaaccaatcgctgtgctagcggcttgagacgggcgcgggtgccagcagagcttagatggtcctaagtctcctagtttcaaagaggcgcagtctatggatatatatcaatagaacagctaccaacacagatgacgactaatgatggcagaagctctgctgctaatccacttcaatgctttccaattggctctctcgaagatccggggtaaaccatataccaaaatgaagcgacgtccgccactactgcgggtacagagtctgcggtgggatggttaggcgagaccgatgatgctgctttcggtaccagccaatagcaacgcaattaacgtagcctgcggattggctacagatgtccgcaatgtgatgcgcaatacaatagagtttgagacggattgggaggtgggctttcagtcctttgccaggtccagcagatcggcccgggagaagcttacttcgggcgggaacgagcgttggtaggaatccagacctgtaaaaatgattctagtcgatgattctacccaatactcagtggtgagcaaaacgagtctatcgcagggctgcacaacaggtttcacggtgaacgaaagaccatgtaccacctagtcgattggccagtgatataaaacgagagacggtagcaccacgtctggactggaccttcgttgacagcgtcaagttcgaaatgacgagcgagtgaccagaggaaggtatcattaagcgggtagattagtttctgtgtctcgatatcctcgctggttcagacaatgtttgtcgtttcacgaggttgagtggctagagagtcgttcacgtaagcgatcgtgggccgatatcctgtattctatcgttgatgcacaaggctggcgtgaatatcaacgagatcgaagggtcctacgggtagtgcggccagccgacgtagagtatatttggttgcgtgaggactgtagatttcactttctgtgtgttcatcaaagaaccccaagaatggcaagagtgagtaatggctaggaatgag

SEQ ID NO: 36774 - DNA, 2649 bp, Muscodor strobelii
  misc_feature: SGI cDNA ID NO. 572750
  misc_feature: Encodes the peptide sequence at SEQ ID NO 36775
atgtcgagcgccgagcaacttcttgaacagtatcaaggacatatcgttccgcgttcgttcgatccgggctttgtggttttgagctttttcgtttctctgattggtgctgcttcaactttggagctcatcaacagacgaacttcccgcaatgggctccttaaccatatatatttgatcagcgctgctgtgactatgggcggaattgccatatggtcgatgcacttcgttgggaacagagcaactgttctcgcccaaggccagtccgaactccagatcatatactccagcggcttcacggctgtctcattctttctaccgattctggttctctttgcggccttcgtggctacgggtacgaacaatcatgtttcctggtggaggatcggcggcggcggtacccttgctggaggagcgatttgcggcatgcattatattggcaacgcctctatcgccaactatacatgtgaatataagattgccaatgtagtcggatccgcagtcattgcggtcgttgacagcgtcgtggctttatcgatcttcttcgctttacgagcatcatggtctaactcatggtggaaacgtgtgtcgtctgctatcttactggctggcgctgtctcgggtatgcattggtgtgctgcgacaggcacaagctatcgtctcatcaagctgaacgaacacaatacttcctcacgcaacatcatcgtcatcgtcatcactgtcttgtcgttcatggccgctcttgttgtggccggcgtggtgatccatggaaccacggtcgcgcgaagtaatgcgagcaaggcccgacaagtagttttggcagccgctgtttttgatcgtactggtagaattctcgtcaatccagatggcttgcttccgagcgagaaaatcacagacacgtacattgagaagacgcccagcgatgcgttcaatatcgagaaccctttattccagtggatgtttcaagcgtcgcggaactggggtgacatcaacggcatgatcggtggcatggcttctcatttggctagcctttctttcaacggccgaggaaggagtgtgcgtttgatacgagaaaatggacagcttgttgaaaactacgacgtgttgttccgtgagctgttctgcttggctgcagcaagtttggccaacaaactcaaggaccatttaactaatgttggtattctatgggacgagatcctaccgaccggaaagacaaggatctattatccaaaggagactacggacgatacatgcgaaaggggagatagcgttagcatcagagattcagacagtggttggggctccttgatgtttcttgttcgtcgccttgagaattctcaagatgtcgaaaagctccaagcagcaggttaccgatttgccgaaatccaccaagtcagcggtatcatccgctcagggatgcagatcaaaatccccaacctcaatcaaactttcatgaacatggcgaggtacgcaaagcaggacacgatgctagaacccaacgtgcatttgggattcttcggcatccgagctcgtgtcggtggccaggggtttgacgtcctcgtagaaaagggagctcacaatcttctccctacagcgaagatgcctctcgagcgactagaaccttggcatctcgacttccttcgtcaatatgacgggctggctatgccggctgttcaacataatcttctagaaatggcaaagaggaaacactcgagggagactacctttgcttccattctgtttgaggctgtcgacgcgcttcgcgcacacatcaatgatcgagccttccacgatgctgccctgagttgccgaaccgtccaagttccatgccagcctcgcccgggctcagatgcagcagaagaatgcacaatgattgcgatccacttactagtgccaatacactacaagatgaatagtccgggctacgagtttgttcctttgacctttttcaaagtccatcagacagtgtatcagaattcaccacataacgctacattcacgcaacatcttcaccgagagctgtcgcctatagttcaaggaccacatcttgtgccgcagctgccaaaaaccgcgctcacgcaaaggcgatctacacgtttctttagcgtgtttcggttcaactcctctgggctacagactaccgacgcggatggcaatctgattccagtagacattgcacgcaaagaatcatataccggttctagcgagaccggttcgacactcgagctgtggaaccgtgacagtaataagctcaagagggtttcacatgagactatgccaacggcatcacccacgcctctggaaccactacacagttctcacaagattggaggcttgggcgggatcctagtgtcgcaggaaattaaggtgaacgtcagtcaagttcaggaagtagaaagtcgctcgtcgggtggtgaacgtccctcgcgagaggtcgcccttccgctttcccaggacaagaccaaaggtccaagatatgggcatacgcggacccaaacggagaggcagttcgagttcaagccaatcacgataattaacagcagcccccgggtagaacaggccatgggatcgacggtggtcgctagcgggagtaccaacgaggaaatgacctttgttgacgagctgttttcctgctgcgttgaaaggcggtaa

SEQ ID NO: 36775 - protein, 882 aa, Muscodor strobelii
  misc_feature: SGI Peptide ID NO. 572750
  misc_feature (67)..(114): Pfam Id: PF03707 Pfam Desc: Bacterial signalling protein N terminal repeat
  misc_feature (2)..(882): NCBI GI: 261354876 Blast Desc: conserved [Verticillium albo-atrum VaMs.102]
  misc_feature (8)..(879): NCBI GI: 171679144 Blast Desc: protein product [Podospora anserina] gi|170937643|emb|CAP62302.1| protein product [Podospora anserina]
  misc_feature (3)..(882): NCBI GI: 256729206 Blast Desc: NECHADRAFT_47644 [Nectria haematococca mpVI 77-13-4]
  misc_feature (4)..(879): NCBI GI: 256721099 Blast Desc: NECHADRAFT_54441 [Nectria haematococca mpVI 77-13-4]
  misc_feature (3)..(882): NCBI GI: 46116914 Blast Desc: FG04299.1 [Gibberella zeae PH-1]
  misc_feature (2)..(837): NCBI GI: 116178784 Blast Desc: CHGG_00020 [Chaetomium globosum CBS 148.51] gi|88184317|gb|EAQ91785.1| CHGG_00020 [Chaetomium globosum CBS 148.51]
  misc_feature (7)..(685): NCBI GI: 145608402 Blast Desc: MGG_03148 [Magnaporthe grisea 70-15] gi|145015876|gb|EDK00366.1| MGG_03148 [Magnaporthe grisea 70-15]
  misc_feature (6)..(677): NCBI GI: 85079079 Blast Desc: NCU05013 [Neurospora crassa OR74A] gi|28917339|gb|EAA27046.1| [Neurospora crassa OR74A]
  misc_feature (7)..(841): NCBI GI: 46126791 Blast Desc: FG07773.1 [Gibberella zeae PH-1]
  misc_feature (3)..(824): NCBI GI: 256719920 Blast Desc: NECHADRAFT_56701 [Nectria haematococca mpVI 77-13-4]
MSSAEQLLEQYQGHIVPRSFDPGFVVLSFFVSLIGAASTLELINRRTSRNGLLNHIYLISAAVTMGGIAIWSMHFVGNRATVLAQGQSELQIIYSSGFTAVSFFLPILVLFAAFVATGTNNHVSWWRIGGGGTLAGGAICGMHYIGNASIANYTCEYKIANVVGSAVIAVVDSVVALSIFFALRASWSNSWWKRVSSAILLAGAVSGMHWCAATGTSYRLIKLNEHNTSSRNIIVIVITVLSFMAALVVAGVVIHGTTVARSNASKARQVVLAAAVFDRTGRILVNPDGLLPSEKITDTYIEKTPSDAFNIENPLFQWMFQASRNWGDINGMIGGMASHLASLSFNGRGRSVRLIRENGQLVENYDVLFRELFCLAAASLANKLKDHLTNVGILWDEILPTGKTRIYYPKETTDDTCERGDSVSIRDSDSGWGSLMFLVRRLENSQDVEKLQAAGYRFAEIHQVSGIIRSGMQIKIPNLNQTFMNMARYAKQDTMLEPNVHLGFFGIRARVGGQGFDVLVEKGAHNLLPTAKMPLERLEPWHLDFLRQYDGLAMPAVQHNLLEMAKRKHSRETTFASILFEAVDALRAHINDRAFHDAALSCRTVQVPCQPRPGSDAAEECTMIAIHLLVPIHYKMNSPGYEFVPLTFFKVHQTVYQNSPHNATFTQHLHRELSPIVQGPHLVPQLPKTALTQRRSTRFFSVFRFNSSGLQTTDADGNLIPVDIARKESYTGSSETGSTLELWNRDSNKLKRVSHETMPTASPTPLEPLHSSHKIGGLGGILVSQEIKVNVSQVQEVESRSSGGERPSREVALPLSQDKTKGPRYGHTRTQTERQFEFKPITIINSSPRVEQAMGSTVVASGSTNEEMTFVDELFSCCVERR

SEQ ID NO: 36776 - DNA, 134 bp, Muscodor strobelii
  misc_feature: SGI EST ID NO. CUFF.87779.0
  misc_feature: Variant of the nucleotide sequence at SEQ ID NO 36774
gggcggaattgccatatggtcgatgcacttcgttgggaacagagcaactgttctcgcccaaggccagtccgaactccagatcatatactccagcggcttcacggctgtctcattctttctaccgattctggttc

SEQ ID NO: 36777 - DNA, 1335 bp, Muscodor strobelii
  misc_feature: SGI cDNA ID NO. 572751
  misc_feature: Encodes the peptide sequence at SEQ ID NO 36778
atgtcgtccgccgagcccccgaaggcacccaggctcgagcccttgccccacttcaagccgagtctctacgaacgcgcatggcagtcgatcccacaccccacgctcccgctcctcgcgacctgccaccagaaaaccgtcaccgtcttctccctgtccaccctttccgcccacagcagtgccacggctggccacgaacgctcggtccgatcctcgacgtggaagccgaaccagcccccgcacaagctctgtctcgtctccggcagctttgactccaccgctgctctctggcgctgggaggacaagggccagggacgcgacgggctcgaggtcgagatcaccggcgccgagaacgaagatgaggacggggacaaagactggcagctcatcgtcgtgctcgagggccacgactccgagatcaagtccgttgccttctcccccactggccagtacctcgcctcctgcagcagggacaagtcggtgtggatatgggaagacgtgggcgcctcggaggaggacgacgaatgggagaccgtcgccgtcctcagcgagcacgacggcgacgtcaaagccgtcgcctggtgtcccgagaccaaccgcagcggtcgcggccgctacagcagcgacgtccttgccagcgccagctacgacgataccgtccgcatatggcgcgaggacggcgagggcgattgggtgtgcgtgtctgtgctcgaggcccacaaaggcactgtctggggcatacagtgggagtccaaccccaagaacgagcgcttcccccgactcctcacttggagtgccgacaagaccatccgcgtctggacattgagagaggaggacgaagaagaagaggcgcccaagcagtcatggggcagactcggcggcatccccaacaccatgcgcagatcgctgaaggaggaatggttctgtacggccatactgccgacggcacatacaagagatatctactctgcgacctggagtgcggagacaggccttgtagccagtatcggcagcgacggtatcatcgcggtatattcagaaggaccggcagagtcaacagcggcgacgacagaagatgaagccgcagctgtatcggacgcagacatgttcatgacagtcggacaaacagaaataaaaaagccagaggcttcaaaacgatggaagctcctgacaactaccccaaatgcacacggcccctacgagattaaccacgtcacttggtgcaagcgatatgataacggatgcgatcccgagaagagaggcatcgaggagatgctggtcaccacgggagacgacggactcgtccggccctggaaagtcgtgttctccgatgtctag

SEQ ID NO: 36778 - protein, 444 aa, Muscodor strobelii
  misc_feature: SGI Peptide ID NO. 572751
  misc_feature (126)..(164): Pfam Id: PF00400 Pfam Desc: WD domain, G-beta repeat
  misc_feature (175)..(223): Pfam Id: PF00400 Pfam Desc: WD domain, G-beta repeat
  misc_feature (230)..(273): Pfam Id: PF00400 Pfam Desc: WD domain, G-beta repeat
  misc_feature (306)..(345): Pfam Id: PF00400 Pfam Desc: WD domain, G-beta repeat
  misc_feature (55)..(97): Pfam Id: PF00400 Pfam Desc: WD domain, G-beta repeat
  misc_feature (7)..(439): NCBI GI: 256729211 Blast Desc: NECHADRAFT_47465 [Nectria haematococca mpVI 77-13-4]
  misc_feature (7)..(439): NCBI GI: 46116924 Blast Desc: FG04304.1 [Gibberella zeae PH-1]
  misc_feature (2)..(420): NCBI GI: 261354875 Blast Desc: cytosolic iron-sulfur protein assembly protein [Verticillium albo-atrum VaMs.102]
  misc_feature (12)..(439): NCBI GI: 85074633 Blast Desc: NCU05426 [Neurospora crassa OR74A] gi|74698304|sp|Q9P5P0.1|CIAO1_NEUCR RecName: Full= cytosolic iron-sulfur protein assembly protein 1 gi|7801088|emb|CAB91483.1|
  misc_feature (7)..(442): NCBI GI: 257096326 Blast Desc: NCU05426 [Neurospora crassa OR74A] gi|74698304|sp|Q9P5P0.1|CIAO1_NEUCR RecName: Full= cytosolic iron-sulfur protein assembly protein 1 gi|7801088|emb|CAB91483.1|
  misc_feature (12)..(441): NCBI GI: 145608398 Blast Desc: MGG_03150 [Magnaporthe grisea 70-15] gi|257096284|sp|A4R7U3.1|CIAO1_MAGGR RecName: Full= cytosolic iron-sulfur protein assembly protein 1 MGG_03150 [Magnaporthe
  misc_feature (18)..(439): NCBI GI: 171690258 Blast Desc: protein product [Podospora anserina] gi|170945077|emb|CAP71188.1| protein product [Podospora anserina]
  misc_feature (7)..(442): NCBI GI: 116204751 Blast Desc: CHGG_10259 [Chaetomium globosum CBS 148.51] gi|88176387|gb|EAQ83855.1| CHGG_10259 [Chaetomium globosum CBS 148.51]
  misc_feature (7)..(439): NCBI GI: 169604576 Blast Desc: SNOG_05302 [Phaeosphaeria nodorum SN15] gi|121935813|sp|Q0USG2.1|CIAO1_PHANO RecName: Full= cytosolic iron-sulfur protein assembly protein 1 SNOG_05302 [Phaeosphaeria
  misc_feature (12)..(439): NCBI GI: 156043517 Blast Desc: SS1G_10762 [Sclerotinia sclerotiorum 1980] gi|257096290|sp|A7EZJ5.1|CIAO1_SCLS1 RecName: Full= cytosolic iron-sulfur protein assembly protein 1 SS1G_10762 [Sclerotinia
MSSAEPPKAPRLEPLPHFKPSLYERAWQSIPHPTLPLLATCHQKTVTVFSLSTLSAHSSATAGHERSVRSSTWKPNQPPHKLCLVSGSFDSTAALWRWEDKGQGRDGLEVEITGAENEDEDGDKDWQLIVVLEGHDSEIKSVAFSPTGQYLASCSRDKSVWIWEDVGASEEDDEWETVAVLSEHDGDVKAVAWCPETNRSGRGRYSSDVLASASYDDTVRIWREDGEGDWVCVSVLEAHKGTVWGIQWESNPKNERFPRLLTWSADKTIRVWTLREEDEEEEAPKQSWGRLGGIPNTMRRSLKEEWFCTAILPTAHTRDIYSATWSAETGLVASIGSDGIIAVYSEGPAESTAATTEDEAAAVSDADMFMTVGQTEIKKPEASKRWKLLTTTPNAHGPYEINHVTWCKRYDNGCDPEKRGIEEMLVTTGDDGLVRPWKVVFSDV

SEQ ID NO: 36779 - DNA, 5406 bp, Muscodor strobelii
  misc_feature: SGI EST ID NO. CUFF.87883.0
  misc_feature: Variant of the nucleotide sequence at SEQ ID NO 36777
cgcggcattgccagtcctccccttttaatttctacctaaggtacgtgtaccatattcaatctatcataactatcacggtactttttgcgccggcgtatcatctgctgctatttgtgcttcatttgaagattcgcccctcgatctggaatacagctcttctgtcagtagcctctggtgggaagtcacaagcggggtttgcgccatggtacatatgtaagggccatcgtcttttccatctagatagccctccaatctggcacccgaccacgtcgccgacctcacctcacctcgcctgctttccgacgctgaaagcgcaggcgcagcatgtcgtccgccgagcccccgaaggcacccaggctcgagcccttgccccacttcaagccgagtctctacgaacgcgcatggcagtcgatcccacaccccacgctcccgctcctcgcgacctgccaccagaaaaccgtcaccgtcttctccctgtccaccctttccgcccacagcagtgccacggctggccacgaacgctcggtccgatcctcgacgtggaagccgaaccagcccccgcacaagctctgtctcgtctccggcagctttgactccaccgctgctctctggcgctgggaggacaagggccagggacgcgacgggctcgaggtcgagatcaccggcgccgagaacgaagatgaggacggggacaaagactggcagctcatcgtcgtgctcgagggccacgactccgagatcaagtccgttgccttctcccccactggccagtacctcgcctcctgcagcagggacaagtcggtgtggatatgggaagacgtgggcgcctcggaggaggacgacgaatgggagaccgtcgccgtcctcagcgagcacgacggcgacgtcaaagccgtcgcctggtgtcccgagaccaaccgcagcggtcgcggccgctacagcagcgacgtccttgccagcgccagctacgacgataccgtccgcatatggcgcgaggacggcgagggcgattgggtgtgcgtgtctgtgctcgaggcccacaaaggcactgtctggggcatacagtgggagtccaaccccaagaacgagcgcttcccccgactcctcacttggagtgccgacaagaccatccgcgtctggacattgagagaggaggacgaagaagaagaggcgcccaagcagtcatggggcagactcggcggcatccccaacaccatgcgcagatcgctgaaggaggaatggttctgtacggccatactgccgacggcacatacaagagatatctactctgcgacctggagtgcggagacaggccttgtagccagtatcggcagcgacggtatcatcgcggtatattcagaaggaccggcagagtcaacagcggcgacgacagaagatgaagccgcagctgtatcggacgcagacatgttcatgacagtcggacaaacagaaataaaaaagccagaggcttcaaaacgatggaagctcctgacaactaccccaaatgcacacggcccctacgagattaaccacgtcacttggtgcaagcgatatgataacggatgcgatcccgagaagagaggcatcgaggagatgctggtcaccacgggagacgacggactcgtccggccctggaaagtcgtgttctccgatgtctaggacttcttcacgcgatttttcacttctgcagacttcattgtacataatggctgggagttgatcactgcatttaagcataggaaacatcggaggagcatggcaactttgtatttgtacacggcgtactggtagatgacaagaccggtatgaaaggcataacatccgagagacttccatctgaactcttcagccgggatctccttgtgcttgctgtatgacgtgcattctgatctattgtgtacgtacatacataatcaagcgctcgggaagacatagcctagagcagaagttggagttacagctggaattaaggcgcgtatttcaaggcgatcgtccaatgttgcaattaacctgaggcgttttagatgaacatccatgctgccaacgaccgtttttgtgtgtcgtgcttgtatgtactggaagagattgcgcccgtcactatcgtacgagtacatctttcccagcttctctttcaattgagcacttaagcccccagccagccagcgccattggaaaagttcattccgcaatttcaaccgccttccacatccaatctagtgcttctatgtcctcggtgatcgtgactcacggtacgctccaagtctcgtgcgcttacgaacttgcagcagggttgtttctccaaggtgtatctggagcggggaaatgttccaaaggattggtgatggctgcgggggcaagactctttaattgttctgcctattctaacaccgatttcgctgagagtctgagatgcacctgataggccaatgccacactctttcgcatggcgttttgaccgccagcgatagaatgaacgaagctcgtcattatcacgatggccgatctcatttttgttctgcacgctggcgtatgagctgacgcagcccacttgatcgaaagtcgagaagatcatactcgtctgaccaatctggacgaagacaagattcgagatctcacgagacactaccttactaccccagcatcgagaagcaggtcgataagagcttgcttatctgatggcccgcaacattgctctcagctgaaccacctgcctgatcttcatccgtagttttatcaactttccctctgtcaatctcgtgcggtcgcaagcctcaaaggcaaattggttgatgattcggtctactgagtagtctacgttaaatattctggatgtataacgctgctcgaatgcaccatcgtggttgatatttttcgagttcagaactagacgcacgtgttcgagggctttaacctcacagagcctcaccccaatcagggtgtagcctatgctgaaatcatgcagcgcggagacaatttgtattcaatgagcgacgattcggacagcgaagagcaccatgaattgtcacctacagatggctactttcagagcccctcgtctcacgtcacgccacgtgtacccaatgtgtcggtgttcgaccctacgatagagcaaagatcggagttggaaagaacaccgaaaggaaaagaggcagacgaagagagacggaataactctgaaagatatccagatacccgtcctgccggctcatcggcgcaagggacgtatcgccaggcaccagcttcggcattcgcgtcaccactacgcccacacacgtattcacaatcgtcagcttcacaggcacctttccagacatatccagcacgggcacggagcccttctctatattccgaagcgccgcccgcttacacgccatcacatacctgcccgatctcctcgcttgtgaataacagtcaacaggaacagtccagcaactacagcacgttcagtaatcgtcagggttacagtcacagcagaaatcacagtagtacgagtatcaacatgggtgtccctcctctgacagagtccgatagactccttatgtcacaacctcagagcatgggcccacccggtgacgaagaaagtggtgcttcaggttggctcagacgtaccagaaggcggttgcctgctcggcttggctggaagaccgttttactcactttgatagtttttataacagtcattgtggccttaactaggcgtgggtcttctcacgggaacgattcaaccataaggccggatcccaaaggcaggacggaccctcctccatttgagtctacgcactgttccggaaaacaatatcgcttcgatgatcaagagttggcgctcgattttgaaagagcacaaaatgtatcattcatcgagacacttcataaacatgcaggtgctacacccgtacacataggtggacaagttcatgtacggaaactagccaaaggaaatggaaagcctcgtatggtcttggaggttgccaccaatgacgcagacctcaagcttgagatggtgctggattccttcacgcaacaaatgaaagtcagcgttccagacaagaatagctatctctcgacgggagatcagccttgtgtcacgatgcgagccacgatctgggtaccagaaaatgcggagatcggaacactctccgttgacgtcgtccatcttgccatcattctctttgacgatttatcaatacatgtggcagactctaccaagctctcttcaatctctggtagcattgactccgggtctctcgaagctgcttcagagaagagcgaagtcggcgtttcctcagactccgaattcagattcatccccagctcggatggatacctcttggactcgaggatcatcgaagtctcaacaatatccagcaagatcagcggcaactggccactgtatgacttactgacactggagtcgaaatccggcgccatacgagtaagcatcacaccgaaagaagagctcgagtctgatcccaaagcgcccatcctctcggtgcaaaccgtatcgagcgccatccaaatcgcagagccgatcagtaacccaaaacaaattccactacgcaattacatcgcagagatctcatctgtctcgggaacaatccacacagacctcgcatttagctccgagatagcagtacgaaccacatcaaatgccatatcactcgacttactacccgtcctcaatgtcgataagttctctccagactccccagcaaagttacgcacctctacggcaagcggtacgacgaccgtaaatatccgcgaatccctgtggttcgacgccagtggcaagagtctcgtcgaagccataatcacaccagtcctaggcgaaggaataatgccttccaagtccaaagccaagaaattgaactgcgtcgactctgtccacaaatctacgagcgggaacattgggtttcggtatccacagtcgtgggaggggtatctgaccgctgattccatcagtgggcatctcactgcccgaggcaaggatcttgagatcgtgaagtatcccggcggatgggtgggaagcagtatggaagctcgaaagggcccgaaagaaaaggggtcgaatgttcaggttcatacaatctccggtggaatggatgctacatttggtgacgagtggtgagctgggcccaatttcgggaatggcttatactgcgacgtggacaataggtgtaatgtattgaacgatggaaaagtatgaatcgagtggagcaacgagatatgagtacacgaagaagcgatgaaaataccctcgtttagcccttgatcggtattaaatttggagtttaggatgggatatagcttcttactgcagcaccccttaatgcatatgcttgagcaacgaccgcagtgagatctgatttcgatgcagcacaaaagagcaccagtcccaagtacttcagc

SEQ ID NO: 36780 - DNA, 1443 bp, Muscodor strobelii
  misc_feature: SGI cDNA ID NO. 572752
  misc_feature: Encodes the peptide sequence at SEQ ID NO 36781
atggagataagaacgcaaggcactaatgtagctgtccagtcaaccataaggccggatcccaaaggcaggacggaccctcctccatttgagtctacgcactgttccggaaaacaatatcgcttcgatgatcaagagttggcgctcgattttgaaagagcacaaaatgtatcattcatcgagacacttcataaacatgcaggtgctacacccgtacacataggtggacaagttcatgtacggaaactagccaaaggaaatggaaagcctcgtatggtcttggaggttgccaccaatgacgcagacctcaagcttgagatggtgctggattccttcacgcaacaaatgaaagtcagcgttccagacaagaatagctatctctcgacgggagatcagccttgtgtcacgatgcgagccacgatctgggtaccagaaaatgcggagatcggaacactctccgttgacgtcgtccatcttgccatcattctctttgacgatttatcaatacatgtggcagactctaccaagctctcttcaatctctggtagcattgactccgggtctctcgaagctgcttcagagaagagcgaagtcggcgtttcctcagactccgaattcagattcatccccagctcggatggatacctcttggactcgaggatcatcgaagtctcaacaatatccagcaagatcagcggcaactggccactgtatgacttactgacactggagtcgaaatccggcgccatacgagtaagcatcacaccgaaagaagagctcgagtctgatcccaaagcgcccatcctctcggtgcaaaccgtatcgagcgccatccaaatcgcagagccgatcagtaacccaaaacaaattccactacgcaattacatcgcagagatctcatctgtctcgggaacaatccacacagacctcgcatttagctccgagatagcagtacgaaccacatcaaatgccatatcactcgacttactacccgtcctcaatgtcgataagttctctccagactccccagcaaagttacgcacctctacggcaagcggtacgacgaccgtaaatatccgcgaatccctgtggttcgacgccagtggcaagagtctcgtcgaagccataatcacaccagtcctaggcgaaggaataatgccttccaagtccaaagccaagaaattgaactgcgtcgactctgtccacaaatctacgagcgggaacattgggtttcggtatccacagtcgtgggaggggtatctgaccgctgattccatcagtgggcatctcactgcccgaggcaaggatcttgagatcgtgaagtatcccggcggatgggtgggaagcagtatggaagctcgaaagggcccgaaagaaaaggggtcgaatgttcaggttcatacaatctccggtggaatggatgctacatttggtgacgagtggtga

SEQ ID NO: 36781 - protein, 480 aa, Muscodor strobelii
  misc_feature: SGI Peptide ID NO. 572752
  misc_feature (31)..(477): NCBI GI: 156043036 Blast Desc: SS1G_11318 [Sclerotinia sclerotiorum 1980] gi|154695702|gb|EDN95440.1| SS1G_11318 [Sclerotinia sclerotiorum 1980]
  misc_feature (34)..(479): NCBI GI: 256729240 Blast Desc: NECHADRAFT_47830 [Nectria haematococca mpVI 77-13-4]
  misc_feature (53)..(472): NCBI GI: 154313278 Blast Desc: BC1G_05336 [Botryotinia fuckeliana B05.10] gi|150849405|gb|EDN24598.1| BC1G_05336 [Botryotinia fuckeliana B05.10]
  misc_feature (34)..(432): NCBI GI: 171688792 Blast Desc: protein product [Podospora anserina] gi|170944358|emb|CAP70468.1| protein product [Podospora anserina]
  misc_feature (65)..(477): NCBI GI: 85078648 Blast Desc: NCU01565 [Neurospora crassa OR74A] gi|16416046|emb|CAD01134.1| [Neurospora crassa] gi|28917255|gb|EAA26966.1| [Neurospora crassa OR74A]
  misc_feature (34)..(479): NCBI GI: 46117030 Blast Desc: FG04357.1 [Gibberella zeae PH-1]
  misc_feature (18)..(479): NCBI GI: 116199691 Blast Desc: CHGG_08001 [Chaetomium globosum CBS 148.51] gi|88179280|gb|EAQ86748.1| CHGG_08001 [Chaetomium globosum CBS 148.51]
  misc_feature (70)..(367): NCBI GI: 145610597 Blast Desc: MGG_01073 [Magnaporthe grisea 70-15] gi|145017969|gb|EDK02248.1| MGG_01073 [Magnaporthe grisea 70-15]
  misc_feature (36)..(477): NCBI GI: 189188344 Blast Desc: [Pyrenophora tritici-repentis Pt-1C-BFP] gi|187972117|gb|EDU39616.1| [Pyrenophora tritici-repentis Pt-1C-BFP]
  misc_feature (18)..(470): NCBI GI: 169623098 Blast Desc: SNOG_14774 [Phaeosphaeria nodorum SN15] gi|160704914|gb|EAT77966.2| SNOG_14774 [Phaeosphaeria nodorum SN15]
MEIRTQGTNVAVQSTIRPDPKGRTDPPPFESTHCSGKQYRFDDQELALDFERAQNVSFIETLHKHAGATPVHIGGQVHVRKLAKGNGKPRMVLEVATNDADLKLEMVLDSFTQQMKVSVPDKNSYLSTGDQPCVTMRATIWVPENAEIGTLSVDVVHLAIILFDDLSIHVADSTKLSSISGSIDSGSLEAASEKSEVGVSSDSEFRFIPSSDGYLLDSRIIEVSTISSKISGNWPLYDLLTLESKSGAIRVSITPKEELESDPKAPILSVQTVSSAIQIAEPISNPKQIPLRNYIAEISSVSGTIHTDLAFSSEIAVRTTSNAISLDLLPVLNVDKFSPDSPAKLRTSTASGTTTVNIRESLWFDASGKSLVEAIITPVLGEGIMPSKSKAKKLNCVDSVHKSTSGNIGFRYPQSWEGYLTADSISGHLTARGKDLEIVKYPGGWVGSSMEARKGPKEKGSNVQVHTISGGMDATFGDEW

SEQ ID NO: 36782 - DNA, 5406 bp, Muscodor strobelii; identical to SEQ ID NO: 36779
  misc_feature: SGI EST ID NO. CUFF.87883.0
  misc_feature: Variant of the nucleotide sequence at SEQ ID NO 36780

SEQ ID NO: 36783 - DNA, 498 bp, Muscodor strobelii
  misc_feature: SGI cDNA ID NO. 572753
  misc_feature: Encodes the peptide sequence at SEQ ID NO 36784
atgtgcaccgaagtttacatgtccttcgacgacccaagctgtaaccacagagaataccaaaacactttcccctgccacatcgtccgaagatgccaccccaacgacgaccaactacttcgagagcctgtcttcctgcctcagccgccacctaaagtgccaccgggcttcctgcgctgcaacatgcgccgtgccactcgacccgtgaagggcaaatgtcgcgaatgccgtagagccgagtaccaagcagcgaagcagcgacaagatggccttctcaccccctctctatcgtccaatccatcaacttcttcctaccgtggtcggcaattcattacaccgtctcctgacaatcgattgcgggaacgaatgcaagactccctttctcaagtggctagggagcaacgcggtactccggcctcgagcgtgggtgttgctggtggacgatcaagggccgactcgcagggtagttaccgtggggtcaattacagcagcaaattctag

SEQ ID NO: 36784 - protein, 165 aa, Muscodor strobelii
  misc_feature: SGI Peptide ID NO. 572753
MCTEVYMSFDDPSCNHREYQNTFPCHIVRRCHPNDDQLLREPVFLPQPPPKVPPGFLRCNMRRATRPVKGKCRECRRAEYQAAKQRQDGLLTPSLSSNPSTSSYRGRQFITPSPDNRLRERMQDSLSQVAREQRGTPASSVGVAGGRSRADSQGSYRGVNYSSKF

SEQ ID NO: 36785 - DNA, 817 bp, Muscodor strobelii
  misc_feature: SGI EST ID NO. CUFF.87817.0
  misc_feature: Variant of the nucleotide sequence at SEQ ID NO 36783
ctcctttgacccataaggtctagtacaacaggagacaggcgagctctgtaggtgcaccactgagcttaaagaccaacatgtctggatcgtgaaaagtcattcattcatgccttaatctttcgtgccgtcatctcttccttctatctcgccgctgggccgttcactaatgtgccttcttactcacactgcatattgaaacattcaccaatttcacctcagtgtatttcttggtggttgatttcttttcgacgagggacatcaagctcaagcaatttgtatattattgttgataccaacatcttcagtcgcctagcagttttctcaatttcttcgcgttcgccccttcccgtttctacagcctctacatgcaccttgcatcaccgtcgattctttacgattcccttcgttttcgccaaagaagctgcgggtagcctcggcaatcgcgccctctgctacaacaatgtgcaccgaagtttacatgtccttcgacgacccaagctgtaaccacagagaataccaaaacactttcccctgccacatcgtccgaagatgccaccccaacgacgaccaactacttcgagagcctgtcttcctgcctcagccgccacctaaagtgccaccgggcttcctgcgctgcaacatgcgccgtgccactcgacccgtgaagggcaaatgtcgcgaatgccgtagagccgagtaccaagcagcgaagcagcgacaagatggccttctcaccccctctctatcgtccaatccatcaacttcttcctaccgtggtcggcaattcattacaccgtctcctgacaatcgattgcgg

SEQ ID NO: 36786 - DNA, 1980 bp, Muscodor strobelii
  misc_feature: SGI cDNA ID NO. 572754
  misc_feature: Encodes the peptide sequence at SEQ ID NO 36787
atgcgggcaacatttgaagcacctgcctccagtgttctttcagcaccagcttcagtggcatttactccaaatcacgcggccacagaccgaccctctgcgatcccctctattggcgaagatcaatcagactgctcagtagaaaatctcatgttggacctcggcttattggaagagaatccaccggaagacctatcacaaaactcactgggccaacgccccaagatctcaatctacaagtcaattggagttctcaacgtctacacaatcgtttccgccccgctgtctgttcttcgaagtattagctccggtccatatgccatattccgacaattgctctcggatctgagcccacgtcgcttactccatgccgaactgatcgtcctaatatttcttgctattggacatgtcggcatacaattctcgtctacgattctggtctccgacctcaccactaccattcttgtaggatttttgaagaagacgcaagttagtctgatgccattcatgaacaccaccatagatactcattcttgggcgcctccacctggcattcctatctttggcgagctatctacgaagtatagagccgagccagatcagaacggcttgagcgacactggcattaagcggcgtgtgatgctcccttttaccgaatcgcaaaatagaacaaacgtccgtagctacgaagggcctaccatggttctcaattctcgagtagcatgcatgccacccactattttggggcatatcgaggctgttcccatatcgaacctgccatccagggcttggataaatgagatcttcaccggccggatcttaatggcgaatacaatacagaatgcaggcatatccgctaataacacatgtggtgctagtggatgtctctctgacattttttttcgctaccatttgcctagcgtcctaggagatgaacccgaatacgaccgtattgtcagtatgctgtgcataactgagtccaaagatatctatgcgtcagaatggaaacaagatgacgatccatggacacccgccaccatgtcaagtctcgtcttaactacttatgtagagaatgatgcgtggaaacgatttattgataaccctgttatcgtgcccccccctatcatccaagacgaatgggcaatctatcgtctcggttctggatgctctgttaatgctacgctttgcttcaatgcctttaccacgatgttctccaacgtttcgatgttagcccagagaaatttggtagagccaacttttggacagatttctggctcactcgggtcggagaatattcggaatttcctgggagccaacccactgatccaagacctgaatgatcgcggagtattgagcgttaattcgatcaacgattggagcgaatatgtctatggagctacatacaataaggacataccactatctcatcgtcttgccgctggcatggatttggcaatgttcggatctgggtgggcaaacgagacgttagcagggtatataatcactggcactcatcgagcatctgtggcgatccagtctctgtacactatacttgcactgaacctaaacgagcaacttatacaatatgcatcgacgcctttaccagtagacctagttcagatccaatcatctgtcgttctgactagccacctaggtcttgttaccgtcgcagctcttgtcttcctaaacataatatgtgtcttcacaatcacgacaatgtacgtcgcacactcccgctattccatgataggcaacttctggcatgcagtctctcaggtagtctcagacactacggtagagacgctttcccagagcaacatggagaaagacgacgaggtccgtaaactaatacgagacaacgactttgcggtaaggctgatggagcaagctgaggctggtactgtcaagcttgtgccagccagtgtcaacacagataagccaagtgtttcgacaaagccagatcagaagcaagcaaatatctag

SEQ ID NO: 36787 - protein, 659 aa, Muscodor strobelii
  misc_feature: SGI Peptide ID NO. 572754
  misc_feature (92)..(637): NCBI GI: 145605162 Blast Desc: MGG_02132 [Magnaporthe grisea 70-15] gi|145013020|gb|EDJ97661.1| MGG_02132 [Magnaporthe grisea 70-15]
  misc_feature (92)..(621): NCBI GI: 46139113 Blast Desc: FG11071.1 [Gibberella zeae PH-1]
  misc_feature (121)..(246): NCBI GI: 119474385 Blast Desc: NFIA_005330 [Neosartorya fischeri NRRL 181] gi|119407221|gb|EAW17171.1| conserved [Neosartorya fischeri NRRL 181]
MRATFEAPASSVLSAPASVAFTPNHAATDRPSAIPSIGEDQSDCSVENLMLDLGLLEENPPEDLSQNSLGQRPKISIYKSIGVLNVYTIVSAPLSVLRSISSGPYAIFRQLLSDLSPRRLLHAELIVLIFLAIGHVGIQFSSTILVSDLTTTILVGFLKKTQVSLMPFMNTTIDTHSWAPPPGIPIFGELSTKYRAEPDQNGLSDTGIKRRVMLPFTESQNRTNVRSYEGPTMVLNSRVACMPPTILGHIEAVPISNLPSRAWINEIFTGRILMANTIQNAGISANNTCGASGCLSDIFFRYHLPSVLGDEPEYDRIVSMLCITESKDIYASEWKQDDDPWTPATMSSLVLTTYVENDAWKRFIDNPVIVPPPIIQDEWAIYRLGSGCSVNATLCFNAFTTMFSNVSMLAQRNLVEPTFGQISGSLGSENIRNFLGANPLIQDLNDRGVLSVNSINDWSEYVYGATYNKDIPLSHRLAAGMDLAMFGSGWANETLAGYIITGTHRASVAIQSLYTILALNLNEQLIQYASTPLPVDLVQIQSSVVLTSHLGLVTVAALVFLNIICVFTITTMYVAHSRYSMIGNFWHAVSQVVSDTTVETLSQSNMEKDDEVRKLIRDNDFAVRLMEQAEAGTVKLVPASVNTDKPSVSTKPDQKQANI

SEQ ID NO: 36788 - DNA, 1065 bp, Muscodor strobelii
  misc_feature: SGI cDNA ID NO. 572755
  misc_feature: Encodes the peptide sequence at SEQ ID NO 36789
atgttgtttaaagacaagggccgagcaccaactcggtataggagatttgtggttaaagctacgagcgatgatgttgacgacgaaattcgatctctacagagatggcaattcgcagaacatatccttagactgatctcgaagccggtcgacactggtgcgagtagcccgatggccaacagctcaagagtcagtaagtcgaaggcaagcaacctgccgaggaagaagtggatcgtcaccgagtatttgcagaatgggacattagaacagtttttggaaagagcacggattaatgaccctcagcccctggcgcggaagctaccaaaccgcgtgctttgggctatttttctttgccttactagggcatgcgtcgcgttggcattcccaccccaggaccgagtcaaaagggaaaccataccacctcaatctggccctgacgcccgccaaccaactagtaaaatacacggcgacatgcatttgggtaatataatgtttggagatgttgcatatccacaacgtatatcgaacgacaccttctacgagcattaccctcttccaatactcaagctcatcgacttcgggtgtgtcgacgatgtcaccgaggacagtgatagtgcaggagaacgtgacgagattgaagctttcgaccgagcattgggatttaatgcattaattgattctaagtttaatcaaaatgctgcgataaattttaacatcctggagattggcgagataatggcgaagctcataatggatcggcgttgggatgtcagggacattcaagatcggcgaaggatggtcagattataccgagataagcgaggcgacaacagaagggaccccaatctagatcgagctcttttgaacatcatcgctagatgtgtggcggcgctcccagctaacagacctcgtctaacccagcttctcgcaagggtagaggatggggcaaggaaaccagcgacagcatatccaggcgttgctgaagagacagatcaaaatatttccagatttatccagcgaaacttcctggagccaccgggaggtcttgcaacaccccctcgaagctaa

SEQ ID NO: 36789 - protein, 354 aa, Muscodor strobelii
  misc_feature: SGI Peptide ID NO. 572755
  misc_feature (77)..(312): NCBI GI: 85081014 Blast Desc: NCU05146 [Neurospora crassa OR74A] gi|28881434|emb|CAD70551.1| [Neurospora crassa] gi|28917716|gb|EAA27408.1| [Neurospora crassa OR74A]
  misc_feature (1)..(200): NCBI GI: 116201421 Blast Desc: [Chaetomium globosum CBS 148.51] gi|88177113|gb|EAQ84581.1| [Chaetomium globosum CBS 148.51]
  misc_feature (106)..(307): NCBI GI: 145601223 Blast Desc: [Magnaporthe grisea 70-15] gi|145009254|gb|EDJ93965.1| [Magnaporthe grisea 70-15]
  misc_feature (77)..(307): NCBI GI: 171695774 Blast Desc: protein product [Podospora anserina] gi|170948129|emb|CAP60293.1| protein product [Podospora anserina]
  misc_feature (73)..(145): NCBI GI: 261355308 Blast Desc: [Verticillium albo-atrum VaMs.102]
  misc_feature (103)..(338): NCBI GI: 85111903 Blast Desc: NCU00763 [Neurospora crassa OR74A] gi|28925929|gb|EAA34924.1| [Neurospora crassa OR74A] gi|38636417|emb|CAE81954.1| [Neurospora crassa]
MLFKDKGRAPTRYRRFVVKATSDDVDDEIRSLQRWQFAEHILRLISKPVDTGASSPMANSSRVSKSKASNLPRKKWIVTEYLQNGTLEQFLERARINDPQPLARKLPNRVLWAIFLCLTRACVALAFPPQDRVKRETIPPQSGPDARQPTSKIHGDMHLGNIMFGDVAYPQRISNDTFYEHYPLPILKLIDFGCVDDVTEDSDSAGERDEIEAFDRALGFNALIDSKFNQNAAINFNILEIGEIMAKLIMDRRWDVRDIQDRRRMVRLYRDKRGDNRRDPNLDRALLNIIARCVAALPANRPRLTQLLARVEDGARKPATAYPGVAEETDQNISRFIQRNFLEPPGGLATPPRS

SEQ ID NO: 36790 - DNA, 2964 bp, Muscodor strobelii
  misc_feature: SGI cDNA ID NO. 572756
  misc_feature: Encodes the peptide sequence at SEQ ID NO 36791
atggccaaaaaggcgcgtcagaggataagctatgttctcgagctcgaccattcctcctctggcggccatagactcggtgtcaatggccttgatgtagactccgacaatgccattctctactccggcggtagagatggcgttgtctgtgcctgggacctcgatctcgacctcaatggccactcaactcgggacccgaagcgaaagccgaccaccaccttccgcgcttccacccaagctcacacccactggatcaatgacatcgtgctcgcctccaacagcacagctcttgtctccgcctcgtcagatctgactgtcaagctctggcaaccctccgcgggcaacaacgaggcccacaccataggccaacatgccgactacgcgaaatgcctcgctgctccgagcggcgtgaattgggttgcgtccggtggtcttgaccgcaagatatatctctgggatctgagcggacaaggcaagactctggagatcgatacgcgaggcgaagacaaggctgagaaaggttctgtctacgccctgagcgccactcgctcgatcatagcgaatggtggaccggaggcgattgtgaggctgtgggatccaagaaatggccaacgtatcaccaaattctctggccatacagctaccattcggtctatcctgatcaacgaagccggcgacacggtcgtgacggcaagctctgatcagacaatcaaagtgtggagtgttacggctggacgttgtatgtatacgttcacgatgcacaacgaaagtgtctggtcgttattctccgaagatccccagctcggcgttttctacagtgcagatcgatccggtctcattgtcaagaccgacacccgcgggaccacggacatggacgaaggattgtccgttgctgttgcccaagaacacgacgggatttacaagatggtggcatgcggtgattacatctggagcgcaacctccagttcgtctatcaacagatggacaaatgtagagacagggccagatgctcacttaccagaggccttccggcgcctgcgaagcagtagttcagcttctagaagccggcagccaagcgtggtctcgacaagcggtcccagcaaaaatgaaatccctgccaagtccatcttgaagctttcgaataccgcttcgtttccacttgaattcagccttcgaaatccgtccgagtcgaacctaaccatccctactattgccaggaaaggctcagaagctgtagttgattccgtgctcccctcgatagagcctatacaccatctcccagaagacaccattgagggacaaaatgggttggtcaagcacaggttactcaacgataggaggagagtcttaactcttgatacagctggagatgtcttgctttgggaccttattcgttgtgaagtaattcaacgctttggaaagaagcacttggaagatgtggaacccgaagtaaacactctggaggctgttgcgccgtggtgttctatcgatacgagctcaggaaatctgactgttgtcctcgaactgttcaactgttttgatgctgagatgtatgctgacgagttgaaattggaggagcctattgaattccgagaagatcaaagaataaatcttggaagatggattctccggtatctatttgctaggactatcgatgaagagatcaaacgcgacgaagcatacagacagaagctcaatgaagccgttgaaaaacgacgagctgccatccgtctcaatcctccaggatctattacactcccgccgattgacactcaagtctggaatgctgcaggttctccgattaccacgccaagggcaaatggccctggcgtgccagcaacgcccggatatggcatcggcattgcgacgccagcagtgcaacatatgccaggagtgccagaatatccgggtactacgcctctcgcctcgcctgataagagactgtcgcagacgagtcggccatccggcgaagactatttctccagcggtatcagttctgccgatgcacccaataagcctgcgacgacaccgggaccacctgagacgccggctgcaaaggaagaaacacccaagtctccgttggaagcaaaagacaaagatactgcaaagtccccgaccacagctttcggcaagaagtttagaatgggcatgtcgtttggcaaaaagggcggtagatccgcatcaagtaccaccgagaagcccacaatcgtggaagagaaacctgaagagaacaaatccgagtcatcttcgaaccacgagaaggagattgacgataacttcagaggagtcatacagaaaatccagaatgactacgacaagcaaatcgtggacaccccggataaacttgtcgagacgaagatcacgcccagcctgccaatcgatacccccgtgctgaaactcccattaggcaccaaggttatcattcaagaggaaacgtcgggaggcagcgcagacttgtatcgtggaactgtggccacggttgggatggatactgatgtgattgaggagaaggctcccatgtggctgggagaactacttctggccaacacgattccacaaaaagatccgatcaaggtgtcctttgttctacatccatggcaagacacattaccgagtatcgccacttctgacggcaacaaccggctcaatgcgaatcgaatgttgcgagtcaagaagatcttagcgtatgttgcggagcgaattgaagctcccgtggaagaaccggatcccgatgctctgaagcccgaagagtatttggagctatactgcaacgaacagttgctacccaataccatgagccttgctacattgcgagcccatgtctggaagggcgggaatgatgttgttttacattacaaggccaacgggcgcaaagaaataccaaaggaactgcctagacctgccgccgaggaggaatctgctctagagccggaggcagccgctatgcccctttcgcccgatgagtag

SEQ ID NO: 36791 - protein, 987 aa, Muscodor strobelii
  misc_feature: SGI Peptide ID NO. 572756
  misc_feature (202)..(240): Pfam Id: PF00400 Pfam Desc: WD domain, G-beta repeat
  misc_feature (71)..(109): Pfam Id: PF00400 Pfam Desc: WD domain, G-beta repeat
  misc_feature (14)..(52): Pfam Id: PF00400 Pfam Desc: WD domain, G-beta repeat
  misc_feature (114)..(152): Pfam Id: PF00400 Pfam Desc: WD domain, G-beta repeat
  misc_feature (1)..(959): NCBI GI: 16416042 Blast Desc: conserved [Neurospora crassa]
  misc_feature (1)..(926): NCBI GI: 156047789 Blast Desc: SS1G_09584 [Sclerotinia sclerotiorum 1980] gi|154693979|gb|EDN93717.1| SS1G_09584 [Sclerotinia sclerotiorum 1980]
  misc_feature (1)..(959): NCBI GI: 164428024 Blast Desc: NCU01569 [Neurospora crassa OR74A] gi|157071978|gb|EAA26970.2| conserved [Neurospora crassa OR74A]
  misc_feature (1)..(959): NCBI GI: 46117018 Blast Desc: FG04351.1 [Gibberella zeae PH-1]
  misc_feature (2)..(959): NCBI GI: 256729233 Blast Desc: [Nectria haematococca mpVI 77-13-4]
  misc_feature (1)..(959): NCBI GI: 145610595 Blast Desc: MGG_01074 [Magnaporthe grisea 70-15] gi|145017968|gb|EDK02247.1| MGG_01074 [Magnaporthe grisea 70-15]
  misc_feature (2)..(966): NCBI GI: 261355477 Blast Desc: WD repeat-containing protein [Verticillium albo-atrum VaMs.102]
  misc_feature (1)..(959): NCBI GI: 171688796 Blast Desc: protein product [Podospora anserina] gi|170944360|emb|CAP70470.1| protein product [Podospora anserina]
  misc_feature (1)..(980): NCBI GI: 116199723 Blast Desc: CHGG_08017 [Chaetomium globosum CBS 148.51] gi|88179296|gb|EAQ86764.1| CHGG_08017 [Chaetomium globosum CBS 148.51]
  misc_feature (18)..(969): NCBI GI: 189189420 Blast Desc: WD repeat containing protein 48 [Pyrenophora tritici-repentis Pt-1C-BFP] gi|187972655|gb|EDU40154.1| WD repeat containing protein 48 [Pyrenophora tritici-repentis Pt-1C-BFP]
MAKKARQRISYVLELDHSSSGGHRLGVNGLDVDSDNAILYSGGRDGVVCAWDLDLDLNGHSTRDPKRKPTTTFRASTQAHTHWINDIVLASNSTALVSASSDLTVKLWQPSAGNNEAHTIGQHADYAKCLAAPSGVNWVASGGLDRKIYLWDLSGQGKTLEIDTRGEDKAEKGSVYALSATRSIIANGGPEAIVRLWDPRNGQRITKFSGHTATIRSILINEAGDTVVTASSDQTIKVWSVTAGRCMYTFTMHNESVWSLFSEDPQLGVFYSADRSGLIVKTDTRGTTDMDEGLSVAVAQEHDGIYKMVACGDYIWSATSSSSINRWTNVETGPDAHLPEAFRRLRSSSSASRSRQPSVVSTSGPSKNEIPAKSILKLSNTASFPLEFSLRNPSESNLTIPTIARKGSEAVVDSVLPSIEPIHHLPEDTIEGQNGLVKHRLLNDRRRVLTLDTAGDVLLWDLIRCEVIQRFGKKHLEDVEPEVNTLEAVAPWCSIDTSSGNLTVVLELFNCFDAEMYADELKLEEPIEFREDQRINLGRWILRYLFARTIDEEIKRDEAYRQKLNEAVEKRRAAIRLNPPGSITLPPIDTQVWNAAGSPITTPRANGPGVPATPGYGIGIATPAVQHMPGVPEYPGTTPLASPDKRLSQTSRPSGEDYFSSGISSADAPNKPATTPGPPETPAAKEETPKSPLEAKDKDTAKSPTTAFGKKFRMGMSFGKKGGRSASSTTEKPTIVEEKPEENKSESSSNHEKEIDDNFRGVIQKIQNDYDKQIVDTPDKLVETKITPSLPIDTPVLKLPLGTKVIIQEETSGGSADLYRGTVATVGMDTDVIEEKAPMWLGELLLANTIPQKDPIKVSFVLHPWQDTLPSIATSDGNNRLNANRMLRVKKILAYVAERIEAPVEEPDPDALKPEEYLELYCNEQLLPNTMSLATLRAHVWKGGNDVVLHYKANGRKEIPKELPRPAAEEESALEPEAAAMPLSPDE

SEQ ID NO: 36792 - DNA, 4935 bp, Muscodor strobelii
  misc_feature: SGI EST ID NO. CUFF.87877.0
  misc_feature: Variant of the nucleotide sequence at SEQ ID NO 36790
gtgttcgtcagtctggcttcctgagtttcgcgaaccgacccgacagtttggggtccaatactcactcgctctgcgctctcgtagtctgtctacggtaataatagtaacttaccccaacttcactgcaacccaccgccatcacttagtataaacccgcctcgacatcattttctctgctcttcttttatttggttgagcacgggtgttacaggaaatctcaattcgcatcctagcttgccttgccttgccttgccttgccgtgcgtcatttgctcttacgttagcctgtgtatctcagccctctcgacctcagcttgttttcttactgttgacattagaggagactgggaatcttgaatcttattatgctcgcatgattgctattgctcctccgtattcgccatggccaaaaaggcgcgtcagaggataagctatgttctcgagctcgaccattcctcctctggcggccatagactcggtgtcaatggccttgatgtagactccgacaatgccattctctactccggcggtagagatggcgttgtctgtgcctgggacctcgatctcgacctcaatggccactcaactcgggacccgaagcgaaagccgaccaccaccttccgcgcttccacccaagctcacacccactggatcaatgacatcgtgctcgcctccaacagcacagctcttgtctccgcctcgtcagatctgactgtcaagctctggcaaccctccgcgggcaacaacgaggcccacaccataggccaacatgccgactacgcgaaatgcctcgctgctccgagcggcgtgaattgggttgcgtccggtggtcttgaccgcaagatatatctctgggatctgagcggacaaggcaagactctggagatcgatacgcgaggcgaagacaaggctgagaaaggttctgtctacgccctgagcgccactcgctcgatcatagcgaatggtggaccggaggcgattgtgaggctgtgggatccaagaaatggccaacgtatcaccaaattctctggccatacagctaccattcggtctatcctgatcaacgaagccggcgacacggtcgtgacggcaagctctgatcagacaatcaaagtgtggagtgttacggctggacgttgtatgtatacgttcacgatgcacaacgaaagtgtctggtcgttattctccgaagatccccagctcggcgttttctacagtgcagatcgatccggtctcattgtcaagaccgacacccgcgggaccacggacatggacgaaggattgtccgttgctgttgcccaagaacacgacgggatttacaagatggtggcatgcggtgattacatctggagcgcaacctccagttcgtctatcaacagatggacaaatgtagagacagggccagatgctcacttaccagaggccttccggcgcctgcgaagcagtagttcagcttctagaagccggcagccaagcgtggtctcgacaagcggtcccagcaaaaatgaaatccctgccaagtccatcttgaagctttcgaataccgcttcgtttccacttgaattcagccttcgaaatccgtccgagtcgaacctaaccatccctactattgccaggaaaggctcagaagctgtagttgattccgtgctcccctcgatagagcctatacaccatctcccagaagacaccattgagggacaaaatgggttggtcaagcacaggttactcaacgataggaggagagtcttaactcttgatacagctggagatgtcttgctttgggaccttattcgttgtgaagtaattcaacgctttggaaagaagcacttggaagatgtggaacccgaagtaaacactctggaggctgttgcgccgtggtgttctatcgatacgagctcaggaaatctgactgttgtcctcgaactgttcaactgttttgatgctgagatgtatgctgacgagttgaaattggaggagcctattgaattccgagaagatcaaagaataaatcttggaagatggattctccggtatctatttgctaggactatcgatgaagagatcaaacgcgacgaagcatacagacagaagctcaatgaagccgttgaaaaacgacgagctgccatccgtctcaatcctccaggatctattacactcccgccgattgacactcaagtctggaatgctgcaggttctccgattaccacgccaagggcaaatggccctggcgtgccagcaacgcccggatatggcatcggcattgcgacgccagcagtgcaacatatgccaggagtgccagaatatccgggtactacgcctctcgcctcgcctgataagagactgtcgcagacgagtcggccatccggcgaagactatttctccagcggtatcagttctgccgatgcacccaataagcctgcgacgacaccgggaccacctgagacgccggctgcaaaggaagaaacacccaagtctccgttggaagcaaaagacaaagatactgcaaagtccccgaccacagctttcggcaagaagtttagaatgggcatgtcgtttggcaaaaagggcggtagatccgcatcaagtaccaccgagaagcccacaatcgtggaagagaaacctgaagagaacaaatccgagtcatcttcgaaccacgagaaggagattgacgataacttcagaggagtcatacagaaaatccagaatgactacgacaagcaaatcgtggacaccccggataaacttgtcgagacgaagatcacgcccagcctgccaatcgatacccccgtgctgaaactcccattaggcaccaaggttatcattcaagaggaaacgtcgggaggcagcgcagacttgtatcgtggaactgtggccacggttgggatggatactgatgtgattgaggagaaggctcccatgtggctgggagaactacttctggccaacacgattccacaaaaagatccgatcaaggtgtcctttgttctacatccatggcaagacacattaccgagtatcgccacttctgacggcaacaaccggctcaatgcgaatcgaatgttgcgagtcaagaagatcttagcgtatgttgcggagcgaattgaagctcccgtggaagaaccggatcccgatgctctgaagcccgaagagtatttggagctatactgcaacgaacagttgctacccaataccatgagccttgctacattgcgagcccatgtctggaagggcgggaatgatgttgttttacattacaaggccaacgggcgcaaagaaataccaaaggaactgcctagacctgccgccgaggaggaatctgctctagagccggaggcagccgctatgcccctttcgcccgatgagtagttgagacggcgacttgatagctggtgatgcttgcttcttagttggatgccaggtttctgggaacgattgacaggacaaaagtgattggggcgaggcgttcgtactgcgacatgatagaagaaggcgcaagtcaagatggcgactgaaacccatgtgcttccagacagattggacgatgcatgagaatgggtatcatttctagtctagcgacatttctatagtagttcaggcttccgttggtgatggaaaggctctcaagtattgtacataattataccccgtgttatatatggcttttccagacgccaaaaaaatgccaggttgtttgtacaagatggtaataatggtacatgcagccgggaaaacattcatataagttcttggcgccgtgatggtaagctggcctgcatcgcattgacagtccattgataacttccgaggaaaatggcgcctcccgcgctgatccacatgaccctaggtccaatgccagcgaagaatgggcggacgccttgtgaggccaagagattcctgaagacggtcaaaacactctcgcgttcctgagacaacatgacacgggtcttcagaacatcaagaggcgtcgttatagccgcagccacagcaccggatatactgccatacagcgcactctcgcctgcgcccacctcggctgtctctcctatggtgctagctttgcgtctgcgaccccagctcttcatcgcttcccacaaggggaactgtatgacggtgaaggggacctcgcgcatgacggtgatggcccagcccctgtacagctccctccagacgcccgtgagtccaatattgccgtattgccctaatatggcgcggagagcgcccgcagaggaaccgccatgttgaccagcttgtgcgcgctgcttgacgacttcggtggggacgcggacggcgcaagcggctatctcgccgagggaggctgcggccatgtgcgtgagcggatctgcccatttactgtcgcttccaccttggccattccgcctcgagtttgagaggatgtccttgacgccttcgtatgtgcagaagaagaatgctgcgcccggcgctgacccaacaacggcggatccgacgccgcggtacacgcctcggaagccgcccgaggggaaaaagccggcggatgattggaggcgagtttttagtgtatcgagggggaagagggagaggtcgactgtggttcctgcgacgccgccggcgaggagggccgttgtgaagggtggtgtgtgcgtttgcgacatggtggctttggctctgcgagtttggcgctcggcgtggtgggcgtgatgggcgcaattggcggcggcaacaagagacagctggaggaggttgggcggggtgctactgtcgcggagaagcccaagcccttgacggcttcatctggtgcgtgtacctagaccgcacttcgaatccgacccgcaatcagatgctcattgacgcttggaaattctgggttgcgacgtcgaacatgatgtcggagctttttgcgataggcttgtagccagcaattcaccgagcttggttgcgcgataatatctgcctacgc

SEQ ID NO: 36793 - DNA, 897 bp, Muscodor strobelii
  misc_feature: SGI cDNA ID NO. 572757
  misc_feature: Encodes the peptide sequence at SEQ ID NO 36794
atgtcgcaaacgcacacaccacccttcacaacggccctcctcgccggcggcgtcgcaggaaccacagtcgacctctccctcttccccctcgatacactaaaaactcgcctccaatcatccgccggctttttcccctcgggcggcttccgaggcgtgtaccgcggcgtcggatccgccgttgttgggtcagcgccgggcgcagcattcttcttctgcacatacgaaggcgtcaaggacatcctctcaaactcgaggcggaatggccaaggtggaagcgacagtaaatgggcagatccgctcacgcacatggccgcagcctccctcggcgagatagccgcttgcgccgtccgcgtccccaccgaagtcgtcaagcagcgcgcacaagctggtcaacatggcggttcctctgcgggcgctctccgcgccatattagggcaatacggcaatattggactcacgggcgtctggagggagctgtacaggggctgggccatcaccgtcatgcgcgaggtccccttcaccgtcatacagttccccttgtgggaagcgatgaagagctggggtcgcagacgcaaagctagcaccataggagagacagccgaggtgggcgcaggcgagagtgcgctgtatggcagtatatccggtgctgtggctgcggctataacgacgcctcttgatgttctgaagacccgtgtcatgttgtctcaggaacgcgagagtgttttgaccgtcttcaggaatctcttggcctcacaaggcgtccgcccattcttcgctggcattggacctagggtcatgtggatcagcgcgggaggcgccattttcctcggaagttatcaatggactgtcaatgcgatgcaggccagcttaccatcacggcgccaagaacttatatga

SEQ ID NO: 36794 - protein, 298 aa, Muscodor strobelii
  misc_feature: SGI Peptide ID NO. 572757
  misc_feature (203)..(290): Pfam Id: PF00153 Pfam Desc: Mitochondrial carrier protein
  misc_feature (8)..(85): Pfam Id: PF00153 Pfam Desc: Mitochondrial carrier protein
  misc_feature (98)..(192): Pfam Id: PF00153 Pfam Desc: Mitochondrial carrier protein
  misc_feature (1)..(294): NCBI GI: 171688798 Blast Desc: protein product [Podospora anserina] gi|170944361|emb|CAP70471.1| protein product [Podospora anserina]
  misc_feature (1)..(286): NCBI GI: 39973605 Blast Desc: MGG_01051 [Magnaporthe grisea 70-15] gi|145017993|gb|EDK02272.1| MGG_01051 [Magnaporthe grisea 70-15]
  misc_feature (7)..(287): NCBI GI: 46117020 Blast Desc: FG04352.1 [Gibberella zeae PH-1]
  misc_feature (1)..(286): NCBI GI: 256729437 Blast Desc: [Nectria haematococca mpVI 77-13-4]
  misc_feature (1)..(286): NCBI GI: 154296483 Blast Desc: BC1G_12816 [Botryotinia fuckeliana B05.10] gi|150843339|gb|EDN18532.1| BC1G_12816 [Botryotinia fuckeliana B05.10]
  misc_feature (2)..(289): NCBI GI: 85078659 Blast Desc: NCU01568 [Neurospora crassa OR74A] gi|16416043|emb|CAD01131.1| related to PET8 protein [Neurospora crassa] gi|28917258|gb|EAA26969.1| NCU01568 [Neurospora crassa
  misc_feature (1)..(288): NCBI GI: 156047809 Blast Desc: SS1G_09594 [Sclerotinia sclerotiorum 1980] gi|154693989|gb|EDN93727.1| SS1G_09594 [Sclerotinia sclerotiorum 1980]
  misc_feature (8)..(286): NCBI GI: 169607537 Blast Desc: SNOG_06827 [Phaeosphaeria nodorum SN15] gi|111064358|gb|EAT85478.1| SNOG_06827 [Phaeosphaeria nodorum SN15]
  misc_feature (8)..(286): NCBI GI: 189189416 Blast Desc: conserved [Pyrenophora tritici-repentis Pt-1C-BFP] gi|187972653|gb|EDU40152.1| conserved [Pyrenophora tritici-repentis Pt-1C-BFP]
  misc_feature (7)..(192): NCBI GI: 116199725 Blast Desc: CHGG_08018 [Chaetomium globosum CBS 148.51] gi|88179297|gb|EAQ86765.1| CHGG_08018 [Chaetomium globosum CBS 148.51]
MSQTHTPPFTTALLAGGVAGTTVDLSLFPLDTLKTRLQSSAGFFPSGGFRGVYRGVGSAVVGSAPGAAFFFCTYEGVKDILSNSRRNGQGGSDSKWADPLTHMAAASLGEIAACAVRVPTEVVKQRAQAGQHGGSSAGALRAILGQYGNIGLTGVWRELYRGWAITVMREVPFTVIQFPLWEAMKSWGRRRKASTIGETAEVGAGESALYGSISGAVAAAITTPLDVLKTRVMLSQERESVLTVFRNLLASQGVRPFFAGIGPRVMWISAGGAIFLGSYQWTVNAMQASLPSRRQELI

SEQ ID NO: 36795 - DNA, 2181 bp, Muscodor strobelii
  misc_feature: SGI cDNA ID NO. 572758
  misc_feature: Encodes the peptide sequence at SEQ ID NO 36796
atgggcacgattccgcaggtgctgcacacggggactcgccccatcggcctccaggagttcgccgatgcgttgcgagcctgttgcccgccgcgattccccaacttgactttcgatggctactcgaacattccgaggccggttggaatggcaataagtggtggcgttgattccatggccatggcctatctctgctcccgtctgcgcaggcaagaccggcgtttccagctcgccgacaacccgattgatatgtttcgcgcctgtgttgtcgatcacaggctgcgagaagggtcgacagatgaagcctggaaagtggtgagagccctaaaagcaatgggcatagctgccgaagccgtttcaatgcgatggagcgtcacattacgagacactccctacaaacatcccaaggacatgcccaactttgaaagcattgcgcggaggctccgctatcagaaactggcccgttggtgcaacaatcgcgacaccgtgagtctcttgctggcccatcacgaagatgaccagtacgagaccgtcctgatgcgccttctttcgggccacaagttccgcggactccgtggtatgaagaaggccgctgatatacccgaatgcgaaggcctacacaaggcacactacagcggctatctcgacgatcaggcacgggacaatccctattgggacagcaagatttcgaatcggaagtggatatggctccgaggcaaaatccgatctcagataagcgatctcatgcaggacgaagaagacaacgagtctctcttggctggactcgatcctgaagtgaatgagttataccgtgaagagaaaagggtcattttagacgagactgcccctctcgattgcgaggatggcggtataatgttataccgccctttgctcgagtttacgaaagaccgactgatcgccacgtgtgaagcaaataaggtgccctggttcgaggattccaccaacaaggatcccactctcacgatgaggaatgccgtccggcatatgtgtaagaattacacattgccggttgcgttacagaaaccttccgtcttggcgctatcgcagcggtgcgaaaagaaggctttgtcgttagagactgatgccgagcgtctgctcaagaagacgattattcacgaactcaactcgtatgccggaaccgtcaccgttcaatttcctgagaccataagcctcagctcaagggacttgcaaactccgctacgacgacaggtccggattcaacgacagcgagaagtggcggctctgttgatccaacgcattcagagtctggtgagcccaaacgacggggccagtattactaccatcgtaccattcgtttcgcgattgttccccatgctagcaactcccaatgagccagccatctcgcctccgaaagccttcgccatcgggggaacccatttcgtccctgtcatccccaaattcaatgctcggcggccgcgcaactcatcacgcccagctctaacctggtacctctctcgagctccttaccagaacaacgcacctattcctcgctggcgctccaaatattgggcttactgccgttggcctgcagagtggaaacctagaagcaagtggcctagatggtcacgctggaatctttgggatggtcggtactggcttagcctccgacaccgatttccacatcgcatcatcctccaacctttcggaaaagaacacgcaaagcgatttcgggacaagctgcacccagatgacgccgatcggctggctgctctgctgaagagacatgcaccaggcaaggtccggtatacgcttcccgcgttgtatatagaagaagaacttgatctaggggacatccgaccgaggccgctctatccgataccaacatcggagctcacggagttcgcccgcggcagtgaggggcacgaagagcatgaagacgacggtctggaaaatagaatctggataaacggggtcggtttggtggtctcggatcatcccaagactatcgatccctcgaagctgcaaatcattgcgttgccgacgcttggcatccagatcccgatgttggaggattggcttgaatatgatgtcaggtacaagcgtgctgatcgacatacgctcgctaaggcggattctttccaacgggggtcatttgtaccgcccaagcccaggggcaggaaacggatgagggttcgagcatag

SEQ ID NO: 36796 - protein, 726 aa, Muscodor strobelii
  misc_feature: SGI Peptide ID NO. 572758
  misc_feature (46)..(335): Pfam Id: PF01171 Pfam Desc: PP-loop family
  misc_feature (139)..(194): Pfam Id: PF01171 Pfam Desc: PP-loop family
  misc_feature (288)..(335): Pfam Id: PF01171 Pfam Desc: PP-loop family
  misc_feature (46)..(101): Pfam Id: PF01171 Pfam Desc: PP-loop family
  misc_feature (1)..(724): NCBI GI: 171688800 Blast Desc: protein product [Podospora anserina] gi|170944362|emb|CAP70472.1| protein product [Podospora anserina]
  misc_feature (7)..(711): NCBI GI: 164428026 Blast Desc: NCU01570 [Neurospora crassa OR74A] gi|16416041|emb|CAD01129.1| conserved [Neurospora crassa] gi|157071979|gb|EAA26971.2| [Neurospora crassa OR74A]
  misc_feature (1)..(607): NCBI GI: 256729243 Blast Desc: NECHADRAFT_47816 [Nectria haematococca mpVI 77-13-4]
  misc_feature (1)..(696): NCBI GI: 46117032 Blast Desc: FG04358.1 [Gibberella zeae PH-1]
  misc_feature (1)..(696): NCBI GI: 39973603 Blast Desc: MGG_01052 [Magnaporthe grisea 70-15] gi|145017992|gb|EDK02271.1| MGG_01052 [Magnaporthe grisea 70-15]
  misc_feature (14)..(609): NCBI GI: 154296481 Blast Desc: BC1G_12815 [Botryotinia fuckeliana B05.10] gi|150843338|gb|EDN18531.1| BC1G_12815 [Botryotinia fuckeliana B05.10]
  misc_feature (1)..(306): NCBI GI: 116199727 Blast Desc: CHGG_08019 [Chaetomium globosum CBS 148.51] gi|88179298|gb|EAQ86766.1| CHGG_08019 [Chaetomium globosum CBS 148.51]
  misc_feature (12)..(549): NCBI GI: 225561815 Blast Desc: PP-loop family protein [Ajellomyces capsulatus G186AR]
  misc_feature (12)..(549): NCBI GI: 240275421 Blast Desc: PP-loop family protein [Ajellomyces capsulatus H143]
  misc_feature (13)..(574): NCBI GI: 240106824 Blast Desc: PP-loop family protein [Coccidioides posadasii C735 delta SOWgp]
MGTIPQVLHTGTRPIGLQEFADALRACCPPRFPNLTFDGYSNIPRPVGMAISGGVDSMAMAYLCSRLRRQDRRFQLADNPIDMFRACVVDHRLREGSTDEAWKVVRALKAMGIAAEAVSMRWSVTLRDTPYKHPKDMPNFESIARRLRYQKLARWCNNRDTVSLLLAHHEDDQYETVLMRLLSGHKFRGLRGMKKAADIPECEGLHKAHYSGYLDDQARDNPYWDSKISNRKWIWLRGKIRSQISDLMQDEEDNESLLAGLDPEVNELYREEKRVILDETAPLDCEDGGIMLYRPLLEFTKDRLIATCEANKVPWFEDSTNKDPTLTMRNAVRHMCKNYTLPVALQKPSVLALSQRCEKKALSLETDAERLLKKTIIHELNSYAGTVTVQFPETISLSSRDLQTPLRRQVRIQRQREVAALLIQRIQSLVSPNDGASITTIVPFVSRLFPMLATPNEPAISPPKAFAIGGTHFVPVIPKFNARRPRNSSRPALTWYLSRAPYQNNAPIPRWRSKYWAYCRWPAEWKPRSKWPRWSRWNLWDGRYWLSLRHRFPHRIILQPFGKEHAKRFRDKLHPDDADRLAALLKRHAPGKVRYTLPALYIEEELDLGDIRPRPLYPIPTSELTEFARGSEGHEEHEDDGLENRIWINGVGLVVSDHPKTIDPSKLQIIALPTLGIQIPMLEDWLEYDVRYKRADRHTLAKADSFQRGSFVPPKPRGRKRMRVRA

SEQ ID NO: 36797 - DNA, 2592 bp, Muscodor strobelii
  misc_feature: SGI EST ID NO. CUFF.87880.0
  misc_feature: Variant of the nucleotide sequence at SEQ ID NO 36795
gtttgacagctgagcccctcatgctcaattgcccgtgtttccaactccaagccactgtttttctagttgtttagatatcatgtcgacggaatgggcacgattccgcaggtgctgcacacggggactcgccccatcggcctccaggagttcgccgatgcgttgcgagcctgttgcccgccgcgattccccaacttgactttcgatggctactcgaacattccgaggccggttggaatggcaataagtggtggcgttgattccatggccatggcctatctctgctcccgtctgcgcaggcaagaccggcgtttccagctcgccgacaacccgattgatatgtttcgcgcctgtgttgtcgatcacaggctgcgagaagggtcgacagatgaagcctggaaagtggtgagagccctaaaagcaatgggcatagctgccgaagccgtttcaatgcgatggagcgtcacattacgagacactccctacaaacatcccaaggacatgcccaactttgaaagcattgcgcggaggctccgctatcagaaactggcccgttggtgcaacaatcgcgacaccgtgagtctcttgctggcccatcacgaagatgaccagtacgagaccgtcctgatgcgccttctttcgggccacaagttccgcggactccgtggtatgaagaaggccgctgatatacccgaatgcgaaggcctacacaaggcacactacagcggctatctcgacgatcaggcacgggacaatccctattgggacagcaagatttcgaatcggaagtggatatggctccgaggcaaaatccgatctcagataagcgatctcatgcaggacgaagaagacaacgagtctctcttggctggactcgatcctgaagtgaatgagttataccgtgaagagaaaagggtcattttagacgagactgcccctctcgattgcgaggatggcggtataatgttataccgccctttgctcgagtttacgaaagaccgactgatcgccacgtgtgaagcaaataaggtgccctggttcgaggattccaccaacaaggatcccactctcacgatgaggaatgccgtccggcatatgtgtaagaattacacattgccggttgcgttacagaaaccttccgtcttggcgctatcgcagcggtgcgaaaagaaggctttgtcgttagagactgatgccgagcgtctgctcaagaagacgattattcacgaactcaactcgtatgccggaaccgtcaccgttcaatttcctgagaccataagcctcagctcaagggacttgcaaactccgctacgacgacaggtccggattcaacgacagcgagaagtggcggctctgttgatccaacgcattcagagtctggtgagcccaaacgacggggccagtattactaccatcgtaccattcgtttcgcgattgttccccatgctagcaactcccaatgagccagccatctcgcctccgaaagccttcgccatcgggggaacccatttcgtccctgtcatccccaaattcaatgctcggcggccgcgcaactcatcacgcccagctctaacctggtacctctctcgagctccttaccagaacaacgcacctattcctcgctggcgctccaaatattgggcttactgccgttggcctgcagagtggaaacctagaagcaagtggcctagatggtcacgctggaatctttgggatggtcggtactggcttagcctccgacaccgatttccacatcgcatcatcctccaacctttcggaaaagaacacgcaaagcgatttcgggacaagctgcacccagatgacgccgatcggctggctgctctgctgaagagacatgcaccaggcaaggtccggtatacgcttcccgcgttgtatatagaagaagaacttgatctaggggacatccgaccgaggccgctctatccgataccaacatcggagctcacggagttcgcccgcggcagtgaggggcacgaagagcatgaagacgacggtctggaaaatagaatctggataaacggggtcggtttggtggtctcggatcatcccaagactatcgatccctcgaagctgcaaatcattgcgttgccgacgcttggcatccagatcccgatgttggaggattggcttgaatatgatgtcaggtacaagcgtgctgatcgacatacgctcgctaaggcggattctttccaacgggggtcatttgtaccgcccaagcccaggggcaggaaacggatgagggttcgagcatagcgatagattgatacccttttcacgttgttagattcttatatattctggttgtatgtacgctatgtgaagaatttcaaatgctgctaaatgatgtcgaccgtgcctcgctttcttatctattgcccaaggaattgtaacaatccactcaagagatctgccaaactttggtctgcgtttccgttgtcgtccgtgttcccaccgtcgtttccatttccattattattcccatttccattcccggagccctgcgctgggtcattgccattgccattctgtccattcttcccacctcttcctccttgcccttgtcccgcacctgcg

SEQ ID NO: 36798 - DNA, 630 bp, Muscodor strobelii
  misc_feature: SGI cDNA ID NO. 572759
  misc_feature: Encodes the peptide sequence at SEQ ID NO 36799
atgcacgcaacactcttcctcttcctcctgccattaagcagcgcgctgccacatctcgacggcctatcagatacaatcatacaaaaagcccgctcagcaaaagatgatgcactggacataaacgcagcaaacgatacgtccatccctgtagtcgtcatccggccgtcaactacaatggtagtagacgcagagcccacatccactgcaaaagtaacaaagacaaaagtagcgacaaacattgcttcttcagtagcggcaacagatatcgcctcttcagttgctaatgctacttccgcgtcatcagcaccagcagcatcaagtacaaacgcggcagctaccggcaccgcagctatatcaacagtggacatcttcccatcatccacagtcgtcgcgtctgcagctccgtccgcaacccagacagctggcgcaggtgcgggacaagggcaaggaggaagaggtgggaagaatggacagaatggcaatggcaatgacccagcgcagggctccgggaatggaaatgggaataataatggaaatggaaacgacggtgggaacacggacgacaacggaaacgcagaccaaagtttggcagatctcttgagtggattgttacaattccttgggcaatag

SEQ ID NO: 36799 - protein, 209 aa, Muscodor strobelii
  misc_feature: SGI Peptide ID NO. 572759
MHATLFLFLLPLSSALPHLDGLSDTIIQKARSAKDDALDINAANDTSIPVVVIRPSTTMVVDAEPTSTAKVTKTKVATNIASSVAATDIASSVANATSASSAPAASSTNAAATGTAAISTVDIFPSSTVVASAAPSATQTAGAGAGQGQGGRGGKNGQNGNGNDPAQGSGNGNGNNNGNGNDGGNTDDNGNADQSLADLLSGLLQFLGQ

SEQ ID NO: 36800 - DNA, 482 bp, Muscodor strobelii
  misc_feature: SGI EST ID NO. CUFF.87850.0
  misc_feature: Variant of the nucleotide sequence at SEQ ID NO 36798
ggttaggtgggaaacatctggtagagcattttcggaacgtgtattatcttcttcaaaacattgattctcagttgaactgacttataccgaatgcctacgattgttcaattgagagctctcactcactaaaatcaagaaacgtctccaaattcatactcacttaatccttattctttctctcacattgctttctttacagcgagctctcgctcagtgaaaaacaaccatgcacgcaacactcttcctcttcctcctgccattaagcagcgcgctgccacatctcgacggcctatcagatacaatcatacaaaaagcccgctcagcaaaagatgatgcactggacataaacgcagcaaacgatacgtccatccctgtagtcgtcatccggccgtcaactacaatggtagtagacgcagagcccacatccactgcaaaagtaacaaagacaaaagtagcgacaaacattgcttcttcagtagcgg

SEQ ID NO: 36801 - DNA, 1752 bp, Muscodor strobelii
  misc_feature: SGI cDNA ID NO. 572760
  misc_feature: Encodes the peptide sequence at SEQ ID NO 36802
atgaacgactctgctgaggagtgcgaaacgcacatctttgtagatgccagcgagcttaaacagtcgccaaaatcttcttctcaatctgctcccgacgacgatgctacctctcagatcgcgggggggtttagggaacgagctggtgaaatcgatcgccggagtgctagaaatgtaagagctgagcctccgcctcaagctgtccactctagctcgtccaattcaagccaaagcaaacgcggccaggccggaagagatcagtgtcgcaaatctggagaagacagtgacagtggctcggatgatgacaacactcgtcgccaattaggagatggtaacgacgaaaccattgcgcagcaagagccgctgccctcgccaatcgaatccacatcggggagcaaacactccaagttgaaattttcgaagccaatagtattaacacccgaagaggaacggcgtgtggaggtgcagcggctgatgtttcgtcgacgggaaacaagcgatgacgaatggcgcaggctttttgaaattcgctctataaaccgaaatgacgctatccagaaacgagaatatcttgttgacttgtgtagtcagcgtagaatcagatattcttcgcatgacctcgatacaagttcgctggattcaacatggcgtccaaatgatgcctatctttggcacgaacaggaagcctggaggtaccaatatcttaatagagtattgggccgtgatattgaaaacagaaacacagttcaggtggagagtcggctgttgaaagagatggcaccgtcttatctggttcaagagctcatataccaagctgaagctatgtgcctaatttggtggaatcagtttctcgactctcccgcgagcactatgtacgagcttgtggaaattatcacagggaaacacgactatatacaaaggtataacagaagacccaaatcaggaatgcgagaggaacgttggtacagcacgtttgctggtatctacgaacgcaacctcgtatccgagcttctctcttgcacaagccaagtacttaccgatgggccagcatatcgcaaaatactcaaactgttgtcgaggactccttcagcaggccaaggcgctaggaggaacatgcaactaattcctttccgagcggtggacaacgagtcagactatctcatgattacgaggttgatagctaattgtcgccaagaaggacgccccagtcaagaatatacggaatgggtgtgtagccattttcatcctgacgagctctctgaatgctgccaacagatgcaagagcaactccgcggtgaggaaatcaagaccttgtttggaaatgcatctattcaacaagaattcatcgaggaaacaaaagcagacggagaggtgtcgctatctctgtatcttttcaaaggcggcattccatgctccgtctcacccgtatctcgagatgatgagttacaattgggctggtataggatgcagggtactgtggcttggaatgacgaaatgctcaggcatggtctgacatctcgatatttctgtcacgagttggataaggtctctggataccatttcaaggtcggcattgatggagaattgctcgggctctggtcacccaaacatcgtcttgttctgtacgaagttgcggaagagactagcgcactgccatactgtaacaaatctacccaggaactgaaaggcgagatgaaaagtgctctaagccgggattatcgacgatacatgaccggatacatgccaacaaactag

SEQ ID NO: 36802 - protein, 583 aa, Muscodor strobelii
  misc_feature: SGI Peptide ID NO. 572760
MNDSAEECETHIFVDASELKQSPKSSSQSAPDDDATSQIAGGFRERAGEIDRRSARNVRAEPPPQAVHSSSSNSSQSKRGQAGRDQCRKSGEDSDSGSDDDNTRRQLGDGNDETIAQQEPLPSPIESTSGSKHSKLKFSKPIVLTPEEERRVEVQRLMFRRRETSDDEWRRLFEIRSINRNDAIQKREYLVDLCSQRRIRYSSHDLDTSSLDSTWRPNDAYLWHEQEAWRYQYLNRVLGRDIENRNTVQVESRLLKEMAPSYLVQELIYQAEAMCLIWWNQFLDSPASTMYELVEIITGKHDYIQRYNRRPKSGMREERWYSTFAGIYERNLVSELLSCTSQVLTDGPAYRKILKLLSRTPSAGQGARRNMQLIPFRAVDNESDYLMITRLIANCRQEGRPSQEYTEWVCSHFHPDELSECCQQMQEQLRGEEIKTLFGNASIQQEFIEETKADGEVSLSLYLFKGGIPCSVSPVSRDDELQLGWYRMQGTVAWNDEMLRHGLTSRYFCHELDKVSGYHFKVGIDGELLGLWSPKHRLVLYEVAEETSALPYCNKSTQELKGEMKSALSRDYRRYMTGYMPTN

SEQ ID NO: 36803 - DNA, 1042 bp, Muscodor strobelii
  misc_feature: SGI EST ID NO. CUFF.87861.0
  misc_feature: Variant of the nucleotide sequence at SEQ ID NO 36801
gtggaatcagtttctcgactctcccgcgagcactatgtacgagcttgtggaaattatcacagggaaacacgactatatacaaaggtataacagaagacccaaatcaggaatgcgagaggaacgttggtacagcacgtttgctggtatctacgaacgcaacctcgtatccgagcttctctcttgcacaagccaagtacttaccgatgggccagcatatcgcaaaatactcaaactgttgtcgaggactccttcagcaggccaaggcgctaggaggaacatgcaactaattcctttccgagcggtggacaacgagtcagactatctcatgattacgaggttgatagctaattgtcgccaagaaggacgccccagtcaagaatatacggaatgggtgtgtagccattttcatcctgacgagctctctgaatgctgccaacagatgcaagagcaactccgcggtgaggaaatcaagaccttgtttggaaatgcatctattcaacaagaattcatcgaggaaacaaaagcagacggagaggtgtcgctatctctgtatcttttcaaaggcggcattccatgctccgtctcacccgtatctcgagatgatgagttacaattgggctggtataggatgcagggtactgtggcttggaatgacgaaatgctcaggcatggtctgacatctcgatatttctgtcacgagttggataaggtctctggataccatttcaaggtcggcattgatggagaattgctcgggctctggtcacccaaacatcgtcttgttctgtacgaagttgcggaagagactagcgcactgccatactgtaacaaatctacccaggaactgaaaggcgagatgaaaagtgctctaagccgggattatcgacgatacatgaccggatacatgccaacaaactaggaagctaaagagtcatacgcagaatataatatattccacaatttagctagcatagagtagtcgtgcagagtaaactagatcagctaacttgttaaattggcactgtacgaaagtctgacaatg

SEQ ID NO: 36804 - DNA, 936 bp, Muscodor strobelii
  misc_feature: SGI cDNA ID NO. 572761
  misc_feature: Encodes the peptide sequence at SEQ ID NO 36805
atgaatgaacatgattccgtggaaatgtcgctgaacaggccacacagcgccacggccgtttcttcggtaacagatataagctcagcttcagcttctctcatagatgaagccaatcctataacacgagaggacattgaaagaaaaccatggaaatacatcggatatcgttgctacaccgatctcattgcttccgaagatgacttttttctattgaggcgcttcgactctcttaatgtgcgcgtcgcattgcttctgcaagatgagatcacggaactggagaccgagctcaaggatatagatgacgaatctagcaaaaaagcatcacctgatatccacaatggctcgttcagactagatctagagcagcgcaggaaagcgttgagaaaaatccgaactcgattaagagaatataatgaacttattttacagcagtcagaactgaaaaaatttcaaaccccgcgtacacaagacgtacgctcgttgaaaaactggcactacaaccatgactacatggccatttcatcagacgagcaaaagtatctagagcatgaagaagatctgatctatattgtgcaaagagataaaatgcccttgcggagactaatagacagttcacgtttgttcagaactctcccaatatggcgtctgaagcaagagcgttctggcgaaaacgaaaaagacgttataacccattattccgacaagcggatgaacacattcgctacaagtctcatcatacttttcggcgccatactgctactcgcgcctttgtggattctgtatgcgctaagtaatatagcccatagactgggtgttataagcgtattcgtcgttgcattcctttttacgctgtcattcgcgctaccaatgaagcctttcgaggcattgggagcgactgctgcgtacgtccaactccaatatatcatgagattttag

SEQ ID NO: 36805 - protein, 311 aa, Muscodor strobelii
  misc_feature: SGI Peptide ID NO. 572761
  misc_feature (45)..(301): NCBI GI: 171685542 Blast Desc: protein product [Podospora anserina] gi|170942732|emb|CAP68385.1| protein product [Podospora anserina]
  misc_feature (38)..(297): NCBI GI: 256732079 Blast Desc: NECHADRAFT_80333 [Nectria haematococca mpVI 77-13-4]
  misc_feature (14)..(297): NCBI GI: 116199503 Blast Desc: [Chaetomium globosum CBS 148.51] gi|88179186|gb|EAQ86654.1| [Chaetomium globosum CBS 148.51]
  misc_feature (26)..(305): NCBI GI: 189204077 Blast Desc: PTRG_08042 [Pyrenophora tritici-repentis Pt-1C-BFP] gi|187985473|gb|EDU50961.1| PTRG_08042 [Pyrenophora tritici-repentis Pt-1C-BFP]
  misc_feature (37)..(285): NCBI GI: 169619281 Blast Desc: SNOG_12835 [Phaeosphaeria nodorum SN15] gi|111058515|gb|EAT79635.1| SNOG_12835 [Phaeosphaeria nodorum SN15]
  misc_feature (41)..(140): NCBI GI: 169605277 Blast Desc: SNOG_05661 [Phaeosphaeria nodorum SN15] gi|111065605|gb|EAT86725.1| SNOG_05661 [Phaeosphaeria nodorum SN15]
  misc_feature (25)..(304): NCBI GI: 261355016 Blast Desc: conserved [Verticillium albo-atrum VaMs.102]
  misc_feature (54)..(309): NCBI GI: 256722189 Blast Desc: NECHADRAFT_52473 [Nectria haematococca mpVI 77-13-4]
  misc_feature (63)..(305): NCBI GI: 189194677 Blast Desc: conserved [Pyrenophora tritici-repentis Pt-1C-BFP] gi|187979241|gb|EDU45867.1| conserved [Pyrenophora tritici-repentis Pt-1C-BFP]
  misc_feature (53)..(305): NCBI GI: 169618816 Blast Desc: SNOG_12600 [Phaeosphaeria nodorum SN15] gi|111058778|gb|EAT79898.1| SNOG_12600 [Phaeosphaeria nodorum SN15]
MNEHDSVEMSLNRPHSATAVSSVTDISSASASLIDEANPITREDIERKPWKYIGYRCYTDLIASEDDFFLLRRFDSLNVRVALLLQDEITELETELKDIDDESSKKASPDIHNGSFRLDLEQRRKALRKIRTRLREYNELILQQSELKKFQTPRTQDVRSLKNWHYNHDYMAISSDEQKYLEHEEDLIYIVQRDKMPLRRLIDSSRLFRTLPIWRLKQERSGENEKDVITHYSDKRMNTFATSLIILFGAILLLAPLWILYALSNIAHRLGVISVFVVAFLFTLSFALPMKPFEALGATAAYVQLQYIMRF

SEQ ID NO: 36806 - DNA, 1962 bp, Muscodor strobelii
  misc_feature: SGI cDNA ID NO. 572762
  misc_feature: Encodes the peptide sequence at SEQ ID NO 36807
atgtccgagtatcaataccgaagaattgacaatatccccaacggcgaccatatccgcctcctgaccctagccccgggcgaattttgggcagcgcctattcacgtcagcctctctgtcgtcaagctcggtagcgacgtagattatgaggcgctgtcatacaactgggctagaacatgggatacgagttctatcttctgcgacgggaagccgttcacggttacggcgcacctcgagtccgctcttcgccgtctacgatcaagaacgagcgatagggtcctatggatcgatgcaatatgcatcgaccagaacaatcttaccgaacggtctcaccaggttagccacatgaggcgggtctatcaggatgcgcagcgagtgttagtctggctgggcgagagcactttcagcgacccttcggtctttcccctctgccagcgcatggctgataattggatgtctctatacctagatgaatcgatcaatcttgatggccctgagtttctgtggcaggccaatcgaaagcaactctggttgcagaaattgcgagaaaaacaacacccgtacatagcacccactcgagaggacgaacagaatgaggagttgttcccaaatcagaatgaagtgaacgcagcattttcgtttctgcgtcttccatggttcaaacgctgctgggttattcaagaagttgtgctagcaaaggaagccattatgatgagtggcaagaactctatctcgtgggagctctttgttgtgggcatctcgctagtaatgtacctcggcgaaggcggactcgaaggtcggcagccagaggattatacctccagtattatgcttctcgcgggcatgttacgtggccaaatacggaattcggaagaaaaaggacaaggaatgccgcatttcgatcccctctggatgctcaacagggcgcgcaagatgggcgcgaccgatccacgggataaggtatatgctgtcctcggactcattgaccccgagaggcagacggagcttttcaaacctgattataccatctctgtgggagaatgctataagcgctctgcagttgctatcatgttagagaagaaaaacctcgacgtcctgatgatcgaccgcagccctgaatcggaactggccgcgccttcatgggttccagactgggattgtcacagacaatccattccgggcgctctcatccgcaacaatgataattatcgtgaatactgcgcttccacttcgtcacaattcgacgtaaaagacagagtagaaggagatgttctgatactttcagggtacgagttcgatagcatcgttgcggtcgaagatgtcctggtgaccccgaatttggtcaaatcggacttcagcgacgctttttcttctataagctcgttcaaaacattttggaacgataagctcggggtccttggtggctacatggacaccttgctgaactgggagaggttcgctctctcgcgctactattccacatatccaactggcgaagaccctgaagtagtttatgctacaacactctgtatcggatacgtagacagtccagacgcggctctagcaggctttaggaaatggcgcaaaagtctcctgggaccaaaggcagtgaacttcctgcgacaggtgaaaccgggaagtcaggcttggaacccctttacggcactctcaggtggcatctcgcttgccgcgtttaattacaatgatagagtcttcgccacggctacggaaagaacacttgaccggcgattagccaggactgcgaaagggtatctggcacttgtcccaagtcaaagcactgtcggcgaccagatatcactcttcgagggcggcaaggtaccatttgtgacgagaaaggcgcaacataaggggagtcatcaactgattgggccaagctacgtacatggtatcatgtacggaggggcatggaaacagtcgttggttcgtcatattgcaattgcttga

SEQ ID NO: 36807 - protein, 653 aa, Muscodor strobelii
  misc_feature: SGI Peptide ID NO. 572762
  misc_feature (48)..(227): Pfam Id: PF06985 Pfam Desc: Heterokaryon incompatibility protein (HET)
  misc_feature (48)..(132): Pfam Id: PF06985 Pfam Desc: Heterokaryon incompatibility protein (HET)
  misc_feature (194)..(227): Pfam Id: PF06985 Pfam Desc: Heterokaryon incompatibility protein (HET)
  misc_feature (4)..(642): NCBI GI: 256721799 Blast Desc: NECHADRAFT_53281 [Nectria haematococca mpVI 77-13-4]
  misc_feature (12)..(447): NCBI GI: 261202540 Blast Desc: conserved [Ajellomyces dermatitidis SLH14081] gi|239590581|gb|EEQ73162.1| conserved [Ajellomyces dermatitidis SLH14081]
  misc_feature (18)..(644): NCBI GI: 171678763 Blast Desc: protein product [Podospora anserina] gi|170937451|emb|CAP62109.1| protein product [Podospora anserina]
  misc_feature (12)..(445): NCBI GI: 239612306 Blast Desc: conserved [Ajellomyces dermatitidis ER-3]
  misc_feature (73)..(618): NCBI GI: 256729019 Blast Desc: NECHADRAFT_79878 [Nectria haematococca mpVI 77-13-4]
  misc_feature (2)..(445): NCBI GI: 225683598 Blast Desc: [Paracoccidioides brasiliensis Pb03]
  misc_feature (2)..(445): NCBI GI: 226287224 Blast Desc: conserved [Paracoccidioides brasiliensis Pb18]
  misc_feature (12)..(641): NCBI GI: 256721216 Blast Desc: NECHADRAFT_101059 [Nectria haematococca mpVI 77-13-4]
  misc_feature (16)..(640): NCBI GI: 145245067 Blast Desc: An11g08370 [Aspergillus niger] gi|134079496|emb|CAK46028.1| protein product [Aspergillus niger]
  misc_feature (18)..(639): NCBI GI: 46109348 Blast Desc: FG01556.1 [Gibberella zeae PH-1]
MSEYQYRRIDNIPNGDHIRLLTLAPGEFWAAPIHVSLSVVKLGSDVDYEALSYNWARTWDTSSIFCDGKPFTVTAHLESALRRLRSRTSDRVLWIDAICIDQNNLTERSHQVSHMRRVYQDAQRVLVWLGESTFSDPSVFPLCQRMADNWMSLYLDESINLDGPEFLWQANRKQLWLQKLREKQHPYIAPTREDEQNEELFPNQNEVNAAFSFLRLPWFKRCWVIQEVVLAKEAIMMSGKNSISWELFVVGISLVMYLGEGGLEGRQPEDYTSSIMLLAGMLRGQIRNSEEKGQGMPHFDPLWMLNRARKMGATDPRDKVYAVLGLIDPERQTELFKPDYTISVGECYKRSAVAIMLEKKNLDVLMIDRSPESELAAPSWVPDWDCHRQSIPGALIRNNDNYREYCASTSSQFDVKDRVEGDVLILSGYEFDSIVAVEDVLVTPNLVKSDFSDAFSSISSFKTFWNDKLGVLGGYMDTLLNWERFALSRYYSTYPTGEDPEVVYATTLCIGYVDSPDAALAGFRKWRKSLLGPKAVNFLRQVKPGSQAWNPFTALSGGISLAAFNYNDRVFATATERTLDRRLARTAKGYLALVPSQSTVGDQISLFEGGKVPFVTRKAQHKGSHQLIGPSYVHGIMYGGAWKQSLVRHIAIA

SEQ ID NO: 36808 - DNA, 541 bp, Muscodor strobelii
  misc_feature: SGI EST ID NO. CUFF.87874.0
  misc_feature: Variant of the nucleotide sequence at SEQ ID NO 36806
cgtagacagtccagacgcggctctagcaggctttaggaaatggcgcaaaagtctcctgggaccaaaggcagtgaacttcctgcgacaggtgaaaccgggaagtcaggcttggaacccctttacggcactctcaggtggcatctcgcttgccgcgtttaattacaatgatagagtcttcgccacggctacggaaagaacacttgaccggcgattagccaggactgcgaaagggtatctggcacttgtcccaagtcaaagcactgtcggcgaccagatatcactcttcgagggcggcaaggtaccatttgtgacgagaaaggcgcaacataaggggagtcatcaactgattgggccaagctacgtacatggtatcatgtacggaggggcatggaaacagtcgttggttcgtcatattgcaattgcttgagagaagatcaacctgaaatgtgatgagctgtgtgctttttgtttgcggctagatatatacgacgcactcgtccaattagtatcataccacatttcttcgttttcaaccttgccc

SEQ ID NO: 36809 - DNA, 360 bp, Muscodor strobelii
  misc_feature: SGI cDNA ID NO. 572763
  misc_feature: Encodes the peptide sequence at SEQ ID NO 36810
atgcgatccaagttcaaggacgagcatcccttcgagaagcgcaaggccgaggccgagcgcatccgccagaagtactccgaccgcattccggtcatctgtgaaaaggtcgagaagtccgacattgcgactatcgacaagaagaaataccttgtccccgcagatctcaccgtaggccagttcgtctacgtgatccgcaagcgcatcaagctgtcccccgagaaggccatcttcatcttcgtcgatgaggtcctgcccccgaccgccgctctcatgagctccatctacgaagagcataaggacgaagatggattcctctacatcacctactcgggcgagaacacattcggcgaatcttcttag

SEQ ID NO: 36810 - protein, 119 aa, Muscodor strobelii
  misc_feature: SGI Peptide ID NO. 572763
  misc_feature (13)..(116): Pfam Id: PF02991 Pfam Desc: Microtubule associated protein 1A/1B, light chain 3
  misc_feature (1)..(118): NCBI GI: 46138451 Blast Desc: FG10740.1 [Gibberella zeae PH-1]
  misc_feature (1)..(118): NCBI GI: 171474367 Blast Desc: microtubule-associated protein [Gibberella zeae]
  misc_feature (1)..(118): NCBI GI: 169596995 Blast Desc: SNOG_01275 [Phaeosphaeria nodorum SN15] gi|121921129|sp|Q0V3Y9.1|ATG8_PHANO RecName: Full=Autophagy-related protein 8; AltName: Full=Autophagy-related
  misc_feature (1)..(118): NCBI GI: 156062972 Blast Desc: SS1G_01602 [Sclerotinia sclerotiorum 1980] gi|166990636|sp|A7E8H4.1|ATG8_SCLS1 RecName: Full=Autophagy-related protein 8; AltName: Full=Autophagy-related
  misc_feature (1)..(117): NCBI GI: 85078885 Blast Desc: NCU01545 [Neurospora crassa OR74A] gi|62899798|sp|Q8WZY7.1|ATG8_NEUCR RecName: Full=Autophagy-related protein 8; AltName: Full=Autophagy-related
  misc_feature (1)..(118): NCBI GI: 242807563 Blast Desc: autophagic death protein Aut7/IDI-7, [Talaromyces stipitatus ATCC 10500] gi|218715607|gb|EED15029.1| autophagic death protein Aut7/IDI-7, [Talaromyces stipitatus ATCC 10500]
  misc_feature (1)..(118): NCBI GI: 256729181 Blast Desc: [Nectria haematococca mpVI 77-13-4]
  misc_feature (1)..(116): NCBI GI: 166990631 Blast Desc: ATG8_COLLN RecName: Full=Autophagy-related protein 8; AltName: Full=Autophagy-related ubiquitin-like modifier ATG8; Flags: Precursor gi|134034956|gb|ABO46011.1| autophagy 8 protein
  misc_feature (1)..(117): NCBI GI: 169764058 Blast Desc: [Aspergillus oryzae RIB40] gi|238490045|ref|XP_002376260.1| autophagic death protein IDI-7, [Aspergillus flavus NRRL3357] gi|255931651|ref|XP_002557382.1| 8;
  misc_feature (1)..(118): NCBI GI: 154319031 Blast Desc: autophagy-related protein 8 [Botryotinia fuckeliana B05.10] gi|166990630|sp|A6RPU4.1|ATG8_BOTFB RecName: Full=Autophagy-related protein 8; AltName: Full=Autophagy-related
MRSKFKDEHPFEKRKAEAERIRQKYSDRIPVICEKVEKSDIATIDKKKYLVPADLTVGQFVYVIRKRIKLSPEKAIFIFVDEVLPPTAALMSSIYEEHKDEDGFLYITYSGENTFGESS

SEQ ID NO: 36811 - DNA, 2053 bp, Muscodor strobelii
  misc_feature: SGI EST ID NO. CUFF.87983.0
  misc_feature: Variant of the nucleotide sequence at SEQ ID NO 36809
cgctgtccctagaggtacctctcttgcacacctcctccaacctccaccgcctcacccatcgcattcccattaccaatccacgctcagctgtcgctccatccatcaccagattgatctcttacatctacatctttccacctattgctcctagggctatcctcaacccttcatcagctccccatctcgcggcgctcgcagtcatcgccgaccgacaagtcattgctcctgttctagctaccgatctcgactctaccaaacaacaccgccaacatgcgatccaagttcaaggacgagcatcccttcgagaagcgcaaggccgaggccgagcgcatccgccagaagtactccgaccgcattccggtcatctgtgaaaaggtcgagaagtccgacattgcgactatcgacaagaagaaataccttgtccccgcagatctcaccgtaggccagttcgtctacgtgatccgcaagcgcatcaagctgtcccccgagaaggccatcttcatcttcgtcgatgaggtcctgcccccgaccgccgctctcatgagctccatctacgaagagcataaggacgaagatggattcctctacatcacctactcgggcgagaacacattcggcgaatcttcttagatcggtcctctacttgggtttggggtttctttagggcgttcttagggtcgactgtacgttcagacacgatgtgacgggcttctgctgctgctgctagacacagccacgacgggacgggaatggcagggagggaatcagtttgtctagacgggcgtccaagcttgtcaaccgtgttgcgttagcagatggattcattctcgcctttgatattcagctcgtcgatgataactatgaaatagtggcgttctgcccaccatcctgctgttctcccaacccttgccggcacttgccgtgtgctttccgcgatgcgtgcataccccaatacccagtctcgtgcatactgacatgttcaagccttctcaaacactttcttgtgcgccgctaacctttttctcatgtcccgcatgtagaagtctaccggtagcctcctgatcttcaggggcagcggcctatagagagtcttcacgagcacctcttccagcttgtacatcttgggatggctcttgactccaaactccctacggattctctccggcagaaactcggccgtcacgacacggagactgggcataaagatgcgggcccaagcgggagctctccggaggtagagaagatcttgggcgacctctttagcgtgctgtgtgatctcgagcgtggccactttgtggtcccagtattgccagaaagcagcacggttggccggccacatctccggaggcacctgcaatgaacacgccaggatcgagtactcggagtatatcttatccatctcctcttcgtcatcaatcttgccccatacacgctcgtaaatggtgatggccgtcgcatacagcgtggccgccacccacatctggagttcgggatcgagggcgctgtatgtcttgccctgattctttccctcattcagagtgccggtgatttgcgtgtggatccgggtgatcatgtctgtgatctgtctcttctcttgtggagttccgaacgccatgcagtacacgaaggtcatggtagtccgtagcctgtcttgtacccgatacgcgaagttgctgtgttggttcacgccggcgccgactccgggctcggcaacttgcagcagaatggcggcaatgccgccggccactaggatcccttcttgtacaacgcgggtgatgtgcttggcttcaaagtctgccgataggaaggtctctttcgagatgccccctgtcgccgacttctctcctgaagaggaagaagaggcactcgttccggtcatcatgcgctatggactctgtgtttgaagggaaggggtctcagcaacgtaagttcgacaggttgataccggacaacgtgaactgctgcctgtggtctcagatgcaagtagatatgcaagtagatattgaatggaactgctcaagatatatgtcgaagtttcatgacagttgactcc

SEQ ID NO: 36812 - DNA, 900 bp, Muscodor strobelii
  misc_feature: SGI cDNA ID NO. 572764
  misc_feature: Reduced expression when VOC is produced
  misc_feature: Encodes the peptide sequence at SEQ ID NO 36813
atgaccggaacgagtgcctcttcttcctcttcaggagagaagtcggcgacagggggcatctcgaaagagaccttcctatcggcagactttgaagccaagcacatcacccgcgttgtacaagaagggatcctagtggccggcggcattgccgccattctgctgcaagttgccgagcccggagtcggcgccggcgtgaaccaacacagcaacttcgcgtatcgggtacaagacaggctacggactaccatgaccttcgtgtactgcatggcgttcggaactccacaagagaagagacagatcacagacatgatcacccggatccacacgcaaatcaccggcactctgaatgagggaaagaatcagggcaagacatacagcgccctcgatcccgaactccagatgtgggtggcggccacgctgtatgcgacggccatcaccatttacgagcgtgtatggggcaagattgatgacgaagaggagatggataagatatactccgagtactcgatcctggcgtgttcattgcaggtgcctccggagatgtggccggccaaccgtgctgctttctggcaatactgggaccacaaagtggccacgctcgagatcacacagcacgctaaagaggtcgcccaagatcttctctacctccggagagctcccgcttgggcccgcatctttatgcccagtctccgtgtcgtgacggccgagtttctgccggagagaatccgtagggagtttggagtcaagagccatcccaagatgtacaagctggaagaggtgctcgtgaagactctctataggccgctgcccctgaagatcaggaggctaccggtagacttctacatgcgggacatgagaaaaaggttagcggcgcacaagaaagtgtttgagaaggcttga

SEQ ID NO: 36813 - protein, 299 aa, Muscodor strobelii
  misc_feature: SGI Peptide ID NO. 572764
  misc_feature (25)..(289): NCBI GI: 239612867 Blast Desc: conserved [Ajellomyces dermatitidis ER-3]
  misc_feature (25)..(289): NCBI GI: 261189915 Blast Desc: conserved [Ajellomyces dermatitidis SLH14081] gi|239591604|gb|EEQ74185.1| conserved [Ajellomyces dermatitidis SLH14081]
  misc_feature (5)..(296): NCBI GI: 115399376 Blast Desc: conserved [Aspergillus terreus NIH2624] gi|114192160|gb|EAU33860.1| conserved [Aspergillus terreus NIH2624]
  misc_feature (1)..(289): NCBI GI: 67524441 Blast Desc: AN2678.2 [Aspergillus nidulans FGSC A4] gi|40743896|gb|EAA63080.1| AN2678.2 [Aspergillus nidulans FGSC A4] gi|259486411|tpe|CBF84225.1| TPA: conserved [Aspergillus FGSC
  misc_feature (21)..(293): NCBI GI: 238508166 Blast Desc: conserved [Aspergillus flavus NRRL3357] gi|220688803|gb|EED45155.1| conserved [Aspergillus flavus NRRL3357]
  misc_feature (23)..(289): NCBI GI: 115383726 Blast Desc: conserved [Aspergillus terreus NIH2624] gi|114196102|gb|EAU37802.1| conserved [Aspergillus terreus NIH2624]
  misc_feature (21)..(293): NCBI GI: 169784636 Blast Desc: [Aspergillus oryzae RIB40] gi|83775526|dbj|BAE65646.1| protein product [Aspergillus oryzae]
  misc_feature (9)..(281): NCBI GI: 169765340 Blast Desc: [Aspergillus oryzae RIB40] gi|83764996|dbj|BAE55139.1| protein product [Aspergillus oryzae]
  misc_feature (9)..(281): NCBI GI: 238481855 Blast Desc: conserved [Aspergillus flavus NRRL3357] gi|220700216|gb|EED56554.1| conserved [Aspergillus flavus NRRL3357]
  misc_feature (7)..(289): NCBI GI: 115383720 Blast Desc: conserved [Aspergillus terreus NIH2624] gi|114196099|gb|EAU37799.1| conserved [Aspergillus terreus NIH2624]
  misc_feature: Useful for introducing or modulating the production of volatile compounds
MTGTSASSSSSGEKSATGGISKETFLSADFEAKHITRVVQEGILVAGGIAAILLQVAEPGVGAGVNQHSNFAYRVQDRLRTTMTFVYCMAFGTPQEKRQITDMITRIHTQITGTLNEGKNQGKTYSALDPELQMWVAATLYATAITIYERVWGKIDDEEEMDKIYSEYSILACSLQVPPEMWPANRAAFWQYWDHKVATLEITQHAKEVAQDLLYLRRAPAWARIFMPSLRVVTAEFLPERIRREFGVKSHPKMYKLEEVLVKTLYRPLPLKIRRLPVDFYMRDMRKRLAAHKKVFEKA

SEQ ID NO: 36814 - DNA, 654 bp, Muscodor strobelii
  misc_feature: SGI cDNA ID NO. 572765
  misc_feature: Reduced expression when VOC is produced
  misc_feature: Encodes the peptide sequence at SEQ ID NO 36815
atgaccttcgtgtactgcatggcgttcggaactccacaagagaagagacagatcacagacatgatcacccggatccacacgcaaatcaccggcactctgaatgagggaaagaatcagggcaagacatacagcgccctcgatcccgaactccagatgtgggtggcggccacgctgtatgcgacggccatcaccatttacgagcgtgtatggggcaagattgatgacgaagaggagatggataagatatactccgagtactcgatcctggcgtgttcattgcaggtgcctccggagatgtggccggccaaccgtgctgctttctggcaatactgggaccacaaagtggccacgctcgagatcacacagcacgctaaagaggtcgcccaagatcttctctacctccggagagctcccgcttgggcccgcatctttatgcccagtctccgtgtcgtgacggccgagtttctgccggagagaatccgtagggagtttggagtcaagagccatcccaagatgtacaagctggaagaggtgctcgtgaagactctctataggccgctgcccctgaagatcaggaggctaccggtagacttctacatgcgggacatgagaaaaaggttagcggcgcacaagaaagtgtttgagaaggcttga

SEQ ID NO: 36815 - protein, 217 aa, Muscodor strobelii
  misc_feature: SGI Peptide ID NO. 572765
  misc_feature (1)..(207): NCBI GI: 261189915 Blast Desc: conserved [Ajellomyces dermatitidis SLH14081] gi|239591604|gb|EEQ74185.1| conserved [Ajellomyces dermatitidis SLH14081]
  misc_feature (1)..(207): NCBI GI: 239612867 Blast Desc: conserved [Ajellomyces dermatitidis ER-3]
  misc_feature (1)..(214): NCBI GI: 115399376 Blast Desc: conserved [Aspergillus terreus NIH2624] gi|114192160|gb|EAU33860.1| conserved [Aspergillus terreus NIH2624]
  misc_feature (1)..(207): NCBI GI: 67524441 Blast Desc: AN2678.2 [Aspergillus nidulans FGSC A4] gi|40743896|gb|EAA63080.1| AN2678.2 [Aspergillus nidulans FGSC A4] gi|259486411|tpe|CBF84225.1| TPA: conserved [Aspergillus FGSC
  misc_feature (1)..(211): NCBI GI: 238508166 Blast Desc: conserved [Aspergillus flavus NRRL3357] gi|220688803|gb|EED45155.1| conserved [Aspergillus flavus NRRL3357]
  misc_feature (1)..(211): NCBI GI: 169784636 Blast Desc: [Aspergillus oryzae RIB40] gi|83775526|dbj|BAE65646.1| protein product [Aspergillus oryzae]
  misc_feature (1)..(207): NCBI GI: 115383726 Blast Desc: conserved [Aspergillus terreus NIH2624] gi|114196102|gb|EAU37802.1| conserved [Aspergillus terreus NIH2624]
  misc_feature (1)..(207): NCBI GI: 115383720 Blast Desc: conserved [Aspergillus terreus NIH2624] gi|114196099|gb|EAU37799.1| conserved [Aspergillus terreus NIH2624]
  misc_feature (1)..(199): NCBI GI: 169765340 Blast Desc: [Aspergillus oryzae RIB40] gi|83764996|dbj|BAE55139.1| protein product [Aspergillus oryzae]
  misc_feature (1)..(199): NCBI GI: 238481855 Blast Desc: conserved [Aspergillus flavus NRRL3357] gi|220700216|gb|EED56554.1| conserved [Aspergillus flavus NRRL3357]
  misc_feature: Useful for introducing or modulating the production of volatile compounds
MTFVYCMAFGTPQEKRQITDMITRIHTQITGTLNEGKNQGKTYSALDPELQMWVAATLYATAITIYERVWGKIDDEEEMDKIYSEYSILACSLQVPPEMWPANRAAFWQYWDHKVATLEITQHAKEVAQDLLYLRRAPAWARIFMPSLRVVTAEFLPERIRREFGVKSHPKMYKLEEVLVKTLYRPLPLKIRRLPVDFYMRDMRKRLAAHKKVFEKA

SEQ ID NO: 36816 - DNA, 1410 bp, Muscodor strobelii
  misc_feature: SGI cDNA ID NO. 572766
  misc_feature: Reduced expression when VOC is produced
  misc_feature: Encodes the peptide sequence at SEQ ID NO 36817
atggagaaatcagcttcgcctcgcccctactacaggcctaacaatgaagaaaaacatgaagagaaacttgataggcagccgagtctgcactcgagtcacgatgaactcatctacgggcgaatgagtagagccaagacgccggatacggttgctacgggcgcgagaactgcctcggtggcagcaaaaggctccaatatacggaaagttccccgaaggcagcggatgatggaacactttcgtcgcttttggccgtgctacttgataggcggtctaatactagctgctattctactccccatattattcctgaaaatcataccagccattgcccagagagtcatcgacaagacgaacttgccaataaacggcgggaaaatccaagccgtgacaagtaatcagctcctcgtctccctgagcacatccttgacggtaccaggaggcctcacggtcggtttgagtccatttacgctatacttatacaacaaaaccgatccagtctacactccttttctcagtgttcctctcgcaggacagaaggtccatggtacaaccaatatcgaagttacggacgaaatagtcagcgtagatgacattgacgctctcaacggctggctcgcctctacgctgcttcaagagacgaccgagcttagcgttaggggaaactcaactgctcatttgggtgcactgcactttcatgtcaatgtcgataaaaccgtcggcgtctccgctttaagaaaccttgacggcgtaagcatcgacagcttcacagtcatgctaccgccagataatgacgggaccaacatcgtgggatacatcaacatgccaaattggtcagacctgacactaggtctcggaaacgtcacgctcaatgcctgggccgacgatatactagtagcgaacgcggagatactcaacgttgatataccacctggtaataactcgctgccgttccgaggacagttatatctcgacacagtcacaaacaacattggcactcttatagcaagtcagagtgatattctgactaccggtagactagcagcctggtgcaacgggaatcagacgttggtcaacgggcagcatatctcgtatcttgagactgtgctgggtcaggcacatatcgagatcgagttgcccattactcagttattggggagtattattgatagtggagcttctggtaacttgacgttgaatgggctgtgggacagcgtatttgggaacagtagtagtaataatagctcgttgacggattttcttgacgatcttgcgcagagtcttggagggagcaattcgactgataatccctttgaggactttttgggcgatttgaatttgacaagtttgatcgggattaaggacatgggggcgaaggagtttaaggagagtgtcaagttgtttgatgattga

SEQ ID NO: 36817 - protein, 469 aa, Muscodor strobelii
  misc_feature: SGI Peptide ID NO. 572766
  misc_feature (16)..(443): NCBI GI: 238508164 Blast Desc: conserved [Aspergillus flavus NRRL3357] gi|220688802|gb|EED45154.1| conserved [Aspergillus flavus NRRL3357]
  misc_feature (54)..(410): NCBI GI: 145603854 Blast Desc: MGG_10273 [Magnaporthe grisea 70-15] gi|145011996|gb|EDJ96652.1| MGG_10273 [Magnaporthe grisea 70-15]
  misc_feature (54)..(410): NCBI GI: 149211157 Blast Desc: MGCH7_ch7g1040 [Magnaporthe grisea 70-15] gi|86196995|gb|EAQ71633.1| MGCH7_ch7g1040 [Magnaporthe grisea 70-15]
  misc_feature (43)..(395): NCBI GI: 169765338 Blast Desc: [Aspergillus oryzae RIB40] gi|83764995|dbj|BAE55138.1| protein product [Aspergillus oryzae]
  misc_feature (67)..(414): NCBI GI: 115383722 Blast Desc: conserved [Aspergillus terreus NIH2624] gi|114196100|gb|EAU37800.1| conserved [Aspergillus terreus NIH2624]
  misc_feature (58)..(384): NCBI GI: 67524443 Blast Desc: AN2679.2 [Aspergillus nidulans FGSC A4] gi|40743897|gb|EAA63081.1| AN2679.2 [Aspergillus nidulans FGSC A4] gi|259486410|tpe|CBF84224.1| TPA: conserved [Aspergillus FGSC
  misc_feature (55)..(384): NCBI GI: 115399378 Blast Desc: conserved [Aspergillus terreus NIH2624] gi|114192161|gb|EAU33861.1| conserved [Aspergillus terreus NIH2624]
  misc_feature (73)..(432): NCBI GI: 116200935 Blast Desc: CHGG_08352 [Chaetomium globosum CBS 148.51] gi|88176870|gb|EAQ84338.1| CHGG_08352 [Chaetomium globosum CBS 148.51]
  misc_feature (71)..(410): NCBI GI: 256721231 Blast Desc: NECHADRAFT_34831 [Nectria haematococca mpVI 77-13-4]
  misc_feature (67)..(467): NCBI GI: 121706130 Blast Desc: conserved [Aspergillus clavatus NRRL 1] gi|119399474|gb|EAW09902.1| conserved [Aspergillus clavatus NRRL 1]
  misc_feature: Useful for introducing or modulating the production of volatile compounds
MEKSASPRPYYRPNNEEKHEEKLDRQPSLHSSHDELIYGRMSRAKTPDTVATGARTASVAAKGSNIRKVPRRQRMMEHFRRFWPCYLIGGLILAAILLPILFLKIIPAIAQRVIDKTNLPINGGKIQAVTSNQLLVSLSTSLTVPGGLTVGLSPFTLYLYNKTDPVYTPFLSVPLAGQKVHGTTNIEVTDEIVSVDDIDALNGWLASTLLQETTELSVRGNSTAHLGALHFHVNVDKTVGVSALRNLDGVSIDSFTVMLPPDNDGTNIVGYINMPNWSDLTLGLGNVTLNAWADDILVANAEILNVDIPPGNNSLPFRGQLYLDTVTNNIGTLIASQSDILTTGRLAAWCNGNQTLVNGQHISYLETVLGQAHIEIELPITQLLGSIIDSGASGNLTLNGLWDSVFGNSSSNNSSLTDFLDDLAQSLGGSNSTDNPFEDFLGDLNLTSLIGIKDMGAKEFKESVKLFDD

SEQ ID NO: 36818 - DNA, 2524 bp, Muscodor strobelii
  misc_feature: SGI EST ID NO. CUFF.87919.0
  misc_feature: Variant of the nucleotide sequence at SEQ ID NO 36816
cagagcctccctggcctcggagcaaagacagctgggaactgaattggtgagagagagcaagccgaaaaaggaaatgggtgcgtacgattttggatccttggcggaatgccgctttgaatgcatatttgatcgacatatcccacaggtgtcactggtgaacccttgcgagccatgcaactccaacctgatcatcacccggatctacaacgggtttctctctcgtaccacaaacgacatggcaactcggcaaggcacttttcttgactttggcaactgagaagcctgtttaataattgccttgttgacaataattcgtaccacggaatgcgaatatttgggaatccatgtcagccgcgatgccactccacatccccatggggtctggggaatccttgacgctcctgctcgcttgacaactcgacgatttcaacagggccaacaagaaatgaaatgccaccccacacgattcagtcgtgcattggcactcaccaggcttgttgctggctctgtctcgttcgtctcgcttgtctgcatggtaattcaaatttgttgccaactggttggctacgcgagcatgtcagtatacgatgttataggcgcttttgatgacagatcctagagtagagccagtacctattccgcaaatcttggatcgttgacactctcagtttgcttcggagctacatggaccaccggaaccctatttctcctcacttggctgggctggagtggacaatgccctggttcttggagtctaattgacagacggaagtgtggctaggtttggctatgtcattgaaaaagtgatcatgtccagatcctctttctcctcacttgggctgggcacgatcgggatttttccgtatgcaactgtgtaatggggccgcagggagcaggtgatgtgcagtgacgcccctcaatactcatcactccttcttgcatgtcgaagtccgtttgaaaacggcatatcaagaagcgcgcgcctcgagtgatacgtcttttggagttctccggaatgcttccatgcgaacatagatgcattgacgttgacgcatgcgaataataccatggagaaatcagcttcgcctcgcccctactacaggcctaacaatgaagaaaaacatgaagagaaacttgataggcagccgagtctgcactcgagtcacgatgaactcatctacgggcgaatgagtagagccaagacgccggatacggttgctacgggcgcgagaactgcctcggtggcagcaaaaggctccaatatacggaaagttccccgaaggcagcggatgatggaacactttcgtcgcttttggccgtgctacttgataggcggtctaatactagctgctattctactccccatattattcctgaaaatcataccagccattgcccagagagtcatcgacaagacgaacttgccaataaacggcgggaaaatccaagccgtgacaagtaatcagctcctcgtctccctgagcacatccttgacggtaccaggaggcctcacggtcggtttgagtccatttacgctatacttatacaacaaaaccgatccagtctacactccttttctcagtgttcctctcgcaggacagaaggtccatggtacaaccaatatcgaagttacggacgaaatagtcagcgtagatgacattgacgctctcaacggctggctcgcctctacgctgcttcaagagacgaccgagcttagcgttaggggaaactcaactgctcatttgggtgcactgcactttcatgtcaatgtcgataaaaccgtcggcgtctccgctttaagaaaccttgacggcgtaagcatcgacagcttcacagtcatgctaccgccagataatgacgggaccaacatcgtgggatacatcaacatgccaaattggtcagacctgacactaggtctcggaaacgtcacgctcaatgcctgggccgacgatatactagtagcgaacgcggagatactcaacgttgatataccacctggtaataactcgctgccgttccgaggacagttatatctcgacacagtcacaaacaacattggcactcttatagcaagtcagagtgatattctgactaccggtagactagcagcctggtgcaacgggaatcagacgttggtcaacgggcagcatatctcgtatcttgagactgtgctgggtcaggcacatatcgagatcgagttgcccattactcagttattggggagtattattgatagtggagcttctggtaacttgacgttgaatgggctgtgggacagcgtatttgggaacagtagtagtaataatagctcgttgacggattttcttgacgatcttgcgcagagtcttggagggagcaattcgactgataatccctttgaggactttttgggcgatttgaatttgacaagtttgatcgggattaaggacatgggggcgaaggagtttaaggagagtgtcaagttgtttgatgattgatgaagggaatgggatagattatgagggcatgagactgggtacgaaat

SEQ ID NO: 36819 - DNA, 338 bp, Muscodor strobelii
  misc_feature: SGI cDNA ID NO. 572767
  misc_feature: Reduced expression when VOC is produced
  misc_feature: Encodes the peptide sequence at SEQ ID NO 36820
atggattccagacagccccagatgcccttcgcgcgcagtagtgctacatcgccacccttcacacgctcgccctttgcgccggcagcgtcgacggggcccatcaacggctctacttcctccccgtatcctccccgttcggccgtcgcaacgacgagcccggccaccgcctacgccgaacaacaacagcagcagcagcagcagcaacagcagcaacaccatcagcggcacccgtccgaacctaatcccttctaccccgcatccccaatcccggccaccgccgtcgtacgggcccgagccgacctcacatcccgcccagacacacgcaagacaccagagct

SEQ ID NO: 36820 - protein, 112 aa, Muscodor strobelii
  misc_feature: SGI Peptide ID NO. 572767
  misc_feature: Useful for introducing or modulating the production of volatile compounds
MDSRQPQMPFARSSATSPPFTRSPFAPAASTGPINGSTSSPYPPRSAVATTSPATAYAEQQQQQQQQQQQQHHQRHPSEPNPFYPASPIPATAVVRARADLTSRPDTRKTPE

SEQ ID NO: 36821 - DNA, 3308 bp, Muscodor strobelii
  misc_feature: SGI EST ID NO. CUFF.87928.0
  misc_feature: Variant of the nucleotide sequence at SEQ ID NO 36819
ggggtgtgtcaagtcgcgataagcagcttctctccctgtcttctacatcgaattcgtctgcctgcctgtctgccttcctgcgcctactactggaagcagtggtccgtttgctgcgtatttgatcgtgcaagatcccgaagacgggcgcgcattgccgcggtgctgggcgagcgggctggctccgtgcgtagacattcgtgggtctcactttcatgcttgacaagatggtcatagtgacacgaggcaaaggcgaagagtgttcgatttgtggcagagatcaaggactacatggatctcattctagttacctgtatcgtcgtacaatatgttcgcgcagcatatggacgttcctaacgtagctgagccctgattttatctccgactgaggattgaccagttccatctatgtttctgtatgtaggtatgtgacgatgagccgtagcacgggaaacgagtcgtgaccccttgcgcatggctctttgaacaatatatttgcccaccccctcatgcgattcaagatactcagtccttgattacctacttatctactgaatctcagcttgtgtgttacagctctgtggtaggtgcggtgtaaaatatgcctttttacggtgtgctgcatgtaaatttgcaatgcgacacagcaccgtatattggctgaccgctggaggctttttttagtcccgccttcgcacgggatgacgaaaatctacagaatggatatggcatcttactagctccggagggagactggccaaagattggacagctcgacaaaacgaaaccttatatacgctttgtcctcccgcctcttatgtcaagctgtctcgcattcactcaccatgccgaggctttcgaagcatcgctcagctctcggagattcacacgagacaatgcgaaatgggattcatgatggaggtgtgtcgaagcaggccagcaagatccctgcaagattgctgctggttcccagccccatgatgcccccatgcagcatacccctgccgatgggtcaagcagagctctggtgccccttgtcgagcttgtccgtttggcgccggtttgggccttggtcggaccttggtgttgggcagaagcttggatcggcttggagcgagcaagggcggccctgcagggttgcgagagcgtgcatgtgtctgactctgacggttacccgcgtctaggcctagctggcattagtgttggcgattgaacctttgggcctatcgagcttcaggcaattcgggggggccactagcccccaggtgggcagtagctttggccagttggcgtgtatgttggagaagggaaaaaagtgccctcgttcgtcattccggcgggtggtaatgaagaagtggcggtaaggtaaaatatggcgttgatgcgtctgtccatctatcgagatgtatatccggagaggcagagcttgggcacaggtgggatatattgaaagtacgtagtatcaggcgtagacttggaaacaaggaaagaagcaatcaaggacacacaaaggcttgtccatgcccatatatagatattagatatgaatttgtgatagctcggggggagggatcggcacaggtttgacgtggctgactgtgaagtgccatcagagatcagatggatcacgcgttcaagggtcgatgaaacagcaggtagcttttctttttgagttgcatctgactcggcttgcgggtttgattcggtttggattgcggccgccatcttgtcaggacttgtcatgcattattatagtcactgtactgtagttcgtcaaatcataagatgttgttgttggcgttgtcgctgtcgcacttctttcccccttcccctgctcgtttctattcccgttcctgtccctgtgcctgatacagatcacacatctccacgtctccatcgccgccgtcgtttgtgacgggagtctgcctctgcagctgctaccttacacagaccatccaggcaggcacttccaagaaaagcagtagctgcagcagcatcatagcacaagcaagtggaagattcgggcccggggcgtatcccttagtattactgtaggtaggtaggctctggtctgtgagatgcggtgcaacacatgtatcgcgagagacaggcacggacaaggtctccacccattcgcttctgcgagctctgcgctagcgacgtcttccctgatgggaatccctgcgcatgctggacggcatccttgacagccgactttttggggcgggttggggtcatgtcccatcccgggcggccgtgccttcaccattttctgattctgcgcttgcgcctgcatttgcattttccaccggggatcgtcttttgatcttcgcctgagcctgcaaaccctctctgtccgtcccgagcccgactcgcctcatcgtcgttgtcgtcgttgttgttgtgacttgcgaatacacgtacaattccttcccccttagtcatcgtcatcgtcatcgtcatcgtcatcagcaccgtctgcaccacccactcgggacacgccgtcggcctctaacctcaccgccgttgcgtatccgagcctcgactaattcggtagctgtgcatcgtagggccaaagctcgaactcaatccgtgagccaacgtcaacatccagcgtcaacacccgacgataccctacgccgagagcaatactgtttgagtaccttgagagtcgtcgtattattcttgacagccatagctgtgtctgcctgtcgatccgcgtccacgatccgctgccgtcatcgactaatgcccatgtctgaatcgaactgttgagcttgaagactgtcaacctgtcactccactgtctattcgctgtataatcgagtacttacaggtcgttgtatcctggtcaacgtagcgtattgccactgcatggtggagcatttcgtggtctgcatagtgaggcgtccaaaggggttcgaagctgtcgcgcgagcatcaggctctaatgttctacgacacccgatagcatcatggattccagacagccccagatgcccttcgcgcgcagtagtgctacatcgccacccttcacacgctcgccctttgcgccggcagcgtcgacggggcccatcaacggctctacttcctccccgtatcctccccgttcggccgtcgcaacgacgagcccggccaccgcctacgccgaacaacaacagcagcagcagcagcagcaacagcagcaacaccatcagcggcacccgtccgaacctaatcccttctaccccgcatccccaatcccggccaccgccgtcgtacgggcccgagccgacctcacatcccgcccagacacacgcaagacaccagag

SEQ ID NO: 36822 - DNA, 933 bp, Muscodor strobelii
  misc_feature: SGI cDNA ID NO. 572768
  misc_feature: Encodes the peptide sequence at SEQ ID NO 36823
atggcgacaatactaggaaagcgcaaatcgcgcacgcaaaaagccgatcccacaatttctcaagaggacgcccaagctgtatttgcacgcctttttgagcagcaatttctaccactggccccatcgggagaacaagcctccacgagtgtcgcggagggccggccattagagaaagatgacgaggacgacgaagacgatgaatcagaagatggaaatgacgatgattcgtggggtggggtatcggaagacgacgacgagtccgaaacctcagcttcacctgataccgtcgaaatcgtttctcacaccgaggcctattcagccaaaacagcaagctctttagacaaacgcgaaagccgcgcatggctatcctcaaagcctcccacctactcctcatctgagaacaccacatccacaaaaacaaagaaagccgtctcaacagccgaagaagacgcaccatccctacttaaaaacgatcttgccctacaacgtctactctccgagtcccatcttttctcatccgcagcagctaaaaacgtcgacaaagagtccgacgacttcatcggcggccactcaacagaacacatcggtcgcaaccggcatctagccacggatattcgtctatcggcattggggtccaagacttcgatctacaagcaagctaaaatgcccatgtcgttccgcaagggcataaacgcagcggcagaaggcaaagagtcaaagcgaagacgcgaggcaaaggagaatggcattgtgctggagagacctggtccgaagaagaacgtgagagatagacggaaaggtaggccgaaagatatcgatgcgccggctgttgggaagatgaataatggcatgttgaaattgagtaagagggatatttctagtgtcgagggtccgaaaaggagtgcgacgtctgctaagaaacggaggaggtga

SEQ ID NO: 36823 - protein, 310 aa, Muscodor strobelii
  misc_feature: SGI Peptide ID NO. 572768
  misc_feature (4)..(297): NCBI GI: 46125863 Blast Desc: FG07309.1 [Gibberella zeae PH-1]
  misc_feature (4)..(296): NCBI GI: 67523673 Blast Desc: AN2292.2 [Aspergillus nidulans FGSC A4] gi|40745247|gb|EAA64403.1| AN2292.2 [Aspergillus nidulans FGSC A4] gi|259487685|tpe|CBF86546.1| TPA: conserved [Aspergillus FGSC
  misc_feature (4)..(296): NCBI GI: 70998586 Blast Desc: conserved [Aspergillus fumigatus Af293] gi|66851651|gb|EAL91977.1| conserved [Aspergillus fumigatus Af293] gi|159126251|gb|EDP51367.1| conserved [Aspergillus A1163]
  misc_feature (4)..(299): NCBI GI: 225557814 Blast Desc: conserved [Ajellomyces capsulatus G186AR]
  misc_feature (4)..(301): NCBI GI: 119498521 Blast Desc: NFIA_036930 [Neosartorya fischeri NRRL 181] gi|119414182|gb|EAW24121.1| conserved [Neosartorya fischeri NRRL 181]
  misc_feature (4)..(310): NCBI GI: 240109115 Blast Desc: CPC735_026200 [Coccidioides posadasii C735 delta SOWgp]
  misc_feature (1)..(297): NCBI GI: 145602332 Blast Desc: MGG_12957 [Magnaporthe grisea 70-15] gi|145010761|gb|EDJ95417.1| MGG_12957 [Magnaporthe grisea 70-15]
  misc_feature (4)..(310): NCBI GI: 119181980 Blast Desc: CIMG_06048 [Coccidioides immitis RS]
  misc_feature (4)..(310): NCBI GI: 258572066 Blast Desc: conserved [Uncinocarpus reesii 1704] gi|237905081|gb|EEP79482.1| conserved [Uncinocarpus reesii 1704]
  misc_feature (23)..(296): NCBI GI: 85081139 Blast Desc: NCU00151 [Neurospora crassa OR74A] gi|28917737|gb|EAA27428.1| [Neurospora crassa OR74A]
MATILGKRKSRTQKADPTISQEDAQAVFARLFEQQFLPLAPSGEQASTSVAEGRPLEKDDEDDEDDESEDGNDDDSWGGVSEDDDESETSASPDTVEIVSHTEAYSAKTASSLDKRESRAWLSSKPPTYSSSENTTSTKTKKAVSTAEEDAPSLLKNDLALQRLLSESHLFSSAAAKNVDKESDDFIGGHSTEHIGRNRHLATDIRLSALGSKTSIYKQAKMPMSFRKGINAAAEGKESKRRREAKENGIVLERPGPKKNVRDRRKGRPKDIDAPAVGKMNNGMLKLSKRDISSVEGPKRSATSAKKRRR

SEQ ID NO: 36824 - DNA, 780 bp, Muscodor strobelii
  misc_feature: SGI cDNA ID NO. 572769
  misc_feature: Encodes the peptide sequence at SEQ ID NO 36825
atgacacgcttcaggccgtgtatagacctccacgcaggtcaggtgaagcagattgtcggagggaccctcgacagctcgaccagtgaactcaagacaaattatgtctctaagcagccggctggtcattacgcggggctctaccgcggcaattctctcgagggcgcacacgtgatcatgctaggtccaggaaatgacgaggccgccaaggaagctctagccgcctggccaaatcacctccaggtcggaggcggcatcagtgataaaaatgcggcatcttggatagagaagggcgctagtcaggtgattatcacatcatttttattcccagacggtaaattcagccaggagcggcttgatgccgtattagctgcgttgggcggcgacaaaactaaacttgtgattgatctgagttgtcggcgcaaaggtgatgataggtggtttgtagccatgaataagtggcagactatcactgacatggaagtcaatcaagaatctataaaaaagcttgagccatattgctccgagtttctcattcatgctgcagacaacgagggtcttcagaagggtattgatgagaaactcgttgagcggctaagcgagtggtgcagcataccagtcacatatgctggtggcggtaggaatctcgatgacctcgagctcgtcaagagtataagccgtggtcgagtagatctgacgattgggagtgcgttggattgcttcggtgggaatggtgttaaattcgatgactgcgtcgcgtggaacgcgaaacagagcctatga

SEQ ID NO: 36825 - protein, 259 aa, Muscodor strobelii
  misc_feature: SGI Peptide ID NO. 572769
  misc_feature (3)..(245): Pfam Id: PF00977 Pfam Desc: Histidine biosynthesis protein
  misc_feature (131)..(222): Pfam Id: PF00977 Pfam Desc: Histidine biosynthesis protein
  misc_feature (1)..(257): NCBI GI: 85081135 Blast Desc: NCU00150 [Neurospora crassa OR74A] gi|52000710|sp|Q7RXQ8.1|HIS4_NEUCR RecName: Full=1-(5-phosphoribosyl)-5-[(5-phosphoribosylamino)methylideneamino]
  misc_feature (1)..(257): NCBI GI: 46125871 Blast Desc: FG07313.1 [Gibberella zeae PH-1]
  misc_feature (1)..(257): NCBI GI: 145602330 Blast Desc: conserved [Magnaporthe grisea 70-15] gi|145010760|gb|EDJ95416.1| conserved [Magnaporthe grisea 70-15]
  misc_feature (1)..(257): NCBI GI: 171685822 Blast Desc: protein product [Podospora anserina] gi|170942872|emb|CAP68525.1| protein product [Podospora anserina]
  misc_feature (1)..(257): NCBI GI: 156037488 Blast Desc: SS1G_12457 [Sclerotinia sclerotiorum 1980] gi|154697866|gb|EDN97604.1| SS1G_12457 [Sclerotinia sclerotiorum 1980]
  misc_feature (1)..(259): NCBI GI: 116207260 Blast Desc: phosphoribosylformimino-5-aminoimidazole carboxamide ribotide isomerase [Chaetomium globosum CBS 148.51] gi|88183520|gb|EAQ90988.1| carboxamide ribotide isomerase CBS
  misc_feature (1)..(254): NCBI GI: 115438316 Blast Desc: 1-(5-phosphoribosyl)-5-[(5-phosphoribosylamino)methylideneamino] imidazole-4-carboxamide isomerase [Aspergillus terreus NIH2624]
  misc_feature (1)..(254): NCBI GI: 255931931 Blast Desc: Pc12g06840 [Penicillium chrysogenum Wisconsin 54-1255] gi|211582141|emb|CAP80311.1| Pc12g06840 [Penicillium chrysogenum Wisconsin 54-1255]
  misc_feature (1)..(257): NCBI GI: 119498523 Blast Desc: 5-proFAR isomerase [Neosartorya fischeri NRRL 181] gi|119414183|gb|EAW24122.1| 5-proFAR isomerase [Neosartorya fischeri NRRL 181]
  misc_feature (1)..(254): NCBI GI: 145253761 Blast Desc: An17g01640 [Aspergillus niger] gi|134083965|emb|CAK43060.1| protein product [Aspergillus niger]
  misc_feature (1)..(257): SWISSPROT Homolog: EC 5.3.1.16 1-(5-phosphoribosyl)-5-((5-phosphoribosylamino)methylideneamino)imidazole-4-carboxamideisomerase
MTRFRPCIDLHAGQVKQIVGGTLDSSTSELKTNYVSKQPAGHYAGLYRGNSLEGAHVIMLGPGNDEAAKEALAAWPNHLQVGGGISDKNAASWIEKGASQVIITSFLFPDGKFSQERLDAVLAALGGDKTKLVIDLSCRRKGDDRWFVAMNKWQTITDMEVNQESIKKLEPYCSEFLIHAADNEGLQKGIDEKLVERLSEWCSIPVTYAGGGRNLDDLELVKSISRGRVDLTIGSALDCFGGNGVKFDDCVAWNAKQSL

SEQ ID NO: 36826 - DNA, 2418 bp, Muscodor strobelii
  misc_feature: SGI EST ID NO. CUFF.87925.0
  misc_feature: Variant of the nucleotide sequence at SEQ ID NO 36824
cggtgtttccgcttacggccgtctatagtacgataagagtggggccaaattctcagtacgctacattacaccctcggtcacaaggtcacagcagtatatcagtcattatgcagaatagacatcaattggggtatctcactcaacgctccagttgccatccctccaatcacctcctccgtttcttagcagacgtcgcactccttttcggaccctcgacactagaaatatccctcttactcaatttcaacatgccattattcatcttcccaacagccggcgcatcgatatctttcggcctacctttccgtctatctctcacgttcttcttcggaccaggtctctccagcacaatgccattctcctttgcctcgcgtcttcgctttgactctttgccttctgccgctgcgtttatgcccttgcggaacgacatgggcattttagcttgcttgtagatcgaagtcttggaccccaatgccgatagacgaatatccgtggctagatgccggttgcgaccgatgtgttctgttgagtggccgccgatgaagtcgtcggactctttgtcgacgtttttagctgctgcggatgagaaaagatgggactcggagagtagacgttgtagggcaagatcgtttttaagtagggatggtgcgtcttcttcggctgttgagacggctttctttgtttttgtggatgtggtgttctcagatgaggagtaggtgggaggctttgaggatagccatgcgcggctttcgcgtttgtctaaagagcttgctgttttggctgaataggcctcggtgtgagaaacgatttcgacggtatcaggtgaagctgaggtttcggactcgtcgtcgtcttccgataccccaccccacgaatcatcgtcatttccatcttctgattcatcgtcttcgtcgtcctcgtcatctttctctaatggccggccctccgcgacactcgtggaggcttgttctcccgatggggccagtggtagaaattgctgctcaaaaaggcgtgcaaatacagcttgggcgtcctcttgagaaattgtgggatcggctttttgcgtgcgcgatttgcgctttcctagtattgtcgccatgctgcctttaatcgagcacctttgcgcgatcactcgtgagcgagcaatgtttaaagtggtggtgtgaagttggaaggttagaaaatttctgggcggaatgatagccttgcagctgccactatcttcaggccaattacagcgctgaattagagctgccaccaaaacaccccgccatagcctcgctaactttgctgtgacatctcaataccccgccatcaaccattgtatttcaaattttgtgttaatactgataccgatctgcgtcggatttggccatttattacccgataagaaatataatgacacgcttcaggccgtgtatagacctccacgcaggtcaggtgaagcagattgtcggagggaccctcgacagctcgaccagtgaactcaagacaaattatgtctctaagcagccggctggtcattacgcggggctctaccgcggcaattctctcgagggcgcacacgtgatcatgctaggtccaggaaatgacgaggccgccaaggaagctctagccgcctggccaaatcacctccaggtcggaggcggcatcagtgataaaaatgcggcatcttggatagagaagggcgctagtcaggtgattatcacatcatttttattcccagacggtaaattcagccaggagcggcttgatgccgtattagctgcgttgggcggcgacaaaactaaacttgtgattgatctgagttgtcggcgcaaaggtgatgataggtggtttgtagccatgaataagtggcagactatcactgacatggaagtcaatcaagaatctataaaaaagcttgagccatattgctccgagtttctcattcatgctgcagacaacgagggtcttcagaagggtattgatgagaaactcgttgagcggctaagcgagtggtgcagcataccagtcacatatgctggtggcggtaggaatctcgatgacctcgagctcgtcaagagtataagccgtggtcgagtagatctgacgattgggagtgcgttggattgcttcggtgggaatggtgttaaattcgatgactgcgtcgcgtggaacgcgaaacagagcctatgagtctcttcaaagacttggcctcgattcacaaagagagcagataatcatcggctgcaagcacaatactgttgtacaatactgaataataatcccggctagaaatacaaaagcaatgtggaaattattaacaatgtctttgtagcgattcaacggttgactcgttgcgcttgtcatgcgggcaaaagcaatttacttcaaatatgttcatgtttgctatgaattaacatacgctctccagcg

SEQ ID NO: 36827 - DNA, 480 bp, Muscodor strobelii
  misc_feature: SGI cDNA ID NO. 572770
  misc_feature: Encodes the peptide sequence at SEQ ID NO 36828
atgtctacatctacctccactgtctctctcgatcgctttccgatcctaagcgaatcaatgtgtcaactctatcaagacatagcatcgtacgcatggatgcagtatcggtgtatcatgacagcagaagaatgcgaaaagatgctgtcggaagcaaagtgggattctgtcgatgactacatacagcatactcacaaacatgccagtaatgaacaaaccgtcgaggccgcggctgcagaagcagatcatgatagcttgccgcgtgatggcatggatgataaacatgacgagaatgcgggagaggccgccgacaacgtaatagtgctcggcaagtacaacgtctattgttctccggaggaaggcgagggtttcaggttatccaatgatggcgatgtttgggatgtctctagagtcattctccatcaggagccttacacaatatgggtcttcgttgacgataagcggaagtatgagtcaagctga

SEQ ID NO: 36828 - protein, 159 aa, Muscodor strobelii
  misc_feature: SGI Peptide ID NO. 572770
MSTSTSTVSLDRFPILSESMCQLYQDIASYAWMQYRCIMTAEECEKMLSEAKWDSVDDYIQHTHKHASNEQTVEAAAAEADHDSLPRDGMDDKHDENAGEAADNVIVLGKYNVYCSPEEGEGFRLSNDGDVWDVSRVILHQEPYTIWVFVDDKRKYESS

SEQ ID NO: 36829 - DNA, 873 bp, Muscodor strobelii
  misc_feature: SGI cDNA ID NO. 572771
  misc_feature: Elevated expression when VOC is produced
  misc_feature: Encodes the peptide sequence at SEQ ID NO 36830
atggcacaatcgtggaacatcccaggattccctgggggagtccagatgagcaattgggacaccgccgcatttcaaggagctaacgctcaggggaacgtccagcagaacgtcgataatgaaaacatcggagaaggtttcggcaatggtggtgccgaagaagctgccgaagatggtccttctactggagaacaatgcataatcaaccctgttattccgaactgtaaagccgggtggggcataggcgaagaaattacttatacatatcaaggtacaaactacaaataccgcattgtatatgaagagaagggatgtccttcttggacagatgaacagggaaaatataaatcctacaagcgcgactcacaggctcacgaaggttatcccaaaggaatcaatcaaacccaagaagcatctgaaatacgaaaagttgtgttccaagcgaccaaggacttgggcgggaaatacaacatcagccgttgctgggcggtgttgaaatacttcgaaggcaacggtgtggcaatagcacaggctgatcaggaagatacgccgtgcttgttagtcaccctttttgacgtcaagaactttgcagcatggcggaaaccgactgagcatgacgttactcaatgtggtatagatctcagagccgctatcgaggaccagaaggtcaagcgcaatttgcagccagcgcaagactttattgaactgaacattgtgattcgcctgggtaaataccgttggaagagagaacaagcggaaggccagtggcctcactataccaggagacaacgagcagagcaaagtatgacggcactttatttcgatatatggctagatacgagccccgacaggggacaggtagcatgcctagtatga

SEQ ID NO: 36830 - protein, 290 aa, Muscodor strobelii
  misc_feature: SGI Peptide ID NO. 572771
  misc_feature: Useful for introducing or modulating the production of volatile compounds
MAQSWNIPGFPGGVQMSNWDTAAFQGANAQGNVQQNVDNENIGEGFGNGGAEEAAEDGPSTGEQCIINPVIPNCKAGWGIGEEITYTYQGTNYKYRIVYEEKGCPSWTDEQGKYKSYKRDSQAHEGYPKGINQTQEASEIRKVVFQATKDLGGKYNISRCWAVLKYFEGNGVAIAQADQEDTPCLLVTLFDVKNFAAWRKPTEHDVTQCGIDLRAAIEDQKVKRNLQPAQDFIELNIVIRLGKYRWKREQAEGQWPHYTRRQRAEQSMTALYFDIWLDTSPDRGQVACLV

SEQ ID NO: 36831 - DNA, 1796 bp, Muscodor strobelii
  misc_feature: SGI EST ID NO. CUFF.87922.0
  misc_feature: Variant of the nucleotide sequence at SEQ ID NO 36829
caatgatagaagcgcaacaaagaaataaaagacacgaccttcatgatgcggttttcagtgtctccgtttacccaacatacgcctcgtcgtacatacaccatatacaaccaacgcatcattaacacgaacaaagagtgagtcgctccatatcccctatttaagtgcctgattatgtgctcgcgagatactccgttgactctagatcaacttcacgatccgtctgcgtgaacgtttgagccagactgagctctactatcatttcaactcgggctctccctatttgatcacagcctttttctccgagtaccagttgctctctatgccggtcgtcgacgcacgccatggcacaatcgtggaacatcccaggattccctgggggagtccagatgagcaattgggacaccgccgcatttcaaggagctaacgctcaggggaacgtccagcagaacgtcgataatgaaaacatcggagaaggtttcggcaatggtggtgccgaagaagctgccgaagatggtccttctactggagaacaatgcataatcaaccctgttattccgaactgtaaagccgggtggggcataggcgaagaaattacttatacatatcaaggtacaaactacaaataccgcattgtatatgaagagaagggatgtccttcttggacagatgaacagggaaaatataaatcctacaagcgcgactcacaggctcacgaaggttatcccaaaggaatcaatcaaacccaagaagcatctgaaatacgaaaagttgtgttccaagcgaccaaggacttgggcgggaaatacaacatcagccgttgctgggcggtgttgaaatacttcgaaggcaacggtgtggcaatagcacaggctgatcaggaagatacgccgtgcttgttagtcaccctttttgacgtcaagaactttgcagcatggcggaaaccgactgagcatgacgttactcaatgtggtatagatctcagagccgctatcgaggaccagaaggtcaagcgcaatttgcagccagcgcaagactttattgaactgaacattgtgattcgcctgggtaaataccgttggaagagagaacaagcggaaggccagtggcctcactataccaggagacaacgagcagagcaaagtatgacggcactttatttcgatatatggctagatacgagccccgacaggggacaggtagcatgcctagtatgagttacagtgtcagagtagtacactatcgtcttccttggctatgctcaataggctttcttttgtcttttcctttctttattctggggttacgcggctagatttccttatcacactcatttcccattatttgctttcgaaacgttggaaacacggggtattgcaacattttgttcagttgcttttctgtcattcatttttgtatgcctttttactcaataattgctataacactcattcgttgttgtcaaatttcgagacaccgtaggatacctatgagacaatgctttgccattcatttcgacttacactcctacgatatcaactaaattatttatattgagtgctacgtatgcctgacacgtgtcaaaactgtaccttcaccttagaacatgggcttcgtgtggcgaggttggcaaaactgattatgcgcgaagtctttggcaatttgatactacgtatagcactcaacactatttccttcaggtagaaattaggcttaaacctgtagtattcaaagcccgctatagtcacattcgtctggttggtgatcactatgatacagaattgtaatttagatacaag

SEQ ID NO: 36832 - DNA, 1812 bp, Muscodor strobelii
  misc_feature: SGI cDNA ID NO. 572772
  misc_feature: Encodes the peptide sequence at SEQ ID NO 36833
atggctggtcgcttcgttcgagcgtccaagtaccgccacgtatttggcaaatccactcgcaaagaattctgctacgacaacttgcgcataagcagaaatgcgtgggataccaatctagtcaaggccaaccccgaatatctctccgtcaattgggaagccggtggcggcggcgcattcgctgtcatcccattgaacgagaagggcaaagtccccgatgtcattcccctgttccgtggccacacagctaccgtcctcgacaccgactggaatcctttcaacgaccgattgattgcttccgctgctgacgatggcaaggtgatgctctgggaggtaccccagggcttcagtcttttcaccgacgccgaagagcccgccgatgttgctccagtcctcaaattgactggccacagccgcaaagtcggccaagtcttgttcaacccggctgccgagaacattctcgcctccgcctctggcgatctgaccatcaagctgtgggatgtcggcgcaggctcggccgtacacacccttaaccaccccgatattgtacagagcttgtcttggaatgctagtggcactatgctggtgaccacctcgagagacaagaagctccgtgtatgggatgttcgtcaggagaggccggcttcagaatgccaaggtcatgagggtgcaaagaacagccgagctgtgtggcttggcgaacacaaccgaattgctactactggcttctcaaaaatgagtgatcgtcagcttgccctatgggagccaggcaattccagtcctattggcggcttttcggtgctcgacagcatctctggtgtttgcatgcctttctgggatgacggttccaatgtgctcttccttgctggaaagggcgatggtaatattcgatacttcgaatacgagaacgacaaattcgagttcttgtccgagtacaagtccccagagcctcagcgaggaattgccttcttgcccaagcgtggcgtgaatgttcatgaaaacgaggtgatgagagcgttcaagaccgtcaacgatagctatatcgagcctatttctttcacagtgcccagacgtgctgagacgtttcaatccgacatctttcccccatgtatcggcagcaggcccgcagtgagtgcccaggaatggatctccgggaagagcggtgtcccgcccaagatcgactttgagagcatctacgagggcaatgccccagttgaggtaccatctgactacaagccaccagtctccgctcctgctcctgctccggtgcagaaaccggcccctagacaagcggaaccagctccagctccagcagctcgcgccgcacctccctccgtgaaggatcagcaaggctctatggcggccatggtatccaagtacgaagatacggaagacgctgaaccggagcctgaatctccttttgaagaggtctcgaggccaccgcagaggagtgctatgcctgccagctccgaacctaaagccccatctcccactaagaccacgtctgctccactacccaagccagtttcacctattgtcaagtcacccacacagtcgaccccagcagcctcctacacaccaccggtatctgcagcctcgcgaacggtttcttcgggatcaggctctgagtctacgcttgatcagatcaagcagttgttagagaaacagacaaagatgctcggagcccaaagtcagcaaattgagcagctcacagccgaggtggattcgatgaagaagcgagtaggatcgggctcccaggatcaaagtgaacgcatccggcaattagagttggagctagaggagttgaggtcgtga

SEQ ID NO: 36833 - protein, 603 aa, Muscodor strobelii
  misc_feature: SGI Peptide ID NO. 572772
  misc_feature (71)..(110): Pfam Id: PF00400 Pfam Desc: WD domain, G-beta repeat
  misc_feature (170)..(207): Pfam Id: PF00400 Pfam Desc: WD domain, G-beta repeat
  misc_feature (127)..(166): Pfam Id: PF00400 Pfam Desc: WD domain, G-beta repeat
  misc_feature (4)..(68): Pfam Id: PF08953 Pfam Desc: Domain of function (DUF1899)
  misc_feature (260)..(394): Pfam Id: PF08954 Pfam Desc: Domain of function (DUF1900)
  misc_feature (1)..(603): NCBI GI: 145608772 Blast Desc: MGG_06389 [Magnaporthe grisea 70-15] gi|145016203|gb|EDK00693.1| MGG_06389 [Magnaporthe grisea 70-15]
  misc_feature (1)..(603): NCBI GI: 226509504 Blast Desc: LOC100274369 [Zea mays] gi|194707578|gb|ACF87873.1| [Zea mays]
  misc_feature (1)..(602): NCBI GI: 261360353 Blast Desc: coronin [Verticillium albo-atrum VaMs.102]
  misc_feature (1)..(603): NCBI GI: 256732757 Blast Desc: NECHADRAFT_104173 [Nectria haematococca mpVI 77-13-4]
  misc_feature (1)..(603): NCBI GI: 156033039 Blast Desc: SS1G_13595 [Sclerotinia sclerotiorum 1980] gi|154698998|gb|EDN98736.1| SS1G_13595 [Sclerotinia sclerotiorum 1980]
  misc_feature (1)..(603): NCBI GI: 116191745 Blast Desc: CHGG_05590 [Chaetomium globosum CBS 148.51] gi|88181503|gb|EAQ88971.1| CHGG_05590 [Chaetomium globosum CBS 148.51]
  misc_feature (13)..(603): NCBI GI: 85080705 Blast Desc: NCU00202 [Neurospora crassa OR74A] gi|28917657|gb|EAA27351.1| NCU00202 [Neurospora crassa OR74A]
  misc_feature (1)..(602): NCBI GI: 46125867 Blast Desc: FG07311.1 [Gibberella zeae PH-1]
  misc_feature (13)..(603): NCBI GI: 154301425 Blast Desc: BC1G_10382 [Botryotinia fuckeliana B05.10] gi|150856122|gb|EDN31314.1| BC1G_10382 [Botryotinia fuckeliana B05.10]
  misc_feature (13)..(603): NCBI GI: 171687090 Blast Desc: protein product [Podospora anserina] gi|170943506|emb|CAP69159.1| protein product [Podospora anserina]
MAGRFVRASKYRHVFGKSTRKEFCYDNLRISRNAWDTNLVKANPEYLSVNWEAGGGGAFAVIPLNEKGKVPDVIPLFRGHTATVLDTDWNPFNDRLIASAADDGKVMLWEVPQGFSLFTDAEEPADVAPVLKLTGHSRKVGQVLFNPAAENILASASGDLTIKLWDVGAGSAVHTLNHPDIVQSLSWNASGTMLVTTSRDKKLRVWDVRQERPASECQGHEGAKNSRAVWLGEHNRIATTGFSKMSDRQLALWEPGNSSPIGGFSVLDSISGVCMPFWDDGSNVLFLAGKGDGNIRYFEYENDKFEFLSEYKSPEPQRGIAFLPKRGVNVHENEVMRAFKTVNDSYIEPISFTVPRRAETFQSDIFPPCIGSRPAVSAQEWISGKSGVPPKIDFESIYEGNAPVEVPSDYKPPVSAPAPAPVQKPAPRQAEPAPAPAARAAPPSVKDQQGSMAAMVSKYEDTEDAEPEPESPFEEVSRPPQRSAMPASSEPKAPSPTKTTSAPLPKPVSPIVKSPTQSTPAASYTPPVSAASRTVSSGSGSESTLDQIKQLLEKQTKMLGAQSQQIEQLTAEVDSMKKRVGSGSQDQSERIRQLELELEELRS

SEQ ID NO: 36834 - DNA, 2483 bp, Muscodor strobelii
  misc_feature: SGI EST ID NO. CUFF.87933.1
  misc_feature: Variant of the nucleotide sequence at SEQ ID NO 36832
ggatttggaggctgcacttagctgcccttggctggaactgcctggaactcctaggtccagggggccaggggtatgcattgcatcgcattcgcagcgctcgtcgcagcattgtgcaatcaattgcgcctgccgcccaccttgtccttatcctgtccttattggccttgacgacatatcttcttacgccgcagggcagctctcacccacgaataaacatccctcatcctcttccctggacctggtgatcccgtaatacctctttgattttcctcaaccctacgcgacgacgttcctctgcctcgcctgcatcttatagctctctaccttccgcttcctctccccaagatggctggtcgcttcgttcgagcgtccaagtaccgccacgtatttggcaaatccactcgcaaagaattctgctacgacaacttgcgcataagcagaaatgcgtgggataccaatctagtcaaggccaaccccgaatatctctccgtcaattgggaagccggtggcggcggcgcattcgctgtcatcccattgaacgagaagggcaaagtccccgatgtcattcccctgttccgtggccacacagctaccgtcctcgacaccgactggaatcctttcaacgaccgattgattgcttccgctgctgacgatggcaaggtgatgctctgggaggtaccccagggcttcagtcttttcaccgacgccgaagagcccgccgatgttgctccagtcctcaaattgactggccacagccgcaaagtcggccaagtcttgttcaacccggctgccgagaacattctcgcctccgcctctggcgatctgaccatcaagctgtgggatgtcggcgcaggctcggccgtacacacccttaaccaccccgatattgtacagagcttgtcttggaatgctagtggcactatgctggtgaccacctcgagagacaagaagctccgtgtatgggatgttcgtcaggagaggccggcttcagaatgccaaggtcatgagggtgcaaagaacagccgagctgtgtggcttggcgaacacaaccgaattgctactactggcttctcaaaaatgagtgatcgtcagcttgccctatgggagccaggcaattccagtcctattggcggcttttcggtgctcgacagcatctctggtgtttgcatgcctttctgggatgacggttccaatgtgctcttccttgctggaaagggcgatggtaatattcgatacttcgaatacgagaacgacaaattcgagttcttgtccgagtacaagtccccagagcctcagcgaggaattgccttcttgcccaagcgtggcgtgaatgttcatgaaaacgaggtgatgagagcgttcaagaccgtcaacgatagctatatcgagcctatttctttcacagtgcccagacgtgctgagacgtttcaatccgacatctttcccccatgtatcggcagcaggcccgcagtgagtgcccaggaatggatctccgggaagagcggtgtcccgcccaagatcgactttgagagcatctacgagggcaatgccccagttgaggtaccatctgactacaagccaccagtctccgctcctgctcctgctccggtgcagaaaccggcccctagacaagcggaaccagctccagctccagcagctcgcgccgcacctccctccgtgaaggatcagcaaggctctatggcggccatggtatccaagtacgaagatacggaagacgctgaaccggagcctgaatctccttttgaagaggtctcgaggccaccgcagaggagtgctatgcctgccagctccgaacctaaagccccatctcccactaagaccacgtctgctccactacccaagccagtttcacctattgtcaagtcacccacacagtcgaccccagcagcctcctacacaccaccggtatctgcagcctcgcgaacggtttcttcgggatcaggctctgagtctacgcttgatcagatcaagcagttgttagagaaacagacaaagatgctcggagcccaaagtcagcaaattgagcagctcacagccgaggtggattcgatgaagaagcgagtaggatcgggctcccaggatcaaagtgaacgcatccggcaattagagttggagctagaggagttgaggtcgtgatgttgttcagacggctggcaccagtctggtaggatagaggatcgaaactgtattttttggtgcgaggcggctggaatgatgaactcacgaagcgtgtatgtacattttacaatgatgaattcttacaggctgggctcagcgccaaaccgccagatgtcaccctgatctactttttcaattcagtgaatgtaagattctctttaaaacattgcgaagaatgattgatttctaacaacaagataatggaataaagataaagttaaaaactcgaagaaaagataggagggcatttgagccaaagttgatcaccatacacagcattgccc

SEQ ID NO: 36835 - DNA, 1716 bp, Muscodor strobelii
  misc_feature: SGI cDNA ID NO. 572773
  misc_feature: Encodes the peptide sequence at SEQ ID NO 36836
atggcagaaaattacaagcacttcgagaatatctatctcgacctatccaaggagtccgggaagtgcaggttcgctgagaatggcctcggctggcgacctgcctcgggcggcaacaccttcaccctcgacagcggcgacatcgtcaccgcccagtggagccgtgcctccaagggcttcgagctcaagatcctcaagcgcaactccgacgttgtccatctcgacggcttccagcaagacgactacgaggcgttgagccgggcctttaagaactggtacagcatcaacctcgaccagaaggaccacgccctgcgcggctggaactggggcaagaccgagttcagcaaggccgagcttatcttcaacgtccagaacaagccctccttcgagatcccctactccgagatctccaacaccaaccttgccggccgcaacgaagtcgccgtcgagttcaacccctccaacgaagaggacaccggcacgaatggccacctcggcggcgcgcgcggtcgcggcaagaagtcgggcgccggcaaggaccagctggtagagatgcgattctacattcccggaaccaccactcgcaaggagactgagggagaggaagcgggcagcgacgccgacgaggaggaaaagaacgccgctactctgttttatgagaccctcatcgacaaggctgagattggtgagacggccggtgacgccatcgccacattcctcgaggtgcttcacctcacgcctcgtggacgcttcgatatcgatatgtacgattcatccttccgtctacgtggtaagacatacgactacaagatccaatatgatgccatcaagaagttcatggtactcccgaagccggacgagctacacttcatgctctgtatcggtctagatcccccgctccgtcaaggccagacgcgataccctttcctcgtcatgcaagttaagaaggacgaggaagtgactatcgacctcaatctcaccgacgacgagctgaaggagaagttcaagggcaagctagaggcccactacgagcagccgctccaccaggtcattacgtacatattcaagggcctcgcgaacaagaagatcacgtcgcccgccaaggacttcatgacccacagacagcagtacggcatcaagtgctctattaaagcagctgagggcttcctctactgtctggagaaggccttcatgttcgtgccgaagccggcgacctatatctcgtacgaccagacgcagagcatcaccttctcgcgcgttagcggcgccgtctcggcgctctcgacgtttgacataacggtgcggatgaagacggggccggcccacgggttcagcaacattagtagagaggaccagaaggcgctagaagacttcttcaagttgaaggggctccgtgtgaagaacgagattgacgaggatgctacactgctcgctgcagccctccgcgaggaagctatggacgactcggaggaagaggttgttggtgctggagcggatcgcggatctgcggatgaagacgaggagtctgttgatgaagacttcagagctgagagtgaaagtgacgtcgcagaagaattcgactctgaccatgagtcttctggctctggaggcgacgagagcggtgtcgatgatgaagatgaagacgaggagatggctgacgacgacggtgaggaggaagaggaggagaagccaaaggcgaaaaaacaaaagacgaagtga

SEQ ID NO: 36836 - protein, 571 aa, Muscodor strobelii
  misc_feature: SGI Peptide ID NO. 572773
  misc_feature (386)..(528): Pfam Id: PF08512 Pfam Desc: Histone chaperone Rttp106-like
  misc_feature (245)..(461): Pfam Id: PF03531 Pfam Desc: Structure-specific recognition protein (SSRP1)
  misc_feature (8)..(543): NCBI GI: 85078552 Blast Desc: NCU11168 [Neurospora crassa OR74A] gi|74613683|sp|Q7RWW0.1|POB3_NEUCR RecName: Full=FACT complex subunit pob-3; AltName: Full=Facilitates chromatin transcription
  misc_feature (8)..(539): NCBI GI: 171686954 Blast Desc: protein product [Podospora anserina] gi|170943438|emb|CAP69091.1| protein product [Podospora anserina]
  misc_feature (8)..(541): NCBI GI: 46111273 Blast Desc: FG02518.1 [Gibberella zeae PH-1] gi|110287791|sp|Q4IJU0.1|POB3_GIBZE RecName: Full=FACT complex subunit POB3; AltName: Full=Facilitates chromatin transcription
  misc_feature (8)..(538): NCBI GI: 145614364 Blast Desc: MGG_11344 [Magnaporthe grisea 70-15] gi|145021302|gb|EDK05431.1| MGG_11344 [Magnaporthe grisea 70-15]
  misc_feature (8)..(529): NCBI GI: 256725804 Blast Desc: [Nectria haematococca mpVI 77-13-4]
  misc_feature (8)..(543): NCBI GI: 261360130 Blast Desc: FACT complex subunit pob-3 [Verticillium albo-atrum VaMs.102]
  misc_feature (8)..(544): NCBI GI: 116191855 Blast Desc: conserved [Chaetomium globosum CBS 148.51] gi|88181558|gb|EAQ89026.1| conserved [Chaetomium globosum CBS 148.51]
  misc_feature (1)..(546): NCBI GI: 261196620 Blast Desc: FACT complex subunit pob3 [Ajellomyces dermatitidis SLH14081] gi|239595958|gb|EEQ78539.1| FACT complex subunit pob3 [Ajellomyces dermatitidis SLH14081]
  misc_feature (8)..(546): NCBI GI: 239609535 Blast Desc: FACT complex subunit pob3 [Ajellomyces dermatitidis ER-3]
  misc_feature (8)..(534): NCBI GI: 258576315 Blast Desc: conserved [Uncinocarpus reesii 1704] gi|237902605|gb|EEP77006.1| conserved [Uncinocarpus reesii 1704]
MAENYKHFENIYLDLSKESGKCRFAENGLGWRPASGGNTFTLDSGDIVTAQWSRASKGFELKILKRNSDVVHLDGFQQDDYEALSRAFKNWYSINLDQKDHALRGWNWGKTEFSKAELIFNVQNKPSFEIPYSEISNTNLAGRNEVAVEFNPSNEEDTGTNGHLGGARGRGKKSGAGKDQLVEMRFYIPGTTTRKETEGEEAGSDADEEEKNAATLFYETLIDKAEIGETAGDAIATFLEVLHLTPRGRFDIDMYDSSFRLRGKTYDYKIQYDAIKKFMVLPKPDELHFMLCIGLDPPLRQGQTRYPFLVMQVKKDEEVTIDLNLTDDELKEKFKGKLEAHYEQPLHQVITYIFKGLANKKITSPAKDFMTHRQQYGIKCSIKAAEGFLYCLEKAFMFVPKPATYISYDQTQSITFSRVSGAVSALSTFDITVRMKTGPAHGFSNISREDQKALEDFFKLKGLRVKNEIDEDATLLAAALREEAMDDSEEEVVGAGADRGSADEDEESVDEDFRAESESDVAEEFDSDHESSGSGGDESGVDDEDEDEEMADDDGEEEEEEKPKAKKQKTK

SEQ ID NO: 36837 - DNA, 2395 bp, Muscodor strobelii
  misc_feature: SGI EST ID NO. CUFF.87980.0
  misc_feature: Variant of the nucleotide sequence at SEQ ID NO 36835
aagcagaggacttgaactttacctaccgagctgccgcacactggacgttgacccggtcggtgccacagcctcaacattaaagttgcccatcaattaaacaccaaccacccgatagcgataacgccagcctggctgtcgcgttctgacgcgacaggtctccacctttgccgcctgccctgcgccgaagctccaaggtaccaaccaatttaatttctggagaggcagtcgcagagccagctcctcaaccgccttcgtcactttccctttccatccctctcgccttggattagctgccaacatcaccgtaagcgcttgcaaaatggcagaaaattacaagcacttcgagaatatctatctcgacctatccaaggagtccgggaagtgcaggttcgctgagaatggcctcggctggcgacctgcctcgggcggcaacaccttcaccctcgacagcggcgacatcgtcaccgcccagtggagccgtgcctccaagggcttcgagctcaagatcctcaagcgcaactccgacgttgtccatctcgacggcttccagcaagacgactacgaggcgttgagccgggcctttaagaactggtacagcatcaacctcgaccagaaggaccacgccctgcgcggctggaactggggcaagaccgagttcagcaaggccgagcttatcttcaacgtccagaacaagccctccttcgagatcccctactccgagatctccaacaccaaccttgccggccgcaacgaagtcgccgtcgagttcaacccctccaacgaagaggacaccggcacgaatggccacctcggcggcgcgcgcggtcgcggcaagaagtcgggcgccggcaaggaccagctggtagagatgcgattctacattcccggaaccaccactcgcaaggagactgagggagaggaagcgggcagcgacgccgacgaggaggaaaagaacgccgctactctgttttatgagaccctcatcgacaaggctgagattggtgagacggccggtgacgccatcgccacattcctcgaggtgcttcacctcacgcctcgtggacgcttcgatatcgatatgtacgattcatccttccgtctacgtggtaagacatacgactacaagatccaatatgatgccatcaagaagttcatggtactcccgaagccggacgagctacacttcatgctctgtatcggtctagatcccccgctccgtcaaggccagacgcgataccctttcctcgtcatgcaagttaagaaggacgaggaagtgactatcgacctcaatctcaccgacgacgagctgaaggagaagttcaagggcaagctagaggcccactacgagcagccgctccaccaggtcattacgtacatattcaagggcctcgcgaacaagaagatcacgtcgcccgccaaggacttcatgacccacagacagcagtacggcatcaagtgctctattaaagcagctgagggcttcctctactgtctggagaaggccttcatgttcgtgccgaagccggcgacctatatctcgtacgaccagacgcagagcatcaccttctcgcgcgttagcggcgccgtctcggcgctctcgacgtttgacataacggtgcggatgaagacggggccggcccacgggttcagcaacattagtagagaggaccagaaggcgctagaagacttcttcaagttgaaggggctccgtgtgaagaacgagattgacgaggatgctacactgctcgctgcagccctccgcgaggaagctatggacgactcggaggaagaggttgttggtgctggagcggatcgcggatctgcggatgaagacgaggagtctgttgatgaagacttcagagctgagagtgaaagtgacgtcgcagaagaattcgactctgaccatgagtcttctggctctggaggcgacgagagcggtgtcgatgatgaagatgaagacgaggagatggctgacgacgacggtgaggaggaagaggaggagaagccaaaggcgaaaaaacaaaagacgaagtgagaggttcgacgtaaatagtggacacttcagtctgcattgatttccatgagttcaagggaactttgttatggcggaaaaaatcggcgttggggcgtgggctttgcttgggttagccaactcttgctgtgtttgtttgattagagaatctgagattacgaggtagatggtcagggaggttgggaagggagaggaccatactgctgattgatttgcgaacaggaactgagaactacgcctttaatacatgtggtattgaagtggccaggagttgcatatagggttccatggctatgaagtagatagactgcatttagctgcgctacactacagcaatgaagatcccgatgaattaatgtaaat

SEQ ID NO: 36838 - DNA, 882 bp, Muscodor strobelii
  misc_feature: SGI cDNA ID NO. 572774
  misc_feature: Encodes the peptide sequence at SEQ ID NO 36839
atggtactcccgaagccggacgagctacacttcatgctctgtatcggtctagatcccccgctccgtcaaggccagacgcgataccctttcctcgtcatgcaagttaagaaggacgaggaagtgactatcgacctcaatctcaccgacgacgagctgaaggagaagttcaagggcaagctagaggcccactacgagcagccgctccaccaggtcattacgtacatattcaagggcctcgcgaacaagaagatcacgtcgcccgccaaggacttcatgacccacagacagcagtacggcatcaagtgctctattaaagcagctgagggcttcctctactgtctggagaaggccttcatgttcgtgccgaagccggcgacctatatctcgtacgaccagacgcagagcatcaccttctcgcgcgttagcggcgccgtctcggcgctctcgacgtttgacataacggtgcggatgaagacggggccggcccacgggttcagcaacattagtagagaggaccagaaggcgctagaagacttcttcaagttgaaggggctccgtgtgaagaacgagattgacgaggatgctacactgctcgctgcagccctccgcgaggaagctatggacgactcggaggaagaggttgttggtgctggagcggatcgcggatctgcggatgaagacgaggagtctgttgatgaagacttcagagctgagagtgaaagtgacgtcgcagaagaattcgactctgaccatgagtcttctggctctggaggcgacgagagcggtgtcgatgatgaagatgaagacgaggagatggctgacgacgacggtgaggaggaagaggaggagaagccaaaggcgaaaaaacaaaagacgaagtga

SEQ ID NO: 36839 - protein, 293 aa, Muscodor strobelii
  misc_feature: SGI Peptide ID NO. 572774
  misc_feature (108)..(250): Pfam Id: PF08512 Pfam Desc: Histone chaperone Rttp106-like
  misc_feature (2)..(183): Pfam Id: PF03531 Pfam Desc: Structure-specific recognition protein (SSRP1)
  misc_feature (3)..(183): Pfam Id: PF03531 Pfam Desc: Structure-specific recognition protein (SSRP1)
  misc_feature (1)..(266): NCBI GI: 116191855 Blast Desc: conserved [Chaetomium globosum CBS 148.51] gi|88181558|gb|EAQ89026.1| conserved [Chaetomium globosum CBS 148.51]
  misc_feature (1)..(265): NCBI GI: 85078552 Blast Desc: NCU11168 [Neurospora crassa OR74A] gi|74613683|sp|Q7RWW0.1|POB3_NEUCR RecName: Full=FACT complex subunit pob-3; AltName: Full=Facilitates chromatin transcription
  misc_feature (1)..(265): NCBI GI: 261360130 Blast Desc: FACT complex subunit pob-3 [Verticillium albo-atrum VaMs.102]
  misc_feature (1)..(263): NCBI GI: 46111273 Blast Desc: FG02518.1 [Gibberella zeae PH-1] gi|110287791|sp|Q4IJU0.1|POB3_GIBZE RecName: Full=FACT complex subunit POB3; AltName: Full=Facilitates chromatin transcription
  misc_feature (1)..(261): NCBI GI: 171686954 Blast Desc: protein product [Podospora anserina] gi|170943438|emb|CAP69091.1| protein product [Podospora anserina]
  misc_feature (1)..(260): NCBI GI: 145614364 Blast Desc: MGG_11344 [Magnaporthe grisea 70-15] gi|145021302|gb|EDK05431.1| MGG_11344 [Magnaporthe grisea 70-15]
  misc_feature (1)..(265): NCBI GI: 154312776 Blast Desc: BC1G_05089 [Botryotinia fuckeliana B05.10] gi|150849791|gb|EDN24984.1| BC1G_05089 [Botryotinia fuckeliana B05.10]
  misc_feature (1)..(265): NCBI GI: 156051618 Blast Desc: SS1G_07216 [Sclerotinia sclerotiorum 1980] gi|154704994|gb|EDO04733.1| SS1G_07216 [Sclerotinia sclerotiorum 1980]
  misc_feature (1)..(251): NCBI GI: 256725804 Blast Desc: [Nectria haematococca mpVI 77-13-4]
  misc_feature (1)..(290): NCBI GI: 255931771 Blast Desc: Pc12g05980 [Penicillium chrysogenum Wisconsin 54-1255] gi|211582061|emb|CAP80225.1| Pc12g05980 [Penicillium chrysogenum Wisconsin 54-1255]
MVLPKPDELHFMLCIGLDPPLRQGQTRYPFLVMQVKKDEEVTIDLNLTDDELKEKFKGKLEAHYEQPLHQVITYIFKGLANKKITSPAKDFMTHRQQYGIKCSIKAAEGFLYCLEKAFMFVPKPATYISYDQTQSITFSRVSGAVSALSTFDITVRMKTGPAHGFSNISREDQKALEDFFKLKGLRVKNEIDEDATLLAAALREEAMDDSEEEVVGAGADRGSADEDEESVDEDFRAESESDVAEEFDSDHESSGSGGDESGVDDEDEDEEMADDDGEEEEEEKPKAKKQKTK

SEQ ID NO: 36840 - DNA, 2395 bp, Muscodor strobelii; identical to SEQ ID NO: 36837
  misc_feature: SGI EST ID NO. CUFF.87980.0
  misc_feature: Variant of the nucleotide sequence at SEQ ID NO 36838

SEQ ID NO: 36841 - DNA, 4245 bp, Muscodor strobelii
  misc_feature: SGI cDNA ID NO. 572775
  misc_feature: Encodes the peptide sequence at SEQ ID NO 36842
atggcttccgagcaacctgtcacggagccattgcgcatctctaagagcacacctaaccaatcaccaaccaagggcgcgcattcccgcgccttgtctgagatctcagcaaccgagaagaggcgcaactcgcccagctggccacagccaaacaagcagggacagaagatggcaccactcaacacagactcgtctccattccagtcatcaccgctggacagcaccacttccccacggctcctctggcagaaccgaaaactcaccgagaatgacctctatgctggcaggtcaggctctccttctcccaccaggcgctcctccatcgagcgcctccagaaggcctcgcgcgtcaagaacagtaccatgtttgcgcgcgagcagaaacaggaatacgaccctgcccggcttcccaccattgaacgaccccttgctaaagtccagggcaatgcctttggcggcactggaaacgctggcctgcgcatgggccattcccgctccgagagccagaccaatatcccgctttacagcccaaccaagtccatcgcaagcccaccaggcctcgctcgtccccagactccgagcaaggaccagccatcaccaactaaatcctcgctgtcagcttcgcgctttaagagcagctacaactcacagaatgacgacgatgtcttctcggatcattcattcgacgattccaacactatggacggaagatccctgcatcggcatgcaaaatcggtgacatttgacgccgcacctcctcagatcaatgagtacgagatggcaacacccgatatctcatccattggcaccaactcgagagagggcagttacgaatccgaagaggacgacatgtatggccattatcaaaacgatgacagcgagctccaggacgagagctttgacgcaacactagaagacactgataagactccggtggttggtccggatgattggcgccgtgaccttgactctcgctttgatagtagcccaatgccagaggccaccatctcccgacccgctgtcggccgtccccagcctggccgtaccaactcctccacatcaagtggcgagcaccgaccactgccccctcttcctggcatgggccatgagcggtccgactcggcttcttcgaacacgaacacggaaagacctctgtctcctcgcaatctcccatcgccaccgtcatcctcgaagtccgagatttccaacattggaaactccaacatgtccttggaggagcgtctgaagcttatgatgctgtctgacgaaagtagtccaaaggctggagaaaaggccgccaaaacatttgctgagcagcagcgggaacgccgtatgcgaagagccggtgctcgtgatagagtcgcgagcccgacgcctgagcgtgagcaagctgatgcggaggcggaggccgaggaaggtgatgatacgctcggtgatatctctgcattggacatggactatcagctgcccagcatctcacgccattccattctgcagcgtgtcaacggcaacaaggctttgaatcgtgagtctgagtacgagttcaacacacctgcgccggagtccagtcctgcgcgcagccctccatacgaccccgatgttcctatcgctagtatcgaggactcggttttggaggatatttcacagttgcccgatgacagtatgattgatgatgaccaagatgaccacgagagcggcgttgaatatgatttgcctccacgatctaatgaggaggatatgactccagagaagggtgatcacgatgatgatactgaaagccagtactcagacgacctcccaaccgcacaggacgcccgtggagaagaggactctgcaagcacccctcgcgcttccagccctgttgaagaaggctcggttaccaacttcagcgccacattgcctcaagttaagagtcagaggcactcggacttcactcgcagcttccagtcatacatgctccccaaagcaaaagactctgattctgtcatacacaacgagagccgcaaggagtccagcatgtcctctcatacggcaaggccacgtactcccgtcctacccgtctcaaagccggagtatgacggctctggttggggtgaacctgacgaggaggacgacgaaccaggcacgcctgagtctgtcattcatcaccctgtttctgatgaagagtcggagtttgatgagaccttcgatgagccaattgagtctccggcagtccccgaacagatcgcaactatcaagtctgcatccggttcgcgtctaaagacacgcgcctcagctacaccctcagacatccaggcaatgcgtgaggcccgtaggcaagtcagtcgagaagtcgcacctgtagtaccacctatcccggaccgccaccgtaaccggctgtcacgcgacttccaaaacgaccggctcgacgtctctaccggtgatgaatacctcgatcggcacccaagcttcaagaataggagcttgaccttggaccttgacttaggtcttagtcttgaccaggattttgatagggttattgaggcacaaaaggttgagctccaacaaaaactcctttgcgaccccttcgtgactgccagtaacagtccttctagacaagcgtctggtcccaacaacaataacgcgagtgctcctctaggggtgcctgcgcgtctttcttcactatctcgtgctaacattaccacccgaaaacagcgcggttatctcatgcgacagaacacaaaacttgtcactgctactgacaaggacaacgaggagctacgctctgcaactcgatcagctggcaattcacctgtcaagcaacagcgtcctcaatcttggacggtagagccctggaacggaaaacaaagacgcagcatcaggaagcgacacggcccctccttgagcggacctgcaccaccaatgcctggtcacgaaagcaacgctacggccatgactgtggttgaagaagaagtcccggagcaggccattggcgagtccggtgagcgaggtagactcttcgtcaaggtgatgggagtcaaggatctcgacctaccccttcctagaaacgagagaacttggtttaatctcacgctcgataacggcgtgcattgtgtgacaacctcttggctcgaacttgctcgcaacgccccaattggccaggaattcgaacttgtcgtccctgatgacttggaattccaactcaccctcaatgtcaagttggagcaaccaaaggtgcccaagcatgtggctgccgtgccgactaagatgtcgaaacctaagacgtccacattctcgcgtgtctttgccagtccaaaaaaacgcaaggagatggaagctcgtcaacgggctgaagaggaagcccatgctcaggcccagcgggaggctgcaagcaagttgagccttgcacccaccgcttgggacttactgtcacccctggctgccgaggatggtagctttgcacgatcctacgtctgcctgaaggaacatgagcaacgttgctacggacggccctatatggtagagatagccgccttcaatgagtgggcaactgaagaaccttcctttgctagcagtgtcaagagcaaacgttcgggcatcccaaccggtagcattgtgcgccgcgctccctacaaggtcggcaagttggaggtgcaactcttgttcgtccctcgtcccaaaggctccaccgatgaggatatgccgaagtctatgaactcgtgcatccgggagctgaaagcagccgaggagagacagagtcgcaattgggagggtcatctaagccagcagggcggtgactgtccttactggcgccgccgttacttcaagcttgtgggcaccaaactcactgcttaccatgaggctacccgccagccacgcgccacaatcaatctgtccaatgccaagcgcttgattgacgaccgccgacaactgacaaacccagagacaactggtcgtggaggcaagcgccgtcgctctgcctttgccgaagaggaagatggctacatgtttgtcgaggagggcttccgcatccgctttaacaacggagagctcattgacttctatgccgacaccgccgaagacaaggaaggctggatgaaagtcctgggcgacctcatcggtgttggtcgaaccagtgacgaagaggacccatctggtgtcaattcgcgacgcaagtggtgcgagctcgtccttaagcgtgaggaggcgctccgcaagcgtgcagagggtaaacgagttcattcgcgtaccaagagcatgatcatgtga

SEQ ID NO: 36842 - protein, 1414 aa, Muscodor strobelii
  misc_feature: SGI Peptide ID NO. 572775
  misc_feature (1246)..(1366): Pfam Id: PF00169 Pfam Desc: PH domain
  misc_feature (994)..(1245): Pfam Id: PF08174 Pfam Desc: Fungal domain of function (DUF1709)
  misc_feature (994)..(1070): Pfam Id: PF08174 Pfam Desc: Fungal domain of function (DUF1709)
  misc_feature (1140)..(1245): Pfam Id: PF08174 Pfam Desc: Fungal domain of function (DUF1709)
  misc_feature (1249)..(1366): Pfam Id: PF00169 Pfam Desc: PH domain
  misc_feature (1)..(1414): NCBI GI: 256732756 Blast Desc: NECHADRAFT_37841 [Nectria haematococca mpVI 77-13-4]
  misc_feature (55)..(1411): NCBI GI: 261360352 Blast Desc: INT1 [Verticillium albo-atrum VaMs.102]
  misc_feature (29)..(1413): NCBI GI: 171685802 Blast Desc: protein product [Podospora anserina] gi|170942862|emb|CAP68515.1| protein product [Podospora anserina]
  misc_feature (18)..(1414): NCBI GI: 116207258 Blast Desc: CHGG_02922 [Chaetomium globosum CBS 148.51] gi|88183519|gb|EAQ90987.1| CHGG_02922 [Chaetomium globosum CBS 148.51]
  misc_feature (1)..(1414): NCBI GI: 164428888 Blast Desc: NCU00152 [Neurospora crassa OR74A] gi|157072324|gb|EAA27429.2| conserved [Neurospora crassa OR74A]
  misc_feature (1)..(1411): NCBI GI: 46125869 Blast Desc: FG07312.1 [Gibberella zeae PH-1]
  misc_feature (29)..(1396): NCBI GI: 225559411 Blast Desc: conserved [Ajellomyces capsulatus G186AR]
  misc_feature (29)..(1402): NCBI GI: 239606366 Blast Desc: GTP binding protein Bud4 [Ajellomyces dermatitidis ER-3]
  misc_feature (29)..(1402): NCBI GI: 261190136 Blast Desc: GTP binding protein Bud4 [Ajellomyces dermatitidis SLH14081] gi|239591306|gb|EEQ73887.1| GTP binding protein Bud4 [Ajellomyces dermatitidis SLH14081]
  misc_feature (10)..(1393): NCBI GI: 169621123 Blast Desc: SNOG_13766 [Phaeosphaeria nodorum SN15] gi|160704183|gb|EAT78790.2| SNOG_13766 [Phaeosphaeria nodorum SN15]
MASEQPVTEPLRISKSTPNQSPTKGAHSRALSEISATEKRRNSPSWPQPNKQGQKMAPLNTDSSPFQSSPLDSTTSPRLLWQNRKLTENDLYAGRSGSPSPTRRSSIERLQKASRVKNSTMFAREQKQEYDPARLPTIERPLAKVQGNAFGGTGNAGLRMGHSRSESQTNIPLYSPTKSIASPPGLARPQTPSKDQPSPTKSSLSASRFKSSYNSQNDDDVFSDHSFDDSNTMDGRSLHRHAKSVTFDAAPPQINEYEMATPDISSIGTNSREGSYESEEDDMYGHYQNDDSELQDESFDATLEDTDKTPVVGPDDWRRDLDSRFDSSPMPEATISRPAVGRPQPGRTNSSTSSGEHRPLPPLPGMGHERSDSASSNTNTERPLSPRNLPSPPSSSKSEISNIGNSNMSLEERLKLMMLSDESSPKAGEKAAKTFAEQQRERRMRRAGARDRVASPTPEREQADAEAEAEEGDDTLGDISALDMDYQLPSISRHSILQRVNGNKALNRESEYEFNTPAPESSPARSPPYDPDVPIASIEDSVLEDISQLPDDSMIDDDQDDHESGVEYDLPPRSNEEDMTPEKGDHDDDTESQYSDDLPTAQDARGEEDSASTPRASSPVEEGSVTNFSATLPQVKSQRHSDFTRSFQSYMLPKAKDSDSVIHNESRKESSMSSHTARPRTPVLPVSKPEYDGSGWGEPDEEDDEPGTPESVIHHPVSDEESEFDETFDEPIESPAVPEQIATIKSASGSRLKTRASATPSDIQAMREARRQVSREVAPVVPPIPDRHRNRLSRDFQNDRLDVSTGDEYLDRHPSFKNRSLTLDLDLGLSLDQDFDRVIEAQKVELQQKLLCDPFVTASNSPSRQASGPNNNNASAPLGVPARLSSLSRANITTRKQRGYLMRQNTKLVTATDKDNEELRSATRSAGNSPVKQQRPQSWTVEPWNGKQRRSIRKRHGPSLSGPAPPMPGHESNATAMTVVEEEVPEQAIGESGERGRLFVKVMGVKDLDLPLPRNERTWFNLTLDNGVHCVTTSWLELARNAPIGQEFELVVPDDLEFQLTLNVKLEQPKVPKHVAAVPTKMSKPKTSTFSRVFASPKKRKEMEARQRAEEEAHAQAQREAASKLSLAPTAWDLLSPLAAEDGSFARSYVCLKEHEQRCYGRPYMVEIAAFNEWATEEPSFASSVKSKRSGIPTGSIVRRAPYKVGKLEVQLLFVPRPKGSTDEDMPKSMNSCIRELKAAEERQSRNWEGHLSQQGGDCPYWRRRYFKLVGTKLTAYHEATRQPRATINLSNAKRLIDDRRQLTNPETTGRGGKRRRSAFAEEEDGYMFVEEGFRIRFNNGELIDFYADTAEDKEGWMKVLGDLIGVGRTSDEEDPSGVNSRRKWCELVLKREEALRKRAEGKRVHSRTKSMIM

SEQ ID NO: 36843 - DNA, 5371 bp, Muscodor strobelii
  misc_feature: SGI EST ID NO. CUFF.87987.1
  misc_feature: Variant of the nucleotide sequence at SEQ ID NO 36841
gagaatttcaagacagcaattgacaaatggcaagtcattctcatggatgactgcagggtaggggtgcttgtacagcattgatggcctgtgcttctgctgcaggtcgaacgttggtatggcaacggcgaccaatgtggtagtggtcacgggctgcacagagccgttgatgattagcggcgggcaggcgcgggaagcaaggcaggagtgcaggtcgttgcagcagactcgcaaatggtggggtcctgggctttgtgcacccctgctctgtttacatcgtgcggcccaaatagacggcgacagcacctgtgatcagcttcaccaatcctcccctcactcaccactttccttcccgtcgcaaattgccacgtcgcaagagttggtatacgtcttttccgtcttgaatctgcttatattgcattctttcccacaattgggacgtggaacaagcttccttacttgcatatagcctgccgcgttgcacattggattcggcgccgtgtgctcgacagctcccttctctttgttgctgctgtttcgcatttcgcgaccgcaacaatcgtattcattttgtcgcgccactggtatactattcaactgcatctgttgcgcatcactccttatcctcttcttttccttgtatttacgaatactcgagagatatgaattggcggaagaattactagactggacaaactgggaaccgcattgttaaatatggcttccgagcaacctgtcacggagccattgcgcatctctaagagcacacctaaccaatcaccaaccaagggcgcgcattcccgcgccttgtctgagatctcagcaaccgagaagaggcgcaactcgcccagctggccacagccaaacaagggacagaagatggcaccactcaacacagactcgtctccattccagtcatcaccgctggacagcaccacttccccacggctcctctggcagaaccgaaaactcaccgagaatgacctctatgctggcaggtcaggctctccttctcccaccaggcgctcctccatcgagcgcctccagaaggcctcgcgcgtcaagaacagtaccatgtttgcgcgcgagcagaaacaggaatacgaccctgcccggcttcccaccattgaacgaccccttgctaaagtccagggcaatgcctttggcggcactggaaacgctggcctgcgcatgggccattcccgctccgagagccagaccaatatcccgctttacagcccaaccaagtccatcgcaagcccaccaggcctcgctcgtccccagactccgagcaaggaccagccatcaccaactaaatcctcgctgtcagcttcgcgctttaagagcagctacaactcacagaatgacgacgatgtcttctcggatcattcattcgacgattccaacactatggacggaagatccctgcatcggcatgcaaaatcggtgacatttgacgccgcacctcctcagatcaatgagtacgagatggcaacacccgatatctcatccattggcaccaactcgagagagggcagttacgaatccgaagaggacgacatgtatggccattatcaaaacgatgacagcgagctccaggacgagagctttgacgcaacactagaagacactgataagactccggtggttggtccggatgattggcgccgtgaccttgactctcgctttgatagtagcccaatgccagaggccaccatctcccgacccgctgtcggccgtccccagcctggccgtaccaactcctccacatcaagtggcgagcaccgaccactgccccctcttcctggcatgggccatgagcggtccgactcggcttcttcgaacacgaacacggaaagacctctgtctcctcgcaatctcccatcgccaccgtcatcctcgaagtccgagatttccaacattggaaactccaacatgtccttggaggagcgtctgaagcttatgatgctgtctgacgaaagtagtccaaaggctggagaaaaggccgccaaaacatttgctgagcagcagcgggaacgccgtatgcgaagagccggtgctcgtgatagagtcgcgagcccgacgcctgagcgtgagcaagctgatgcggaggcggaggccgaggaaggtgatgatacgctcggtgatatctctgcattggacatggactatcagctgcccagcatctcacgccattccattctgcagcgtgtcaacggcaacaaggctttgaatcgtgagtctgagtacgagttcaacacacctgcgccggagtccagtcctgcgcgcagccctccatacgaccccgatgttcctatcgctagtatcgaggactcggttttggaggatatttcacagttgcccgatgacagtatgattgatgatgaccaagatgaccacgagagcggcgttgaatatgatttgcctccacgatctaatgaggaggatatgactccagagaagggtgatcacgatgatgatactgaaagccagtactcagacgacctcccaaccgcacaggacgcccgtggagaagaggactctgcaagcacccctcgcgcttccagccctgttgaagaaggctcggttaccaacttcagcgccacattgcctcaagttaagagtcagaggcactcggacttcactcgcagcttccagtcatacatgctccccaaagcaaaagactctgattctgtcatacacaacgagagccgcaaggagtccagcatgtcctctcatacggcaaggccacgtactcccgtcctacccgtctcaaagccggagtatgacggctctggttggggtgaacctgacgaggaggacgacgaaccaggcacgcctgagtctgtcattcatcaccctgtttctgatgaagagtcggagtttgatgagaccttcgatgagccaattgagtctccggcagtccccgaacagatcgcaactatcaagtctgcatccggttcgcgtctaaagacacgcgcctcagctacaccctcagacatccaggcaatgcgtgaggcccgtaggcaagtcagtcgagaagtcgcacctgtagtaccacctatcccggaccgccaccgtaaccggctgtcacgcgacttccaaaacgaccggctcgacgtctctaccggtgatgaatacctcgatcggcacccaagcttcaagaataggagcttgaccttggaccttgacttaggtcttagtcttgaccaggattttgatagggttattgaggcacaaaagcgcggttatctcatgcgacagaacacaaaacttgtcactgctactgacaaggacaacgaggagctacgctctgcaactcgatcagctggcaattcacctgtcaagcaacagcgtcctcaatcttggacggtagagccctggaacggaaaacaaagacgcagcatcaggaagcgacacggcccctccttgagcggacctgcaccaccaatgcctggtcacgaaagcaacgctacggccatgactgtggttgaagaagaagtcccggagcaggccattggcgagtccggtgagcgaggtagactcttcgtcaaggtgatgggagtcaaggatctcgacctaccccttcctagaaacgagagaacttggtttaatctcacgctcgataacggcgtgcattgtgtgacaacctcttggctcgaacttgctcgcaacgccccaattggccaggaattcgaacttgtcgtccctgatgacttggaattccaactcaccctcaatgtcaagttggagcaaccaaaggtgcccaagcatgtggctgccgtgccgactaagatgtcgaaacctaagacgtccacattctcgcgtgtctttgccagtccaaaaaaacgcaaggagatggaagctcgtcaacgggctgaagaggaagcccatgctcaggcccagcgggaggctgcaagcaagttgagccttgcacccaccgcttgggacttactgtcacccctggctgccgaggatggtagctttgcacgatcctacgtctgcctgaaggaacatgagcaacgttgctacggacggccctatatggtagagatagccgccttcaatgagtgggcaactgaagaaccttcctttgctagcagtgtcaagagcaaacgttcgggcatcccaaccggtagcattgtgcgccgcgctccctacaaggtcggcaagttggaggtgcaactcttgttcgtccctcgtcccaaaggctccaccgatgaggatatgccgaagtctatgaactcgtgcatccgggagctgaaagcagccgaggagagacagagtcgcaattgggagggtcatctaagccagcagggcggtgactgtccttactggcgccgccgttacttcaagcttgtgggcaccaaactcactgcttaccatgaggctacccgccagccacgcgccacaatcaatctgtccaatgccaagcgcttgattgacgaccgccgacaactgacaaacccagagacaactggtcgtggaggcaagcgccgtcgctctgcctttgccgaagaggaagatggctacatgtttgtcgaggagggcttccgcatccgctttaacaacggagagctcattgacttctatgccgacaccgccgaagacaaggaaggctggatgaaagtcctgggcgacctcatcggtgttggtcgaaccagtgacgaagaggacccatctggtgtcaattcgcgacgcaagtggtgcgagctcgtccttaagcgtgaggaggcgctccgcaagcgtgcagagggtaaacgagttcattcgcgtaccaagagcatgatcatgtgaggctgtgccttgcagacagactttgtttctacaacttcatgattcatgatcatgtgatccggctggatgaatgacgaggctttggactggcttggctataagaaagaacatcatgatcgacatacagaaaagactgccgacgacaattgcttttcgataaatgctattcactaaggctatttgtctccaacgacgctcatgatgatgggtgcttgtcctgtcctgtcaagaaatacatccgaaaagtccgctaaggttcatcgcattgagaggttttgtgagcactgacttggttctggagacctgtctttgttggaattaaaggggttggttcgatgctaggtgaattggtgttaatatggcctgcattgggggaacgaaatgaaagtggactgacacatggatggatgaactggattgcatggctgataatttgctggagttgccctcttttttcacgcttgatacttctagttcttgtggactttcaaagtacctcagtacctgcatatacgttgtgggcatggagtatcggcttgtaggattgtcaggattgtcactgttaataatgaggact

SEQ ID NO: 36844 - DNA, 4242 bp, Muscodor strobelii
  misc_feature: SGI cDNA ID NO. 572776
  misc_feature: Encodes the peptide sequence at SEQ ID NO 36845
atggcttccgagcaacctgtcacggagccattgcgcatctctaagagcacacctaaccaatcaccaaccaagggcgcgcattcccgcgccttgtctgagatctcagcaaccgagaagaggcgcaactcgcccagctggccacagccaaacaagggacagaagatggcaccactcaacacagactcgtctccattccagtcatcaccgctggacagcaccacttccccacggctcctctggcagaaccgaaaactcaccgagaatgacctctatgctggcaggtcaggctctccttctcccaccaggcgctcctccatcgagcgcctccagaaggcctcgcgcgtcaagaacagtaccatgtttgcgcgcgagcagaaacaggaatacgaccctgcccggcttcccaccattgaacgaccccttgctaaagtccagggcaatgcctttggcggcactggaaacgctggcctgcgcatgggccattcccgctccgagagccagaccaatatcccgctttacagcccaaccaagtccatcgcaagcccaccaggcctcgctcgtccccagactccgagcaaggaccagccatcaccaactaaatcctcgctgtcagcttcgcgctttaagagcagctacaactcacagaatgacgacgatgtcttctcggatcattcattcgacgattccaacactatggacggaagatccctgcatcggcatgcaaaatcggtgacatttgacgccgcacctcctcagatcaatgagtacgagatggcaacacccgatatctcatccattggcaccaactcgagagagggcagttacgaatccgaagaggacgacatgtatggccattatcaaaacgatgacagcgagctccaggacgagagctttgacgcaacactagaagacactgataagactccggtggttggtccggatgattggcgccgtgaccttgactctcgctttgatagtagcccaatgccagaggccaccatctcccgacccgctgtcggccgtccccagcctggccgtaccaactcctccacatcaagtggcgagcaccgaccactgccccctcttcctggcatgggccatgagcggtccgactcggcttcttcgaacacgaacacggaaagacctctgtctcctcgcaatctcccatcgccaccgtcatcctcgaagtccgagatttccaacattggaaactccaacatgtccttggaggagcgtctgaagcttatgatgctgtctgacgaaagtagtccaaaggctggagaaaaggccgccaaaacatttgctgagcagcagcgggaacgccgtatgcgaagagccggtgctcgtgatagagtcgcgagcccgacgcctgagcgtgagcaagctgatgcggaggcggaggccgaggaaggtgatgatacgctcggtgatatctctgcattggacatggactatcagctgcccagcatctcacgccattccattctgcagcgtgtcaacggcaacaaggctttgaatcgtgagtctgagtacgagttcaacacacctgcgccggagtccagtcctgcgcgcagccctccatacgaccccgatgttcctatcgctagtatcgaggactcggttttggaggatatttcacagttgcccgatgacagtatgattgatgatgaccaagatgaccacgagagcggcgttgaatatgatttgcctccacgatctaatgaggaggatatgactccagagaagggtgatcacgatgatgatactgaaagccagtactcagacgacctcccaaccgcacaggacgcccgtggagaagaggactctgcaagcacccctcgcgcttccagccctgttgaagaaggctcggttaccaacttcagcgccacattgcctcaagttaagagtcagaggcactcggacttcactcgcagcttccagtcatacatgctccccaaagcaaaagactctgattctgtcatacacaacgagagccgcaaggagtccagcatgtcctctcatacggcaaggccacgtactcccgtcctacccgtctcaaagccggagtatgacggctctggttggggtgaacctgacgaggaggacgacgaaccaggcacgcctgagtctgtcattcatcaccctgtttctgatgaagagtcggagtttgatgagaccttcgatgagccaattgagtctccggcagtccccgaacagatcgcaactatcaagtctgcatccggttcgcgtctaaagacacgcgcctcagctacaccctcagacatccaggcaatgcgtgaggcccgtaggcaagtcagtcgagaagtcgcacctgtagtaccacctatcccggaccgccaccgtaaccggctgtcacgcgacttccaaaacgaccggctcgacgtctctaccggtgatgaatacctcgatcggcacccaagcttcaagaataggagcttgaccttggaccttgacttaggtcttagtcttgaccaggattttgatagggttattgaggcacaaaaggttgagctccaacaaaaactcctttgcgaccccttcgtgactgccagtaacagtccttctagacaagcgtctggtcccaacaacaataacgcgagtgctcctctaggggtgcctgcgcgtctttcttcactatctcgtgctaacattaccacccgaaaacagcgcggttatctcatgcgacagaacacaaaacttgtcactgctactgacaaggacaacgaggagctacgctctgcaactcgatcagctggcaattcacctgtcaagcaacagcgtcctcaatcttggacggtagagccctggaacggaaaacaaagacgcagcatcaggaagcgacacggcccctccttgagcggacctgcaccaccaatgcctggtcacgaaagcaacgctacggccatgactgtggttgaagaagaagtcccggagcaggccattggcgagtccggtgagcgaggtagactcttcgtcaaggtgatgggagtcaaggatctcgacctaccccttcctagaaacgagagaacttggtttaatctcacgctcgataacggcgtgcattgtgtgacaacctcttggctcgaacttgctcgcaacgccccaattggccaggaattcgaacttgtcgtccctgatgacttggaattccaactcaccctcaatgtcaagttggagcaaccaaaggtgcccaagcatgtggctgccgtgccgactaagatgtcgaaacctaagacgtccacattctcgcgtgtctttgccagtccaaaaaaacgcaaggagatggaagctcgtcaacgggctgaagaggaagcccatgctcaggcccagcgggaggctgcaagcaagttgagccttgcacccaccgcttgggacttactgtcacccctggctgccgaggatggtagctttgcacgatcctacgtctgcctgaaggaacatgagcaacgttgctacggacggccctatatggtagagatagccgccttcaatgagtgggcaactgaagaaccttcctttgctagcagtgtcaagagcaaacgttcgggcatcccaaccggtagcattgtgcgccgcgctccctacaaggtcggcaagttggaggtgcaactcttgttcgtccctcgtcccaaaggctccaccgatgaggatatgccgaagtctatgaactcgtgcatccgggagctgaaagcagccgaggagagacagagtcgcaattgggagggtcatctaagccagcagggcggtgactgtccttactggcgccgccgttacttcaagcttgtgggcaccaaactcactgcttaccatgaggctacccgccagccacgcgccacaatcaatctgtccaatgccaagcgcttgattgacgaccgccgacaactgacaaacccagagacaactggtcgtggaggcaagcgccgtcgctctgcctttgccgaagaggaagatggctacatgtttgtcgaggagggcttccgcatccgctttaacaacggagagctcattgacttctatgccgacaccgccgaagacaaggaaggctggatgaaagtcctgggcgacctcatcggtgttggtcgaaccagtgacgaagaggacccatctggtgtcaattcgcgacgcaagtggtgcgagctcgtccttaagcgtgaggaggcgctccgcaagcgtgcagagggtaaacgagttcattcgcgtaccaagagcatgatcatgtga

SEQ ID NO: 36845 - protein, 1413 aa, Muscodor strobelii
  misc_feature: SGI Peptide ID NO. 572776
  misc_feature (1245)..(1365): Pfam Id: PF00169 Pfam Desc: PH domain
  misc_feature (993)..(1244): Pfam Id: PF08174 Pfam Desc: Fungal domain of function (DUF1709)
  misc_feature (993)..(1069): Pfam Id: PF08174 Pfam Desc: Fungal domain of function (DUF1709)
  misc_feature (1139)..(1244): Pfam Id: PF08174 Pfam Desc: Fungal domain of function (DUF1709)
  misc_feature (1248)..(1365): Pfam Id: PF00169 Pfam Desc: PH domain
  misc_feature (1)..(1413): NCBI GI: 256732756 Blast Desc: NECHADRAFT_37841 [Nectria haematococca mpVI 77-13-4]
  misc_feature (50)..(1410): NCBI GI: 261360352 Blast Desc: INT1 [Verticillium albo-atrum VaMs.102]
  misc_feature (29)..(1412): NCBI GI: 171685802 Blast Desc: protein product [Podospora anserina] gi|170942862|emb|CAP68515.1| protein product [Podospora anserina]
  misc_feature (18)..(1413): NCBI GI: 116207258 Blast Desc: CHGG_02922 [Chaetomium globosum CBS 148.51] gi|88183519|gb|EAQ90987.1| CHGG_02922 [Chaetomium globosum CBS 148.51]
  misc_feature (1)..(1413): NCBI GI: 164428888 Blast Desc: NCU00152 [Neurospora crassa OR74A] gi|157072324|gb|EAA27429.2| conserved [Neurospora crassa OR74A]
  misc_feature (1)..(1410): NCBI GI: 46125869 Blast Desc: FG07312.1 [Gibberella zeae PH-1]
  misc_feature (29)..(1395): NCBI GI: 225559411 Blast Desc: conserved [Ajellomyces capsulatus G186AR]
  misc_feature (29)..(1401): NCBI GI: 239606366 Blast Desc: GTP binding protein Bud4 [Ajellomyces dermatitidis ER-3]
  misc_feature (29)..(1401): NCBI GI: 261190136 Blast Desc: GTP binding protein Bud4 [Ajellomyces dermatitidis SLH14081] gi|239591306|gb|EEQ73887.1| GTP binding protein Bud4 [Ajellomyces dermatitidis SLH14081]
  misc_feature (10)..(1392): NCBI GI: 169621123 Blast Desc: SNOG_13766 [Phaeosphaeria nodorum SN15] gi|160704183|gb|EAT78790.2| SNOG_13766 [Phaeosphaeria nodorum SN15]
MASEQPVTEPLRISKSTPNQSPTKGAHSRALSEISATEKRRNSPSWPQPNKGQKMAPLNTDSSPFQSSPLDSTTSPRLLWQNRKLTENDLYAGRSGSPSPTRRSSIERLQKASRVKNSTMFAREQKQEYDPARLPTIERPLAKVQGNAFGGTGNAGLRMGHSRSESQTNIPLYSPTKSIASPPGLARPQTPSKDQPSPTKSSLSASRFKSSYNSQNDDDVFSDHSFDDSNTMDGRSLHRHAKSVTFDAAPPQINEYEMATPDISSIGTNSREGSYESEEDDMYGHYQNDDSELQDESFDATLEDTDKTPVVGPDDWRRDLDSRFDSSPMPEATISRPAVGRPQPGRTNSSTSSGEHRPLPPLPGMGHERSDSASSNTNTERPLSPRNLPSPPSSSKSEISNIGNSNMSLEERLKLMMLSDESSPKAGEKAAKTFAEQQRERRMRRAGARDRVASPTPEREQADAEAEAEEGDDTLGDISALDMDYQLPSISRHSILQRVNGNKALNRESEYEFNTPAPESSPARSPPYDPDVPIASIEDSVLEDISQLPDDSMIDDDQDDHESGVEYDLPPRSNEEDMTPEKGDHDDDTESQYSDDLPTAQDARGEEDSASTPRASSPVEEGSVTNFSATLPQVKSQRHSDFTRSFQSYMLPKAKDSDSVIHNESRKESSMSSHTARPRTPVLPVSKPEYDGSGWGEPDEEDDEPGTPESVIHHPVSDEESEFDETFDEPIESPAVPEQIATIKSASGSRLKTRASATPSDIQAMREARRQVSREVAPVVPPIPDRHRNRLSRDFQNDRLDVSTGDEYLDRHPSFKNRSLTLDLDLGLSLDQDFDRVIEAQKVELQQKLLCDPFVTASNSPSRQASGPNNNNASAPLGVPARLSSLSRANITTRKQRGYLMRQNTKLVTATDKDNEELRSATRSAGNSPVKQQRPQSWTVEPWNGKQRRSIRKRHGPSLSGPAPPMPGHESNATAMTVVEEEVPEQAIGESGERGRLFVKVMGVKDLDLPLPRNERTWFNLTLDNGVHCVTTSWLELARNAPIGQEFELVVPDDLEFQLTLNVKLEQPKVPKHVAAVPTKMSKPKTSTFSRVFASPKKRKEMEARQRAEEEAHAQAQREAASKLSLAPTAWDLLSPLAAEDGSFARSYVCLKEHEQRCYGRPYMVEIAAFNEWATEEPSFASSVKSKRSGIPTGSIVRRAPYKVGKLEVQLLFVPRPKGSTDEDMPKSMNSCIRELKAAEERQSRNWEGHLSQQGGDCPYWRRRYFKLVGTKLTAYHEATRQPRATINLSNAKRLIDDRRQLTNPETTGRGGKRRRSAFAEEEDGYMFVEEGFRIRFNNGELIDFYADTAEDKEGWMKVLGDLIGVGRTSDEEDPSGVNSRRKWCELVLKREEALRKRAEGKRVHSRTKSMIM

SEQ ID NO: 36846 - DNA, 5371 bp, Muscodor strobelii; identical to SEQ ID NO: 36843
  misc_feature: SGI EST ID NO. CUFF.87987.1
  misc_feature: Variant of the nucleotide sequence at SEQ ID NO 36844

SEQ ID NO: 36847 - DNA, 2733 bp, Muscodor strobelii
  misc_feature: SGI cDNA ID NO. 572777
  misc_feature: Encodes the peptide sequence at SEQ ID NO 36848
atgggtaatctgacttccaaggagcagtctgaaaaggggttagaagagggattaggctttgagatccaagaacgagcaacggagacaagacacatccaaggtggtacacacgcgacaccgaaccctgatcttgcagccagagatgacgccaaattgccgcctagtcatccgcacattgtaccttacagaaactcagaacctcaagagcaattggaagtgcaaaagcaactgaagtcggaagcaactgcgtttagaaaatcaaaacgggtgtctttcgctgagttgccggggccatctcgccatatatcaccggcccgaatcaagcaggagcctgatgatgatgcaccttcccgcgtgaaccagctcacagcagtttccccccagcctgttgttatagacttagtgtcgggctcatctcatggtaagcctgcaaagattccgaaagaaacccaccgacaagctgctggtaccaaagatggcactcactcaaacggatcatcttccaaagcagcaaggattggcttagtatcaaggccacaccgccaaggtgataatgaggtcaccttacaagtcaagaaagaggtgctgtcagacgaggaggacttgctgccaggtgttgcggaatggaaatcaaacccttctagtcgcgccaatcccatcgtgattgacgatcaccccagtccggttgcggatgatgtgcgctccagtccgatcgtgattgacgatccctctagtcgggttgtggaggatgtagcagacgaagaagacctatcggcgttgcttcatactgagagaaaacattccctacagagtatccgagaccagccgatccaacgacacgataacttgcccagtatcatcttcaacatacctagtggctttttcaataggcgagacgaaaggaacagggacaacaagaaggaagaggcggcaacatcccgtgtgaatcatttcgcacgacatcgcggaaaggagattgaggaaaggaatggtgaccagccaggtcacagcggtcggctgtacaatactcacaaacgaactcaccaagagaagtcaattgatgctgctgagaagactgcgccaacgcagggcaccattagttccgcatacaagcctgaacgtcattcacatactgcggcaactggagcaagaggtgatctcgacactcttttaacaaaaaacttccaacgtcctttgtcggccaacaacaaccaaaagaagcgaaaagacccaggtggtaatttgacggatgggactgagtacttctcaacgaccaaatccacgaagaggtctagaatcgatcgtcaaatcacttccgaggacaggccacccgctcaattgcccaagaaaattgctgcgaatggccccaagcgtcctcgccagacaggtcaaaggaaggccgcaggcagcaaagcaactcagaaaggacaaaccagtacaccccctcagcctgccaccgtaatcaagcctgctgaaaagatcccgaggaagcctggtatcttagcatccgtctttctaaacgggaaggatccttctctagcaagtgcagaacccaagaatttgatggtggctgcaccacagtccgacttgacgatcaacgaccaacgtcttccaccaaacaattggcaaccttttaagaagaagaaaccagatgagtctcaggtgactgctccctcctcatccagagcccaagatcaaccacccgaagaacctgtggccgtagacctgtcgccattggcaccggaggaccaggaaatctacgatctcatcgcaaacaataattctgctgctgccgcggcccctatcgttctagcgatcagagaacccgagcgacgagaagagctgctcgaccagagagctcaactggaaagagcatttcaagacattgaagatggccagctcatccaagagtacgaaccgcaaagagagatcgagaaagtgccggaaacacataaatggggatatgtggtcatgtgtgccaaagatgcgaatctcctctcagacgacgaagacttggagaaattgccggccatcaggctgcgtgagttcgcagaccggaagagagcaaatgaattcttggagaaagagaccagtcctcagtcgatggaggacggcctcgaggcaattgcaaagcggagtagctgtctcacaggagatcgattactcaaggtcgacatagagttcagcactggcgaacgaaacatcttatgggtgaagcgagacaaggttaaggagctggccgaactcagtaatacacagaaaagacagaagcaatggcgtcctgcgcccaggcccaagttcaagcactacgttgtcgagtgcgagaagtacctcaaagagtacgacatacagccttaccaagaaggcgaagacagcagtgcggccctgcggcgagcttactacgccaatatgggcatccacaccaatgaaatagaggtcaccaagatggggatgcagaccttcaccgatcgagctttggccaatgcgtatgcggcgaaactgttcctcaaagaggctgcggtcccagagtacctgaaaccttcgcagctggatgtctactggtggaagacgaatgcaatcccgttcaatcagcatgccgagcagaagatctttcccgatggcctgtatgaggtggagatggaggctaaggacatgcggagtcgtgttgggtatgataagatcgtggtatttgtccgtgagattgcggacgtgagtgggcctgttaacttctag

SEQ ID NO: 36848 - protein, 910 aa, Muscodor strobelii
  misc_feature: SGI Peptide ID NO. 572777
MGNLTSKEQSEKGLEEGLGFEIQERATETRHIQGGTHATPNPDLAARDDAKLPPSHPHIVPYRNSEPQEQLEVQKQLKSEATAFRKSKRVSFAELPGPSRHISPARIKQEPDDDAPSRVNQLTAVSPQPVVIDLVSGSSHGKPAKIPKETHRQAAGTKDGTHSNGSSSKAARIGLVSRPHRQGDNEVTLQVKKEVLSDEEDLLPGVAEWKSNPSSRANPIVIDDHPSPVADDVRSSPIVIDDPSSRVVEDVADEEDLSALLHTERKHSLQSIRDQPIQRHDNLPSIIFNIPSGFFNRRDERNRDNKKEEAATSRVNHFARHRGKEIEERNGDQPGHSGRLYNTHKRTHQEKSIDAAEKTAPTQGTISSAYKPERHSHTAATGARGDLDTLLTKNFQRPLSANNNQKKRKDPGGNLTDGTEYFSTTKSTKRSRIDRQITSEDRPPAQLPKKIAANGPKRPRQTGQRKAAGSKATQKGQTSTPPQPATVIKPAEKIPRKPGILASVFLNGKDPSLASAEPKNLMVAAPQSDLTINDQRLPPNNWQPFKKKKPDESQVTAPSSSRAQDQPPEEPVAVDLSPLAPEDQEIYDLIANNNSAAAAAPIVLAIREPERREELLDQRAQLERAFQDIEDGQLIQEYEPQREIEKVPETHKWGYVVMCAKDANLLSDDEDLEKLPAIRLREFADRKRANEFLEKETSPQSMEDGLEAIAKRSSCLTGDRLLKVDIEFSTGERNILWVKRDKVKELAELSNTQKRQKQWRPAPRPKFKHYVVECEKYLKEYDIQPYQEGEDSSAALRRAYYANMGIHTNEIEVTKMGMQTFTDRALANAYAAKLFLKEAAVPEYLKPSQLDVYWWKTNAIPFNQHAEQKIFPDGLYEVEMEAKDMRSRVGYDKIVVFVREIADVSGPVNF

SEQ ID NO: 36849 - DNA, 3097 bp, Muscodor strobelii
  misc_feature: SGI EST ID NO. CUFF.87950.0
  misc_feature: Variant of the nucleotide sequence at SEQ ID NO 36847
ccaggagctactcgaaagcatagtcccacccaagttccgcacataaatgaatctgactcgcccacgcctgtgagaatgggtaatctgacttccaaggagcagtctgaaaaggggttagaagagggattaggctttgagatccaagaacgagcaacggagacaagacacatccaaggtggtacacacgcgacaccgaaccctgatcttgcagccagagatgacgccaaattgccgcctagtcatccgcacattgtaccttacagaaactcagaacctcaagagcaattggaagtgcaaaagcaactgaagtcggaagcaactgcgtttagaaaatcaaaacgggtgtctttcgctgagttgccggggccatctcgccatatatcaccggcccgaatcaagcaggagcctgatgatgatgcaccttcccgcgtgaaccagctcacagcagtttccccccagcctgttgttatagacttagtgtcgggctcatctcatggtaagcctgcaaagattccgaaagaaacccaccgacaagctgctggtaccaaagatggcactcactcaaacggatcatcttccaaagcagcaaggattggcttagtatcaaggccacaccgccaaggtgataatgaggtcaccttacaagtcaagaaagaggtgctgtcagacgaggaggacttgctgccaggtgttgcggaatggaaatcaaacccttctagtcgcgccaatcccatcgtgattgacgatcaccccagtccggttgcggatgatgtgcgctccagtccgatcgtgattgacgatccctctagtcgggttgtggaggatgtagcagacgaagaagacctatcggcgttgcttcatactgagagaaaacattccctacagagtatccgagaccagccgatccaacgacacgataacttgcccagtatcatcttcaacatacctagtggctttttcaataggcgagacgaaaggaacagggacaacaagaaggaagaggcggcaacatcccgtgtgaatcatttcgcacgacatcgcggaaaggagattgaggaaaggaatggtgaccagccaggtcacagcggtcggctgtacaatactcacaaacgaactcaccaagagaagtcaattgatgctgctgagaagactgcgccaacgcagggcaccattagttccgcatacaagcctgaacgtcattcacatactgcggcaactggagcaagaggtgatctcgacactcttttaacaaaaaacttccaacgtcctttgtcggccaacaacaaccaaaagaagcgaaaagacccaggtggtaatttgacggatgggactgagtacttctcaacgaccaaatccacgaagaggtctagaatcgatcgtcaaatcacttccgaggacaggccacccgctcaattgcccaagaaaattgctgcgaatggccccaagcgtcctcgccagacaggtcaaaggaaggccgcaggcagcaaagcaactcagaaaggacaaaccagtacaccccctcagcctgccaccgtaatcaagcctgctgaaaagatcccgaggaagcctggtatcttagcatccgtctttctaaacgggaaggatccttctctagcaagtgcagaacccaagaatttgatggtggctgcaccacagtccgacttgacgatcaacgaccaacgtcttccaccaaacaattggcaaccttttaagaagaagaaaccagatgagtctcaggtgactgctccctcctcatccagagcccaagatcaaccacccgaagaacctgtggccgtagacctgtcgccattggcaccggaggaccaggaaatctacgatctcatcgcaaacaataattctgctgctgccgcggcccctatcgttctagcgatcagagaacccgagcgacgagaagagctgctcgaccagagagctcaactggaaagagcatttcaagacattgaagatggccagctcatccaagagtacgaaccgcaaagagagatcgagaaagtgccggaaacacataaatggggatatgtggtcatgtgtgccaaagatgcgaatctcctctcagacgacgaagacttggagaaattgccggccatcaggctgcgtgagttcgcagaccggaagagagcaaatgaattcttggagaaagagaccagtcctcagtcgatggaggacggcctcgaggcaattgcaaagcggagtagctgtctcacaggagatcgattactcaaggtcgacatagagttcagcactggcgaacgaaacatcttatgggtgaagcgagacaaggttaaggagctggccgaactcagtaatacacagaaaagacagaagcaatggcgtcctgcgcccaggcccaagttcaagcactacgttgtcgagtgcgagaagtacctcaaagagtacgacatacagccttaccaagaaggcgaagacagcagtgcggccctgcggcgagcttactacgccaatatgggcatccacaccaatgaaatagaggtcaccaagatggggatgcagaccttcaccgatcgagctttggccaatgcgtatgcggcgaaactgttcctcaaagaggctgcggtcccagagtacctgaaaccttcgcagctggatgtctactggtggaagacgaatgcaatcccgttcaatcagcatgccgagcagaagatctttcccgatggcctgtatgaggtggagatggaggctaaggacatgcggagtcgtgttgggtatgataagatcgtggtatttgtccgtgagattgcggacgtgagtgggcctgttaacttctagagccgggtcttcttagacggtagactaggcgcatggaacatcctttgctcatggacgtcatcccatgtcagctatggcgtttcagtgattgatgggcatgttgagggatggggatggttgctctgggataggattactgagtagcgttacagacaagtttacagtaacgctatatcatagatatatagtagcaaatcaccagcttctatatgccacacattcttcctgttatggtgaaggtatttcttgcatgtgtcttgatttgtgacaatgatattgcatgtcttgc

SEQ ID NO: 36850 - DNA, 978 bp, Muscodor strobelii
  misc_feature: SGI cDNA ID NO. 572778
  misc_feature: Encodes the peptide sequence at SEQ ID NO 36851
atggagacacaggccggtggcggcgccaatgtcagcgccgacacgcttccacgcgaaaagtcatccggcgacaaccgccaattcgagttcatcttccaggaaactctgggatgtatggtaacggctattctgatggctatgactcagcttcgcacaacccaatggactcgtctagtaggtcagagcaacgatggtaatgctaagatgaaggctctccgtcccgaagcgactcagaccagcaacttcaccggctttgagcccgttgagcctctcgagcactggaatagagtccatgatcctaacagcgctgctggtatcaggagggccgagaaacagagaaagagggcgctgcgcaacaatgacgagaatgtcgtcgagcatggtcaacttgctcatcagccccagcagcccgtactctctgctcctgagcccggcgagtatgccgaagtgaagaaggagcttgcatacagcctcatatcctttctcagagaggactggatcttcgacaacaagattaacgttttcgtagttcccggttgggctattgacgacaactggattgaagacctcgttgttccgtctccgtttccactaagagaatggagcacagattgtcgggataggtttggagagcacggcgaatatgggggaagaatcaatgactctgaatacgagaaagccaaaaggattgcaaacgacccaagcatatgccaccgacaacaagcacgatttcattgcttcatctgtaaaggcgaagtcgacaacaacacggaggtcatcaatatgtccatcttgcggtgcggccacgaatgctctggacatggtatgatcaagcactcggcaaaacacggcaaggcctactctgctgatgaggcccgcaagcatgtgatccgtcacggcggccaggttgcggagcaggaggatgacactgatgatgtggttggcgagaagacggaggtaaaaatccccttgtgctga

SEQ ID NO: 36851 - protein, 325 aa, Muscodor strobelii
  misc_feature: SGI Peptide ID NO. 572778
METQAGGGANVSADTLPREKSSGDNRQFEFIFQETLGCMVTAILMAMTQLRTTQWTRLVGQSNDGNAKMKALRPEATQTSNFTGFEPVEPLEHWNRVHDPNSAAGIRRAEKQRKRALRNNDENVVEHGQLAHQPQQPVLSAPEPGEYAEVKKELAYSLISFLREDWIFDNKINVFVVPGWAIDDNWIEDLVVPSPFPLREWSTDCRDRFGEHGEYGGRINDSEYEKAKRIANDPSICHRQQARFHCFICKGEVDNNTEVINMSILRCGHECSGHGMIKHSAKHGKAYSADEARKHVIRHGGQVAEQEDDTDDVVGEKTEVKIPLC

SEQ ID NO: 36852 - DNA, 312 bp, Muscodor strobelii
  misc_feature: SGI cDNA ID NO. 572779
  misc_feature: Encodes the peptide sequence at SEQ ID NO 36853
atggccgccacgaaacccgccacgaaacctcatggactggcatatccgttcttcgatagtaactacgagaaggcccagcaacacttcggaaagctgagatattccgttgcaagcaaaattcttgcacttaatagcaacgaaaccgatttcgagaaggttgagcggctcctccgccgtcccggcgtcttcgtcggtggtgtgactcaaaccggcgaaaatggaagcaacgaaaaaaccgcttcgtctactgctccaggccctcagacctcttcgcagcacggaactcagcctaaaacacacactgatcaataa

SEQ ID NO: 36853 - protein, 103 aa, Muscodor strobelii
  misc_feature: SGI Peptide ID NO. 572779
MAATKPATKPHGLAYPFFDSNYEKAQQHFGKLRYSVASKILALNSNETDFEKVERLLRRPGVFVGGVTQTGENGSNEKTASSTAPGPQTSSQHGTQPKTHTDQ

SEQ ID NO: 36854 - DNA, 4650 bp, Muscodor strobelii
  misc_feature: SGI cDNA ID NO. 572780
  misc_feature: Encodes the peptide sequence at SEQ ID NO 36855
ggccgtgacaagctcgcaggcaggcggcccgggtggaggcgaggcagctcgtggatcggctcgcagtggaacggcgcgcccaacggcgacgaagccgacagcccgcagcctcgaacgcccggccatcgccgccgcatctctgacatgttcaactacggaggtgcctcggacggcgacacgcccaaccctcccaccagacggcccttcctgaaccccgagagggccgccaccttcggcgcccagcggtggaagcaagtcaagcacaccctgcgcatgctaggcaagaagaagacggaccagttcgacttctacaagtcggccgagctgatggccgagcttcgtgccgtcacgcccgccgtcgtcatcctcgccagcatgctgcagcgcgacgagcacggcaacaagcgcatccccgtgctcctcgagcagctcaacatccgcgtcacccacagctactcggaagagaagaacacggccagtgacaggcacaacatgttcaccatcgccctcgagtacggcagcggcctgagtcgcatgacctggaccgtcacgcggaacttgcgagacatagtcgagatgcattacaagtacaaattgaccctcaaaaagaaccgccctctgcaggccaccaccagccagcgcggccgtcccaagcagccagcgttcccccgcaagactttcccctatcttcgtgcctatcagaaccggcacatgtccgacgaggacgagaaggctcccgtgtcgagaatagacgaggcggcggagatgacggcgggagaagggacggcgcccgaagccactgccagtgatgccgagagaagacccaatgcgggccgtaaaaagtcccgcatcaacaccttcttgccccgtcggcagtcgtcaggtctcggcgaggggcgcgaaggttccatgttgaacccccagaacgccgcggccgcccagagacggtatatcgaaaagcagcggaagacgctcgagaagtatctacaggagatgatacactggctcatgttccgccccgacagcaaccgcctgtgcaagtttctagagttgtccgcgctgggcgtgcgactagcagccgagggcaactttcacggcaaagaatgctacctacacattcagttctccaagggcattgatttcagtcgtgttctcatgccgtccaaggtcgtgtcgaagcattctcggaaatggttcctcgtgcgccagaactacattgcagtggtcgagtccccagctacgatgaatattcacgatgtgtatcttgtcgatccacgattccgcatcgaagccaaaaagagcaagctgaagcggtttggccgggccatccaaggtgatgccgagttagcaccggagggagacgaggaaccaggcggcgaaaacgctaccgagaagcatcacagtctcaagatatttaccgccgagaggaagatcaagctattttcccgaaaccagacggtacttcggcagttcgagcagtcggttgtcgacatgctgaaacagacggaatggcatatgcctcatcgattcgacagctttgcacctgttcgaaggaattgctttgcccagtggctggtcgatggtcgagactacatgtggaacgtctcccgcgctatcagcatggcccaggatgtgatttatatacatgattggtggctgagcccagagctctacatgcggaggccagcttgcatcagccagaaatggcgtcttgaccgtctacttcagagaaaagccagggagggtgtcaaaatcttcgtcatcatctaccgcaacgtggagcaggccatcccgattgattccgaatacacaaagtattccctccacaatttacatgacaacatcaccgtcctacggtcgcccaatcagctcaaaaagaatcagttcttctatgctcatcacgagaagatctgcatcgtcgaccacgatgtggctttcgtgggtggcatcgacttatgtttcggtagatgggataatccccagcatccgctcaacgacgaccggccgacgggcatggaacctaatgatggtccgcctcgcgatgccgaacactgtcagctatttcccggaaaagactactccaacccgcgcgttttggattttttcaggctcaatatgccctacgaagaaatgtacgacagagcgaggattccccgaatgccttggcacgacattgccatgcaggttattggacaacctgcaagagacttgacgcgccactttgttcaacggtggaactacctaaggcgcgagcgcaagcccacccgaccgacccctttccttcttccgccgccggacgccaatcctgttgatctcgaggctctgaatctgtcaggcacttgcgaggtccagatcttgcgctcagcgggcgactggtcgctgggattgcccaaagactatcgagaacacagtatccagacagcctacatcaaactcatcgaagagtccgagcactttgtgtacatggagaatcaattcttcatcacgagcacggaaacactcgggaccaaggtcgagaatcggatcggagatgctttagtcgcgcgtatcgtgagggcgcatgagaacgacgaagactggaggtgttgcatactgatcccgctcatgcctggcttccagaacaccgttgatcaagccgaagggagtagcgtcaggctcatcatgcagtttcagtatcgcagcatctgtcggggtccccattccatctttgggcgactagaggcgctaggtatccctcctgaggactatatctccttcttcagcttgcgcaactggggccgcttgggcaagagcaaagcgttggtgacggagcaattatatattcacgccaagactatcatcgtggatgatcgagtcgtcctcatcggttcagccaacatcaacgagcgctccatgttaggcaatcgcgattccgaaacggctgccatcgtgcgggatacagaaatgatgtggtcgacgatggctggtgagccttaccaggttggacgatttgctcatacgttgcgaatgagactcatgagagagcatctcggcttagatgtcgatcaaattacggaagacgagagaatcgcggaccagcgtaccgatgatgctgattacgaggctgagatggctcggatatacggagaagaagacggaaatgaagtcaccatcgccgagagctcagcgcaagccagcgccagggtccatctccaacggccgaacgtccaaggcggacggagcttcaaccacgatgccgtcgatcaggatgatgctcatgactcgccgcctagctcgtcttcttcctcaagctcgtcgaattctttaagaaaccaatctccagagcgcgacgaccgtgtcgatggtaatccaacccacgatgcagatgtagcagggtatggcgcagatcgctggaaggaggccgaggctcggggagccgatcttggtagtgattcaatggttatcaatggacatgaagtgctcatccatcgcccaagcggtctagggaacgtcgaggaggagacttcatcgagcagaaaggagaagaccgacaacctcagagatgatcccagcccgaatcacggcaaagagaatcagctgccgccaacattccccaccaatccaggtcaactacccacaggttcacaattcacgagtcttcccgtggtcgacgatagagacataggtggcccttctgtagtcatagatgagagcggacggcccaactacgagcccatgaacccgctcctcctagacattgaaccagccagaatcgacaaagactccatgcgagaccccgtctgccccgaattctgggatgacgtgtggagcagggtcgcacgaaacaatacgatgctgtatcgtcgcgtcttccgatgtatgccagacagcgaagtctcgacgtggaaggactatcatgagtatgatcagtacggccgcaagttctccgaagccatgttcggttcgcctagtgacgacgaggacgaaaagcacgcagccaacgtggatagcgctgcgggtggtgctgctgcgggcgtcgccgtgccagcggctgcacctctcgggcctaacctatcagagaaactcgcagagaagctcacagagaagacacactcaaacccgagcaacgtagagcctgaggcaactcctgaagctcctacaaccaacggagaatctgaaattatcaacgaaaagctgcctgcttccgattctcctgagacggagaataaggtacactcccaagtcaacactaatgtagataaacctgccgcacgagattctcacgagacagcgtctgccagtcaatccggcggtgatgttccatttccaccctttgagggacaacaacccaacattacccatctcgaaccacaccatgataaaaggggtgaccggcgaacgacgttttcggcatctgagagatcagctcccgattctaacatacacacttacaactctacacggcgtcggcgacgggctacaactaggggcagccgacgcggacccatcttcccgtacgatgtcgtgagtcgcgaggatgctgaggagctctgcggcatgatccagggtcatttggttcaatttgcctacgactggctcgaatctgaggaaaaggacaatcattggttgtaccaggcggacctgctggcgcctaaagaaatctacgattaa

SEQ ID NO: 36855 - protein, 1549 aa, Muscodor strobelii
  misc_feature: SGI Peptide ID NO. 572780
  misc_feature (937)..(964): Pfam Id: PF00614 Pfam Desc: Phospholipase D Active site motif
  misc_feature (629)..(656): Pfam Id: PF00614 Pfam Desc: Phospholipase D Active site motif
  misc_feature (1)..(1549): NCBI GI: 116201559 Blast Desc: CHGG_08664 [Chaetomium globosum CBS 148.51] gi|88177182|gb|EAQ84650.1| CHGG_08664 [Chaetomium globosum CBS 148.51]
  misc_feature (1)..(1547): NCBI GI: 46136803 Blast Desc: FG09917.1 [Gibberella zeae PH-1]
  misc_feature (1)..(1547): NCBI GI: 171677977 Blast Desc: protein product [Podospora anserina] gi|170937057|emb|CAP61716.1| protein product [Podospora anserina]
  misc_feature (1)..(1549): NCBI GI: 39973787 Blast Desc: MGG_00960 [Magnaporthe grisea 70-15] gi|145018084|gb|EDK02363.1| MGG_00960 [Magnaporthe grisea 70-15]
  misc_feature (1)..(1549): NCBI GI: 40882328 Blast Desc: related to phospholipase D [Neurospora crassa]
  misc_feature (1)..(1547): NCBI GI: 261353187 Blast Desc: phospholipase D1 [Verticillium albo-atrum VaMs.102]
  misc_feature (1)..(1172): NCBI GI: 164426645 Blast Desc: NCU03955 [Neurospora crassa OR74A] gi|157071420|gb|EAA28358.2| conserved [Neurospora crassa OR74A]
  misc_feature (1)..(1547): NCBI GI: 189193087 Blast Desc: phospholipase D1 [Pyrenophora tritici-repentis Pt-1C-BFP] gi|187978446|gb|EDU45072.1| phospholipase D1 [Pyrenophora tritici-repentis Pt-1C-BFP]
  misc_feature (73)..(1549): NCBI GI: 212545028 Blast Desc: phospholipase D1 (PLD1), [Penicillium marneffei ATCC 18224] gi|210065637|gb|EEA19731.1| phospholipase D1 (PLD1), [Penicillium marneffei ATCC 18224]
  misc_feature (1)..(1549): NCBI GI: 240104942 Blast Desc: Phospholipase D active site motif containing protein [Coccidioides posadasii C735 delta SOWgp]
GRDKLAGRRPGWRRGSSWIGSQWNGAPNGDEADSPQPRTPGHRRRISDMFNYGGASDGDTPNPPTRRPFLNPERAATFGAQRWKQVKHTLRMLGKKKTDQFDFYKSAELMAELRAVTPAVVILASMLQRDEHGNKRIPVLLEQLNIRVTHSYSEEKNTASDRHNMFTIALEYGSGLSRMTWTVTRNLRDIVEMHYKYKLTLKKNRPLQATTSQRGRPKQPAFPRKTFPYLRAYQNRHMSDEDEKAPVSRIDEAAEMTAGEGTAPEATASDAERRPNAGRKKSRINTFLPRRQSSGLGEGREGSMLNPQNAAAAQRRYIEKQRKTLEKYLQEMIHWLMFRPDSNRLCKFLELSALGVRLAAEGNFHGKECYLHIQFSKGIDFSRVLMPSKVVSKHSRKWFLVRQNYIAVVESPATMNIHDVYLVDPRFRIEAKKSKLKRFGRAIQGDAELAPEGDEEPGGENATEKHHSLKIFTAERKIKLFSRNQTVLRQFEQSVVDMLKQTEWHMPHRFDSFAPVRRNCFAQWLVDGRDYMWNVSRAISMAQDVIYIHDWWLSPELYMRRPACISQKWRLDRLLQRKAREGVKIFVIIYRNVEQAIPIDSEYTKYSLHNLHDNITVLRSPNQLKKNQFFYAHHEKICIVDHDVAFVGGIDLCFGRWDNPQHPLNDDRPTGMEPNDGPPRDAEHCQLFPGKDYSNPRVLDFFRLNMPYEEMYDRARIPRMPWHDIAMQVIGQPARDLTRHFVQRWNYLRRERKPTRPTPFLLPPPDANPVDLEALNLSGTCEVQILRSAGDWSLGLPKDYREHSIQTAYIKLIEESEHFVYMENQFFITSTETLGTKVENRIGDALVARIVRAHENDEDWRCCILIPLMPGFQNTVDQAEGSSVRLIMQFQYRSICRGPHSIFGRLEALGIPPEDYISFFSLRNWGRLGKSKALVTEQLYIHAKTIIVDDRVVLIGSANINERSMLGNRDSETAAIVRDTEMMWSTMAGEPYQVGRFAHTLRMRLMREHLGLDVDQITEDERIADQRTDDADYEAEMARIYGEEDGNEVTIAESSAQASARVHLQRPNVQGGRSFNHDAVDQDDAHDSPPSSSSSSSSSNSLRNQSPERDDRVDGNPTHDADVAGYGADRWKEAEARGADLGSDSMVINGHEVLIHRPSGLGNVEEETSSSRKEKTDNLRDDPSPNHGKENQLPPTFPTNPGQLPTGSQFTSLPVVDDRDIGGPSVVIDESGRPNYEPMNPLLLDIEPARIDKDSMRDPVCPEFWDDVWSRVARNNTMLYRRVFRCMPDSEVSTWKDYHEYDQYGRKFSEAMFGSPSDDEDEKHAANVDSAAGGAAAGVAVPAAAPLGPNLSEKLAEKLTEKTHSNPSNVEPEATPEAPTTNGESEIINEKLPASDSPETENKVHSQVNTNVDKPAARDSHETASASQSGGDVPFPPFEGQQPNITHLEPHHDKRGDRRTTFSASERSAPDSNIHTYNSTRRRRRATTRGSRRGPIFPYDVVSREDAEELCGMIQGHLVQFAYDWLESEEKDNHWLYQADLLAPKEIYD

SEQ ID NO: 36856 - DNA, 5015 bp, Muscodor strobelii
  misc_feature: SGI EST ID NO. CUFF.88011.0
  misc_feature: Variant of the nucleotide sequence at SEQ ID NO 36854
ctcgcaggcaggcggcccgggtggaggcgaggcagctcgtggatcggctcgcagtggaacggcgcgcccaacggcgacgaagccgacagcccgcagcctcgaacgcccggccatcgccgccgcatctctgacatgttcaactacggaggtgcctcggacggcgacacgcccaaccctcccaccagacggcccttcctgaaccccgagagggccgccaccttcggcgcccagcggtggaagcaagtcaagcacaccctgcgcatgctaggcaagaagaagacggaccagttcgacttctacaagtcggccgagctgatggccgagcttcgtgccgtcacgcccgccgtcgtcatcctcgccagcatgctgcagcgcgacgagcacggcaacaagcgcatccccgtgctcctcgagcagctcaacatccgcgtcacccacagctactcggaagagaagaacacggccagtgacaggcacaacatgttcaccatcgccctcgagtacggcagcggcctgagtcgcatgacctggaccgtcacgcggaacttgcgagacatagtcgagatgcattacaagtacaaattgaccctcaaaaagaaccgccctctgcaggccaccaccagccagcgcggccgtcccaagcagccagcgttcccccgcaagactttcccctatcttcgtgcctatcagaaccggcacatgtccgacgaggacgagaaggctcccgtgtcgagaatagacgaggcggcggagatgacggcgggagaagggacggcgcccgaagccactgccagtgatgccgagagaagacccaatgcgggccgtaaaaagtcccgcatcaacaccttcttgccccgtcggcagtcgtcaggtctcggcgaggggcgcgaaggttccatgttgaacccccagaacgccgcggccgcccagagacggtatatcgaaaagcagcggaagacgctcgagaagtatctacaggagatgatacactggctcatgttccgccccgacagcaaccgcctgtgcaagtttctagagttgtccgcgctgggcgtgcgactagcagccgagggcaactttcacggcaaagaatgctacctacacattcagttctccaagggcattgatttcagtcgtgttctcatgccgtccaaggtcgtgtcgaagcattctcggaaatggttcctcgtgcgccagaactacattgcagtggtcgagtccccagctacgatgaatattcacgatgtgtatcttgtcgatccacgattccgcatcgaagccaaaaagagcaagctgaagcggtttggccgggccatccaaggtgatgccgagttagcaccggagggagacgaggaaccaggcggcgaaaacgctaccgagaagcatcacagtctcaagatatttaccgccgagaggaagatcaagctattttcccgaaaccagacggtacttcggcagttcgagcagtcggttgtcgacatgctgaaacagacggaatggcatatgcctcatcgattcgacagctttgcacctgttcgaaggaattgctttgcccagtggctggtcgatggtcgagactacatgtggaacgtctcccgcgctatcagcatggcccaggatgtgatttatatacatgattggtggctgagcccagagctctacatgcggaggccagcttgcatcagccagaaatggcgtcttgaccgtctacttcagagaaaagccagggagggtgtcaaaatcttcgtcatcatctaccgcaacgtggagcaggccatcccgattgattccgaatacacaaagtattccctccacaatttacatgacaacatcaccgtcctacggtcgcccaatcagctcaaaaagaatcagttcttctatgctcatcacgagaagatctgcatcgtcgaccacgatgtggctttcgtgggtggcatcgacttatgtttcggtagatgggataatccccagcatccgctcaacgacgaccggccgacgggcatggaacctaatgatggtccgcctcgcgatgccgaacactgtcagctatttcccggaaaagactactccaacccgcgcgttttggattttttcaggctcaatatgccctacgaagaaatgtacgacagagcgaggattccccgaatgccttggcacgacattgccatgcaggttattggacaacctgcaagagacttgacgcgccactttgttcaacggtggaactacctaaggcgcgagcgcaagcccacccgaccgacccctttccttcttccgccgccggacgccaatcctgttgatctcgaggctctgaatctgtcaggcacttgcgaggtccagatcttgcgctcagcgggcgactggtcgctgggattgcccaaagactatcgagaacacagtatccagacagcctacatcaaactcatcgaagagtccgagcactttgtgtacatggagaatcaattcttcatcacgagcacggaaacactcgggaccaaggtcgagaatcggatcggagatgctttagtcgcgcgtatcgtgagggcgcatgagaacgacgaagactggaggtgttgcatactgatcccgctcatgcctggcttccagaacaccgttgatcaagccgaagggagtagcgtcaggctcatcatgcagtttcagtatcgcagcatctgtcggggtccccattccatctttgggcgactagaggcgctaggtatccctcctgaggactatatctccttcttcagcttgcgcaactggggccgcttgggcaagagcaaagcgttggtgacggagcaattatatattcacgccaagactatcatcgtggatgatcgagtcgtcctcatcggttcagccaacatcaacgagcgctccatgttaggcaatcgcgattccgaaacggctgccatcgtgcgggatacagaaatgatgtggtcgacgatggctggtgagccttaccaggttggacgatttgctcatacgttgcgaatgagactcatgagagagcatctcggcttagatgtcgatcaaattacggaagacgagagaatcgcggaccagcgtaccgatgatgctgattacgaggctgagatggctcggatatacggagaagaagacggaaatgaagtcaccatcgccgagagctcagcgcaagccagcgccagggtccatctccaacggccgaacgtccaaggcggacggagcttcaaccacgatgccgtcgatcaggatgatgctcatgactcgccgcctagctcgtcttcttcctcaagctcgtcgaattctttaagaaaccaatctccagagcgcgacgaccgtgtcgatggtaatccaacccacgatgcagatgtagcagggtatggcgcagatcgctggaaggaggccgaggctcggggagccgatcttggtagtgattcaatggttatcaatggacatgaagtgctcatccatcgcccaagcggtctagggaacgtcgaggaggagacttcatcgagcagaaaggagaagaccgacaacctcagagatgatcccagcccgaatcacggcaaagagaatcagctgccgccaacattccccaccaatccaggtcaactacccacaggttcacaattcacgagtcttcccgtggtcgacgatagagacataggtggcccttctgtagtcatagatgagagcggacggcccaactacgagcccatgaacccgctcctcctagacattgaaccagccagaatcgacaaagactccatgcgagaccccgtctgccccgaattctgggatgacgtgtggagcagggtcgcacgaaacaatacgatgctgtatcgtcgcgtcttccgatgtatgccagacagcgaagtctcgacgtggaaggactatcatgagtatgatcagtacggccgcaagttctccgaagccatgttcggttcgcctagtgacgacgaggacgaaaagcacgcagccaacgtggatagcgctgcgggtggtgctgctgcgggcgtcgccgtgccagcggctgcacctctcgggcctaacctatcagagaaactcgcagagaagctcacagagaagacacactcaaacccgagcaacgtagagcctgaggcaactcctgaagctcctacaaccaacggagaatctgaaattatcaacgaaaagctgcctgcttccgattctcctgagacggagaataaggtacactcccaagtcaacactaatgtagataaacctgccgcacgagattctcacgagacagcgtctgccagtcaatccggcggtgatgttccatttccaccctttgagggacaacaacccaacattacccatctcgaaccacaccatgataaaaggggtgaccggcgaacgacgttttcggcatctgagagatcagctcccgattctaacatacacacttacaactctacacggcgtcggcgacgggctacaactaggggcagccgacgcggacccatcttcccgtacgatgtcgtgagtcgcgaggatgctgaggagctctgcggcatgatccagggtcatttggttcaatttgcctacgactggctcgaatctgaggaaaaggacaatcattggttgtaccaggcggacctgctggcgcctaaagaaatctacgattaatggatttcgtacaactatgtgatcaatcaattgcccaattctcgtttcggtgccgtcttaaagcttctaccgctcgtgccatgtagtggcaagagaaacatcagccatgccccttatcttacaattaaacgcagctagacacataaatgggtgagagggcagaggttgcactctataatagagagatttgcataagagacatgcgcgcatatgcttttgcatcgccttggtgtttcacttggtttgactgttataatatactattactgccttctcgtcccttacattattttggcattcatgaacaacagttaggtacgtgatgtgcttggagactgatcttggacccgatatgcagtgtggccaatgagaatccg

SEQ ID NO: 36857 - DNA, 960 bp, Muscodor strobelii
  misc_feature: SGI cDNA ID NO. 572781
  misc_feature: Encodes the peptide sequence at SEQ ID NO 36858
atggttgacaaagcaaccgttattgccagcaatgatgaatttgctcggcgacgccgcaagggctgcgtggctgtcttcatgggcgccactgcaggcatcggtgaaagcactctcatgcgaatggtcaccctcttagaggattcgaccttctatgttcttgttcgcaatccaaaagacatagcaagcaagctcgaccatctgtcggagactgcctacaaacgtggcaacaaaattgtctccatcgaagcccaggtctcgctcatcggcgacatcgatgtagcatcccaacagatcacgacaactacgactaaaattgactacgtctgtttgagtcctggtgacacgaaggaaggcatagagacttgcttcgccgtctcatactactcacgacttcgcttagtgtcaaatcttttacccctcctccaacgctcgccacaacccagagtcctgtccattttgaatgggacattagaaaagctaatcgacgagagtgacgtcggtctcgacgagggttggggcattaccgctgtggtcaaccacacgactgtctgcacgagcctcgcctttgactatctctcccaaaacgacgcgggtcagaatattgtgttcctgcatgcgacgcctgggtttgtcagcaccgacacccctcgtaaaacgcgaccgtcgaaggaacatggggttgcatggtgggttttcatctcagtgatgcaggtcatttcggggtggattatctactacttcggcatgaacgtagcagagtctggtgagagacactgctatcacctgacaagcgacacctacaagcccggctcctggcaagtcgatcgccacaacgttgtaaagacaccaaacaaggccctaaagagataccaagatagtggatttgccgagaaggtctgggagcatacctcgcgcgtttgggacaaggctttgagttccagtgcatcagctcgcatgtaa

SEQ ID NO: 36858 - protein, 319 aa, Muscodor strobelii
  misc_feature: SGI Peptide ID NO. 572781
  misc_feature (1)..(312): NCBI GI: 119501781 Blast Desc: NFIA_045700 [Neosartorya fischeri NRRL 181] gi|119415813|gb|EAW25750.1| conserved [Neosartorya fischeri NRRL 181]
  misc_feature (1)..(313): NCBI GI: 154292374 Blast Desc: BC1G_14676 [Botryotinia fuckeliana B05.10] gi|150846155|gb|EDN21348.1| BC1G_14676 [Botryotinia fuckeliana B05.10]
  misc_feature (1)..(311): NCBI GI: 119494785 Blast Desc: NFIA_009810 [Neosartorya fischeri NRRL 181] gi|119412360|gb|EAW22301.1| conserved [Neosartorya fischeri NRRL 181]
  misc_feature (1)..(311): NCBI GI: 115491029 Blast Desc: conserved [Aspergillus terreus NIH2624] gi|114197002|gb|EAU38702.1| conserved [Aspergillus terreus NIH2624]
  misc_feature (1)..(310): NCBI GI: 238839983 Blast Desc: conserved [Microsporum canis CBS 113480]
  misc_feature (1)..(311): NCBI GI: 67522278 Blast Desc: AN1596.2 [Aspergillus nidulans FGSC A4] gi|40745147|gb|EAA64303.1| AN1596.2 [Aspergillus nidulans FGSC A4] gi|259486927|tpe|CBF85184.1| TPA: conserved [Aspergillus FGSC
  misc_feature (23)..(318): NCBI GI: 238498030 Blast Desc: conserved [Aspergillus flavus NRRL3357] gi|220693524|gb|EED49869.1| conserved [Aspergillus flavus NRRL3357]
  misc_feature (1)..(311): NCBI GI: 169779655 Blast Desc: [Aspergillus oryzae RIB40] gi|238500331|ref|XP_002381400.1| short-chain dehydrogenases/reductase, [Aspergillus flavus NRRL3357] protein
  misc_feature (1)..(312): NCBI GI: 242815606 Blast Desc: conserved [Talaromyces stipitatus ATCC 10500] gi|218714941|gb|EED14364.1| conserved [Talaromyces stipitatus ATCC 10500]
  misc_feature (1)..(311): NCBI GI: 154290826 Blast Desc: BC1G_15452 [Botryotinia fuckeliana B05.10] gi|150847403|gb|EDN22596.1| BC1G_15452 [Botryotinia fuckeliana B05.10]
MVDKATVIASNDEFARRRRKGCVAVFMGATAGIGESTLMRMVTLLEDSTFYVLVRNPKDIASKLDHLSETAYKRGNKIVSIEAQVSLIGDIDVASQQITTTTTKIDYVCLSPGDTKEGIETCFAVSYYSRLRLVSNLLPLLQRSPQPRVLSILNGTLEKLIDESDVGLDEGWGITAVVNHTTVCTSLAFDYLSQNDAGQNIVFLHATPGFVSTDTPRKTRPSKEHGVAWWVFISVMQVISGWIIYYFGMNVAESGERHCYHLTSDTYKPGSWQVDRHNVVKTPNKALKRYQDSGFAEKVWEHTSRVWDKALSSSASARM

SEQ ID NO: 36859 - DNA, 1195 bp, Muscodor strobelii
  misc_feature: SGI EST ID NO. CUFF.88005.0
  misc_feature: Variant of the nucleotide sequence at SEQ ID NO 36857
atgggcgccactgcaggcatcggtgaaagcactctcatgcgaatggtcaccctcttagaggattcgaccttctatgttcttgttcgcaatccaaaagacatagcaagcaagctcgaccatctgtcggagactgcctacaaacgtggcaacaaaattgtctccatcgaagcccaggtctcgctcatcggcgacatcgatgtagcatcccaacagatcacgacaactacgactaaaattgactacgtctgtttgagtcctggtggtatgccgttcggaggcgcagtttacacgaaggaaggcatagagacttgcttcgccgtctcatactactcacgacttcgcttagtgtcaaatcttttacccctcctccaacgctcgccacaacccagagtcctgtccattttgaatgggacattagaaaagctaatcgacgagagtgacgtcggtctcgacgagggttggggcattaccgctgtggtcaaccacacgactgtctgcacgagcctcgcctttgactatctctcccaaaacgacgcgggtcagaatattgtgttcctgcatgcgacgcctgggtttgtcagcaccgacacccctcgtaaaacgcgaccgtcgaaggaacatggggttgcatggtgggttttcatctcagtgatgcaggtcatttcggggtggattatctactacttcggcatgaacgtagcagagtctggtgagagacactgctatcacctgacaagcgacacctacaagcccggctcctggcaagtcgatcgccacaacgttgtaaagacaccaaacaaggccctaaagagataccaagatagtggatttgccgagaaggtctgggagcatacctcgcgcgtttgggacaaggctttgagttccagtgcatcagctcgcatgtaaattagtggctgccaatgtcttcaccccctggaggccgcagtagaataactagaggtattctgaacgcttgcaaacttggacaaattaggtaaacgttagtaatgtgaaggacaaagactctggggtttgaaatgtagatgactcaaatactttaggcctcaataaggcgctgacttgaactttcaacaccagatcgatcaaaattaagcttgctcgtgagccttgtcgtcattctattaatgcgtagagcgagtttcttcggtcgatccggatgggagctccaaactct

SEQ ID NO: 36860 - DNA, 2538 bp, Muscodor strobelii
  misc_feature: SGI cDNA ID NO. 572782
  misc_feature: Encodes the peptide sequence at SEQ ID NO 36861
atgcctcccacagcaggcaactcgccgcaatggccaccccgatcccctcacgaagcccttctcagcaccccgagtggccgcgaccgtcttcgtcgcatggccgagagaacatcgccctctccctcaccgtccaagcgcgcacaagcatctgctatacgaggcgccaaaagcctcagaaaagacgacgacatggacttcgatctagacggcgacgaggacgaggagatgctcgagctcaagttggctgccatcaaggccaagctcaagctcaagaagctccagagtgccaaggcgaagggcacccaggacccaggtgcggtccccgtacccgcattcgttaattccaggtcaataccagatcatacatctcagagtcgaacccagtctcgcgcccatacatttcagtcccaccaggtacaacgaccccagtcacaggtcgatgttcaggtacctgcttcgccggtcaggaaggtacagtcgtcgatggaggcaacgtctccgagtagagtacgactaggcatagacaaagggttgcgagcaaaggacgtctcactcaagcgtgcgccaactacgaaaagtgccctggacactgctggccctggccagggcagctatttcaagcgaccggaacctccttctctaagtagagcttcgcaggacaggcccatgtccttcagtgagaggcttgcagccgccagaactgaagagtcgtcacgtcaagagcgccaggagcgaataaaacagatcagaacaaatgccttcaaattgggcaaagacgagatggaccagctaaaacagaacgcaatggagatacccgatatacccttacaagaagagtacttcagcagggatgagatcatggccggtggaagtctaaagaggagtaacacaatgccagacatgaagaaacgagtacaaaatcaggcccaagacggaacgttcaatagcttcgatatcccgacggcaaaaccagcatctacttgtaagaagaaggtgcctccgtcggaagtcccagaagacgaggcctcagccatcgagccgtattcagccacccaactctcgaaacgaatcataccccataccacactctcacgcgaaatttccgataagaaggtctacatgatcaaagacttactaaaacatgttaaggcacctgatttccaattaccagacgtcgagcaagatatcgtagtcttcggcatcctcgcctcaaagtccgaacctagagcacaccaaaacacaggaagcaacattaaagagaagaagagccatgacccgagtcggggtaaatacatgattctcacactagtcgacctgacctgggaactgcagctcttcttatttaatagcggtttcgagcgctactggaagctcacacccggcacactaatcgccatcctaaaccccacgatcatgccgcctcctcccaacaggacagacacaggcgcattcagcctcgtgataaacagcgatgaagactccatcctagaggtcggcaccgcacgagatctagggttctgcaagagcgtcaaaaaggacggcgctcaatgtggaaaatgggtgaacagaaagcgcaccgaattctgccagttccacatgaacctcgcgctcgacaaaaaacgcctggcgagacaagacgtcaatgcgtttaacctcggattaggaccctctgagaaagggaaacataattcttatcgtttacatgattgggaagaacatgcgaatgacccgaataagaataagaggggcaattataatagagatacgcagacggcgtggtttatgcgtcctgctagtgcggcgcaggcgttagataatgaggtgctgggaggcaatgttgccggcactattgagaagaaggaggctcttaagaggagattggcgacggaggagaaggaacgggacttgatgaagaagttgggtgaggtggggagtggggccgggagggattatatgaatacggcgcagtcgagacggaaagctgctatgactaccactaccaaggacacagttgggagtagctcgagcttggatgcgggtgacgaaccaagacaacttgatgcgaagagcctaggtttgatcggcggaaagagggaaatccatctcagtcccatcaagaggaaacgtgtcgagtccacgctttcgagtcggagttccagccttgtggggtcttccatcggcactggcaccaatctcttctcctctaacaataccaaatcaacctcaaccgctgcgaaaggcaaacaggcactaggttggggtggcggtctaaaggagaaactggccaggatgaaagatggtgagaagttgaatcatgatgggagtcttgatcagtatctactcgatgccggggaagatggagaggaggagaagggcaggattagggagagtagaagtcccgccaggaaaaagacaaggtttgtgactgagagggggattaaagaggcggggagggagagcttgggaacggaattggccagtggcaaaggaaaacggctagtggagttgagtgatgaggatgagttggttattgtttga

SEQ ID NO: 36861 - protein, 845 aa, Muscodor strobelii
  misc_feature: SGI Peptide ID NO. 572782
  misc_feature (499)..(544): Pfam Id: PF09329 Pfam Desc: Primase zinc finger
  misc_feature (2)..(825): NCBI GI: 46136009 Blast Desc: FG09520.1 [Gibberella zeae PH-1]
  misc_feature (10)..(845): NCBI GI: 256727120 Blast Desc: NECHADRAFT_32786 [Nectria haematococca mpVI 77-13-4]
  misc_feature (2)..(845): NCBI GI: 261359612 Blast Desc: DNA replication licensing factor mcm10 [Verticillium albo-atrum VaMs.102]
  misc_feature (10)..(822): NCBI GI: 171682062 Blast Desc: protein product [Podospora anserina] gi|170940990|emb|CAP66640.1| protein product [Podospora anserina]
  misc_feature (10)..(845): NCBI GI: 116202199 Blast Desc: CHGG_08984 [Chaetomium globosum CBS 148.51] gi|88177502|gb|EAQ84970.1| CHGG_08984 [Chaetomium globosum CBS 148.51]
  misc_feature (2)..(825): NCBI GI: 39968779 Blast Desc: MGG_02482 [Magnaporthe grisea 70-15] gi|145013906|gb|EDJ98547.1| MGG_02482 [Magnaporthe grisea 70-15]
  misc_feature (76)..(771): NCBI GI: 85097048 Blast Desc: NCU04738 [Neurospora crassa OR74A] gi|28921862|gb|EAA31137.1| NCU04738 [Neurospora crassa OR74A] gi|39979188|emb|CAE85560.1| related to replication protein CDC23
  misc_feature (3)..(713): NCBI GI: 240108335 Blast Desc: CPC735_006810 [Coccidioides posadasii C735 delta SOWgp]
  misc_feature (11)..(710): NCBI GI: 119187067 Blast Desc: CIMG_03581 [Coccidioides immitis RS]
  misc_feature (21)..(675): NCBI GI: 226288762 Blast Desc: conserved [Paracoccidioides brasiliensis Pb18]
MPPTAGNSPQWPPRSPHEALLSTPSGRDRLRRMAERTSPSPSPSKRAQASAIRGAKSLRKDDDMDFDLDGDEDEEMLELKLAAIKAKLKLKKLQSAKAKGTQDPGAVPVPAFVNSRSIPDHTSQSRTQSRAHTFQSHQVQRPQSQVDVQVPASPVRKVQSSMEATSPSRVRLGIDKGLRAKDVSLKRAPTTKSALDTAGPGQGSYFKRPEPPSLSRASQDRPMSFSERLAAARTEESSRQERQERIKQIRTNAFKLGKDEMDQLKQNAMEIPDIPLQEEYFSRDEIMAGGSLKRSNTMPDMKKRVQNQAQDGTFNSFDIPTAKPASTCKKKVPPSEVPEDEASAIEPYSATQLSKRIIPHTTLSREISDKKVYMIKDLLKHVKAPDFQLPDVEQDIVVFGILASKSEPRAHQNTGSNIKEKKSHDPSRGKYMILTLVDLTWELQLFLFNSGFERYWKLTPGTLIAILNPTIMPPPPNRTDTGAFSLVINSDEDSILEVGTARDLGFCKSVKKDGAQCGKWVNRKRTEFCQFHMNLALDKKRLARQDVNAFNLGLGPSEKGKHNSYRLHDWEEHANDPNKNKRGNYNRDTQTAWFMRPASAAQALDNEVLGGNVAGTIEKKEALKRRLATEEKERDLMKKLGEVGSGAGRDYMNTAQSRRKAAMTTTTKDTVGSSSSLDAGDEPRQLDAKSLGLIGGKREIHLSPIKRKRVESTLSSRSSSLVGSSIGTGTNLFSSNNTKSTSTAAKGKQALGWGGGLKEKLARMKDGEKLNHDGSLDQYLLDAGEDGEEEKGRIRESRSPARKKTRFVTERGIKEAGRESLGTELASGKGKRLVELSDEDELVIV

SEQ ID NO: 36862 - DNA, 3294 bp, Muscodor strobelii
  misc_feature: SGI EST ID NO. CUFF.88008.0
  misc_feature: Variant of the nucleotide sequence at SEQ ID NO 36860
cgcaacgccaccatccgacctggactcttggtgcctgactaccccgttctggcaaagtcatttaacgtccagatgaacgtcaacaggtctcagattttatcgatattctcggctacatttgagactttggacttttgcatgctgaattctgataccctgtcgcgattgatcattggacgatagatactcaaaagcttgtttatttagcaacaggcaaacttggccgaaacactccacgagcttcacagcttgcgagctcggttctgaaacacccctccttgcatattacctggtgtaaccatcgacctacacagcacaccctaatcttcgataaccacatcaaacacagccggcgccgacttgcttgtatgctaaaagagtccatatgcgctaggacaaggatatggggtcgagaatgacacagttatcaattctcggggccatctcataacacaaggcgcaatgcctcccacagcaggcaactcgccgcaatggccaccccgatcccctcacgaagcccttctcagcaccccgagtggccgcgaccgtcttcgtcgcatggccgagagaacatcgccctctccctcaccgtccaagcgcgcacaagcatctgctatacgaggcgccaaaagcctcagaaaagacgacgacatggacttcgatctagacggcgacgaggacgaggagatgctcgagctcaagttggctgccatcaaggccaagctcaagctcaagaagctccagagtgccaaggcgaagggcacccaggacccaggtgcggtccccgtacccgcattcgttaattccaggtcaataccagatcatacatctcagagtcgaacccagtctcgcgcccatacatttcagtcccaccaggtacaacgaccccagtcacaggtcgatgttcaggtacctgcttcgccggtcaggaaggtacagtcgtcgatggaggcaacgtctccgagtagagtacgactaggcatagacaaagggttgcgagcaaaggacgtctcactcaagcgtgcgccaactacgaaaagtgccctggacactgctggccctggccagggcagctatttcaagcgaccggaacctccttctctaagtagagcttcgcaggacaggcccatgtccttcagtgagaggcttgcagccgccagaactgaagagtcgtcacgtcaagagcgccaggagcgaataaaacagatcagaacaaatgccttcaaattgggcaaagacgagatggaccagctaaaacagaacgcaatggagatacccgatatacccttacaagaagagtacttcagcagggatgagatcatggccggtggaagtctaaagaggagtaacacaatgccagacatgaagaaacgagtacaaaatcaggcccaagacggaacgttcaatagcttcgatatcccgacggcaaaaccagcatctacttgtaagaagaaggtgcctccgtcggaagtcccagaagacgaggcctcagccatcgagccgtattcagccacccaactctcgaaacgaatcataccccataccacactctcacgcgaaatttccgataagaaggtctacatgatcaaagacttactaaaacatgttaaggcacctgatttccaattaccagacgtcgagcaagatatcgtagtcttcggcatcctcgcctcaaagtccgaacctagagcacaccaaaacacaggaagcaacattaaagagaagaagagccatgacccgagtcggggtaaatacatgattctcacactagtcgacctgacctgggaactgcagctcttcttatttaatagcggtttcgagcgctactggaagctcacacccggcacactaatcgccatcctaaaccccacgatcatgccgcctcctcccaacaggacagacacaggcgcattcagcctcgtgataaacagcgatgaagactccatcctagaggtcggcaccgcacgagatctagggttctgcaagagcgtcaaaaaggacggcgctcaatgtggaaaatgggtgaacagaaagcgcaccgaattctgccagttccacatgaacctcgcgctcgacaaaaaacgcctggcgagacaagacgtcaatgcgtttaacctcggattaggaccctctgagaaagggaaacataattcttatcgtttacatgattgggaagaacatgcgaatgacccgaataagaataagaggggcaattataatagagatacgcagacggcgtggtttatgcgtcctgctagtgcggcgcaggcgttagataatgaggtgctgggaggcaatgttgccggcactattgagaagaaggaggctcttaagaggagattggcgacggaggagaaggaacgggacttgatgaagaagttgggtgaggtggggagtggggccgggagggattatatgaatacggcgcagtcgagacggaaagctgctatgactaccactaccaaggacacagttgggagtagctcgagcttggatgcgggtgacgaaccaagacaacttgatgcgaagagcctaggtttgatcggcggaaagagggaaatccatctcagtcccatcaagaggaaacgtgtcgagtccacgctttcgagtcggagttccagccttgtggggtcttccatcggcactggcaccaatctcttctcctctaacaataccaaatcaacctcaaccgctgcgaaaggcaaacaggcactaggttggggtggcggtctaaaggagaaactggccaggatgaaagatggtgagaagttgaatcatgatgggagtcttgatcagtatctactcgatgccggggaagatggagaggaggagaagggcaggattagggagagtagaagtcccgccaggaaaaagacaaggtttgtgactgagagggggattaaagaggcggggagggagagcttgggaacggaattggccagtggcaaaggaaaacggctagtggagttgagtgatgaggatgagttggttattgtttgatatgtctatgtcgggatgacaagacaggcgtgtctgacgcttggagttgggttgagctttggtgtttggttctgatctgggttgacaaacttggctcagcttggcttgggtctgaatgagagatactagttgacacgactagatcaatagcttgctaccggtggcgatgggaacggaatgcaaattgaaatatgatccggtcattcgctcggccgtcaagtgttctgtttatctactcagggtacaagataaaccccatgtctcatgtattttcctcaagcaccttaaatatcc

SEQ ID NO: 36863 - DNA, 1377 bp, Muscodor strobelii
  misc_feature: SGI cDNA ID NO. 572783
  misc_feature: Encodes the peptide sequence at SEQ ID NO 36864
atggcacgaacacgcgcaaccaaaggcgccgacacaagtgccgcggaaaaatcaagcaccacggcatcaaccagcgcatcgagacatattctctcaccatcctcccagaatccactgaagatcttcattctaccaaaaaaagcaacatcttcagcaaaaatcgtctccctcctacatccccgatactcacagccaacgcgctacctcgtctgcccagaaacaggcttctacgagttcacacgcatcgcaacacctaaatccacaccccgaagttggttaatacatcggccctcaaatgcagatggtgaaaaagtcgagacaaaaacagaaaaggatacagaagagttcaacacatacaccacatccacagcagatctcttcatcgcaacacctatcgatcccttattcctcctcctaccaactttaatcgacccaccaaagacggagaaaagaaaatacatatcatccgacgaccactttgaccggatccaggagtcttcgcctcacttatgggagatattacaatggggctcggggtcgatacgaaagctgctcgaggataggctagcagtcgtctgtgacacagtgacagcgggcgatgaacgaatgtacaagttcaacgaaaacaaactcttttcggttattcttgagaaggcgcgaagaatgagcaaaacctcactaccaacgagtatggaagagaagttcgtaacaaaggtgctagatgctccattaataggcaagaaagtcacgacaaccagcacaacgatcaccatcaccgagggagagccagatgaagcgaagatagatcaagagccaacgagcggtacttcgacgccgaagccggaggctgagagccaatcttctgtgtcttctaccgaaacgaatgcgagcttcacatccgtggcatcagtcgagaccacactcaccgagccagaagcaccagactccatgaccctccaaccagcgatgatcgcctcagacgaaataacatccctccagcgtctacgcatcgcattccaatttctctgctcttcatacataccccctaccctatccacccctctcctctcctccctctcttcctcatcttccacctcctcttctccttcaccaacaaacaccccggacttcgcaccgctagacacctatctttcttccctacaagaactcaaagccaaagcccaagcaccgatagactacggcaggaagagggtcctagatgacgatgaggccgcggaacgggcggagaagaagaggaagaaagatgaggatgagaaacgcaagaatgccgggcagagcttggcggtgaaacagttgaggaaggtggatgtgagcggtatgaagaagatgagtgatttctttaggaagaagacgtga

SEQ ID NO: 36864 - protein, 458 aa, Muscodor strobelii
  misc_feature: SGI Peptide ID NO. 572783
  misc_feature (38)..(454): Pfam Id: PF09468 Pfam Desc: Ydr279p protein family (RNase H2 complex component)
  misc_feature (1)..(457): NCBI GI: 39968781 Blast Desc: MGG_02483 [Magnaporthe grisea 70-15] gi|145013905|gb|EDJ98546.1| MGG_02483 [Magnaporthe grisea 70-15]
  misc_feature (31)..(457): NCBI GI: 156052979 Blast Desc: SS1G_06657 [Sclerotinia sclerotiorum 1980] gi|154704435|gb|EDO04174.1| SS1G_06657 [Sclerotinia sclerotiorum 1980]
  misc_feature (1)..(457): NCBI GI: 256727700 Blast Desc: NECHADRAFT_76787 [Nectria haematococca mpVI 77-13-4]
  misc_feature (31)..(457): NCBI GI: 154318449 Blast Desc: BC1G_03392 [Botryotinia fuckeliana B05.10] gi|150842915|gb|EDN18108.1| BC1G_03392 [Botryotinia fuckeliana B05.10]
  misc_feature (1)..(457): NCBI GI: 46136007 Blast Desc: FG09519.1 [Gibberella zeae PH-1]
  misc_feature (1)..(396): NCBI GI: 261359611 Blast Desc: conserved [Verticillium albo-atrum VaMs.102]
  misc_feature (29)..(458): NCBI GI: 85097055 Blast Desc: NCU04740 [Neurospora crassa OR74A] gi|28921864|gb|EAA31139.1| [Neurospora crassa OR74A] gi|39979189|emb|CAE85561.1| [Neurospora crassa]
  misc_feature (1)..(256): NCBI GI: 116202201 Blast Desc: CHGG_08985 [Chaetomium globosum CBS 148.51] gi|88177503|gb|EAQ84971.1| CHGG_08985 [Chaetomium globosum CBS 148.51]
  misc_feature (31)..(456): NCBI GI: 169609753 Blast Desc: SNOG_07969 [Phaeosphaeria nodorum SN15] gi|111063125|gb|EAT84245.1| SNOG_07969 [Phaeosphaeria nodorum SN15]
  misc_feature (27)..(456): NCBI GI: 238838194 Blast Desc: conserved [Microsporum canis CBS 113480]
MARTRATKGADTSAAEKSSTTASTSASRHILSPSSQNPLKIFILPKKATSSAKIVSLLHPRYSQPTRYLVCPETGFYEFTRIATPKSTPRSWLIHRPSNADGEKVETKTEKDTEEFNTYTTSTADLFIATPIDPLFLLLPTLIDPPKTEKRKYISSDDHFDRIQESSPHLWEILQWGSGSIRKLLEDRLAVVCDTVTAGDERMYKFNENKLFSVILEKARRMSKTSLPTSMEEKFVTKVLDAPLIGKKVTTTSTTITITEGEPDEAKIDQEPTSGTSTPKPEAESQSSVSSTETNASFTSVASVETTLTEPEAPDSMTLQPAMIASDEITSLQRLRIAFQFLCSSYIPPTLSTPLLSSLSSSSSTSSSPSPTNTPDFAPLDTYLSSLQELKAKAQAPIDYGRKRVLDDDEAAERAEKKRKKDEDEKRKNAGQSLAVKQLRKVDVSGMKKMSDFFRKKT

SEQ ID NO: 36865 - DNA, 582 bp, Muscodor strobelii
  misc_feature: SGI cDNA ID NO. 572784
  misc_feature: Encodes the peptide sequence at SEQ ID NO 36866
atgtcggaccctggagacaattccgaccccgaactttttgattcacccaccgaagacaaaacccccaaggaccgacccaagactcctaacgataacaacagccagcgctacgaaaatgccgaagaagcgcgtgaggccgctttacgtcgtgaattggacggcgtccgaaacatcaacgagctgatcgagggtgtcgtggggaccctcgagcgggccaagggcaatatgaagacagtatcgaatacagtaacaacagcctcaacactcctcaacacatggacacgtattttatcgcaaacagagcacaaccagcggctactcctaacgccgacgtggaaaggcgcatcggctgacattgcggccgccgagagcgaggctgcagcaaaggccgctgcggcagaacgaagagctgctgaagaggaacgaagaaaagtcgagttcagacgcaaggctgatgaggatcgagctgcaagggagagtgccgcttctgccacttcgactacctcaacaactagggcaagagggcgatttgatacccaacaccacacatccaacaacggcacatgtgcgctgcctttctga

SEQ ID NO: 36866 - protein, 193 aa, Muscodor strobelii
  misc_feature: SGI Peptide ID NO. 572784
  misc_feature (46)..(123): Pfam Id: PF08651 Pfam Desc: DASH complex subunit Duo1
  misc_feature (6)..(177): NCBI GI: 226284134 Blast Desc: conserved [Paracoccidioides brasiliensis Pb01]
  misc_feature (1)..(129): NCBI GI: 116202203 Blast Desc: CHGG_08986 [Chaetomium globosum CBS 148.51] gi|88177504|gb|EAQ84972.1| CHGG_08986 [Chaetomium globosum CBS 148.51]
  misc_feature (6)..(174): NCBI GI: 67537582 Blast Desc: AN4961.2 [Aspergillus nidulans FGSC A4] gi|40741849|gb|EAA61039.1| AN4961.2 [Aspergillus nidulans FGSC A4] gi|259482167|tpe|CBF76390.1| TPA: DASH complex subunit Duo1,
  misc_feature (1)..(136): NCBI GI: 261359610 Blast Desc: conserved [Verticillium albo-atrum VaMs.102]
  misc_feature (8)..(191): NCBI GI: 119187063 Blast Desc: CIMG_03579 [Coccidioides immitis RS]
  misc_feature (17)..(153): NCBI GI: 255936827 Blast Desc: Pc13g10180 [Penicillium chrysogenum Wisconsin 54-1255] gi|211584060|emb|CAP92087.1| Pc13g10180 [Penicillium chrysogenum Wisconsin 54-1255]
  misc_feature (39)..(180): NCBI GI: 238838191 Blast Desc: conserved [Microsporum canis CBS 113480]
  misc_feature (6)..(129): NCBI GI: 156052981 Blast Desc: SS1G_06658 [Sclerotinia sclerotiorum 1980] gi|154704436|gb|EDO04175.1| SS1G_06658 [Sclerotinia sclerotiorum 1980]
  misc_feature (11)..(133): NCBI GI: 212527000 Blast Desc: DASH complex subunit Duo1, [Penicillium marneffei ATCC 18224] gi|210073055|gb|EEA27142.1| DASH complex subunit Duo1, [Penicillium marneffei ATCC 18224]
  misc_feature (6)..(139): NCBI GI: 121705532 Blast Desc: conserved [Aspergillus clavatus NRRL 1] gi|119399175|gb|EAW09603.1| conserved [Aspergillus clavatus NRRL 1]
MSDPGDNSDPELFDSPTEDKTPKDRPKTPNDNNSQRYENAEEAREAALRRELDGVRNINELIEGVVGTLERAKGNMKTVSNTVTTASTLLNTWTRILSQTEHNQRLLLTPTWKGASADIAAAESEAAAKAAAAERRAAEEERRKVEFRRKADEDRAARESAASATSTTSTTRARGRFDTQHHTSNNGTCALPF

SEQ ID NO: 36867 - DNA, 3071 bp, Muscodor strobelii
  misc_feature: SGI EST ID NO. CUFF.88017.1
  misc_feature: Variant of the nucleotide sequence at SEQ ID NO 36865
gccagcgtatgtcaacaaagctgtcctcgattcagcctgtgccgtcctaagtcacaactcgccaaatgtaacagaagaccctgatcctatcgttgctgctgctattgtctaatcatacgtcactgtttcaataagtgtctctcaactccagatattttgatcccttggtgcatcccacccaactaagcccccgccttggcatccatcccccacctacgtagctcacgtctcaacgtcgtactgtacagtagtatcaacaacgtctcgaccctggaccctcacagccttaccgtctaccggacttgtttctgaaatctcgtcatcatcccggctcttcccagtagctagctacttagcctcgagccaaaacaagaaataccacatccatcaattacagacaaacgccctatcctatattacacattaagctcaaaatgtcggaccctggagacaattccgaccccgaactttttgattcacccaccgaagacaaaacccccaaggaccgacccaagactcctaacgataacaacagccagcgctacgaaaatgccgaagaagcgcgtgaggccgctttacgtcgtgaattggacggcgtccgaaacatcaacgagctgatcgagggtgtcgtggggaccctcgagcgggccaagggcaatatgaagacagtatcgaatacagtaacaacagcctcaacactcctcaacacatggacacgtattttatcgcaaacagagcacaaccagcggctactcctaacgccgacgtggaaaggcgcatcggctgacattgcggccgccgagagcgaggctgcagcaaaggccgctgcggcagaacgaagagctgctgaagaggaacgaagaaaagtcgagttcagacgcaaggctgatgaggatcgagctgcaagggagagtgccgcttctgccacttcgactacctcaacaactagggcaagaggtacgacgagagggttgagagctagtcggagcgttagggggcgggggactactgggacgacgaggggaaccgcgacgactgcgaggagtgtgagtacgagtgcgacggcgagtagtgcaaatacgtccacagcggccgactcgagtattgcgagtgctaggagcaactccaagatcgggcgggcgtttttacgtgctgggtcgagagggacgagggggtactgaacgtgaggggatatgataatctcacgattggagcattaaaacgtcggagacctgatgatggagtgctgtacatatccacgacatttcctcttggtctctgcgtacatcctacagacacgagcagttcatacacagagatccatactaaaacaacgccatgtagggcgatttgatacccaacaccacacatccaacaacggcacatgtgcgctgcctttctgatttccagtcccacaaattgcccatacccaaatctccatccaaacctcaaccgcccattccctttcctcccctatcacaccatagtccaatgccatggccagatgcctgattcccacctcatgtccctttcctccaccaactcacgtcttcttcctaaagaaatcactcatcttcttcataccgctcacatccaccttcctcaactgtttcaccgccaagctctgcccggcattcttgcgtttctcatcctcatctttcttcctcttcttctccgcccgttccgcggcctcatcgtcatctaggaccctcttcctgccgtagtctatcggtgcttgggctttggctttgagttcttgtagggaagaaagataggtgtctagcggtgcgaagtccggggtgtttgttggtgaaggagaagaggaggtggaagatgaggaagagagggaggagaggagaggggtggatagggtagggggtatgtatgaagagcagagaaattggaatgcgatgcgtagacgctggagggatgttatttcgtctgaggcgatcatcgctggttggagggtcatggagtctggtgcttctggctcggtgagtgtggtctcgactgatgccacggatgtgaagctcgcattcgtttcggtagaagacacagaagattggctctcagcctccggcttcggcgtcgaagtaccgctcgttggctcttgatctatcttcgcttcatctggctctccctcggtgatggtgatcgttgtgctggttgtcgtgactttcttgcctattaatggagcatctagcacctttgttacgaacttctcttccatactcgttggtagtgaggttttgctcattcttcgcgccttctcaagaataaccgaaaagagtttgttttcgttgaacttgtacattcgttcatcgcccgctgtcactgtgtcacagacgactgctagcctatcctcgagcagctttcgtatcgaccccgagccccattgtaatatctcccataagtgaggcgaagactcctggatccggtcaaagtggtcgtcggatgatatgtattttcttttctccgtctttggtgggtcgattaaagttggtaggaggaggaataagggatcgataggtgttgcgatgaagagatctgctgtggatgtggtgtatgtgttgaactcttctgtatccttttctgtttttgtctcgactttttcaccatctgcatttgagggccgatgtattaaccaacttcggggtgtggatttaggtgttgcgatgcgtgtgaactcgtagaagcctgtttctgggcagacgaggtagcgcgttggctgtgagtatcggggatgtaggagggagacgatttttgctgaagatgttgctttttttggtagaatgaagatcttcagtggattctgggaggatggtgagagaatatgtctcgatgcgctggttgatgccgtggtgcttgatttttccgcggcacttgtgtcggcgcctttggttgcgcgtgttcgtgccatcttggattatgtatcgccaaatatggcggggataccgcaattaggtcttgcagcacttgttcatatttatgttggtcaattgacaccaaagttttgcgacgaaccaaaagaactacgatcaatccaaccctcgaatttgtgatgttgtgcg

SEQ ID NO: 36868 - DNA, 1284 bp, Muscodor strobelii
  misc_feature: SGI cDNA ID NO. 572785
  misc_feature: Reduced expression when VOC is produced
  misc_feature: Encodes the peptide sequence at SEQ ID NO 36869
atggcctcagctcttgctgcatcaaccccctccacaccacctccacctggtagaatccacactccagataccccccgactaggctacggtgacaactgggagccttactcacctcgtcgccgatctccacgcttctcttccaatcgcactccttcacccacctcgtcgtcgcatccagtttcccgcacctcccgccagtccaccacctcttctctctcaaacttctccacccctgccatgtcgccgcgcaaaaagcgcgctcctgccatggactcggtccgtcgcgcatccggcgctctgactgccgagagcacttccaatgccgctgatgcactgggtctcaactccaagctcgcctcatctaactctaaggccatggacgccatgcccaccacccagagcttcggcatgcccacgcccgccaagacaccgcgcaagcagcctgacgctaagctcgagattgcttcccgtgctgtcgcgcgcaatctgttcgtcgacgacgccgatatcttgtcgcccaagaagaaacccagaaagtcttactctggcattggtctcgatagcttcgccgctgaagatgttgaggagaacatcgagattttcaccgactccatcgaccgcgttcctgaggtcgacaacagtgccgataatcctttctacggtcccggctccaccacagccgaggagccttcaaagcgccgcagtaagcgcaaggtcaccattcccggcgaaggcaagaagcccgtagaggaggctgttggtcgagacgacggcatgctctatgtcttccgtggaaagcgggtctaccgcaaattctcagagaccaattctgacgaggcatctggtgccgaagatgagactgagaccgagcgccagcctcggatgactcgcgcttccatcaagccccgccgtctcttcgctcccacccccaagggcaaagagcctgctacctcgtcaacccttgaggacgaagaggctttgactgacatcgaggcccccgatcacgaagatgccaaggtagatattgtcacgaccccagttactacagaagacaagcccgatacgcccaaggctcctcgttttgcacctgcttcgcccccttcgaccacccgcgtgacgcgttctgtcgacaagctgcggtctgctaacacgcccatgccccgcccccgcagtccctttgatggctggcgaagatctaagagtggctccgagggccacggacagaagagggacggagagcctctagctcgccccgccgccagcacgaagcgtgcccgagcttag

SEQ ID NO: 36869 - protein, 427 aa, Muscodor strobelii
  misc_feature: SGI Peptide ID NO. 572785
  misc_feature (3)..(401): NCBI GI: 261359609 Blast Desc: conserved [Verticillium albo-atrum VaMs.102]
  misc_feature (6)..(416): NCBI GI: 256727699 Blast Desc: NECHADRAFT_99364 [Nectria haematococca mpVI 77-13-4]
  misc_feature (1)..(427): NCBI GI: 116202205 Blast Desc: CHGG_08987 [Chaetomium globosum CBS 148.51] gi|88177505|gb|EAQ84973.1| CHGG_08987 [Chaetomium globosum CBS 148.51]
  misc_feature (11)..(415): NCBI GI: 46136003 Blast Desc: FG09517.1 [Gibberella zeae PH-1]
  misc_feature (1)..(426): NCBI GI: 171682060 Blast Desc: protein product [Podospora anserina] gi|170940989|emb|CAP66639.1| protein product [Podospora anserina]
  misc_feature (5)..(426): NCBI GI: 156052983 Blast Desc: SS1G_06659 [Sclerotinia sclerotiorum 1980] gi|154704437|gb|EDO04176.1| SS1G_06659 [Sclerotinia sclerotiorum 1980]
  misc_feature (6)..(426): NCBI GI: 85097061 Blast Desc: NCU04742 [Neurospora crassa OR74A] gi|28921866|gb|EAA31141.1| [Neurospora crassa OR74A] gi|39979191|emb|CAE85563.1| [Neurospora crassa]
  misc_feature (11)..(420): NCBI GI: 145252422 Blast Desc: An16g04130 [Aspergillus niger] gi|134083275|emb|CAK46830.1| protein product [Aspergillus niger]
  misc_feature (19)..(426): NCBI GI: 154318445 Blast Desc: BC1G_03390 [Botryotinia fuckeliana B05.10] gi|150842913|gb|EDN18106.1| BC1G_03390 [Botryotinia fuckeliana B05.10]
  misc_feature (18)..(400): NCBI GI: 39968785 Blast Desc: MGG_02485 [Magnaporthe grisea 70-15] gi|145013903|gb|EDJ98544.1| MGG_02485 [Magnaporthe grisea 70-15]
  misc_feature: Useful for introducing or modulating the production of volatile compounds
MASALAASTPSTPPPPGRIHTPDTPRLGYGDNWEPYSPRRRSPRFSSNRTPSPTSSSHPVSRTSRQSTTSSLSNFSTPAMSPRKKRAPAMDSVRRASGALTAESTSNAADALGLNSKLASSNSKAMDAMPTTQSFGMPTPAKTPRKQPDAKLEIASRAVARNLFVDDADILSPKKKPRKSYSGIGLDSFAAEDVEENIEIFTDSIDRVPEVDNSADNPFYGPGSTTAEEPSKRRSKRKVTIPGEGKKPVEEAVGRDDGMLYVFRGKRVYRKFSETNSDEASGAEDETETERQPRMTRASIKPRRLFAPTPKGKEPATSSTLEDEEALTDIEAPDHEDAKVDIVTTPVTTEDKPDTPKAPRFAPASPPSTTRVTRSVDKLRSANTPMPRPRSPFDGWRRSKSGSEGHGQKRDGEPLARPAASTKRARA

SEQ ID NO: 36870 - DNA, 2476 bp, Muscodor strobelii
  misc_feature: SGI EST ID NO. CUFF.88013.0
  misc_feature: Variant of the nucleotide sequence at SEQ ID NO 36868
cccgactccaatcttgacataacccactctctcccagttcccacatgtcaacctcatccttcatcattcatatcacctcactctcagccaaacatacgcatacgacacaacatcgtccaacgatcgctcttttgaattgtttgactgtcgctgtagtcgatacttatatcgcatcaccaagacagttctactattccgctttcagtcgactcaaaacatcccttttgaccggtagaatacacgatcaccagtagtctcaacgccatcaaaactctagcaaagagccgacacatcttgactagagcatctgtcattcatcgcgtcgcatagcttcttgaggcgcgcatccgtctgattgttactgctctacacaggaaagagggcgtctgatatctgtctacaaacgacgacgtcgccaatcgattgcgatcacccgccgtcatctgatcttactttggcgcatcgacctcgatttggacacgcaccaatacgaacggcgcatagggtaacagtgtaggaaatctgaagttcaagtcaagtcttaagagagaacggacagtggccagttgtagcgaggggttacagcacgctgaagcacgtgctgggcaaccctcatccaaatttcaatttgcctaccttcccacttcccaatttctttcttgctcacaaccatggcctcagctcttgctgcatcaaccccctccacaccacctccacctggtagaatccacactccagataccccccgactaggctacggtgacaactgggagccttactcacctcgtcgccgatctccacgcttctcttccaatcgcactccttcacccacctcgtcgtcgcatccagtttcccgcacctcccgccagtccaccacctcttctctctcaaacttctccacccctgccatgtcgccgcgcaaaaagcgcgctcctgccatggactcggtccgtcgcgcatccggcgctctgactgccgagagcacttccaatgccgctgatgcactgggtctcaactccaagctcgcctcatctaactctaaggccatggacgccatgcccaccacccagagcttcggcatgcccacgcccgccaagacaccgcgcaagcagcctgacgctaagctcgagattgcttcccgtgctgtcgcgcgcaatctgttcgtcgacgacgccgatatcttgtcgcccaagaagaaacccagaaagtcttactctggcattggtctcgatagcttcgccgctgaagatgttgaggagaacatcgagattttcaccgactccatcgaccgcgttcctgaggtcgacaacagtgccgataatcctttctacggtcccggctccaccacagccgaggagccttcaaagcgccgcagtaagcgcaaggtcaccattcccggcgaaggcaagaagcccgtagaggaggctgttggtcgagacgacggcatgctctatgtcttccgtggaaagcgggtctaccgcaaattctcagagaccaattctgacgaggcatctggtgccgaagatgagactgagaccgagcgccagcctcggatgactcgcgcttccatcaagccccgccgtctcttcgctcccacccccaagggcaaagagcctgctacctcgtcaacccttgaggacgaagaggctttgactgacatcgaggcccccgatcacgaagatgccaaggtagatattgtcacgaccccagttactacagaagacaagcccgatacgcccaaggctcctcgttttgcacctgcttcgcccccttcgaccacccgcgtgacgcgttctgtcgacaagctgcggtctgctaacacgcccatgccccgcccccgcagtccctttgatggctggcgaagatctaagagtggctccgagggccacggacagaagagggacggagagcctctagctcgccccgccgccagcacgaagcgtgcccgagcttaggatgctcaataaagcgacgaatcatacgaccacatggaccgacctccggtcttgcatggcctccctacagtggcatcatcacgactgctcattcatttctttcatttcttagccaatcgagccagaattggtgctgtaccaagtttgattcaagggtgtttcttagggagctggttatgggctcatgcgacagtcgcgatacgaaagagagaggaaaaagcatctttcttgcaagaggcgttgggtgttgagcactagggtatgatgacatgacgacaacaaggttggatgcggattattgtgcttccaaggacatgaggatgcatcatgtgctgctttcagagagattgcatacggcttcaggttgaaaaagaagcaggacagggctaatgagggagctgaggagagggtatggataacttgcacctaatctaactagcctgcgactcccagagcttttgcacatacgacttgttgtgtcacctaggtagatgacaattgatcattgcatcatgacaatt

SEQ ID NO: 36871 - DNA, 1002 bp, Muscodor strobelii
  misc_feature: SGI cDNA ID NO. 572786
  misc_feature: Reduced expression when VOC is produced
  misc_feature: Encodes the peptide sequence at SEQ ID NO 36872
atgcacatcctcgtaacaaacgacgacggacctcccggccccgcctcgccatacgtccacgcactcgtccgcggcctacaaaaagcaggccacacagtatcggtctgcctccccgacacccaacgctcctggataggaaaagcacacatgatcggccagaccgtgaagcccatctactaccggccctcccccacctacgacccagcatcttcctctccgcaaggaacaacacatccctacccttccaaatcttctagtacagaagaatgggtcctcgttgacggcacaccagcgagttgcgcacagatcggtctacaccacgtgtttaaacatagaggggaagtcgacctagtagtgagcggtccgaatttcggcaggaattccacggcattgttcgcgttgagtagtggtacgctgggcgctgcgctcgaggcgggtgtgtgtaggaggaaggctatcgcgcttagctatgcgcattttatgacggtgcagaatccgagagaacacggcattattgataccgcgacgagacatagtgtgaaggtcatcgaggcgctatacagacagtggccggaagatggcagtgtggatgtgtatacggtgaatgttccactgctccctggattgggtgaggggaagggagggaaggtggtttttacgaacatgcttcagaattattggggtgcgggaggcacctgttttgttgaggttgaggggagtactggtggggaggaggaggaagaggagagtatcagggaggaggagggggttggtgagaatgggaatggtgaggaggagagaagggtgggagaaagcggtgggttggtgcataggcattttaagtggaagcctaggtttgaggatgtgtatcagagtgtggaggatgcgccgcctgggaatgatgggtgggcggttaaggaggggttcacgagtgtcacgcccatcaaagcgaatttctggccggcggcccaacatctccatggcacagaactgaaattgtga

SEQ ID NO: 36872 - protein, 333 aa, Muscodor strobelii
  misc_feature: SGI Peptide ID NO. 572786
  misc_feature (1)..(227): Pfam Id: PF01975 Pfam Desc: Survival protein SurE
  misc_feature (93)..(156): Pfam Id: PF01975 Pfam Desc: Survival protein SurE
  misc_feature (1)..(333): NCBI GI: 85097065 Blast Desc: NCU04743 [Neurospora crassa OR74A] gi|28921867|gb|EAA31142.1| NCU04743 [Neurospora crassa OR74A] gi|39979192|emb|CAE85564.1| conserved [Neurospora crassa]
  misc_feature (1)..(333): NCBI GI: 171682058 Blast Desc: protein product [Podospora anserina] gi|170940988|emb|CAP66638.1| protein product [Podospora anserina]
  misc_feature (1)..(333): NCBI GI: 39968787 Blast Desc: MGG_02486 [Magnaporthe grisea 70-15] gi|145013902|gb|EDJ98543.1| MGG_02486 [Magnaporthe grisea 70-15]
  misc_feature (1)..(333): NCBI GI: 116202207 Blast Desc: CHGG_08988 [Chaetomium globosum CBS 148.51] gi|88177506|gb|EAQ84974.1| CHGG_08988 [Chaetomium globosum CBS 148.51]
  misc_feature (1)..(333): NCBI GI: 156052985 Blast Desc: SS1G_06660 [Sclerotinia sclerotiorum 1980] gi|154704438|gb|EDO04177.1| SS1G_06660 [Sclerotinia sclerotiorum 1980]
  misc_feature (1)..(315): NCBI GI: 154318443 Blast Desc: BC1G_03389 [Botryotinia fuckeliana B05.10] gi|150842912|gb|EDN18105.1| BC1G_03389 [Botryotinia fuckeliana B05.10]
  misc_feature (1)..(319): NCBI GI: 67537594 Blast Desc: AN4967.2 [Aspergillus nidulans FGSC A4] gi|40741855|gb|EAA61045.1| AN4967.2 [Aspergillus nidulans FGSC A4] gi|259482161|tpe|CBF76378.1| TPA: acid phosphatase, nidulans
  misc_feature (1)..(326): NCBI GI: 46136001 Blast Desc: FG09516.1 [Gibberella zeae PH-1]
  misc_feature (1)..(319): NCBI GI: 169614624 Blast Desc: SNOG_10458 [Phaeosphaeria nodorum SN15] gi|111060732|gb|EAT81852.1| SNOG_10458 [Phaeosphaeria nodorum SN15]
  misc_feature (1)..(323): NCBI GI: 242782297 Blast Desc: acid phosphatase, [Talaromyces stipitatus ATCC 10500] gi|218720118|gb|EED19537.1| acid phosphatase, [Talaromyces stipitatus ATCC 10500]
  misc_feature (1)..(193): SWISSPROT Homolog: EC 3.1.3.5 5'-nucleotidase
  misc_feature: Useful for introducing or modulating the production of volatile compounds
MHILVTNDDGPPGPASPYVHALVRGLQKAGHTVSVCLPDTQRSWIGKAHMIGQTVKPIYYRPSPTYDPASSSPQGTTHPYPSKSSSTEEWVLVDGTPASCAQIGLHHVFKHRGEVDLVVSGPNFGRNSTALFALSSGTLGAALEAGVCRRKAIALSYAHFMTVQNPREHGIIDTATRHSVKVIEALYRQWPEDGSVDVYTVNVPLLPGLGEGKGGKVVFTNMLQNYWGAGGTCFVEVEGSTGGEEEEEESIREEEGVGENGNGEEERRVGESGGLVHRHFKWKPRFEDVYQSVEDAPPGNDGWAVKEGFTSVTPIKANFWPAAQHLHGTELKL

SEQ ID NO: 36873 - DNA, 3456 bp, Muscodor strobelii
  misc_feature: SGI EST ID NO. CUFF.88166.0
  misc_feature: Variant of the nucleotide sequence at SEQ ID NO 36871
tttggaaggagttacgcggcactcacgtcacttcctgacccgatgtcgagatggagacctggggaacttgacccgagaattgcccctcccccaccatgcatttttgtatatgaatcctccacaaatcgcccgaatcccaccaacgctcccaacctcaacccgacattttccttgtctactgctctgctcttacttgactgtggcacaggcggaaacaagctgatttcccggtctaattatatcggcggtcactgatttactccaaaccccgtcacacagttgacctttcccaccacacttccgactccatctcttgacaaccaacaccaaccattcgctcctcaaacgacccgatcatcacgatgcacatcctcgtaacaaacgacgacggacctcccggccccgcctcgccatacgtccacgcactcgtccgcggcctacaaaaagcaggccacacagtatcggtctgcctccccgacacccaacgctcctggataggaaaagcacacatgatcggccagaccgtgaagcccatctactaccggccctcccccacctacgacccagcatcttcctctccgcaaggaacaacacatccctacccttccaaatcttctagtacagaagaatgggtcctcgttgacggcacaccagcgagttgcgcacagatcggtctacaccacgtgtttaaacatagaggggaagtcgacctagtagtgagcggtccgaatttcggcaggaattccacggcattgttcgcgttgagtagtggtacgctgggcgctgcgctcgaggcgggtgtgtgtaggaggaaggctatcgcgcttagctatgcgcattttatgacggtgcagaatccgagagaacacggcattattgataccgcgacgagacatagtgtgaaggtcatcgaggcgctatacagacagtggccggaagatggcagtgtggatgtgtatacggtgaatgttccactgctccctggattgggtgaggggaagggagggaaggtggtttttacgaacatgcttcagaattattggggtgcgggaggcacctgttttgttgaggttgaggggagtactggtggggaggaggaggaagaggagagtatcagggaggaggagggggttggtgagaatgggaatggtgaggaggagagaagggtgggagaaagcggtgggttggtgcataggcattttaagtggaagcctaggtttgaggatgtgtatcagagtgtggaggatgcgccgcctgggaatgatgggtgggcggttaaggaggggttcacgagtgtcacgcccatcaaagcgaatttctggccggcggcccaacatctccatggcacagaactgaaattgtgagtcttgcatcgcacttggtttatagaagcgaattcgggttgcatttccacactgtccatcattgtttcggggaggtctttcgatctatattataaacaaaagcgccaagggcatataggcatctagaaagagggttagacaagttctagacacaaacgtggggttgaggtgtccgctttgcattgttcagcgtctggaaaaccatgtatcttacttttttttctttctatagggaagataaacaaactcagaatatcacacaacctcaaccttcctcatccatgccttcgctggacacgaatctagtcatgcgaccaaaagactacttctacgcactagtgcactacgaagatccttatgtccagccgctgatcctaaacgccctttcgaagatcttcccaccggaatcttatacacttctatctcctcttactacttcctctcacaactcgacctccaacgacgaaccgatttctctatcctcccttttaccaactgcgtcatcaaaagtcctccagataacgcagtatgagaaaatagactgggacttcgtggcggaccacgaatcaacggcaacagttaacagttatatgttgagaaaggcattgataaggaaacattacctagcctctacggttgagcactgggttgcgaaacgacctgatagcgttctggccaagagtgtgagaaggggagaggcgtttgagcttgattttgcggagttccttgatgaggcgctggttgaggcttgggacttgaacgctagtttggggaggaatgaggagcgtctgggagctggtcggagtgatgggctggagtggtggattctcaaaccggggatgagtgatcgtggacagggtattaggttgtttgctacgatggggcaacttcaggggatttttgatgggtgggaggttggtagtgatgacgaggacgaagatgaggaggagaaatcagaatctcagtctcaacccgacgcgcaaaaggacgacgacgttgacgacagagataacatcccgacatcgcaacttcgacatttcgttgcacagccttatatcgatcgtccgctcctactccccggcgacgggagaaaatttcatatcaggacttatgctgcgtgtgtgggcagtctagaggtctacgtgtacagacatatgcttgcgctttttgcagggaagacgtatgtcccgccaaagtaccacggtaagaacggcggcgatgtgggggatggcgcggatggggtgagagatgatggagatgaaaaagatgagaacgatgcggagattgacctagaggctcatctcacgaacacttgccttcagaggagtgtaaaagatgggagcgtgaggttattttgggatttggatattcctgcgtctccgcatacagcaccaacatccaacggcatatcaacatcgatcagctcttcaactaacgccgcatcttctactaacacctcctccccagcgaaatcagccaaatcagcagaccccaaaactcaaatattcaaccaaatcctcgagataacaggagaagtcttcgaagcagccgcaagaggcatgcagatgcactttcgacccctatcgaacgccttcgagatctttgggttggatttcctggtcgatgagatggggcaggtgtttttgcttgaggttaatagttttccggatttcaaacagactggtgatgagcttagggatcttgttgcgggactttgggagggggttttaaggaaggttatgtttgggaatggggagggtataattggggggaaagataggaatggggagagagtggaaggggaggagggatggaaggggaatggggaggatttggtgcttgttagacgggttgggttgggttggtgattgtcgtgtgtgtagtctggagtgagtggttgatagagtgacatactgggcttggctgagatacagaaaatggaaatggttctttagtattctacctttctattttaagtcatcttcgaagatggaaattgagaagaactaatgacgcacggaattagctgtggtgcatccattgttctatcatccagccataggagctttcccgctgacatattacctcgtca

SEQ ID NO: 36874 - DNA, 1560 bp, Muscodor strobelii
  misc_feature: SGI cDNA ID NO. 572787
  misc_feature: Encodes the peptide sequence at SEQ ID NO 36875
atgcgaccaaaagactacttctacgcactagtgcactacgaagatccttatgtccagccgctgatcctaaacgccctttcgaagatcttcccaccggaatcttatacacttctatctcctcttactacttcctctcacaactcgacctccaacgacgaaccgatttctctatcctcccttttaccaactgcgtcatcaaaagtcctccagataacgcagtatgagaaaatagactgggacttcgtggcggaccacgaatcaacggcaacagttaacagttatatgttgagaaaggcattgataaggaaacattacctagcctctacggttgagcactgggttgcgaaacgacctgatagcgttctggccaagagtgtgagaaggggagaggcgtttgagcttgattttgcggagttccttgatgaggcgctggttgaggcttgggacttgaacgctagtttggggaggaatgaggagcgtctgggagctggtcggagtgatgggctggagtggtggattctcaaaccggggatgagtgatcgtggacagggtattaggttgtttgctacgatggggcaacttcaggggatttttgatgggtgggaggttggtagtgatgacgaggacgaagatgaggaggagaaatcagaatctcagtctcaacccgacgcgcaaaaggacgacgacgttgacgacagagataacatcccgacatcgcaacttcgacatttcgttgcacagccttatatcgatcgtccgctcctactccccggcgacgggagaaaatttcatatcaggacttatgctgcgtgtgtgggcagtctagaggtctacgtgtacagacatatgcttgcgctttttgcagggaagacgtatgtcccgccaaagtaccacggtaagaacggcggcgatgtgggggatggcgcggatggggtgagagatgatggagatgaaaaagatgagaacgatgcggagattgacctagaggctcatctcacgaacacttgccttcagaggagtgtaaaagatgggagcgtgaggttattttgggatttggatattcctgcgtctccgcatacagcaccaacatccaacggcatatcaacatcgatcagctcttcaactaacgccgcatcttctactaacacctcctccccagcgaaatcagccaaatcagcagaccccaaaactcaaatattcaaccaaatcctcgagataacaggagaagtcttcgaagcagccgcaagaggcatgcagatgcactttcgacccctatcgaacgccttcgagatctttgggttggatttcctggtcgatgagatggggcaggtgtttttgcttgaggttaatagttttccggatttcaaacagactggtgatgagcttagggatcttgttgcgggactttgggagggggttttaaggaaggttatgtttgggaatggggagggtataattggggggaaagataggaatggggagagagtggaaggggaggagggatggaaggggaatggggaggatttggtgcttgttagacgggttgggttgggttggtga

SEQ ID NO: 36875 - protein, 519 aa, Muscodor strobelii
  misc_feature: SGI Peptide ID NO. 572787
  misc_feature (99)..(486): Pfam Id: PF03133 Pfam Desc: Tubulin-tyrosine ligase family
  misc_feature (133)..(338): Pfam Id: PF03133 Pfam Desc: Tubulin-tyrosine ligase family
  misc_feature (396)..(486): Pfam Id: PF03133 Pfam Desc: Tubulin-tyrosine ligase family
  misc_feature (1)..(518): NCBI GI: 256727698 Blast Desc: NECHADRAFT_58510 [Nectria haematococca mpVI 77-13-4]
  misc_feature (1)..(514): NCBI GI: 46136001 Blast Desc: FG09516.1 [Gibberella zeae PH-1]
  misc_feature (4)..(480): NCBI GI: 85097065 Blast Desc: NCU04743 [Neurospora crassa OR74A] gi|28921867|gb|EAA31142.1| NCU04743 [Neurospora crassa OR74A] gi|39979192|emb|CAE85564.1| conserved [Neurospora crassa]
  misc_feature (7)..(518): NCBI GI: 39968787 Blast Desc: MGG_02486 [Magnaporthe grisea 70-15] gi|145013902|gb|EDJ98543.1| MGG_02486 [Magnaporthe grisea 70-15]
  misc_feature (7)..(518): NCBI GI: 261194234 Blast Desc: tubulin-tyrosine ligase [Ajellomyces dermatitidis SLH14081] gi|239588536|gb|EEQ71179.1| tubulin-tyrosine ligase [Ajellomyces dermatitidis SLH14081]
  misc_feature (7)..(518): NCBI GI: 239606894 Blast Desc: tubulin-tyrosine ligase [Ajellomyces dermatitidis ER-3]
  misc_feature (4)..(518): NCBI GI: 116202207 Blast Desc: CHGG_08988 [Chaetomium globosum CBS 148.51] gi|88177506|gb|EAQ84974.1| CHGG_08988 [Chaetomium globosum CBS 148.51]
  misc_feature (7)..(471): NCBI GI: 189205214 Blast Desc: tubulin-tyrosine ligase family protein [Pyrenophora tritici-repentis Pt-1C-BFP] gi|187986041|gb|EDU51529.1| tubulin-tyrosine ligase family protein [Pyrenophora Pt-1C-BFP]
  misc_feature (7)..(488): NCBI GI: 121705522 Blast Desc: tubulin-tyrosine ligase family protein [Aspergillus clavatus NRRL 1] gi|119399170|gb|EAW09598.1| tubulin-tyrosine ligase family protein [Aspergillus clavatus NRRL 1]
  misc_feature (5)..(438): NCBI GI: 169609757 Blast Desc: SNOG_07971 [Phaeosphaeria nodorum SN15] gi|111063127|gb|EAT84247.1| SNOG_07971 [Phaeosphaeria nodorum SN15]
MRPKDYFYALVHYEDPYVQPLILNALSKIFPPESYTLLSPLTTSSHNSTSNDEPISLSSLLPTASSKVLQITQYEKIDWDFVADHESTATVNSYMLRKALIRKHYLASTVEHWVAKRPDSVLAKSVRRGEAFELDFAEFLDEALVEAWDLNASLGRNEERLGAGRSDGLEWWILKPGMSDRGQGIRLFATMGQLQGIFDGWEVGSDDEDEDEEEKSESQSQPDAQKDDDVDDRDNIPTSQLRHFVAQPYIDRPLLLPGDGRKFHIRTYAACVGSLEVYVYRHMLALFAGKTYVPPKYHGKNGGDVGDGADGVRDDGDEKDENDAEIDLEAHLTNTCLQRSVKDGSVRLFWDLDIPASPHTAPTSNGISTSISSSTNAASSTNTSSPAKSAKSADPKTQIFNQILEITGEVFEAAARGMQMHFRPLSNAFEIFGLDFLVDEMGQVFLLEVNSFPDFKQTGDELRDLVAGLWEGVLRKVMFGNGEGIIGGKDRNGERVEGEEGWKGNGEDLVLVRRVGLGW

SEQ ID NO: 36876 - DNA, 3456 bp, Muscodor strobelii; identical to SEQ ID NO: 36873
  misc_feature: SGI EST ID NO. CUFF.88166.0
  misc_feature: Variant of the nucleotide sequence at SEQ ID NO 36874

SEQ ID NO: 36877 - DNA, 870 bp, Muscodor strobelii
  misc_feature: SGI cDNA ID NO. 572788
  misc_feature: Encodes the peptide sequence at SEQ ID NO 36878
atgcagccgccatacccgtccatgacacctacatggcacaatgatgtgtatcctgccattgagtacacgaacccgaagttgagccacgcaggcgaagtcattgtgattaccggtgctggatcaggcattggccgcgaaattgctattgcctttgccacggctggtgcgaagcatatcgtgctagttggacgtaaccaggacaagcttcggagcactgactctgctatcaatctgaaaggaacgaacacggaaacaacgattattactgctgatgtgaccgatgtagcgtccgtgaagaagatagccgatgctgtagacacttggaacgtcttgatccatgcagcggggtatattgcctcgccgaagcccgtggtagaagccgatatcgacgactactggcagggttacgaaactaacgttaaagctactgtcctactaaccaagcacctgctgccgaaggccagtccaaacgccgccatgatagcgttcacggcgggatcactcgtgttccccatgaagatgctggtaggattgtcgagctacttaatttcgaaaatggccctggcgaagactatggagttcttagccgtcgagaacccagacgtttttttcgctactctgcatcccggtatggtcgacaccgatatattccgcaagtcgggtgcaacccctgacatggttgctatggatactgtgaaactgcctgcgggattctgtctctggctgactacccctgaagctaagttcctcactggcaggtccatctgggcgaactgggatgtggaagagctgaaggctatggaagatgagatttctgcgggaaataagctgacctttaatcatgtgggctttccattcccgtatatgtaa

SEQ ID NO: 36878 - protein, 289 aa, Muscodor strobelii
  misc_feature: SGI Peptide ID NO. 572788
  misc_feature (32)..(187): Pfam Id: PF00106 Pfam Desc: short chain dehydrogenase
  misc_feature (33)..(169): Pfam Id: PF08659 Pfam Desc: KR domain
  misc_feature (32)..(152): Pfam Id: PF00106 Pfam Desc: short chain dehydrogenase
  misc_feature (33)..(107): Pfam Id: PF08659 Pfam Desc: KR domain
  misc_feature (1)..(286): NCBI GI: 154316564 Blast Desc: BC1G_04213 [Botryotinia fuckeliana B05.10] gi|150846013|gb|EDN21206.1| BC1G_04213 [Botryotinia fuckeliana B05.10]
  misc_feature (1)..(286): NCBI GI: 156052701 Blast Desc: SS1G_06517 [Sclerotinia sclerotiorum 1980] gi|154704296|gb|EDO04035.1| SS1G_06517 [Sclerotinia sclerotiorum 1980]
  misc_feature (1)..(286): NCBI GI: 121720144 Blast Desc: NADP(+)-dependent dehydrogenase, [Aspergillus clavatus NRRL 1] gi|119404982|gb|EAW15344.1| NADP(+)-dependent dehydrogenase, [Aspergillus clavatus NRRL 1]
  misc_feature (7)..(277): NCBI GI: 46117514 Blast Desc: FG04599.1 [Gibberella zeae PH-1]
  misc_feature (10)..(284): NCBI GI: 119193560 Blast Desc: CIMG_01157 [Coccidioides immitis RS]
  misc_feature (9)..(278): NCBI GI: 256719855 Blast Desc: NECHADRAFT_73318 [Nectria haematococca mpVI 77-13-4]
  misc_feature (1)..(285): NCBI GI: 116198493 Blast Desc: CHGG_07402 [Chaetomium globosum CBS 148.51] gi|88178681|gb|EAQ86149.1| CHGG_07402 [Chaetomium globosum CBS 148.51]
  misc_feature (1)..(286): NCBI GI: 116207664 Blast Desc: CHGG_03125 [Chaetomium globosum CBS 148.51] gi|88183722|gb|EAQ91190.1| CHGG_03125 [Chaetomium globosum CBS 148.51]
  misc_feature (1)..(285): NCBI GI: 121701587 Blast Desc: NADP(+)-dependent dehydrogenase, [Aspergillus clavatus NRRL 1] gi|119397201|gb|EAW07632.1| NADP(+)-dependent dehydrogenase, [Aspergillus clavatus NRRL 1]
  misc_feature (6)..(285): NCBI GI: 238495010 Blast Desc: short-chain dehydrogenase, [Aspergillus flavus NRRL3357] gi|220695391|gb|EED51734.1| short-chain dehydrogenase, [Aspergillus flavus NRRL3357]
  misc_feature (31)..(252): SWISSPROT Homolog: EC 1.1.1.30 3-hydroxybutyrate dehydrogenase
MQPPYPSMTPTWHNDVYPAIEYTNPKLSHAGEVIVITGAGSGIGREIAIAFATAGAKHIVLVGRNQDKLRSTDSAINLKGTNTETTIITADVTDVASVKKIADAVDTWNVLIHAAGYIASPKPVVEADIDDYWQGYETNVKATVLLTKHLLPKASPNAAMIAFTAGSLVFPMKMLVGLSSYLISKMALAKTMEFLAVENPDVFFATLHPGMVDTDIFRKSGATPDMVAMDTVKLPAGFCLWLTTPEAKFLTGRSIWANWDVEELKAMEDEISAGNKLTFNHVGFPFPYM

SEQ ID NO: 36879 - DNA, 1725 bp, Muscodor strobelii
  misc_feature: SGI cDNA ID NO. 572789
  misc_feature: Encodes the peptide sequence at SEQ ID NO 36880
atgacttcaccctaccttattgttgatggtgcatctgcgtacgcagatacaggcgaccaccacatgacttcaccctcacctctcacactgcttcacctccctcgggagctacgagatgccatctacgaggaatatgtccgtatcgaaggcggctacctctatcactttgagacgggcaaacttcggccccttaacaatcacgagcacgtcattgatctatcactcatgcttacatgcaaacaaatcgctgccgaaatgcaaggtctagccctcggggtaaacaccgtcacttttcgcacgatatccactccggagctagatcttgttgcccatcaattcgataggatcctaaggacttgctcggaataccttgcgaagctatttaccgaaggcactagatactgcaacgaagagcatatctaccaatacttactggatgatcgcaaagggctacgctatgataaagaggttttcgatgagctcgttcgtgcttttcctgactccaagacactgtcatatattgccaagctcccagaatttggaccgccacccgactacaaccaatccattccgatgttgcagaacttgttgtatcagcgcgacgaagactcctggctagagatcccttccgtctcaagagatatatgccgtcgatcagttgaaattgcgttggaactcgggtgctcgttcgccagtggagaggccgaaatcgatatgccaattccggttttgctagagattgtgtcagcgcttaagcattggggtatccccacacgggatacagtctcttacactatcaagaagttcaataaagtacaatggaacgacctatcgagacacttacaaaacgagatggggaaaggacatacccagccgttctcagctacagcggtggctatcaagtttcttcgcgagacaccaatcaccatccggaagcagcttaagaatatcgtgcttcatgaggatcgattatctgtggctcgtccagagtgtcatgccaaaggtctgatcccattctgtcttgagaacccgtctctccgtatcgagcgccgagtcgatctgtggcgtactgctctgtttgacttatggcagacatttcatagcttgaatccatcttctctctgtccatgcggaatagtgcaccggtacgcgtcaaaagccctctctctttggcttgtcgaaacaacggatctcatcagggctggcatgcccggggactcgtttttgctcacattggacggcagtgcggcacctgaaaaagcttttgaggtttcaaggatgttgcagatggatgcggcgtggcaagaggccattgaaaaggcaaacgagagacggctagtctcaccggcatgcgtcggcgagatgaaggatgagggcccctacattagggacaactatccggagatcctgaagggattggccaagaacaaaacttacaagtttatccgctgtaacttcccgtttgcgcctccgttgggatcagccatcgttgaaaatattatcgaccgccaccaaggtaactgcgcggaagattggtatgataattggctggctgggagtagaactatgtttcttgatgattctgaggatctgaggcctttctcgacctggcgcgatatgtgtctggaaacatatattaatgaaacggaacgcgggagatatgctggagaaccccggaattttcgtattgaccatatgttcataccgccgtaccccgaggattga

SEQ ID NO: 36880 - protein, 574 aa, Muscodor strobelii
  misc_feature: SGI Peptide ID NO. 572789
  misc_feature (30)..(487): NCBI GI: 169613873 Blast Desc: SNOG_10070 [Phaeosphaeria nodorum SN15] gi|111061285|gb|EAT82405.1| SNOG_10070 [Phaeosphaeria nodorum SN15]
  misc_feature (23)..(486): NCBI GI: 256721320 Blast Desc: NECHADRAFT_87025 [Nectria haematococca mpVI 77-13-4]
  misc_feature (30)..(441): NCBI GI: 189199878 Blast Desc: PTRG_05943 [Pyrenophora tritici-repentis Pt-1C-BFP] gi|187983375|gb|EDU48863.1| PTRG_05943 [Pyrenophora tritici-repentis Pt-1C-BFP]
  misc_feature (22)..(486): NCBI GI: 189191392 Blast Desc: [Pyrenophora tritici-repentis Pt-1C-BFP] gi|187973641|gb|EDU41140.1| [Pyrenophora tritici-repentis Pt-1C-BFP]
  misc_feature (30)..(455): NCBI GI: 189202952 Blast Desc: [Pyrenophora tritici-repentis Pt-1C-BFP] gi|187984911|gb|EDU50399.1| [Pyrenophora tritici-repentis Pt-1C-BFP]
  misc_feature (246)..(515): NCBI GI: 256728246 Blast Desc: NECHADRAFT_87838 [Nectria haematococca mpVI 77-13-4]
  misc_feature (286)..(516): NCBI GI: 189199968 Blast Desc: conserved [Pyrenophora tritici-repentis Pt-1C-BFP] gi|187983420|gb|EDU48908.1| conserved [Pyrenophora tritici-repentis Pt-1C-BFP]
  misc_feature (293)..(437): NCBI GI: 189188098 Blast Desc: conserved [Pyrenophora tritici-repentis Pt-1C-BFP] gi|187971994|gb|EDU39493.1| conserved [Pyrenophora tritici-repentis Pt-1C-BFP]
  misc_feature (293)..(545): NCBI GI: 256729016 Blast Desc: NECHADRAFT_79869 [Nectria haematococca mpVI 77-13-4]
  misc_feature (293)..(511): NCBI GI: 171682854 Blast Desc: protein product [Podospora anserina] gi|170941386|emb|CAP67036.1| protein product [Podospora anserina]
MTSPYLIVDGASAYADTGDHHMTSPSPLTLLHLPRELRDAIYEEYVRIEGGYLYHFETGKLRPLNNHEHVIDLSLMLTCKQIAAEMQGLALGVNTVTFRTISTPELDLVAHQFDRILRTCSEYLAKLFTEGTRYCNEEHIYQYLLDDRKGLRYDKEVFDELVRAFPDSKTLSYIAKLPEFGPPPDYNQSIPMLQNLLYQRDEDSWLEIPSVSRDICRRSVEIALELGCSFASGEAEIDMPIPVLLEIVSALKHWGIPTRDTVSYTIKKFNKVQWNDLSRHLQNEMGKGHTQPFSATAVAIKFLRETPITIRKQLKNIVLHEDRLSVARPECHAKGLIPFCLENPSLRIERRVDLWRTALFDLWQTFHSLNPSSLCPCGIVHRYASKALSLWLVETTDLIRAGMPGDSFLLTLDGSAAPEKAFEVSRMLQMDAAWQEAIEKANERRLVSPACVGEMKDEGPYIRDNYPEILKGLAKNKTYKFIRCNFPFAPPLGSAIVENIIDRHQGNCAEDWYDNWLAGSRTMFLDDSEDLRPFSTWRDMCLETYINETERGRYAGEPRNFRIDHMFIPPYPED

SEQ ID NO: 36881 - DNA, 1643 bp, Muscodor strobelii
  misc_feature: SGI EST ID NO. CUFF.88031.0
  misc_feature: Variant of the nucleotide sequence at SEQ ID NO 36879
tctcacactgcttcacctccctcgggagctacgagatgccatctacgaggaatatgtccgtatcgaaggcggctacctctatcactttgagacgggcaaacttcggccccttaacaatcacgagcacgtcattgatctatcactcatgcttacatgcaaacaaatcgctgccgaaatgcaaggtctagccctcggggtaaacaccgtcacttttcgcacgatatccactccggagctagatcttgttgcccatcaattcgataggatcctaaggacttgctcggaataccttgcgaagctatttaccgaaggcactagatactgcaacgaagagcatatctaccaatacttactggatgatcgcaaagggctacgctatgataaagaggttttcgatgagctcgttcgtgcttttcctgactccaagacactgtcatatattgccaagctcccagaatttggaccgccacccgactacaaccaatccattccgatgttgcagaacttgttgtatcagcgcgacgaagactcctggctagagatcccttccgtctcaagagatatatgccgtcgatcagttgaaattgcgttggaactcgggtgctcgttcgccagtggagaggccgaaatcgatatgccaattccggttttgctagagattgtgtcagcgcttaagcattggggtatccccacacgggatacagtctcttacactatcaagaagttcaataaagtacaatggaacgacctatcgagacacttacaaaacgagatggggaaaggacatacccagccgttctcagctacagcggtggctatcaagtttcttcgcgagacaccaatcaccatccggaagcagcttaagaatatcgtgcttcatgaggatcgattatctgtggctcgtccagagtgtcatgccaaaggtctgatcccattctgtcttgagaacccgtctctccgtatcgagcgccgagtcgatctgtggcgtactgctctgtttgacttatggcagacatttcatagcttgaatccatcttctctctgtccatgcggaatagtgcaccggtacgcgtcaaaagccctctctctttggcttgtcgaaacaacggatctcatcagggctggcatgcccggggactcgtttttgctcacattggacggcagtgcggcacctgaaaaagcttttgaggtttcaaggatgttgcagatggatgcggcgtggcaagaggccattgaaaaggcaaacgagagacggctagtctcaccggcatgcgtcggcgagatgaaggatgagggcccctacattagggacaactatccggagatcctgaagggattggccaagaacaaaacttacaagtttatccgctgtaacttcccgtttgcgcctccgttgggatcagccatcgttgaaaatattatcgaccgccaccaaggtaactgcgcggaagattggtatgataattggctggctgggagtagaactatgtttcttgatgattctgaggatctgaggcctttctcgacctggcgcgatatgtgtctggaaacatatattaatgaaacggaacgcgggagatatgctggagaaccccggaattttcgtattgaccatatgttcataccgccgtaccccgaggatt

SEQ ID NO: 36882 - DNA, 360 bp, Muscodor strobelii
  misc_feature: SGI cDNA ID NO. 572790
  misc_feature: Encodes the peptide sequence at SEQ ID NO 36883
atggccatcaaattagctctcggtttagttctcactgtggctgttagcttcacaaacgctgtgcctcaattccctccgcccaacagaaactgtacattctccgcgtacaccagctcagattgtacaggagaagcaatcgcaccaacccagcccatctacgccgactgctacgtcggagcattgaagtcttattcgctgtctggaccgcagtgtttctacatcgccgtccgcgaatatgctggccaccaatgcggcggaacctcgccaaggaattttactgccgctcacccgatcaatcaggcgggttgctatacgttcacaactgaacttgggagctcaaactggaatttctactcctga

SEQ ID NO: 36883 - protein, 119 aa, Muscodor strobelii
  misc_feature: SGI Peptide ID NO. 572790
MAIKLALGLVLTVAVSFTNAVPQFPPPNRNCTFSAYTSSDCTGEAIAPTQPIYADCYVGALKSYSLSGPQCFYIAVREYAGHQCGGTSPRNFTAAHPINQAGCYTFTTELGSSNWNFYS

SEQ ID NO: 36884 - DNA, 483 bp, Muscodor strobelii
  misc_feature: SGI cDNA ID NO. 572791
  misc_feature: Encodes the peptide sequence at SEQ ID NO 36885
atgtctaccacccatcagcagaccatttatgaggcaaaggccactcaacccatcaatgttgaggaccaagccaagtggtacgacatcggaagcctccgcaagaagtttcgctcggcaatccatgatggtcgaatgaaaagcaataaatccggagacatctccaagagagagattctgaagtggcttgcatctgagctttctcacagaaagcacaagaagaagtcgatgatcatcattggcgaagaggaagacgacgatgacgacgaagacatggccgcagctcacgactttctgctgcaggctacaggcaagaccgatgccgaactagtggagctagtcgttggggaagagcaccccgaggctgcgcagttggctactgatgtcatcggcggtgccgaggcgcttgacgttgcggaagatagtgaggacggattcttcgccaccttgttccagaccgtcatgaagattgcggatgatatatga

SEQ ID NO: 36885 - protein, 160 aa, Muscodor strobelii
  misc_feature: SGI Peptide ID NO. 572791
MSTTHQQTIYEAKATQPINVEDQAKWYDIGSLRKKFRSAIHDGRMKSNKSGDISKREILKWLASELSHRKHKKKSMIIIGEEEDDDDDEDMAAAHDFLLQATGKTDAELVELVVGEEHPEAAQLATDVIGGAEALDVAEDSEDGFFATLFQTVMKIADDI

SEQ ID NO: 36886 - DNA, 1797 bp, Muscodor strobelii
  misc_feature: SGI cDNA ID NO. 572792
  misc_feature: Encodes the peptide sequence at SEQ ID NO 36887
atggcgagctcatcgtccaccactcccgtagtagcctcggccctcggctgcgtggtggcggtctttgttctatactatcacttcggacggcccaagccatatcctgggatcccctatatcgaggcctcggcgcggtccttcttcggagatgtgccgggcctgatggcgcatatccgccacgaggatggcaccttcatcacatacctcgagaaggtgctgcgcaagctcgacgcgctcatggtccaggtcttcacgcagccatggagcaagcccatgatcgtgcttagtgacttccgcgaggcccgcgacatcatgacgcggcgcgccgccgagttcgaccgcgccacgtcggcggcagacctgctcgcgggactggtgcccgaccaccacatccacatgaagacgcagccgcgctggcgcgcccaccgccgcctcattcaggacctcatgagccccggcttcctgcacaacgtcgctggccccgcgctgcacgagagcgcgctcctcctggtgaatctgtggagggttaagagccgtatcgccgccggtcgcccctggatgacgaccgaggatatcgaccacgccgccgtggattcggtccttgtgttcacgtttggcgaggcatttggtcgacgtcacagcgctaccaggtcagcgctcgatgagttgagagaggattcgactgaaaaggacagtgatcatctgccggaatctcccggctcctcggacgagcctgtggcttttcgcttcgtgcgatccgatccggtcgtgaaggcttctctcgagcttatagcgtgcggggaagaggtgcaaggtagcgccatgccacccttgaagtggtacttcgtgaacaggaagcctcgaatcagacgagcgaggcatatcaaggagtcctttgtcaggagtgaactggaagatgccgtccgacgactaagagcgtcgtccaaagatgaggcgcagttcgtgaaatccgccgtcgaccatatggtttttcgggaagcgaagatagcagaaaaggagtctcgagagcccgtcttcttctcacgtaccatgatagatgagtatagcctgtctgacattgcgatgaacgaccaggttttcggcttcgtcgtggcgggaggtgacacaacgagcacctctgtcgcctggggcctcaagtatttggcggacaatccggctatacaatccaggctgcgcaacgcgttagaaccttcgtttgatctgacccctgcctctgacggccagcccacgctgcgtcacatcgcgggctcgcatattccctatctcgacgcggtgatggaggagaccttacgatgctcaagctccgttcctgtcgtcgatcgcgaagccttgatcgatacggaagttctcggacatcgcattcccaagggcagcatcatcaagtgtctagtagtaggaccgagtatgacgagccccgctttcgagatcgacgagacgcagcgatacggcggtagtctctcttcctcaaaggcggaatctcccgtccggaactgggatcctgacggcatggccgatttcaaccccgagcgctggctcgtgggtaaggacggcgcgttcgaccccatggctgggccgcagctggcgttcgggctgggtccgcgatcgtgctacgggaagcggctcgcgtacctcgagttccggatcctgatcacgttaatcgtctggaatttcgaactcctgccgtgcccgcccgccttgtccagctacaagaatgagctcaagatgacgaataggccgaaggattcgtatgtgcggctacggagtatatatagataa

SEQ ID NO: 36887 - protein, 598 aa, Muscodor strobelii
  misc_feature: SGI Peptide ID NO. 572792
  misc_feature (31)..(593): Pfam Id: PF00067 Pfam Desc: Cytochrome P450
  misc_feature (356)..(467): Pfam Id: PF00067 Pfam Desc: Cytochrome P450
  misc_feature (513)..(570): Pfam Id: PF00067 Pfam Desc: Cytochrome P450
  misc_feature (14)..(596): NCBI GI: 29126007 Blast Desc: P450 monooxygenase for C-4 hydroxylation of trichothecene [Fusarium sporotrichioides]
  misc_feature (14)..(596): NCBI GI: 22300021 Blast Desc: AF330109_1 TRI13 [Fusarium sporotrichioides] gi|23957822|gb|AAN40834.1| cytochrome P450 [Fusarium sporotrichioides]
  misc_feature (14)..(596): NCBI GI: 269856267 Blast Desc: cytochrome P450 monooxygenase [Fusarium sp. NRRL 13405]
  misc_feature (14)..(596): NCBI GI: 20475383 Blast Desc: cytochrome p450 monooxygenase [Gibberella zeae]
  misc_feature (14)..(596): NCBI GI: 18026282 Blast Desc: cytochrome P450 [Gibberella zeae]
  misc_feature (14)..(596): NCBI GI: 18026284 Blast Desc: cytochrome P450 [Gibberella zeae]
  misc_feature (3)..(592): NCBI GI: 91771577 Blast Desc: cytochrome P450 monooxygenase [Hypocrea virens]
  misc_feature (8)..(593): NCBI GI: 169610165 Blast Desc: SNOG_08178 [Phaeosphaeria nodorum SN15] gi|111063334|gb|EAT84454.1| SNOG_08178 [Phaeosphaeria nodorum SN15]
  misc_feature (26)..(596): NCBI GI: 85089910 Blast Desc: NCU09636 [Neurospora crassa OR74A] gi|28919499|gb|EAA28931.1| [Neurospora crassa OR74A]
  misc_feature (7)..(593): NCBI GI: 189191520 Blast Desc: cytochrome P450 monooxygenase [Pyrenophora tritici-repentis Pt-1C-BFP] gi|187973705|gb|EDU41204.1| cytochrome P450 monooxygenase [Pyrenophora tritici-repentis
  misc_feature (63)..(569): SWISSPROT Homolog: EC 1.14.14.1 Unspecific monooxygenase
MASSSSTTPVVASALGCVVAVFVLYYHFGRPKPYPGIPYIEASARSFFGDVPGLMAHIRHEDGTFITYLEKVLRKLDALMVQVFTQPWSKPMIVLSDFREARDIMTRRAAEFDRATSAADLLAGLVPDHHIHMKTQPRWRAHRRLIQDLMSPGFLHNVAGPALHESALLLVNLWRVKSRIAAGRPWMTTEDIDHAAVDSVLVFTFGEAFGRRHSATRSALDELREDSTEKDSDHLPESPGSSDEPVAFRFVRSDPVVKASLELIACGEEVQGSAMPPLKWYFVNRKPRIRRARHIKESFVRSELEDAVRRLRASSKDEAQFVKSAVDHMVFREAKIAEKESREPVFFSRTMIDEYSLSDIAMNDQVFGFVVAGGDTTSTSVAWGLKYLADNPAIQSRLRNALEPSFDLTPASDGQPTLRHIAGSHIPYLDAVMEETLRCSSSVPVVDREALIDTEVLGHRIPKGSIIKCLVVGPSMTSPAFEIDETQRYGGSLSSSKAESPVRNWDPDGMADFNPERWLVGKDGAFDPMAGPQLAFGLGPRSCYGKRLAYLEFRILITLIVWNFELLPCPPALSSYKNELKMTNRPKDSYVRLRSIYR

SEQ ID NO: 36888 - DNA, 837 bp, Muscodor strobelii
  misc_feature: SGI cDNA ID NO. 572793
  misc_feature: Elevated expression when VOC is produced
  misc_feature: Encodes the peptide sequence at SEQ ID NO 36889
atgcccatggagcaaacgtatagagaatttgttcagtgtctcaaagaccgtcgctggggagacatcgacacattcctacacccggactacgccaagaatggaacgccattctccggcgactgctttgccgcggaatcacaggaacacggtcgcatcgaactcgatctggacaccgtcacgatcgacgaggggagccagcgattagcctcgtcgatcctcgtcaagtgggagcccgcggtttgcgtcatggggtttgacgcgccactagataggcccttactgtacacggagcaccacgtcaactggttcgtcgacggcaagctgttgaagacgatgacgatgcccaaccgtgcggcggtgcacgctcagctgtccgaaccggatgtcgccccggccccggacatcatgagcgatgccgaggccggacaggggacggtcattgccgcggacatggaggaactgtaccggcgctacatcgcttcgatcaacgcgcgcaccatgcgcgaggactttagacactacatgtaccaggacatcatctttaacggcacggcctggacaatgggcgacctccggtccatgctggaactcgccttcgcggcggtcccagactgtgtgaccgtcatcgagaccatggtcaccgacgaaggagcgcagcgcctcgccgtgcagctgacggcgtcagggaccatgacccggccgctgttcggcctagatgccgtgggacagctggtccggtttgctgagcataacacgtaccagttccgcgatggtaagatggcgcggttctggagcctgacaaactggggcgatctcgggcagacgctgttggactag

SEQ ID NO: 36889 - protein, 278 aa, Muscodor strobelii
  misc_feature: SGI Peptide ID NO. 572793
  misc_feature (152)..(276): Pfam Id: PF07366 Pfam Desc: SnoaL-like polyketide cyclase
  misc_feature (152)..(266): Pfam Id: PF07366 Pfam Desc: SnoaL-like polyketide cyclase
  misc_feature (7)..(276): NCBI GI: 85114908 Blast Desc: NCU00856 [Neurospora crassa OR74A] gi|28926566|gb|EAA35536.1| [Neurospora crassa OR74A]
  misc_feature (1)..(268): NCBI GI: 39944412 Blast Desc: MGG_04217 [Magnaporthe grisea 70-15] gi|145014963|gb|EDJ99531.1| MGG_04217 [Magnaporthe grisea 70-15]
  misc_feature (16)..(268): NCBI GI: 46139593 Blast Desc: FG11311.1 [Gibberella zeae PH-1]
  misc_feature (6)..(276): NCBI GI: 256721516 Blast Desc: NECHADRAFT_93182 [Nectria haematococca mpVI 77-13-4]
  misc_feature (151)..(268): NCBI GI: 153008695 Blast Desc: Oant_1364 [Ochrobactrum anthropi ATCC 49188] gi|151560583|gb|ABS14081.1| protein of function DUF1486 [Ochrobactrum anthropi ATCC 49188]
  misc_feature (148)..(268): NCBI GI: 126436897 Blast Desc: Mjls_4326 [Mycobacterium sp. JLS] gi|126236697|gb|ABO00098.1| protein of function DUF1486 [Mycobacterium sp. JLS]
  misc_feature (147)..(268): NCBI GI: 239832642 Blast Desc: OINT_1001908 [Ochrobactrum intermedium LMG 3301] gi|239824909|gb|EEQ96477.1| OINT_1001908 [Ochrobactrum intermedium LMG 3301]
  misc_feature (148)..(268): NCBI GI: 108801059 Blast Desc: Mmcs_4095 [Mycobacterium sp. MCS] gi|119870201|ref|YP_940153.1| Mkms_4171 [Mycobacterium sp. KMS] gi|108771478|gb|ABG10200.1| protein of function DUF1486 sp. MCS]
  misc_feature (151)..(269): NCBI GI: 116182988 Blast Desc: CHGG_02122 [Chaetomium globosum CBS 148.51] gi|88186419|gb|EAQ93887.1| CHGG_02122 [Chaetomium globosum CBS 148.51]
  misc_feature (145)..(276): NCBI GI: 146338229 Blast Desc: NTF2-like superfamily protein [Bradyrhizobium sp. ORS278] gi|146191035|emb|CAL75040.1| conserved ; NTF2-like [Bradyrhizobium sp. ORS278]
  misc_feature: Useful for fungicidal and/or biocontrol applications
  misc_feature: Useful for introducing or modulating the production of volatile compounds
MPMEQTYREFVQCLKDRRWGDIDTFLHPDYAKNGTPFSGDCFAAESQEHGRIELDLDTVTIDEGSQRLASSILVKWEPAVCVMGFDAPLDRPLLYTEHHVNWFVDGKLLKTMTMPNRAAVHAQLSEPDVAPAPDIMSDAEAGQGTVIAADMEELYRRYIASINARTMREDFRHYMYQDIIFNGTAWTMGDLRSMLELAFAAVPDCVTVIETMVTDEGAQRLAVQLTASGTMTRPLFGLDAVGQLVRFAEHNTYQFRDGKMARFWSLTNWGDLGQTLLD

SEQ ID NO: 36890 - DNA, 612 bp, Muscodor strobelii
  misc_feature: SGI EST ID NO. CUFF.88061.0
  misc_feature: Variant of the nucleotide sequence at SEQ ID NO 36888
ttcataacaacaatactaaaagattaagtcataatgcccatggagcaaacgtatagagaatttgttcagtgtctcaaagaccgtcgctggggagacatcgacacattcctacacccggactacgccaagaatggaacgccattctccggcgactgctttgccgcggaatcacaggaacacggtcgcatcgaactcgatctggacaccgtcacgatcgacgaggggagccagcgattagcctcgtcgatcctcgtcaagtgggagcccgcggtttgcgtcatggggtttgacgcgccactagataggcccttactgtacacggagcaccacgtcaactggttcgtcgacggcaagctgttgaagacgatgacgatgcccaaccgtgcggcggtgcacgctcagctgtccgaaccggatgtcgccccggccccggacatcatgagcgatgccgaggccggacaggggacggtcattgccgcggacatggaggaactgtaccggcgctacatcgcttcgatcaacgcgcgcaccatgcgcgaggactttagacactacatgtaccaggacatcatctttaacggcacggcctggacaatgggcgacctccggtcc

SEQ ID NO: 36891 - DNA, 2226 bp, Muscodor strobelii
  misc_feature: SGI cDNA ID NO. 572794
  misc_feature: Encodes the peptide sequence at SEQ ID NO 36892
atggcgctagagaaaccagcgttcaaagtgatcattatcggtggcagtattgctggtctgtccctggccatcatgctcgagcgtatcgacatcgacttcgtcatcttggaagcctacaatgaagtcgcaccccaagtgggagcgagtatcactatctggccgcatctcgggcggcttctcgatcagataggttgctggtataggcacggatatccagcgctgttcatccagcgccagcagcttgtgcacgcactctaccagaacctgcggcaaaaggacaagctactattgcagaagcgcctcgtccagatccagccaatggaggacggcatcgaggctctcatgcaggacggaagtgtacataacggagacatcatcgtcggcgccgatggtatgcacagcgccgtacgtaggcagatgcacgtgctggcaaaggcctcgtccccgggatactttgatcctgacgagtactcaaaggtcccctgtacgtacaagtgcatattcggcatctcacacgcccatgcactccagggcatcgagaagggcacgacgagcaatgtcatggggcggcaatggagctacacggtctcgagcgcgccggacgacaagatcttctgggttcttaatgtgaagaacagtgtcgtgacgcacgggaacgcgattccgacgtattaccaagccgaggagcgcgctctggccaaggagcactttaaagaccggctcaacgacctcgacacttttgaggatctgtacaaggcgagggtccgatcccggttgacccctttgcatgagtaccagtggaagcggtggcattttgaccgcatcatgaccattggtgacgcgtgtcacaagattcaccctattggtggcaacggaggtgcggcggcggtcgaggactccgccgccctcgtgaacgcgctcgcccgcaagctcggccacatgcatacccctgggcatctgtcgacttccgacatccgagaaatcttcgcggcggcccaacacgcccgggaggcgcgatcacggggtcttctcgagctgtcaaaccggacgcagcaggtggacgccatggaaagcgtgcttgcgccgcttctcatgcgctacgtcatgccgcacttgacgggcgaggcactcttccttattgtgtcgacgcatgttgtcgggggcccgcgcgtcgaccgcctccccgtgccccggcgagaccattcagtcccgttcgatgacgagctaccagcgaagccactcggcgacgcgcttaaaggtaccgctgtcttcgtccttctgcactcggtcctgtgctacttggcgtggaacaacagcagtagtaatggcggctcaatattgtcctgggtaacgtacaaggcccttcacctccctatgcggtactcctgtgcgttcctcccctgcgacacactcgccgaccgtgatactgccgtgcacgggccctttgcatctatgacttttctcttccccgtcgttcttctgtggaacctagaagcgcatcggaacgggaacgcgcaatcattatggtcctggcccgtcgtactccttgccgtcgcgggattattcttcctgcggcccgagaaggttctcgccatctattttcttctcgcgcttgccaacacccgccgagcccagtacaatctgacgtcaggaaggcctgtatctcttgtcgtcgtcgaagctgttaccactgtgacatggattacttgcgctctgattgccgccatggaatggttttcaccagaccttcccttagaaccccacttcaatgccttatgtcgcgcggtgccgatcagtatatccgtactaatccacgtcctcgccactgcatcgagatcccaatcgcagtcttcaagtcaatcacatggtcttgggatggcgacggacaatatgagactatacctcaaccgcgactacccatccctcgcgtccctgtatcggactctcttcgggctatctctactggcaccgcccggtatccagcccctaggagacggcagcatcattatccattgcctgcacagcacctttgagatgcgccgtcttggttacgtggtcaccaagcaagctctgggtgccgcattgatagtcatactgtcggcgcactttgttgggtcgcttccggtatatgtgggggtcaggtactggcgggaaactgtcattcacacactgagcgagagaacgtctcgggaatcgcgagggctgcacgtattggttgacaggtag

SEQ ID NO: 36892 - protein, 741 aa, Muscodor strobelii
  misc_feature: SGI Peptide ID NO. 572794
  misc_feature (7)..(337): Pfam Id: PF01494 Pfam Desc: FAD binding domain
  misc_feature (7)..(725): NCBI GI: 256720114 Blast Desc: NECHADRAFT_88533 [Nectria haematococca mpVI 77-13-4]
  misc_feature (8)..(726): NCBI GI: 119494160 Blast Desc: FAD binding domain protein [Neosartorya fischeri NRRL 181] gi|119412152|gb|EAW22093.1| FAD binding domain protein [Neosartorya fischeri NRRL 181]
  misc_feature (7)..(726): NCBI GI: 46102717 Blast Desc: FG00057.1 [Gibberella zeae PH-1]
  misc_feature (3)..(422): NCBI GI: 169780646 Blast Desc: [Aspergillus oryzae RIB40] gi|83773527|dbj|BAE63654.1| protein product [Aspergillus oryzae]
  misc_feature (3)..(409): NCBI GI: 238505172 Blast Desc: zeaxanthin epoxidase, [Aspergillus flavus NRRL3357] gi|220689929|gb|EED46279.1| zeaxanthin epoxidase, [Aspergillus flavus NRRL3357]
  misc_feature (4)..(441): NCBI GI: 256729398 Blast Desc: NECHADRAFT_47426 [Nectria haematococca mpVI 77-13-4]
  misc_feature (3)..(646): NCBI GI: 255952903 Blast Desc: Pc21g01340 [Penicillium chrysogenum Wisconsin 54-1255] gi|211588915|emb|CAP95031.1| Pc21g01340 [Penicillium chrysogenum Wisconsin 54-1255]
  misc_feature (1)..(721): NCBI GI: 212533543 Blast Desc: monooxygenase, [Penicillium marneffei ATCC 18224] gi|210072292|gb|EEA26381.1| monooxygenase, [Penicillium marneffei ATCC 18224]
  misc_feature (4)..(393): NCBI GI: 154289643 Blast Desc: BC1G_16100 [Botryotinia fuckeliana B05.10] gi|150848991|gb|EDN24184.1| BC1G_16100 [Botryotinia fuckeliana B05.10]
  misc_feature (4)..(724): NCBI GI: 55823911 Blast Desc: monooxygenase [Fusarium heterosporum]
MALEKPAFKVIIIGGSIAGLSLAIMLERIDIDFVILEAYNEVAPQVGASITIWPHLGRLLDQIGCWYRHGYPALFIQRQQLVHALYQNLRQKDKLLLQKRLVQIQPMEDGIEALMQDGSVHNGDIIVGADGMHSAVRRQMHVLAKASSPGYFDPDEYSKVPCTYKCIFGISHAHALQGIEKGTTSNVMGRQWSYTVSSAPDDKIFWVLNVKNSVVTHGNAIPTYYQAEERALAKEHFKDRLNDLDTFEDLYKARVRSRLTPLHEYQWKRWHFDRIMTIGDACHKIHPIGGNGGAAAVEDSAALVNALARKLGHMHTPGHLSTSDIREIFAAAQHAREARSRGLLELSNRTQQVDAMESVLAPLLMRYVMPHLTGEALFLIVSTHVVGGPRVDRLPVPRRDHSVPFDDELPAKPLGDALKGTAVFVLLHSVLCYLAWNNSSSNGGSILSWVTYKALHLPMRYSCAFLPCDTLADRDTAVHGPFASMTFLFPVVLLWNLEAHRNGNAQSLWSWPVVLLAVAGLFFLRPEKVLAIYFLLALANTRRAQYNLTSGRPVSLVVVEAVTTVTWITCALIAAMEWFSPDLPLEPHFNALCRAVPISISVLIHVLATASRSQSQSSSQSHGLGMATDNMRLYLNRDYPSLASLYRTLFGLSLLAPPGIQPLGDGSIIIHCLHSTFEMRRLGYVVTKQALGAALIVILSAHFVGSLPVYVGVRYWRETVIHTLSERTSRESRGLHVLVDR

SEQ ID NO: 36893 - DNA, 1955 bp, Muscodor strobelii
  misc_feature: SGI EST ID NO. CUFF.88097.0
  misc_feature: Variant of the nucleotide sequence at SEQ ID NO 36891
cgcgattccgacgtattaccaagccgaggagcgcgctctggccaaggagcactttaaagaccggctcaacgacctcgacacttttgaggatctgtacaaggcgagggtccgatcccggttgacccctttgcatgagtaccagtggaagcggtggcattttgaccgcatcatgaccattggtgacgcgtgtcacaaggtacgttttcggtcatcaacgggtgtcggtcaatgcgaatgccagcccctttccttgtattgtcacttacgcagaggctttggattagattcaccctattggtggcaacggaggtgcggcggcggtcgaggactccgccgccctcgtgaacgcgctcgcccgcaagctcggccacatgcatacccctgggcatctgtcgacttccgacatccgagaaatcttcgcggcggcccaacacgcccgggaggcgcgatcacggggtcttctcgagctgtcaaaccggacgcagcaggtggacgccatggaaagcgtgcttgcgccgcttctcatgcgctacgtcatgccgcacttgacgggcgaggcactcttccttattgtgtcgacgcatgttgtcgggggcccgcgcgtcgaccgcctccccgtgccccggcgagaccattcagtcccgttcgatgacgagctaccagcgaagccactcggcgacgcgcttaaaggtaccgctgtcttcgtccttctgcactcggtcctgtgctacttggcgtggaacaacagcagtagtaatggcggctcaatattgtcctgggtaacgtacaaggcccttcacctccctatgcggtactcctgtgcgttcctcccctgcgacacactcgccgaccgtgatactgccgtgcacgggccctttgcatctatgacttttctcttccccgtcgttcttctgtggaacctagaagcgcatcggaacgggaacgcgcaatcattatggtcctggcccgtcgtactccttgccgtcgcgggattattcttcctgcggcccgagaaggttctcgccatctattttcttctcgcgcttgccaacacccgccgagcccagtacaatctgacgtcaggaaggcctgtatctcttgtcgtcgtcgaagctgttaccactgtgacatggattacttgcgctctgattgccgccatggaatggttttcaccagaccttcccttagaaccccacttcaatgccttatgtcgcgcggtgccgatcagtatatccgtactaatccacgtcctcgccactgcatcgagatcccaatcgcagtcttcaagtcaatcacatggtcttgggatggcgacggacaatatgagactatacctcaaccgcgactacccatccctcgcgtccctgtatcggactctcttcgggctatctctactggcaccgcccggtatccagcccctaggagacggcagcatcattatccattgcctgcacagcacctttgagatgcgccgtcttggttacgtggtcaccaagcaagctctgggtgccgcattgatagtcatactgtcggcgcactttgttgggtcgcttccggtatatgtgggggtcaggtactggcgggaaactgtcattcacacactgagcgagagaacgtctcgggaatcgcgagggctgcacgtattggttgacaggtagatgggtcagagctctgatagtacagacttgtcttgccacagttaacgggttgctgtgcctttcagtcgaacaaccccaagtcgtattactgcgttgctatagtggtacgcatgtggtgatatctcttaaattttagactgatgattgtaatctggcggaggaaaacatctgtggctacggaaattggatgtacatgcagtgttgatttgcatgacgggtcggtccgtcatttgactgcggccagtgctagctggaatagatgccacattgtagggtaagagtttgctccaactggaa

SEQ ID NO: 36894 - DNA, 687 bp, Muscodor strobelii
  misc_feature: SGI cDNA ID NO. 572795
  misc_feature: Encodes the peptide sequence at SEQ ID NO 36895
atggtctggccctggcagctctggctatcaccgcggccggcgcaccgcaccgacatctcgggccagaccaagtttgccacggccgggaatgccgccgtctacgatttcctgactgaggatgacggttcctggggagtccgggagacgcactacatagacagtcccgttgctagagctggactatcgggcccgccgctccacgtgcatattttccaagacgagtacttcacggtagaaaagggcgtgctgggtgttgtcacggactcgaagacacatgcgctcaccaaggcagacggcacttttaagatcaaggccggcaccagacatcggttctggttgcacacatcgtcaaccgaagacgtcgtcttccgcggctggattgacgaccaggacaaggaccaggtcctcgacatagacgtcttgcggaactatcagggctacatcttggactgtcacaagaacaacatggagccttcgcccctccagctcgcgctgatcatgtacgacgcgtcgactatcctgaccccgccgttctggatgcccttgtcgctccttactggcttgaatcatgtggtcgctcgctggattggacagtatctattagggtatgtacatgaagccgtagtactagggttttcggtccggcatatcattgttgatctggcactcagttcgattgtgttgtag

SEQ ID NO: 36895 - protein, 228 aa, Muscodor strobelii
  misc_feature: SGI Peptide ID NO. 572795
  misc_feature (1)..(203): NCBI GI: 169613573 Blast Desc: SNOG_09917 [Phaeosphaeria nodorum SN15] gi|111061132|gb|EAT82252.1| SNOG_09917 [Phaeosphaeria nodorum SN15]
  misc_feature (1)..(202): NCBI GI: 242773393 Blast Desc: conserved [Talaromyces stipitatus ATCC 10500] gi|218721850|gb|EED21268.1| conserved [Talaromyces stipitatus ATCC 10500]
  misc_feature (1)..(209): NCBI GI: 261358230 Blast Desc: conserved [Verticillium albo-atrum VaMs.102]
  misc_feature (20)..(203): NCBI GI: 238502251 Blast Desc: conserved [Aspergillus flavus NRRL3357] gi|220691169|gb|EED47517.1| conserved [Aspergillus flavus NRRL3357]
  misc_feature (62)..(203): NCBI GI: 255948128 Blast Desc: Pc22g08160 [Penicillium chrysogenum Wisconsin 54-1255] gi|211591848|emb|CAP98104.1| Pc22g08160 [Penicillium chrysogenum Wisconsin 54-1255]
  misc_feature (63)..(203): NCBI GI: 115399716 Blast Desc: [Aspergillus terreus NIH2624] gi|114191120|gb|EAU32820.1| [Aspergillus terreus NIH2624]
  misc_feature (20)..(176): NCBI GI: 169775621 Blast Desc: [Aspergillus oryzae RIB40] gi|83771012|dbj|BAE61144.1| protein product [Aspergillus oryzae]
  misc_feature (69)..(203): NCBI GI: 121710952 Blast Desc: conserved [Aspergillus clavatus NRRL 1] gi|119401242|gb|EAW11666.1| conserved [Aspergillus clavatus NRRL 1]
  misc_feature (20)..(203): NCBI GI: 238491836 Blast Desc: conserved [Aspergillus flavus NRRL3357] gi|220697568|gb|EED53909.1| conserved [Aspergillus flavus NRRL3357]
  misc_feature (52)..(203): NCBI GI: 159124821 Blast Desc: conserved [Aspergillus fumigatus A1163]
MVWPWQLWLSPRPAHRTDISGQTKFATAGNAAVYDFLTEDDGSWGVRETHYIDSPVARAGLSGPPLHVHIFQDEYFTVEKGVLGVVTDSKTHALTKADGTFKIKAGTRHRFWLHTSSTEDVVFRGWIDDQDKDQVLDIDVLRNYQGYILDCHKNNMEPSPLQLALIMYDASTILTPPFWMPLSLLTGLNHVVARWIGQYLLGYVHEAVVLGFSVRHIIVDLALSSIVL

SEQ ID NO: 36896 - DNA, 897 bp, Muscodor strobelii
  misc_feature: SGI cDNA ID NO. 572796
  misc_feature: Encodes the peptide sequence at SEQ ID NO 36897
atgtctacttatgttatcaccggcgcctcgagggggttagggtttgcattcctccgtgagctgtcgagcgaccccgacaacaccgttgtcggtcttgttcgggatgtgaagaattcagaacaaaaggtgtcggctgagctcgctggtcgatccaatatccacatcgtttccggtgatctcactaatcacggaagtctaaaggctgctgcagaacaggtgtcagccatcacgggcggcaagctcgactatctgattgccaacgccgcttatgtcccaactgtcgacggctattgcgcagttgggcaagtgtacggccctatctcctttcgtccagcgtccacctcacctagggaggcaacgcccgaggacgcagccgagcaattccgctcagccatcgagaccaacgtcatcggcagcctcgctctctatcaagcgttcgtgccgctaatcattcggggtaaggtcaagaaggtcgtcagcatgaccacgggcatggccgacgtcgactttatcaatcaaaacgacgtcgagtatggtgctctgtactcggcctccaagggagctctgaatgtcatcaacgccaaatttagcgctcagtacaagaagcagggtgtactattccttggtatcagcccgggagtggtggacacaggctattttactcccgaaacgaattcgacttctaatgatgtggtatctgaaccagtgtctccagaggatatcacggggttgcagggcatgctggcagtcttccaacagtacgctcctcacttcaagggtcccgtgaccccggaagtcgccgtacgacaggtgatcaaggtctatgagaatgccagtatcgagaaggggtttgggggcaagatggtctctcaatacggcaacacacaatggttgtga

SEQ ID NO: 36897 - protein, 298 aa, Muscodor strobelii
  misc_feature: SGI Peptide ID NO. 572796
  misc_feature (2)..(201): Pfam Id: PF00106 Pfam Desc: short chain dehydrogenase
  misc_feature (2)..(89): Pfam Id: PF00106 Pfam Desc: short chain dehydrogenase
  misc_feature (1)..(298): NCBI GI: 119473497 Blast Desc: short chain dehydrogenase (AtsC), [Neosartorya fischeri NRRL 181] gi|119406777|gb|EAW16727.1| short chain dehydrogenase (AtsC), [Neosartorya fischeri NRRL 181]
  misc_feature (1)..(298): NCBI GI: 121714479 Blast Desc: short chain dehydrogenase (AtsC), [Aspergillus clavatus NRRL 1] gi|119403004|gb|EAW13424.1| short chain dehydrogenase (AtsC), [Aspergillus clavatus NRRL 1]
  misc_feature (1)..(298): NCBI GI: 261358235 Blast Desc: short chain dehydrogenase [Verticillium albo-atrum VaMs.102]
  misc_feature (1)..(298): NCBI GI: 189201619 Blast Desc: conserved [Pyrenophora tritici-repentis Pt-1C-BFP] gi|187984245|gb|EDU49733.1| conserved [Pyrenophora tritici-repentis Pt-1C-BFP]
  misc_feature (1)..(298): NCBI GI: 256730666 Blast Desc: NECHADRAFT_29697 [Nectria haematococca mpVI 77-13-4]
  misc_feature (1)..(298): NCBI GI: 46114388 Blast Desc: FG03036.1 [Gibberella zeae PH-1]
  misc_feature (1)..(298): NCBI GI: 67540978 Blast Desc: AN6659.2 [Aspergillus nidulans FGSC A4] gi|40738998|gb|EAA58188.1| AN6659.2 [Aspergillus nidulans FGSC A4] gi|259480241|tpe|CBF71192.1| TPA: short chain dehydrogenase
  misc_feature (1)..(298): NCBI GI: 258575181 Blast Desc: conserved [Uncinocarpus reesii 1704] gi|237902038|gb|EEP76439.1| conserved [Uncinocarpus reesii 1704]
  misc_feature (1)..(298): NCBI GI: 67522387 Blast Desc: AN1650.2 [Aspergillus nidulans FGSC A4] gi|40745614|gb|EAA64770.1| AN1650.2 [Aspergillus nidulans FGSC A4] gi|259486986|tpe|CBF85294.1| TPA: short chain dehydrogenase
  misc_feature (1)..(285): NCBI GI: 70985667 Blast Desc: short chain dehydrogenase (AtsC) [Aspergillus fumigatus Af293] gi|66845968|gb|EAL86301.1| short chain dehydrogenase (AtsC), [Aspergillus fumigatus Af293] short chain
  misc_feature (5)..(218): SWISSPROT Homolog: EC 1.1.1.62 Estradiol 17-beta-dehydrogenase
  misc_feature (5)..(218): SWISSPROT Homolog: EC 1.1.1.270 3-keto-steroid reductase
MSTYVITGASRGLGFAFLRELSSDPDNTVVGLVRDVKNSEQKVSAELAGRSNIHIVSGDLTNHGSLKAAAEQVSAITGGKLDYLIANAAYVPTVDGYCAVGQVYGPISFRPASTSPREATPEDAAEQFRSAIETNVIGSLALYQAFVPLIIRGKVKKVVSMTTGMADVDFINQNDVEYGALYSASKGALNVINAKFSAQYKKQGVLFLGISPGVVDTGYFTPETNSTSNDVVSEPVSPEDITGLQGMLAVFQQYAPHFKGPVTPEVAVRQVIKVYENASIEKGFGGKMVSQYGNTQWL

SEQ ID NO: 36898 - DNA, 1554 bp, Muscodor strobelii
  misc_feature: SGI cDNA ID NO. 572797
  misc_feature: Encodes the peptide sequence at SEQ ID NO 36899
atgactctcatcttctccttggccgtatacggcatcctgctgctccagtcactggtagtcgcaatgccgttccctcgctatttcgaaagagattctattacccggcgcaacctgactacctctatgatcgagaaggagttggggcccatcctgtccgttggcacactcatattcggtcccgaggactctaatttcaccgacgcggcttcacgatggaacgaattcgtacagccccacgtggagattgttgtagaaccggcccaagagtccgacatctcgataattgtcaaatactgcaacgagaatagcatcgagtttgtggcaaagagccgcggccacggattcacaacgtccctcaatgtctttcgaggcctacagatcagcctgaaccagctccaggccttggaaatagccgccgacggacagacggccttcatccagggcggagtctgggctaagccgactatcgagaccatctgggacgcgggatatgtcacaagcaccggatctgctgaatgtgttggtctagggggcctcactctgggcggcggccatgggcgcctcgagggtctctatggcctcgtcgcggatggtgtcgtgcacttcaacgtcgtgacggccgacggttcggagataggggtaaacgcgaccagccacgtagacctcttctgggccatgagaggtgccggtcacaactttggcatcgtgacgagctcccgggtcaagatccacccccggccggaaaacacgtggcattatcatacctatgtctggacgggagataagttagagaccgtcttcgaagaaattaacaagctgcacaggagtgtcaatggcaccgcgcccgtctcactgggcctggagtctggtctatacagtattgatccgagcgttagcgagaccgagccggtgatctcttggaatttcgcgtacaatagtcttcctgaggaggcagcagcattactggcacctttcaacgccatcccggccgtctcggccaacgggaccgacgtcccctatgtcgatatccccgatgtggcgggaacggcgctggacagccccatctgccacccgggtcataacgtagtggccaatgccctgatccgagagtacaacgtgacggcccagcgccagctctacgatctgtttgcgcaaaaagtggcgcagtaccccgcgctaggaccgatttccgtcttagcccacgagggttacgggaacaaggccgtccaggacatcccgtcacaatcgacggcctacccttaccgagaacagaactttctagtctacctactagcctcgctaccagacggttctgatctcctagacgtggctctgaaatgggccgaggagtcattcgatctctgggtcgcgggtcagggcccggatgagacagcgaagacgtacgtgaactactcgtggggccatccttgggagacggtcgagtccatgtacggcgacgagaggtggcgcctggaccgccttcgtcatctcaaggctagatatgaccccttcaaccgctttcgcttctacagtccgatcattgccgccgaatag

SEQ ID NO: 36899 - protein, 517 aa, Muscodor strobelii
  misc_feature: SGI Peptide ID NO. 572797
  misc_feature (80)..(215): Pfam Id: PF01565 Pfam Desc: FAD binding domain
  misc_feature (1)..(514): NCBI GI: 39970897 Blast Desc: MGG_02915 [Magnaporthe grisea 70-15] gi|149210401|ref|XP_001522575.1| MGCH7_ch7g678 [Magnaporthe grisea 70-15] gi|86196633|gb|EAQ71271.1| MGCH7_ch7g678 grisea
  misc_feature (18)..(514): NCBI GI: 261358233 Blast Desc: FAD binding domain-containing protein [Verticillium albo-atrum VaMs.102]
  misc_feature (14)..(517): NCBI GI: 85089908 Blast Desc: NCU09635 [Neurospora crassa OR74A] gi|28919498|gb|EAA28930.1| conserved [Neurospora crassa OR74A]
  misc_feature (32)..(514): NCBI GI: 149211333 Blast Desc: MGCH7_ch7g1123 [Magnaporthe grisea 70-15] gi|86197078|gb|EAQ71716.1| MGCH7_ch7g1123 [Magnaporthe grisea 70-15]
  misc_feature (5)..(514): NCBI GI: 170940309 Blast Desc: protein product [Podospora anserina]
  misc_feature (33)..(514): NCBI GI: 85119273 Blast Desc: NCU02927 [Neurospora crassa OR74A] gi|28927420|gb|EAA36373.1| [Neurospora crassa OR74A]
  misc_feature (7)..(513): NCBI GI: 39943374 Blast Desc: MGG_10907 [Magnaporthe grisea 70-15] gi|145010943|gb|EDJ95599.1| MGG_10907 [Magnaporthe grisea 70-15]
  misc_feature (1)..(517): NCBI GI: 171681662 Blast Desc: protein product [Podospora anserina] gi|170940790|emb|CAP66439.1| protein product [Podospora anserina]
  misc_feature (1)..(516): NCBI GI: 67528330 Blast Desc: AN4363.2 [Aspergillus nidulans FGSC A4] gi|40741334|gb|EAA60524.1| AN4363.2 [Aspergillus nidulans FGSC A4] gi|259482827|tpe|CBF77678.1| TPA: conserved [Aspergillus FGSC
  misc_feature (96)..(514): NCBI GI: 226885245 Blast Desc: dehydrogenase [Sordaria macrospora]
MTLIFSLAVYGILLLQSLVVAMPFPRYFERDSITRRNLTTSMIEKELGPILSVGTLIFGPEDSNFTDAASRWNEFVQPHVEIVVEPAQESDISIIVKYCNENSIEFVAKSRGHGFTTSLNVFRGLQISLNQLQALEIAADGQTAFIQGGVWAKPTIETIWDAGYVTSTGSAECVGLGGLTLGGGHGRLEGLYGLVADGVVHFNVVTADGSEIGVNATSHVDLFWAMRGAGHNFGIVTSSRVKIHPRPENTWHYHTYVWTGDKLETVFEEINKLHRSVNGTAPVSLGLESGLYSIDPSVSETEPVISWNFAYNSLPEEAAALLAPFNAIPAVSANGTDVPYVDIPDVAGTALDSPICHPGHNVVANALIREYNVTAQRQLYDLFAQKVAQYPALGPISVLAHEGYGNKAVQDIPSQSTAYPYREQNFLVYLLASLPDGSDLLDVALKWAEESFDLWVAGQGPDETAKTYVNYSWGHPWETVESMYGDERWRLDRLRHLKARYDPFNRFRFYSPIIAAE

SEQ ID NO: 36900 - DNA, 1590 bp, Muscodor strobelii
  misc_feature: SGI cDNA ID NO. 572798
  misc_feature: Encodes the peptide sequence at SEQ ID NO 36901
atggaagagagtctgctggtgaaatgcatgcccgtgatcgaccgaaaggaggccccaacggccccaacggctccgagagtagccccaaaacgctccgtccacggagtcggcgtacgggcgaagcggcaggcagtcaagtcgcgtgtgttctggcccagcgcaaacgatcacagacggacgctggtggtaaaccccccttctaacaaggacgcagagagctggaacccgtcttcccattttgtccacgtgtcgtcatgtgacatcgaggtgcaccgcaagctgactgctgccaaactcgagcaccgccatgtcggcggcggtgtggacttggtcctgtccaccaacccgcccgccttgaatatccccctgagctggaatccgcacactaccaaggccgacgacgcacacctcctgcagtacttccaccatgttgcatcgcatgccctttcgagctttggcttggagtccatcgacctcggcggcatactcgtccgcatggcgtcggtagacgactcggccttcactacggcgctgcacaagtccatcttagccttctcatccttgcatcgatatggtcctcacttgcaagccctggaacttaagacctcggcccttgcagccctgggtgcagccttgggcgccgacatcagcacgagcaaggacctcgacgcaaaacaggcgctgcaacatgtcactaccgacatgttgctatattctttcgaaatccaccaagcatctgcgacgtcaggtgactggacccaatatctctgcggtgcggagcatgtcatccgcaccacgagcctcaacaccacacgcgaccgggatgctgcctctgtcctcgactgggtttattaccacgaggtaatgggccgtttcacgctcaagcactggcacgaccaaggaaagggcctaagaatcgtcatttaccccccacatatccgatccgaggcatctcttgcaacgcagtccgctatggaaatgctagaccttctctataagatctacgagaccgtcacggccgacaaagcggggcgccgtagctgtactaagtctaccccgcccgttttctcggccgaggaaagagagcggttcaaggtcttgacctggaagctcgagaacactccaacccgcgatgccgtggacgagaccttccagctcgcggccctgctctatctcgaccgggtcgtttcaggcgccttgcatcagccgctccacattcagtcacgcgtggaccacgccttttccaccttgcttccgcgcctgccagcgtacggtcggcggtgccccctattcgccgtcttcgtcctgggtgccgaggcgcgcaccgaccaacagcgcgccgtcatcctggacctcctccagtccccctctccctccattccccagtccgagacgacggctgtgagcgacgaccccgacgccgtcctggtcgccgctacggctccacgcccgactgagcatatccgcctcctgctcgaggcgctctgggctcaggaagacctccgcgacaagcagtacggcgacctcgaatacaggagcagactgacgtacaccattagccggtctttgactcctccctgctttgcctag

SEQ ID NO: 36901 - protein, 529 aa, Muscodor strobelii
  misc_feature: SGI Peptide ID NO. 572798
  misc_feature (51)..(528): NCBI GI: 171681172 Blast Desc: protein product [Podospora anserina] gi|170940544|emb|CAP65772.1| protein product [Podospora anserina]
  misc_feature (122)..(528): NCBI GI: 258575183 Blast Desc: [Uncinocarpus reesii 1704] gi|237902039|gb|EEP76440.1| [Uncinocarpus reesii 1704]
  misc_feature (119)..(529): NCBI GI: 169613577 Blast Desc: SNOG_09919 [Phaeosphaeria nodorum SN15] gi|111061134|gb|EAT82254.1| SNOG_09919 [Phaeosphaeria nodorum SN15]
  misc_feature (144)..(453): NCBI GI: 261358229 Blast Desc: conserved [Verticillium albo-atrum VaMs.102]
  misc_feature (20)..(507): NCBI GI: 256730463 Blast Desc: NECHADRAFT_73999 [Nectria haematococca mpVI 77-13-4]
  misc_feature (143)..(528): NCBI GI: 67522384 Blast Desc: AN1649.2 [Aspergillus nidulans FGSC A4] gi|40745613|gb|EAA64769.1| [Aspergillus nidulans FGSC A4] gi|259486985|tpe|CBF85292.1| TPA: conserved [Aspergillus nidulans
  misc_feature (145)..(520): NCBI GI: 238494944 Blast Desc: conserved [Aspergillus flavus NRRL3357] gi|220695358|gb|EED51701.1| conserved [Aspergillus flavus NRRL3357]
  misc_feature (61)..(529): NCBI GI: 256721370 Blast Desc: NECHADRAFT_82373 [Nectria haematococca mpVI 77-13-4]
  misc_feature (118)..(528): NCBI GI: 256724599 Blast Desc: NECHADRAFT_84314 [Nectria haematococca mpVI 77-13-4]
  misc_feature (82)..(529): NCBI GI: 212532425 Blast Desc: conserved [Penicillium marneffei ATCC 18224] gi|210071733|gb|EEA25822.1| conserved [Penicillium marneffei ATCC 18224]
MEESLLVKCMPVIDRKEAPTAPTAPRVAPKRSVHGVGVRAKRQAVKSRVFWPSANDHRRTLVVNPPSNKDAESWNPSSHFVHVSSCDIEVHRKLTAAKLEHRHVGGGVDLVLSTNPPALNIPLSWNPHTTKADDAHLLQYFHHVASHALSSFGLESIDLGGILVRMASVDDSAFTTALHKSILAFSSLHRYGPHLQALELKTSALAALGAALGADISTSKDLDAKQALQHVTTDMLLYSFEIHQASATSGDWTQYLCGAEHVIRTTSLNTTRDRDAASVLDWVYYHEVMGRFTLKHWHDQGKGLRIVIYPPHIRSEASLATQSAMEMLDLLYKIYETVTADKAGRRSCTKSTPPVFSAEERERFKVLTWKLENTPTRDAVDETFQLAALLYLDRVVSGALHQPLHIQSRVDHAFSTLLPRLPAYGRRCPLFAVFVLGAEARTDQQRAVILDLLQSPSPSIPQSETTAVSDDPDAVLVAATAPRPTEHIRLLLEALWAQEDLRDKQYGDLEYRSRLTYTISRSLTPPCFA

SEQ ID NO: 36902 - DNA, 2120 bp, Muscodor strobelii
  misc_feature: SGI EST ID NO. CUFF.88134.0
  misc_feature: Variant of the nucleotide sequence at SEQ ID NO 36900
ccgccaaatttgtgcatccaatcctccacgagcatggaagagagtctgctggtgaaatgcatgcccgtgatcgaccgaaaggaggccccaacggccccaacggctccgagagtagccccaaaacgctccgtccacggagtcggcgtacgggcgaagcggcaggcagtcaagtcgcgtgtgttctggcccagcgcaaacgatcacagacggacgctggtggtaaaccccccttctaacaaggacgcagagagctggaacccgtcttcccattttgtccacgtgtcgtcatgtgacatcgaggtgcaccgcaagctgactgctgccaaactcgagcaccgccatgtcggcggcggtgtggacttggtcctgtccaccaacccgcccgccttgaatatccccctgagctggaatccgcacactaccaaggccgacgacgcacacctcctgcagtacttccaccatgttgcatcgcatgccctttcgagctttggcttggagtccatcgacctcggcggcatactcgtccgcatggcgtcggtagacgactcggccttcactacggcgctgcacaagtccatcttagccttctcatccttgcatcgatatggtcctcacttgcaagccctggaacttaagacctcggcccttgcagccctgggtgcagccttgggcgccgacatcagcacgagcaaggacctcgacgcaaaacaggcgctgcaacatgtcactaccgacatgttgctatattctttcgaaatccaccaagcatctgcgacgtcaggtgactggacccaatatctctgcggtgcggagcatgtcatccgcaccacgagcctcaacaccacacgcgaccgggatgctgcctctgtcctcgactgggtttattaccacgaggtaatgggccgtttcacgctcaagcactggcacgaccaaggaaagggcctaagaatcgtcatttaccccccacatatccgatccgaggcatctcttgcaacgcagtccgctatggaaatgctagaccttctctataagatctacgagaccgtcacggccgacaaagcggggcgccgtagctgtactaagtctaccccgcccgttttctcggccgaggaaagagagcggttcaaggtcttgacctggaagctcgagaacactccaacccgcgatgccgtggacgagaccttccagctcgcggccctgctctatctcgaccgggtcgtttcaggcgccttgcatcagccgctccacattcagtcacgcgtggaccacgccttttccaccttgcttccgcgcctgccagcgtacggtcggcggtgccccctattcgccgtcttcgtcctgggtgccgaggcgcgcaccgaccaacagcgcgccgtcatcctggacctcctccagtccccctctccctccattccccagtccgagacgacggctgtgagcgacgaccccgacgccgtcctggtcgccgctacggctccacgcccgactgagcatatccgcctcctgctcgaggcgctctgggctcaggaagacctccgcgacaagcagtacggcgacctcgaatacaggagcagactgacgtacaccattagccggtctttgactcctccctgctttgcctagactgggaagtgagcttctggggcgggtcctgccgtttttctattgcttgcttgtttcctaaactgcctcgaagaaagctcgggttttgatgttctgtggtttaatgttcagttgcttgcaagaaggtaaaggtgcgtttagaacaataaaacaaagatcgagagtaaaatggagagcttattattttctaggtttgagtacctgctcttttctcgtgccctgtgttgtctcgttcgtctgggcgatctaaactccggctttatctgagatgacccagaaacccgtcgcaatcccccaagccaaaggcagcttgtaacgcatctctgtcaaaccccaacctctcgatttcaataatgaccctcttcgccccacttacaaatggcagttcaagcgctgtcggacttggttggccgtttcttcttctccgagtcccaagcttctactcaaatgacactagcattgacaagagccaaactgacaattataatgcattactg

SEQ ID NO: 36903 - DNA, 816 bp, Muscodor strobelii
  misc_feature: SGI cDNA ID NO. 572799
  misc_feature: Encodes the peptide sequence at SEQ ID NO 36904
atgccctcgtacgtcgtgactggagtctcccagggcctgggcgcagaattcctccgccagctctcctctgaccccaataacaccgtcatcggtctcgtccgagacaaagccgcgactgacaagaaggtcgccgccgagatcggtggtcgctccaacgtccacatcctccgtgccgacctgacgagtcacgccgacctcaagcaggccgctgttgacaccgccaccatcactggcggcagcgtcgactatctcatcgcgaatgcagcttacgtcactagcttcgactcatttgatggtatcgataccttggccgagacaaagtccaaggagctccgcgacgacttccacctcctccttgacgtcaacgtcatcggcaacgtgtacttcttcaacgcattcatgcccctcgtcctcaagggcaccggcaagaaggtccttaccatcacaaccggcctggccgacctgggcatcacgcgggaggtcgatctgaagcagggcgcgctatatggcgcttccaaggccgccatgaacgtcatcacggccaagttcgccgcccagtacaaggaggatggcgtcacgttcgtcggcgtgtgcccagggtcggttgacaccggcaagagcatggaaggcttgacgcaggagcagatgcagtccctcggagagctttttggcaagttccagaagtatcagccggccttcaagggccaggacccgctaaacgtcgccatccccggcgtcctcaagatcttcgacaatgccacgttgaaggactcgggcgcctttctctcccacaccggtaccgaccggtggctatga

SEQ ID NO: 36904 - protein, 271 aa, Muscodor strobelii
  misc_feature: SGI Peptide ID NO. 572799
  misc_feature (2)..(188): Pfam Id: PF00106 Pfam Desc: short chain dehydrogenase
  misc_feature (1)..(271): NCBI GI: 189201619 Blast Desc: conserved [Pyrenophora tritici-repentis Pt-1C-BFP] gi|187984245|gb|EDU49733.1| conserved [Pyrenophora tritici-repentis Pt-1C-BFP]
  misc_feature (1)..(271): NCBI GI: 119473497 Blast Desc: short chain dehydrogenase (AtsC), [Neosartorya fischeri NRRL 181] gi|119406777|gb|EAW16727.1| short chain dehydrogenase (AtsC), [Neosartorya fischeri NRRL 181]
  misc_feature (1)..(271): NCBI GI: 121714479 Blast Desc: short chain dehydrogenase (AtsC), [Aspergillus clavatus NRRL 1] gi|119403004|gb|EAW13424.1| short chain dehydrogenase (AtsC), [Aspergillus clavatus NRRL 1]
  misc_feature (1)..(271): NCBI GI: 67522387 Blast Desc: AN1650.2 [Aspergillus nidulans FGSC A4] gi|40745614|gb|EAA64770.1| AN1650.2 [Aspergillus nidulans FGSC A4] gi|259486986|tpe|CBF85294.1| TPA: short chain dehydrogenase
  misc_feature (1)..(271): NCBI GI: 238494946 Blast Desc: short chain dehydrogenase (AtsC), [Aspergillus flavus NRRL3357] gi|220695359|gb|EED51702.1| short chain dehydrogenase (AtsC), [Aspergillus flavus NRRL3357]
  misc_feature (1)..(271): NCBI GI: 226281597 Blast Desc: conserved [Paracoccidioides brasiliensis Pb01]
  misc_feature (1)..(271): NCBI GI: 258575181 Blast Desc: conserved [Uncinocarpus reesii 1704] gi|237902038|gb|EEP76439.1| conserved [Uncinocarpus reesii 1704]
  misc_feature (1)..(271): NCBI GI: 242772417 Blast Desc: short chain dehydrogenase (AtsC), [Talaromyces stipitatus ATCC 10500] gi|218721654|gb|EED21072.1| short chain dehydrogenase (AtsC), [Talaromyces stipitatus ATCC 10500]
  misc_feature (1)..(271): NCBI GI: 256730666 Blast Desc: NECHADRAFT_29697 [Nectria haematococca mpVI 77-13-4]
  misc_feature (1)..(271): NCBI GI: 169777733 Blast Desc: [Aspergillus oryzae RIB40] gi|83772069|dbj|BAE62199.1| protein product [Aspergillus oryzae]
  misc_feature (5)..(217): SWISSPROT Homolog: EC 1.1.1.47 Glucose 1-dehydrogenase
MPSYVVTGVSQGLGAEFLRQLSSDPNNTVIGLVRDKAATDKKVAAEIGGRSNVHILRADLTSHADLKQAAVDTATITGGSVDYLIANAAYVTSFDSFDGIDTLAETKSKELRDDFHLLLDVNVIGNVYFFNAFMPLVLKGTGKKVLTITTGLADLGITREVDLKQGALYGASKAAMNVITAKFAAQYKEDGVTFVGVCPGSVDTGKSMEGLTQEQMQSLGELFGKFQKYQPAFKGQDPLNVAIPGVLKIFDNATLKDSGAFLSHTGTDRWL

SEQ ID NO: 36905 - DNA, 1248 bp, Muscodor strobelii
  misc_feature: SGI EST ID NO. CUFF.88169.1
  misc_feature: Variant of the nucleotide sequence at SEQ ID NO 36903
tagaaataaggatgtctgaaatgctgtatataattaaatatccagggtcagagccgcgacattatggacaaaagacagcttcatctcctctgctcatatcaccatcagctcaacgactccgaaagcccctattttacgcgcataaggtaaagctctttttgcaaacatgccctcgtacgtcgtgactggagtctcccagggcctgggcgcagaattcctccgccagctctcctctgaccccaataacaccgtcatcggtctcgtccgagacaaagccgcgactgacaagaaggtcgccgccgagatcggtggtcgctccaacgtccacatcctccgtgccgacctgacgagtcacgccgacctcaagcaggccgctgttgacaccgccaccatcactggcggcagcgtcgactatctcatcgcgaatgcagcttacgtcactagcttcgactcatttgatggtatcgataccttgtatgtgttgtctccctctcacatctttttccccgtgctccccatctcccagagcccgtcgaggaatcgggccaaggtagtgcagactgaccgacgcgtctcgaatccagggccgagacaaagtccaaggagctccgcgacgacttccacctcctccttgacgtcaacgtcatcggcaacgtgtacttcttcaacgcattcatgcccctcgtcctcaagggcaccggcaagaaggtccttaccatcacaaccggcctggccgacctgggcatcacgcgggaggtcgatctgaagcagggcgcgctatatggcgcttccaaggccgccatgaacgtcatcacggccaagttcgccgcccagtacaaggaggatggcgtcacgttcgtcggcgtgtgcccagggtcggttgacaccggcaagagcatggaaggcttgacgcaggagcagatgcagtccctcggagagctttttggcaagttccagaagtatcagccggccttcaagggccaggacccgctaaacgtcgccatccccggcgtcctcaagatcttcgacaatgccacgttgaaggactcgggcgcctttctctcccacaccggtaccgaccggtggctatgaggaggattcagcttcggcgtggtgtgatatgcctcggagacagtcggtgtgtgcaactatgatagatcaactatcccttgatgtggtagtcgttgctcgctcacgtgacttttcctcttaggtagtccagacagtgaaaaatgcgattagacttcg

SEQ ID NO: 36906 - DNA, 2046 bp, Muscodor strobelii
  misc_feature: SGI cDNA ID NO. 572800
  misc_feature: Encodes the peptide sequence at SEQ ID NO 36907
atgaatcttgccgaggctactgcggtggtagacaatcccgtcgagcgaccgcggcagcaaccgggacacgcgtgtgaagcatgtcgacagaagcgcatccgttgcgataggggggcgcccaagtgcgccgcatgcgcaagttcaggcttagaatgtgttgtcaagatcactcgcccgcccagagggccgaaaaaggggtatatccaggctctgcggaggaagattgacgatctccagatcctcttaagtagtcaacaagaagaagcaggggaaggcggcagcgccatcacagtcgctgctgagaacgccatcatcgagtcgacatcgccccgccaaatgtctagtgccggagcgaacgagaacggcgacagcagcagcgtgggacatagcagcgataacctgctcgtggacagcgcgccagacggttactatggtagtcatagcgactgtgtcaactctcggcctccaccagtgtcggcggtcggcagttctatattaaccttgccctatttctgggacggctccgagggcctgcaagcgaattttgcgttcccggctgtagaccatttccagccgcaggcgtccctcgggacggactttcctcttgcccctattgtgtggaaggacctatcagctagagatctactattcttcgaccgggcatacgctttctcacctgtggtgcagggacatcggtaccgtgcttggtctgcacggcccgacaagagcaagcagagaacatgtctgcagtacgccatgtggacactggcttcttccttctccagccagttccgcgatatacgagacagcctctatcacgaggctcgtcaacggctgcatgatctcgagtcggacaagactcagcaggcgcagccagagccggacctgatttcctacagcatctccattgagcaggttcaagcctgggtgcttctcgccctctacgagctaacgagcgacgccagcaactatcagcgcggcatcatttcggcgggaagagcgtttcgcatggtgcagatgatgaggctacacgacatcgacagatttgaccaggacctgacatgtccccatgggcaagctcaaggcgactggatcgacatcgagtccatgagacgaacgttctggctggcttataccatcgaccgcttcaccagcatggtcgatggtctccacctggcatttgatgagcaacagatccgcacacggatgccagcacctgacgcctactttgcgagtggccagcctatcaccatgtgcttcctttccgacatgatgaacgacgaaatacaggcagagtggcacaccatttcgcccttcgctgggtgtgtcgtcgtcgccacattatgcggaagggccctgcaacaccaacaggaaggactcccggcgcagcaacctcggccaccacgacgacagcagcagcagaagcgctctacctgtcttgaccagaacggagacgcagtatacgacttctgctgccgtcaccgcctcctccacgcgcttttggcccagcatgccaagctgttgcgcacgcagttctcctcgcccctggagcatcccaatctggccccagaccccatatacatcttcgtagccctggcggcgtgcatggccgtcttcctcctccatggagccgccgagtccaatgcgctggggagcagtgcccaggaaacacagctcgtcgacgccctgctcgcggagcaaaggcagtataccctagatgccgtacgagagctcggcgcactcgttaccgttgccagccaacagagccacttccaggtaggtctccctccccctccccctttaccccacgccctgcatggctcacctgagggtacgtccgttcgtctgcagatacatcctttcacaccgattccgctttttctgagcgccaagttctgtctggcacacgcggtgcaagacgaagcatacagcgccgtcgtgcagcccattgcgaaagtcctacaagacttgacccatgtcaacaagctagcgcgcacattctaccagttactgggctttgatcccggcacgagccccatggggtga

SEQ ID NO: 36907 - protein, 681 aa, Muscodor strobelii
  misc_feature: SGI Peptide ID NO. 572800
  misc_feature (23)..(61): Pfam Id: PF00172 Pfam Desc: Fungal Zn(2)-Cys(6) binuclear cluster domain
  misc_feature (302)..(408): Pfam Id: PF04082 Pfam Desc: Fungal specific transcription factor domain
  misc_feature (18)..(671): NCBI GI: 67523159 Blast Desc: AN2036.2 [Aspergillus nidulans FGSC A4] gi|40745712|gb|EAA64868.1| AN2036.2 [Aspergillus nidulans FGSC A4] gi|259487403|tpe|CBF86054.1| TPA: Zn(II)2Cys6 transcription
  misc_feature (18)..(664): NCBI GI: 212539085 Blast Desc: conserved [Penicillium marneffei ATCC 18224] gi|210069440|gb|EEA23531.1| conserved [Penicillium marneffei ATCC 18224]
  misc_feature (18)..(664): NCBI GI: 242819640 Blast Desc: conserved [Talaromyces stipitatus ATCC 10500] gi|218713824|gb|EED13248.1| conserved [Talaromyces stipitatus ATCC 10500]
  misc_feature (18)..(673): NCBI GI: 121719478 Blast Desc: fungal specific transcription factor domain protein [Aspergillus clavatus NRRL 1] gi|119404636|gb|EAW15012.1| fungal specific transcription factor domain protein [Aspergillus NRRL 1]
  misc_feature (18)..(593): NCBI GI: 67525855 Blast Desc: AN3385.2 [Aspergillus nidulans FGSC A4] gi|40744173|gb|EAA63353.1| AN3385.2 [Aspergillus nidulans FGSC A4] gi|259485629|tpe|CBF82814.1| TPA: Zn(II)2Cys6 transcription
  misc_feature (10)..(666): NCBI GI: 115390236 Blast Desc: [Aspergillus terreus NIH2624] gi|114195019|gb|EAU36719.1| [Aspergillus terreus NIH2624]
  misc_feature (7)..(592): NCBI GI: 85091890 Blast Desc: NCU04866 [Neurospora crassa OR74A] gi|28920523|gb|EAA29887.1| [Neurospora crassa OR74A]
  misc_feature (13)..(681): NCBI GI: 106879078 Blast Desc: citrinin biosynthesis transcriptional activator CtnR [Monascus purpureus]
  misc_feature (16)..(671): NCBI GI: 259480645 Blast Desc: TPA: Zn(II)2Cys6 transcription factor (Eurofung) [Aspergillus nidulans FGSC A4]
  misc_feature (214)..(671): NCBI GI: 212539225 Blast Desc: conserved [Penicillium marneffei ATCC 18224] gi|210069510|gb|EEA23601.1| conserved [Penicillium marneffei ATCC 18224]
MNLAEATAVVDNPVERPRQQPGHACEACRQKRIRCDRGAPKCAACASSGLECVVKITRPPRGPKKGYIQALRRKIDDLQILLSSQQEEAGEGGSAITVAAENAIIESTSPRQMSSAGANENGDSSSVGHSSDNLLVDSAPDGYYGSHSDCVNSRPPPVSAVGSSILTLPYFWDGSEGLQANFAFPAVDHFQPQASLGTDFPLAPIVWKDLSARDLLFFDRAYAFSPVVQGHRYRAWSARPDKSKQRTCLQYAMWTLASSFSSQFRDIRDSLYHEARQRLHDLESDKTQQAQPEPDLISYSISIEQVQAWVLLALYELTSDASNYQRGIISAGRAFRMVQMMRLHDIDRFDQDLTCPHGQAQGDWIDIESMRRTFWLAYTIDRFTSMVDGLHLAFDEQQIRTRMPAPDAYFASGQPITMCFLSDMMNDEIQAEWHTISPFAGCVVVATLCGRALQHQQEGLPAQQPRPPRRQQQQKRSTCLDQNGDAVYDFCCRHRLLHALLAQHAKLLRTQFSSPLEHPNLAPDPIYIFVALAACMAVFLLHGAAESNALGSSAQETQLVDALLAEQRQYTLDAVRELGALVTVASQQSHFQVGLPPPPPLPHALHGSPEGTSVRLQIHPFTPIPLFLSAKFCLAHAVQDEAYSAVVQPIAKVLQDLTHVNKLARTFYQLLGFDPGTSPMG

SEQ ID NO: 36908 - DNA, 1284 bp, Muscodor strobelii
  misc_feature: SGI cDNA ID NO. 572801
  misc_feature: Encodes the peptide sequence at SEQ ID NO 36909
atgacagacgggcaatatgaacggcccgttctcacggtcctgatcgtgggctgcggtctcagtggactggcgtccgctctggctttagggcaagccggacaccgcgtgaccgttttcgagcgtagtcccaagctacaagaaatcggtgccggcatacagctatctccaaatgctacacgactgctccgtcattggggtgtcctcgatgaggtcctcaagtatgcgcaccgtcctgagtctgcgacattccgatcctatcgaggcgagttcgtatcgcactccccgcccgtttcggatccgagattgatcgacaatgctccctacatcatggtccatcgtgccgatctcttgagagccctcctatccggcataggagatcatgcgattgagatcaaactcggtactgaagtgaaagggatcaacttcgacaagccctcgatactgttatccaaaggcgaagaatttgaagcagatctggtcttaggggccgacggacagaggtcgcatggcaggggaagcatgctgggtcatccagatcccccttacagccttggagatgtcgtgtatcgagtcgcagttcctaccaaacatatagaccggaaccatccagcctgggacttaatagatcagtttaggatcaatctgtggatgggaccagggagacatgtggttgtataccccatccaggacggtatgctcaacgtggtcctcatctgcaccgagggaacggatagcatgcccatgtacggtccccaaacagtagaactagaggaactacgaagcatgatctacgactgggatccggttctccacgagctgatgaacgtggaaggctcactctgcacaaagtggactctgttccatatccatgagcagatgcgatggcgccacgacagtgggagatttctcctcattggtgatgccgctcacgccatactaccctgcctagctcaaggtgcggctcaggccttcgaggacgcaggcgtcctaggagcgatattcagccaatcgatgatcagcgatcggataccagaagccctacgggtgtttgaacaagtgcgccagccacgcgcgtccgaggtccgacatcgcaccattgaccagaaggacatgtatgcccttgcaaacggcccgctccaggcagaacgcgatgtcaagcttactgcaggcgcggattatgagctgttcaagtggctctgggagtacgacgccacggcgagcggacgggaggcgtggaaggcagtcaccgagattcagcaagagcagattggctaccccctgtag

SEQ ID NO: 36909 - protein, 427 aa, Muscodor strobelii
  misc_feature: SGI Peptide ID NO. 572801
  misc_feature (12)..(274): Pfam Id: PF01266 Pfam Desc: FAD dependent oxidoreductase
  misc_feature (10)..(365): Pfam Id: PF01494 Pfam Desc: FAD binding domain
  misc_feature (20)..(45): Pfam Id: PF01593 Pfam Desc: Flavin containing amine oxidoreductase
  misc_feature (12)..(41): Pfam Id: PF01266 Pfam Desc: FAD dependent oxidoreductase
  misc_feature (12)..(43): Pfam Id: PF00890 Pfam Desc: FAD binding domain
  misc_feature (12)..(41): Pfam Id: PF07992 Pfam Desc: Pyridine nucleotide-disulphide oxidoreductase
  misc_feature (6)..(413): NCBI GI: 169613575 Blast Desc: SNOG_09918 [Phaeosphaeria nodorum SN15] gi|111061133|gb|EAT82253.1| SNOG_09918 [Phaeosphaeria nodorum SN15]
  misc_feature (1)..(409): NCBI GI: 261358228 Blast Desc: salicylate hydroxylase [Verticillium albo-atrum VaMs.102]
  misc_feature (13)..(413): NCBI GI: 258568520 Blast Desc: conserved [Uncinocarpus reesii 1704] gi|237906450|gb|EEP80851.1| conserved [Uncinocarpus reesii 1704]
  misc_feature (8)..(414): NCBI GI: 240110032 Blast Desc: FAD binding domain containing protein [Coccidioides posadasii C735 delta SOWgp]
  misc_feature (8)..(414): NCBI GI: 119184946 Blast Desc: CIMG_07216 [Coccidioides immitis RS]
  misc_feature (11)..(413): NCBI GI: 256723059 Blast Desc: NECHADRAFT_42474 [Nectria haematococca mpVI 77-13-4]
  misc_feature (9)..(412): NCBI GI: 238838861 Blast Desc: salicylate hydroxylase [Microsporum canis CBS 113480]
  misc_feature (10)..(413): NCBI GI: 202953394 Blast Desc: DEHA2F17820p [Debaryomyces hansenii]
  misc_feature (10)..(413): NCBI GI: 50425087 Blast Desc: DEHA0F19239g [Debaryomyces hansenii CBS767]
  misc_feature (11)..(425): NCBI GI: 170100905 Blast Desc: [Laccaria bicolor S238N-H82] gi|164643629|gb|EDR07881.1| [Laccaria bicolor S238N-H82]
  misc_feature (1)..(422): SWISSPROT Homolog: EC 1.14.13.1 Salicylate 1-monooxygenase
MTDGQYERPVLTVLIVGCGLSGLASALALGQAGHRVTVFERSPKLQEIGAGIQLSPNATRLLRHWGVLDEVLKYAHRPESATFRSYRGEFVSHSPPVSDPRLIDNAPYIMVHRADLLRALLSGIGDHAIEIKLGTEVKGINFDKPSILLSKGEEFEADLVLGADGQRSHGRGSMLGHPDPPYSLGDVVYRVAVPTKHIDRNHPAWDLIDQFRINLWMGPGRHVVVYPIQDGMLNVVLICTEGTDSMPMYGPQTVELEELRSMIYDWDPVLHELMNVEGSLCTKWTLFHIHEQMRWRHDSGRFLLIGDAAHAILPCLAQGAAQAFEDAGVLGAIFSQSMISDRIPEALRVFEQVRQPRASEVRHRTIDQKDMYALANGPLQAERDVKLTAGADYELFKWLWEYDATASGREAWKAVTEIQQEQIGYPL

SEQ ID NO: 36910 - DNA, 1026 bp, Muscodor strobelii
  misc_feature: SGI cDNA ID NO. 572802
  misc_feature: Encodes the peptide sequence at SEQ ID NO 36911
atgggtaccgtcgaagggtataccagaccgagccatggtgtcttctgtcttatccccgacacctgggttccctacgccgaattgatgcgcctcgaccgcttgtcgggcttctgggccttctactggcattatctgatcggcttgggcttcgctatcaatatccaacccttctccagccagctcgacctcgggtcccttactctcctcgcggcataccttggtttatggacaaccgtcttccgcggcatcacctgtacatggaacgacaacctggaccaggacttcgatcgccaggtggcacgctgtcgcgtgcgacccataccccggggcgccgtgactaccatgcaggcacacttgttcactgcatttcagatcgccgtgggcgccgccatcctgtatccgtacggccaatcgaccctctatcacgccgccgtggacagcgttctcttgttcatttaccctttgttgaagcgctgtactgactttccccaagttgagctgggcttcgggctgtcgtacgccgtattcttggtagccgcgtcggtcgggaaggatcccctggcaccgctgctagattcgtccctggatctctcatcccgcatctctcaggtcgttgagtcacccctgacccaatcggctacgtgcctctatgtcgccggcatactctggagcgtcatcttcgacaccatctacgcgcatcaggactatctcgacgacctgaaagccggagtcaaggggctcgccgtgcgattaggcaggaaaaggacgaaaccggcgtgttacctgatgggcgtcgtgcagatatactttctatatctagccggtgagctggcggggttcgggcagacatataccgccatatcgtgtggcgcgacgactgctacgctggcctggatgatatgggtcactgatttggaggatggtgcgagctgtgcatgggcatttggtcgtggaagtgcctacgtcggcgcctcgatctcggccggactcctggctgagttctggtctagaaaacatggattttga

SEQ ID NO: 36911 - protein, 341 aa, Muscodor strobelii
  misc_feature: SGI Peptide ID NO. 572802
  misc_feature (37)..(334): Pfam Id: PF01040 Pfam Desc: UbiA prenyltransferase family
  misc_feature (213)..(334): Pfam Id: PF01040 Pfam Desc: UbiA prenyltransferase family
  misc_feature (37)..(182): Pfam Id: PF01040 Pfam Desc: UbiA prenyltransferase family
  misc_feature (4)..(341): NCBI GI: 169613569 Blast Desc: SNOG_09915 [Phaeosphaeria nodorum SN15] gi|111061130|gb|EAT82250.1| SNOG_09915 [Phaeosphaeria nodorum SN15]
  misc_feature (7)..(334): NCBI GI: 119468072 Blast Desc: UbiA family prenyltransferase, [Neosartorya fischeri NRRL 181] gi|119405994|gb|EAW15945.1| UbiA family prenyltransferase, [Neosartorya fischeri NRRL 181]
  misc_feature (7)..(334): NCBI GI: 70991537 Blast Desc: 4-hydroxybenzoate polyprenyl transferase [Aspergillus fumigatus Af293] gi|66848250|gb|EAL88579.1| 4-hydroxybenzoate polyprenyl transferase, [Aspergillus fumigatus Af293] polyprenyl
  misc_feature (1)..(338): NCBI GI: 212543907 Blast Desc: 4-hydroxybenzoate octaprenyltransferase, [Penicillium marneffei ATCC 18224] gi|210067015|gb|EEA21108.1| 4-hydroxybenzoate octaprenyltransferase, [Penicillium marneffei
  misc_feature (7)..(341): NCBI GI: 212530070 Blast Desc: 4-hydroxybenzoate polyprenyl transferase, [Penicillium marneffei ATCC 18224] gi|210074590|gb|EEA28677.1| 4-hydroxybenzoate polyprenyl transferase, [Penicillium marneffei
  misc_feature (184)..(341): NCBI GI: 261358232 Blast Desc: para-hydroxybenzoate-polyprenyltransferase [Verticillium albo-atrum VaMs.102]
  misc_feature (10)..(334): NCBI GI: 145228445 Blast Desc: An01g00870 [Aspergillus niger] gi|134054620|emb|CAK43465.1| protein product [Aspergillus niger]
  misc_feature (20)..(337): NCBI GI: 154289480 Blast Desc: BC1G_16165 [Botryotinia fuckeliana B05.10] gi|150849204|gb|EDN24397.1| BC1G_16165 [Botryotinia fuckeliana B05.10]
  misc_feature (7)..(341): NCBI GI: 242765719 Blast Desc: para-hydroxybenzoate-polyprenyltransferase Coq2, [Talaromyces stipitatus ATCC 10500] gi|218724227|gb|EED23644.1| para-hydroxybenzoate-polyprenyltransferase Coq2, [Talaromyces
  misc_feature (7)..(330): NCBI GI: 169608107 Blast Desc: SNOG_07120 [Phaeosphaeria nodorum SN15] gi|111064651|gb|EAT85771.1| SNOG_07120 [Phaeosphaeria nodorum SN15]
MGTVEGYTRPSHGVFCLIPDTWVPYAELMRLDRLSGFWAFYWHYLIGLGFAINIQPFSSQLDLGSLTLLAAYLGLWTTVFRGITCTWNDNLDQDFDRQVARCRVRPIPRGAVTTMQAHLFTAFQIAVGAAILYPYGQSTLYHAAVDSVLLFIYPLLKRCTDFPQVELGFGLSYAVFLVAASVGKDPLAPLLDSSLDLSSRISQVVESPLTQSATCLYVAGILWSVIFDTIYAHQDYLDDLKAGVKGLAVRLGRKRTKPACYLMGVVQIYFLYLAGELAGFGQTYTAISCGATTATLAWMIWVTDLEDGASCAWAFGRGSAYVGASISAGLLAEFWSRKHGF

SEQ ID NO: 36912 - DNA, 511 bp, Muscodor strobelii
  misc_feature: SGI EST ID NO. CUFF.88127.0
  misc_feature: Variant of the nucleotide sequence at SEQ ID NO 36910
cctcgggtcccttactctcctcgcggcataccttggtttatggacaaccgtcttccgcggcatcacctgtacatggaacgacaacctggaccaggacttcgatcgccaggtggcacgctgtcgcgtgcgacccataccccggggcgccgtgactaccatgcaggcacacttgttcactgcatttcagatcgccgtgggcgccgccatcctgtatccgtacggccaatcgaccctctatcacgccgccgtggacagcgttctcttgttcatttaccctttgttgaagcgctgtactgactttccccaagttgagctgggcttcgggctgtcgtacgccgtattcttggtagccgcgtcggtcgggaaggatcccctggcaccgctgctagattcgtccctggatctctcatcccgcatctctcaggtcgttgagtcacccctgacccaatcggctacgtgcctctatgtcgccggcatactctggagcgtcatcttcgacaccatctacgcg

SEQ ID NO: 36913 - DNA, 1182 bp, Muscodor strobelii
  misc_feature: SGI cDNA ID NO. 572803
  misc_feature: Encodes the peptide sequence at SEQ ID NO 36914
atggccacctcaaccttgtccgtctcaaacgtctctttcgaccggatcgatcgagacatggagcctagccagaacctggacacgaccttctggtgggataccactggtccgtctcttaccacgctgttgaagaccagcaagtacagcgaagaagagcaagcttactatctccaatggtatcaggaatggatcatgagctctttcgggccggcgcccatcgacgggaagctctcttctcgctcgtcgttcacgcacgacgggtcgccgatcgagtttagcctcaattggcgggagaagaaggaggagggcgagacgatccggttctgcctcgagccaacgtccctggcccccggcgacgccgtcaaccggctcgaccagctggcggccaaggatctcctggtcgccctcgccgacaaggtgtccggcatcgacctggccaagttctatgccctgctatcggagttccgcgtgcctaaggagagcgcagcaggcatcctgcagaagattcaaccgggaataccacgattcctcgtgctaacggcctttgatctggaaaagggtggtatcatggccaaagcatacttcaacccagttcccaaagccatacacacgggcaagtcgaccaacgatgtcacacttgacgcggtgcgcacgttgcaaggacccgcggggacttacgccgcttcggttcaagtgatcgacagctatttcaaagcttttagggctggcgaggctccgttggtcttcctgctatcgaacgactgcgtccctgactctagcactggcccccgagtaaaagtatactgcagcaccttggccaacaccctggcccaggtccaattcgccttccacgcaggaggcaggatcacgagctctactacgcagggtggattagacgccatcaaagaattttggtgctaccggttcggactcgatagttctgatccggagatcaagaacaaggaggtcctagaagcgggcgcgaggacgacctttgtgtacgagatgaggcccgctcccgagggcgaagaggccaatattgaggtcaagatgcacatgcccggagcctggctcggccagaccgatgctgagatatgcgacgtgctatctacgtggttccgaaagtgtggccataccgcactggctgatcgatacgagaaagacttgcaggccacattgtaa

SEQ ID NO: 36914 - protein, 393 aa, Muscodor strobelii
  misc_feature: SGI Peptide ID NO. 572803
  misc_feature (22)..(390): NCBI GI: 154968291 Blast Desc: 7-dimethylallyltryptophan synthase [Aspergillus fumigatus]
  misc_feature (22)..(390): NCBI GI: 146323462 Blast Desc: dimethylallyl tryptophan synthase SirD-like [Aspergillus fumigatus Af293] gi|129558278|gb|EAL92290.2| dimethylallyl tryptophan synthase SirD-like, [Aspergillus Af293]
  misc_feature (22)..(390): NCBI GI: 119491023 Blast Desc: dimethylallyl tryptophan synthase GliD2 [Neosartorya fischeri NRRL 181] gi|119411332|gb|EAW21275.1| dimethylallyl tryptophan synthase GliD2 [Neosartorya fischeri NRRL 181]
  misc_feature (22)..(390): NCBI GI: 115433825 Blast Desc: [Aspergillus terreus NIH2624] gi|114189901|gb|EAU31601.1| [Aspergillus terreus NIH2624]
  misc_feature (22)..(390): NCBI GI: 238846194 Blast Desc: tryptophan dimethylallyltransferase [Microsporum canis CBS 113480]
  misc_feature (26)..(392): NCBI GI: 115449623 Blast Desc: [Aspergillus terreus NIH2624] gi|114187603|gb|EAU29303.1| [Aspergillus terreus NIH2624]
  misc_feature (25)..(391): NCBI GI: 119478629 Blast Desc: dimethylallyl tryptophan synthase, [Neosartorya fischeri NRRL 181] gi|119407559|gb|EAW17508.1| dimethylallyl tryptophan synthase, [Neosartorya fischeri NRRL 181]
  misc_feature (3)..(391): NCBI GI: 167427919 Blast Desc: 4-dimethylallyl tryptophan synthase [Malbranchea aurantiaca] gi|167427921|gb|ABZ80612.1| 4-dimethylallyl tryptophan synthase [synthetic construct]
  misc_feature (25)..(392): NCBI GI: 61814692 Blast Desc: brevianamide F prenyltransferase [Aspergillus fumigatus]
  misc_feature (24)..(393): NCBI GI: 169783720 Blast Desc: [Aspergillus oryzae RIB40] gi|83775066|dbj|BAE65189.1| protein product [Aspergillus oryzae]
  misc_feature (25)..(391): SWISSPROT Homolog: EC 2.5.1.34 Tryptophan dimethylallyltransferase
MATSTLSVSNVSFDRIDRDMEPSQNLDTTFWWDTTGPSLTTLLKTSKYSEEEQAYYLQWYQEWIMSSFGPAPIDGKLSSRSSFTHDGSPIEFSLNWREKKEEGETIRFCLEPTSLAPGDAVNRLDQLAAKDLLVALADKVSGIDLAKFYALLSEFRVPKESAAGILQKIQPGIPRFLVLTAFDLEKGGIMAKAYFNPVPKAIHTGKSTNDVTLDAVRTLQGPAGTYAASVQVIDSYFKAFRAGEAPLVFLLSNDCVPDSSTGPRVKVYCSTLANTLAQVQFAFHAGGRITSSTTQGGLDAIKEFWCYRFGLDSSDPEIKNKEVLEAGARTTFVYEMRPAPEGEEANIEVKMHMPGAWLGQTDAEICDVLSTWFRKCGHTALADRYEKDLQATL

SEQ ID NO: 36915 - DNA, 2046 bp, Muscodor strobelii
  misc_feature: SGI cDNA ID NO. 572804
  misc_feature: Encodes the peptide sequence at SEQ ID NO 36916
atggccactacagggcgctcattgaccgagatactcctatcacagctgcgtgatcctgcgccatccgtgacgacgccactcggaatcgatggagagagcctgacaatcgcagacgtcgtagccgtctcgagacatctagcccacgtcgagcttacgccgcagtccatcgccgctattcaagcctgtaccaacatcgtgtccgaaaaaatcgctaagggcgacatcatctacggtgtcaataccgggttcggcggcagcgccgatgcgagacccaacgatgtcgaaaaggttcagcaaagcctgatcagtcacttgacttgcggcatcgtctcagacggcaaacaaaatactattccaaggcaggtcaatgggcagtcgacccagacgaatggacatgcaatcaatatcaatggacatagaagcgagacgaatgggcattcaagcgatgccagtcggagcaagggagagagtcaaaccctcaagaacaaattgaacgggcaccaggaagtatccgtcgctgcgctaccgctgaacgatccgctcgccaccacttgcatgcccgagtcgtgggcccgggcgtctatgctgatccgtctgaactccctggctggcggcgcatctggtgtgagagttgagatcgccgattccctggtaagcctgcttaacaaggacatcgtgccgcggatccccgtacgcggaagcatatcggcgtcgggggaccttagcgcgctcgcatggatcggcgccctaatgcagggcaaaccgttagcgagtgcctttgctgggccacgcgagagcagcagcgggtcctccgctcgaagaataacgagggccgatgtggcgctggcggacgctggcatctcgcccattagcctacacgctaaggagggcctcgctatcgtcaacggcacggccgtgtctgcggcggtggcggccttggcagcgcacgaagccctgcacctggcggccctggcgcaggtacttacggccatgagcgtcgaggcgcttcggggcagcgacgagagctttgaaccctttattgcgcgtatgaggccacacccgggccaggtcgacagcgcgcaaaacatccgggctttcctctccggatcgcggctactaaacaggcatgatagtcaggacgaggcgacgctacgccaagaccgctactcgctacggaccgccagccagtggatcggccccgtgctcgaggacttcggtctagcctatgaccagctgacggttgagctgaattcggttacggacaacccgcttattgacgtcgccggagggtcgggccgtgttctccacgggggcaacttccaggctcgcgcggtcacgtcggccgtcgaaaagctccgacagggtctccaaggtctcggccgcatgctctttgcccagtgcaccgagatgatgaacccgaccacaagctggggcctgccgccgaacttgtgttccgacgaccctaatgattctttcctgtttaaaggcctggacgttgtcgtggccgctttggcgtcggagctaggattcttggcgaacccagtcggatcgcacgttcagacggccgagatgggcaaccagagcctcaactctatggcgctcgtgtcggcccgctacactctcgaggccgttgaagtgctgtcacagctcgcttcggcacatcttctagcactgtgccaagcgctggatcttcgcgcgatagagatcgagggccgaactagcgcccagccgaatgcagagccgtacatcggccaagcagcgcggcgcatgtaccgctttgttcgagaggatctcgccataccgttcctagacgaggcacatcttgcttccaatgaggctgcgagcgtagacgactggacgcccagcctcgggttgtataacacgcgaatctacgattcgattaggtcagggcgcctgtacgatgtcgttttgcagtgtttagcagacgtagaaagggagccggtcaacggcaccgcggcccaagacacggggcctggcaggaggttccgaactcggtccctgcgcggatttgggtcttgggattga

SEQ ID NO: 36916 - protein, 681 aa, Muscodor strobelii
  misc_feature: SGI Peptide ID NO. 572804
  misc_feature (26)..(596): Pfam Id: PF00221 Pfam Desc: Phenylalanine and histidine ammonia-lyase
  misc_feature (186)..(596): Pfam Id: PF00221 Pfam Desc: Phenylalanine and histidine ammonia-lyase
  misc_feature (26)..(122): Pfam Id: PF00221 Pfam Desc: Phenylalanine and histidine ammonia-lyase
  misc_feature (1)..(665): NCBI GI: 169613567 Blast Desc: SNOG_09914 [Phaeosphaeria nodorum SN15] gi|111061129|gb|EAT82249.1| SNOG_09914 [Phaeosphaeria nodorum SN15]
  misc_feature (4)..(652): NCBI GI: 39966379 Blast Desc: MGG_10036 [Magnaporthe grisea 70-15] gi|145015332|gb|EDJ99868.1| MGG_10036 [Magnaporthe grisea 70-15]
  misc_feature (29)..(577): NCBI GI: 169626166 Blast Desc: SNOG_16362 [Phaeosphaeria nodorum SN15] gi|111055228|gb|EAT76348.1| SNOG_16362 [Phaeosphaeria nodorum SN15]
  misc_feature (8)..(580): NCBI GI: 154314405 Blast Desc: BC1G_05296 [Botryotinia fuckeliana B05.10] gi|150848941|gb|EDN24134.1| BC1G_05296 [Botryotinia fuckeliana B05.10]
  misc_feature (27)..(570): NCBI GI: 238495156 Blast Desc: phenylalanine ammonia-lyase, [Aspergillus flavus NRRL3357] gi|220695464|gb|EED51807.1| phenylalanine ammonia-lyase, [Aspergillus flavus NRRL3357]
  misc_feature (175)..(570): NCBI GI: 145240489 Blast Desc: An08g07740 [Aspergillus niger] gi|134077411|emb|CAL00792.1| protein product [Aspergillus niger]
  misc_feature (47)..(570): NCBI GI: 169777919 Blast Desc: [Aspergillus oryzae RIB40] gi|83772162|dbj|BAE62292.1| protein product [Aspergillus oryzae]
  misc_feature (26)..(572): NCBI GI: 85091095 Blast Desc: NCU09391 [Neurospora crassa OR74A] gi|28920117|gb|EAA29498.1| conserved [Neurospora crassa OR74A]
  misc_feature (26)..(607): NCBI GI: 242762237 Blast Desc: phenylalanine ammonia-lyase, [Talaromyces stipitatus ATCC 10500] gi|218723531|gb|EED22948.1| phenylalanine ammonia-lyase, [Talaromyces stipitatus ATCC 10500]
  misc_feature (26)..(592): NCBI GI: 212529798 Blast Desc: phenylalanine ammonia-lyase, [Penicillium marneffei ATCC 18224] gi|210074454|gb|EEA28541.1| phenylalanine ammonia-lyase, [Penicillium marneffei ATCC 18224]
  misc_feature (14)..(570): SWISSPROT Homolog: EC 4.3.1.24 Phenylalanine ammonia-lyase
MATTGRSLTEILLSQLRDPAPSVTTPLGIDGESLTIADVVAVSRHLAHVELTPQSIAAIQACTNIVSEKIAKGDIIYGVNTGFGGSADARPNDVEKVQQSLISHLTCGIVSDGKQNTIPRQVNGQSTQTNGHAININGHRSETNGHSSDASRSKGESQTLKNKLNGHQEVSVAALPLNDPLATTCMPESWARASMLIRLNSLAGGASGVRVEIADSLVSLLNKDIVPRIPVRGSISASGDLSALAWIGALMQGKPLASAFAGPRESSSGSSARRITRADVALADAGISPISLHAKEGLAIVNGTAVSAAVAALAAHEALHLAALAQVLTAMSVEALRGSDESFEPFIARMRPHPGQVDSAQNIRAFLSGSRLLNRHDSQDEATLRQDRYSLRTASQWIGPVLEDFGLAYDQLTVELNSVTDNPLIDVAGGSGRVLHGGNFQARAVTSAVEKLRQGLQGLGRMLFAQCTEMMNPTTSWGLPPNLCSDDPNDSFLFKGLDVVVAALASELGFLANPVGSHVQTAEMGNQSLNSMALVSARYTLEAVEVLSQLASAHLLALCQALDLRAIEIEGRTSAQPNAEPYIGQAARRMYRFVREDLAIPFLDEAHLASNEAASVDDWTPSLGLYNTRIYDSIRSGRLYDVVLQCLADVEREPVNGTAAQDTGPGRRFRTRSLRGFGSWD

SEQ ID NO: 36917 - DNA, 1117 bp, Muscodor strobelii
  misc_feature: SGI EST ID NO. CUFF.88154.0
  misc_feature: Variant of the nucleotide sequence at SEQ ID NO 36915
cggccgcatgctctttgcccagtgcaccgagatgatgaacccgaccacaagctggggcctgccgccgaacttgtgttccgacgaccctaatgattctttcctgtttaaaggcctggacgttgtcgtggccgctttggcgtcggagctaggattcttggcgaacccagtcggatcgcacgttcagacggccgagatgggcaaccagagcctcaactctatggcgctcgtgtcggcccgctacactctcgaggccgttgaagtgctgtcacagctcgcttcggcacatcttctagcactgtgccaagcgctggatcttcgcgcgatagagatcgagggccgaactagcgcccagccgaatgcagagccgtacatcggccaagcagcgcggcgcatgtaccgctttgttcgagaggatctcgccataccgttcctagacgaggcacatcttgcttccaatgaggctgcgagcgtagacgactggacgcccagcctcgggttgtataacacgcgaatctacgattcgattaggtcagggcgcctgtacgatgtcgttttgcagtgtttagcagacgtagaaagggagccggtcaacggcaccgcggcccaagacacggggcctggcaggaggttccgaactcggtccctgcgcggatttgggtcttgggattgaggtgataccacttttccctttgtcttggctctgtgacgggttcgatggaataacagaaagtggtacattcattggccagaaggatctttgagactcgtttacattcggagtactttaataaactaaacggaaacgccacagctatcagagagctattaccctgatagacacagtgaatgatcatcatgactgcctagcagatagacccggtgctagaatgctgcctccacttggctacctagacgcttgatcgccttaattttgtcgatgttaccaacgaggcaccgagggttacttggtcaggatgtttcagcatattgattaatgtttagttggcttagtagaagcttgtgggttactcaatgtatcaaacgaatgacttccttaacgacgcctaccacgaggccccggtagcgcccttcagcttgcgcccgggccaaaatgttc

SEQ ID NO: 36918 - DNA, 360 bp, Muscodor strobelii
  misc_feature: SGI cDNA ID NO. 572805
  misc_feature: Elevated expression when VOC is produced
  misc_feature: Encodes the peptide sequence at SEQ ID NO 36919
atggccatcaaatccaccttctctctagctctggttgcagctgctggcactgccagtgcccttccgcagcttgggattcctcctacaagaaattgcgcgttcgctgcctacactagctcagattgcacgggtgaccctgttccagctacgcagcctatctctgcagactgctacgttggtgatcttaagtcgttctctgcgacgggaccgcagtgtttccgtatcgtcgtccgggagtatgcggatgatcagtgtggcggcacatcaccgttcaattaccagtggcccgatgacgtgaatcaggccggctgttacacatttcatactgacttgggtagcctgaattggaacttttattaa

SEQ ID NO: 36919 - protein, 119 aa, Muscodor strobelii
  misc_feature: SGI Peptide ID NO. 572805
  misc_feature: Useful for introducing or modulating the production of volatile compounds
MAIKSTFSLALVAAAGTASALPQLGIPPTRNCAFAAYTSSDCTGDPVPATQPISADCYVGDLKSFSATGPQCFRIVVREYADDQCGGTSPFNYQWPDDVNQAGCYTFHTDLGSLNWNFY

SEQ ID NO: 36920 - DNA, 997 bp, Muscodor strobelii
  misc_feature: SGI EST ID NO. CUFF.88164.0
  misc_feature: Variant of the nucleotide sequence at SEQ ID NO 36918
tcaaaacctaatgttgcatcacgaactttgggcttggcgaggccacaatgtggcctgcatcatgttacaacaacagataaagtcagttagcccaggatctttagggcttggcttagacattgagataagcagagcgagtcatataatagggcgacgttttgcactggcttcttatcgtcgaggcttgtttcacgtcaagctatttcacacttttacctactcctcagcttcacgttcccgttcaacgtcccgccttctgtcgtcatcgcaatatggccatcaaatccaccttctctctagctctggttgcagctgctggcactgccagtgcccttccgcagcttgggattcctcctacaagaaattgcgcgttcgctgcctacactagctcagattgcacgggtgaccctgttccagctacgcagcctatctctgcagactgctacgttggtgatcttaagtcgttctctgcgacgggaccgcagtgtttccgtatcgtcgtccgggagtatgcggatgatcagtgtggcggcacatcaccgttcaattaccagtggcccgatgacgtgaatcaggccggctgttacacatttcatactgacttgggtagcctgaattggaacttttattaattgtcgctttaccatgtattagcagctttggtagatgatggcgaggtgaactgtggaacagggttatctattttgccttggagttgctagactgagcgcatttttcatgtggcaggagctcctggtgggagatattctggtggtatagaggcagtagcctttccgcaaagctcacgagctctgtttcaatcggacaggcttgattcaacaagtcgagactttggcaatgaaaaggcggcaaatactcttatttttaggggacaacatacatacttgcagtggaagatcttggatgcgtggtacgccgtgatctagcgcgttggtacaaccaaacacgaaatagtttcaagttcttcatagtctct

SEQ ID NO: 36921 - DNA, 1065 bp, Muscodor strobelii
  misc_feature: SGI cDNA ID NO. 572806
  misc_feature: Encodes the peptide sequence at SEQ ID NO 36922
atgctctattcgcgaagaacgatggacaacgctgctatatcgggtttcgacagactctcagcatgtgacattgtcatcgctgttctaggcattactggatctgggaaaagcacatttatcgggagcctcatagactcggacacaaagatcggacataaccttagacctaaaacgacccagattgaaatctaccattatgttcaagagagcggtcggcgtgtctatctgattgatacgcctggattcgacgatgatacccgcaccgacattgatgtgctccaggagcaaatattcttctttgcccaacttcacagattgtctgctccgctcgtcggcgtcatttatctacattcgatattaaagaatcgtattagcggatcaacaatacggaatttcagaatgctggagcaaatgtgcggtctccacgctcttgatcgcgtagtattggtcacaacaatgtggaacataattcaacctgaatgttcgcagctcatcaatgcctacgaaagacagaaggagctgatttcggataaaaacttctgggggtacatgtgtcaacatggcagcaaggatatgcaatttgacggtggaaaacaatctgctttgcaagctatcgatgtccttgtagccagatatatccaggacggtcctgttaccttccaaatacagagagaagttattgaggaggagagggatatttgggctagctcggcggcaagacaagtagctggagaacttgttcgtgtcaaagaagactgtggaaggatccttgacgaactttcaatccaattaactaaagctgagagacagagtgaccatgacagagccttgcgactttccgaagagagacaaacgttcgaacgaaagttgcaagatgttgccaaggcgaatcaacgactgcaaacctctttccgcacaatctgcatggaaaaagaagcacgctttatacgtaagctaaatgaattcaatagcgaatacggtgtgttgttacaagaactccgacgcgatgcgactaagtacacgcgtctcgaggaggaggagaaagagagcaagacaatctactag

SEQ ID NO: 36922 - protein, 354 aa, Muscodor strobelii
  misc_feature: SGI Peptide ID NO. 572806
  misc_feature (18)..(315): NCBI GI: 256728210 Blast Desc: NECHADRAFT_54135 [Nectria haematococca mpVI 77-13-4]
  misc_feature (19)..(347): NCBI GI: 46127679 Blast Desc: FG08217.1 [Gibberella zeae PH-1]
  misc_feature (1)..(267): NCBI GI: 85089818 Blast Desc: NCU05929 [Neurospora crassa OR74A] gi|28919449|gb|EAA28888.1| [Neurospora crassa OR74A]
  misc_feature (19)..(315): NCBI GI: 189196544 Blast Desc: conserved [Pyrenophora tritici-repentis Pt-1C-BFP] gi|187980489|gb|EDU47115.1| conserved [Pyrenophora tritici-repentis Pt-1C-BFP]
  misc_feature (5)..(328): NCBI GI: 169769100 Blast Desc: [Aspergillus oryzae RIB40] gi|238501534|ref|XP_002382001.1| conserved [Aspergillus flavus NRRL3357] gi|83766878|dbj|BAE57018.1| protein product oryzae]
  misc_feature (19)..(291): NCBI GI: 116206564 Blast Desc: CHGG_02575 [Chaetomium globosum CBS 148.51] gi|88183172|gb|EAQ90640.1| CHGG_02575 [Chaetomium globosum CBS 148.51]
  misc_feature (19)..(346): NCBI GI: 169769098 Blast Desc: [Aspergillus oryzae RIB40] gi|238501532|ref|XP_002382000.1| conserved [Aspergillus flavus NRRL3357] gi|83766877|dbj|BAE57017.1| protein product oryzae]
  misc_feature (19)..(325): NCBI GI: 116206562 Blast Desc: CHGG_02574 [Chaetomium globosum CBS 148.51] gi|88183171|gb|EAQ90639.1| CHGG_02574 [Chaetomium globosum CBS 148.51]
  misc_feature (23)..(339): NCBI GI: 46115214 Blast Desc: FG03449.1 [Gibberella zeae PH-1]
  misc_feature (23)..(317): NCBI GI: 256735682 Blast Desc: NECHADRAFT_75781 [Nectria haematococca mpVI 77-13-4]
MLYSRRTMDNAAISGFDRLSACDIVIAVLGITGSGKSTFIGSLIDSDTKIGHNLRPKTTQIEIYHYVQESGRRVYLIDTPGFDDDTRTDIDVLQEQIFFFAQLHRLSAPLVGVIYLHSILKNRISGSTIRNFRMLEQMCGLHALDRVVLVTTMWNIIQPECSQLINAYERQKELISDKNFWGYMCQHGSKDMQFDGGKQSALQAIDVLVARYIQDGPVTFQIQREVIEEERDIWASSAARQVAGELVRVKEDCGRILDELSIQLTKAERQSDHDRALRLSEERQTFERKLQDVAKANQRLQTSFRTICMEKEARFIRKLNEFNSEYGVLLQELRRDATKYTRLEEEEKESKTIY

SEQ ID NO: 36923 - DNA, 266 bp, Muscodor strobelii
  misc_feature: SGI EST ID NO. CUFF.88158.0
  misc_feature: Variant of the nucleotide sequence at SEQ ID NO 36921
caataatgctctattcgcgaagaacgatggacaacgctgctatatcgggtttcgacagactctcagcatgtgacattgtcatcgctgttctaggcattactggatctgggaaaagcacatttatcgggagcctcatagactcggacacaaagatcggacataaccttagacctaaaacgacccagattgaaatctaccattatgttcaagagagcggtcggcgtgtctatctgattgatacgcctggattcgacgatgatacccgc

SEQ ID NO: 36924 - DNA, 1233 bp, Muscodor strobelii
  misc_feature: SGI cDNA ID NO. 572807
  misc_feature: Encodes the peptide sequence at SEQ ID NO 36925
atggagagccagccaagagcacaaacgttccaggcacaacccagcgacgtcttaatcgcggttatgggaataactggatgtgggaagagcactttcatctctcactgcaccgatgaagacgtcccaattgggacgagcctccatagtcacacgcacaacatttgcgtatattcctgcaagccgattattggtgagaacgtctatctagtcgacacaccagggttcgatgacacggagcgcgaagatgcggatgttcttaaggagattgcagcgtgggtcacagatacatatgagcggaaaattcatctccgaggaatcttgtaccttcatcgcattaccgacattcgtatgcagggagcggcaatgagaaacctcttcatgttcaagaaattatgcggaaacaatgcgatcaagaatgttattctagttacaactatgtgggaagatattgaatttcaggttggacaacgtagagaagatgagctcaggacgacagctgattattggcaagagatgcttaagaatggctcgaggatgatacgacatgaaaacaactttcaatccgcgcgggccatcattaatgctctacttgaaaccaaaactgacaccacgctcgcgattcaaactgaaatggtggatgaacggaaggatttgcacaatacgagtgctggaaaagagttgagcggcattttagaacaagagcgtaagcgattcgctcgtcgcatcgaagatctggagcaacagatgacagaggcaagagaagcaagagacagagagtcggaagagcaaatccggctgatgcagcaggaaagacaggcggaggtgaagaagcttctgcaccaacaagaaagtatcaaggtcagcctcgagcagcttcaccaagagaaagttacgaacctagaacggcttttagccatacaacagaaccagatggaaagagataggttagaaatcgcggaattaaggggaaatctcgccagttcctccatcacgcctcaccccgacgttcatcatgacagagagacgcggaaccactacaatcaaattcatacaattcagaacctgggagccattcttcagaacttgagagaaggctccttcagatatccccgtgcagccttctccccagacgcgcgtctccttgcactaccttactgggatgggtatagttacggcattcagatctgggacatgacgaccaatattcagctgttaagatatgggatgttgtaa

SEQ ID NO: 36925 - protein, 410 aa, Muscodor strobelii
  misc_feature: SGI Peptide ID NO. 572807
  misc_feature (13)..(310): NCBI GI: 256735682 Blast Desc: NECHADRAFT_75781 [Nectria haematococca mpVI 77-13-4]
  misc_feature (16)..(317): NCBI GI: 189198139 Blast Desc: conserved [Pyrenophora tritici-repentis Pt-1C-BFP] gi|187981355|gb|EDU47981.1| conserved [Pyrenophora tritici-repentis Pt-1C-BFP]
  misc_feature (12)..(309): NCBI GI: 256728380 Blast Desc: NECHADRAFT_54176 [Nectria haematococca mpVI 77-13-4]
  misc_feature (13)..(312): NCBI GI: 189196544 Blast Desc: conserved [Pyrenophora tritici-repentis Pt-1C-BFP] gi|187980489|gb|EDU47115.1| conserved [Pyrenophora tritici-repentis Pt-1C-BFP]
  misc_feature (13)..(337): NCBI GI: 46115214 Blast Desc: FG03449.1 [Gibberella zeae PH-1]
  misc_feature (16)..(315): NCBI GI: 116206562 Blast Desc: CHGG_02574 [Chaetomium globosum CBS 148.51] gi|88183171|gb|EAQ90639.1| CHGG_02574 [Chaetomium globosum CBS 148.51]
  misc_feature (2)..(296): NCBI GI: 169769098 Blast Desc: [Aspergillus oryzae RIB40] gi|238501532|ref|XP_002382000.1| conserved [Aspergillus flavus NRRL3357] gi|83766877|dbj|BAE57017.1| protein product oryzae]
  misc_feature (14)..(300): NCBI GI: 116206564 Blast Desc: CHGG_02575 [Chaetomium globosum CBS 148.51] gi|88183172|gb|EAQ90640.1| CHGG_02575 [Chaetomium globosum CBS 148.51]
  misc_feature (11)..(304): NCBI GI: 256728210 Blast Desc: NECHADRAFT_54135 [Nectria haematococca mpVI 77-13-4]
  misc_feature (9)..(310): NCBI GI: 169769100 Blast Desc: [Aspergillus oryzae RIB40] gi|238501534|ref|XP_002382001.1| conserved [Aspergillus flavus NRRL3357] gi|83766878|dbj|BAE57018.1| protein product oryzae]
MESQPRAQTFQAQPSDVLIAVMGITGCGKSTFISHCTDEDVPIGTSLHSHTHNICVYSCKPIIGENVYLVDTPGFDDTEREDADVLKEIAAWVTDTYERKIHLRGILYLHRITDIRMQGAAMRNLFMFKKLCGNNAIKNVILVTTMWEDIEFQVGQRREDELRTTADYWQEMLKNGSRMIRHENNFQSARAIINALLETKTDTTLAIQTEMVDERKDLHNTSAGKELSGILEQERKRFARRIEDLEQQMTEAREARDRESEEQIRLMQQERQAEVKKLLHQQESIKVSLEQLHQEKVTNLERLLAIQQNQMERDRLEIAELRGNLASSSITPHPDVHHDRETRNHYNQIHTIQNLGAILQNLREGSFRYPRAAFSPDARLLALPYWDGYSYGIQIWDMTTNIQLLRYGML

SEQ ID NO: 36926 - DNA, 2727 bp, Muscodor strobelii
  misc_feature: SGI cDNA ID NO. 572808
  misc_feature: Reduced expression when VOC is produced
  misc_feature: Encodes the peptide sequence at SEQ ID NO 36927
atgtccgccgccaccatgcagtcgacacctgtagtcccaccccgtcctgctaggagtcaggacaaaggcagcgacaactcgatgcccgccatcccgccgcgccccaccaaacgcttcaaccgctccgtgtcacccaaccctgaccgtttcgcgccttcgcctctcaacgaaagcccgttcaaccccaaggctaagcgcctgagtcagagctttctcggcgaagagctcgagcgatccacgagtgtcgaactgcccagtgttggccaggagggccaggagtacgctgctgccatcgaaggactgggttcctctggtccttctcccgaggacaaccacaatgctccctcttcccccgagcagacccgaagcgtgggcgacgacgtcaagctccatgcgccaaaacccaccgtaccggccatcagcgccaaacagcgtgtggctgccgtcacccgcaccgactcggacaaagccgcagcttttggaattggccgtccgagcagcgaggagcccttccagtctggccgcagtctcaagaagaaggccagcaccctaagccaactgtcccatcagagcgagcaagacgacgagcatggcattcctgagatcggccagcgtgtccccatgttggcatacgctggcgatgtgcaggctccttcaccggcacctcctcgcgccccgagtgtggacagtactaagagcggccgtcaccacacccgccggtcgagttcccgcactggcttcaacgagctaccgccgggaagctatggtctgcacggccacggcgttgagtctaccgacaagctggagaaggcttactacgagaagcatcccgagaaataccacaaagagcactacaaccacttgcgcgaccgcgatcacgactactccatgagcagtgagaatctcaacaagattgtccgggataccgccagccgtggggctggttctggtacctctggctacgtcggaattccaagcgagcaggtcggttaccaggccagtgacgagtatacctcgcgcatgtcaacgcctcagccaacggggtcgtcgcaaaaggccgaaaccagcagatcacctctttctagcgaatttgagaagaagagcaacgttattcacatcgatgaccatggcgaccacactggcttcgctaagtttggcgatgaacactcggcagagggttacggtgagcatgaagaatatgagcatcctatcttagctgccgacgaagtggcgaaggaccccaattcacacgaccagaaacctgctgttccgcatcaccaccgacgccagagtggcgacgagatccgcagccgcccttcaagcaggccggcaagtatctatagccctcctccggccgacttgatgtctactcctcttgatgatgtggaggagtacgaacccctcttccctgagggtgagggtgaaaagcccaagacggcagccgacaaactaaaggaatatcgtcagcgattcccgagccgtgatatttgggaagatgcacccaacagtgtgcatagcacggccgaagtttctaccccggaacccacggacgctcgtcccaagtcccggacatcgattgacttgccccctcgcgatactgagacacctgcccaggcttttgccaggaggcaagaagaacttgccgagaaagaagcctcacaccctgatgccttcttgaaccgcactcagcgccccaagtcctgggccgagcaccagccccacctcgccaaggaaatcaatagccgtcctagcacacagcgctttcccagtcgggatatttgggaagacacgcccgactcgttacaatttacgacgactgtttcgcggcgccagtccacagaggacacgccagtagaggaagaagaaaagcccaagcttggtgacgcaaatttccggggtagccagcctatgattccggcccgcccagctaagaggcagggctccggtgatgacaagcccactattccgggccgacctaaaccgcaaatcccggctcgtccggccaagtccgcatcggaatccagcgagcccgacgcacccagacaaaagcctgctgttcccgcgcgaccggttggcgggaagattgctgcattgcaagctggatttatgtccgatttaaacaaccgcttacgtttaggcccgcaggctcctaagaaagaggctccccccgaagaagcgatagaagagaaagagcgtgcaccgcttgcggatgcaagaaagagtcgtgcgagaggtccccagaggagggccccgactaaagctagcagtccggcgtcgggcgatagaaacgccccgccgcccgttagcaatggcggccttaccttttccatgacgaggacactattcagcatcaatgaagaggggactatgactgtcgaccattttggtgaggggaaggagggcttgagtgagaatgttgaggagattaggcctgaggagccagaaacaaagtcggaggttcatgaggttgaacctgaggctactgagatcaagtcggaaattcctgaggccaagtcggaaactcctcaggttagagaggagacgacgaaagaagagaagcccgctgttgatgtcccgagcgaaaaggaagacgttggggatgtggaggagactgaaaccgaaaccaagacgctggctacgaatacggctggtgaacctctgatttcagaaacgcttgataggggggagggtgatgtgatgaaggatgttgaggaggttgtttcatga

SEQ ID NO: 36927 - protein, 908 aa, Muscodor strobelii
  misc_feature: SGI Peptide ID NO. 572808
  misc_feature (1)..(858): NCBI GI: 171682074 Blast Desc: protein product [Podospora anserina] gi|170940996|emb|CAP66646.1| protein product [Podospora anserina]
  misc_feature (20)..(888): NCBI GI: 39968777 Blast Desc: MGG_02481 [Magnaporthe grisea 70-15] gi|145013907|gb|EDJ98548.1| MGG_02481 [Magnaporthe grisea 70-15]
  misc_feature (1)..(846): NCBI GI: 116202193 Blast Desc: CHGG_08981 [Chaetomium globosum CBS 148.51] gi|88177499|gb|EAQ84967.1| CHGG_08981 [Chaetomium globosum CBS 148.51]
  misc_feature (1)..(899): NCBI GI: 256727117 Blast Desc: NECHADRAFT_66743 [Nectria haematococca mpVI 77-13-4]
  misc_feature (29)..(749): NCBI GI: 85067731 Blast Desc: NCU04757 [Neurospora crassa OR74A] gi|28921776|gb|EAA31054.1| NCU04757 [Neurospora crassa OR74A] gi|40882299|emb|CAF06122.1| [Neurospora crassa]
  misc_feature (1)..(792): NCBI GI: 46135983 Blast Desc: FG09507.1 [Gibberella zeae PH-1]
  misc_feature (8)..(793): NCBI GI: 154318459 Blast Desc: BC1G_03397 [Botryotinia fuckeliana B05.10] gi|150842920|gb|EDN18113.1| BC1G_03397 [Botryotinia fuckeliana B05.10]
  misc_feature (8)..(760): NCBI GI: 156052969 Blast Desc: SS1G_06652 [Sclerotinia sclerotiorum 1980] gi|154704430|gb|EDO04169.1| SS1G_06652 [Sclerotinia sclerotiorum 1980]
  misc_feature (5)..(801): NCBI GI: 67537518 Blast Desc: AN4929.2 [Aspergillus nidulans FGSC A4] gi|40741817|gb|EAA61007.1| AN4929.2 [Aspergillus nidulans FGSC A4] gi|259482201|tpe|CBF76457.1| TPA: conserved [Aspergillus FGSC
  misc_feature (190)..(896): NCBI GI: 261359585 Blast Desc: conserved [Verticillium albo-atrum VaMs.102]
  misc_feature: Useful for introducing or modulating the production of volatile compounds
MSAATMQSTPVVPPRPARSQDKGSDNSMPAIPPRPTKRFNRSVSPNPDRFAPSPLNESPFNPKAKRLSQSFLGEELERSTSVELPSVGQEGQEYAAAIEGLGSSGPSPEDNHNAPSSPEQTRSVGDDVKLHAPKPTVPAISAKQRVAAVTRTDSDKAAAFGIGRPSSEEPFQSGRSLKKKASTLSQLSHQSEQDDEHGIPEIGQRVPMLAYAGDVQAPSPAPPRAPSVDSTKSGRHHTRRSSSRTGFNELPPGSYGLHGHGVESTDKLEKAYYEKHPEKYHKEHYNHLRDRDHDYSMSSENLNKIVRDTASRGAGSGTSGYVGIPSEQVGYQASDEYTSRMSTPQPTGSSQKAETSRSPLSSEFEKKSNVIHIDDHGDHTGFAKFGDEHSAEGYGEHEEYEHPILAADEVAKDPNSHDQKPAVPHHHRRQSGDEIRSRPSSRPASIYSPPPADLMSTPLDDVEEYEPLFPEGEGEKPKTAADKLKEYRQRFPSRDIWEDAPNSVHSTAEVSTPEPTDARPKSRTSIDLPPRDTETPAQAFARRQEELAEKEASHPDAFLNRTQRPKSWAEHQPHLAKEINSRPSTQRFPSRDIWEDTPDSLQFTTTVSRRQSTEDTPVEEEEKPKLGDANFRGSQPMIPARPAKRQGSGDDKPTIPGRPKPQIPARPAKSASESSEPDAPRQKPAVPARPVGGKIAALQAGFMSDLNNRLRLGPQAPKKEAPPEEAIEEKERAPLADARKSRARGPQRRAPTKASSPASGDRNAPPPVSNGGLTFSMTRTLFSINEEGTMTVDHFGEGKEGLSENVEEIRPEEPETKSEVHEVEPEATEIKSEIPEAKSETPQVREETTKEEKPAVDVPSEKEDVGDVEETETETKTLATNTAGEPLISETLDRGEGDVMKDVEEVVS

SEQ ID NO: 36928 - DNA, 3312 bp, Muscodor strobelii
  misc_feature: SGI EST ID NO. CUFF.88209.2
  misc_feature: Variant of the nucleotide sequence at SEQ ID NO 36926
gtcgggcatgcatttatttgttcattcatccattgattgacatgaccctcgactgactcagtgtggtcgatgtctctattgtgtgtcgggcgcccttgctgacccttgctgctcgtccaggtcctattcttatcggccccatacaaagtccagaagcatagccgaacacctcagctaacatcaaccttttgcatctcttgctcgccctctcttcttgttttcttggtctcttcagctatgtccgccgccaccatgcagtcgacacctgtagtcccaccccgtcctgctaggagtcaggacaaaggcagcgacaactcgatgcccgccatcccgccgcgccccaccaaacgcttcaaccgctccgtgtcacccaaccctgaccgtttcgcgccttcgcctctcaacgaaagcccgttcaaccccaaggctaagcgcctgagtcagagctttctcggcgaagagctcgagcgatccacgagtgtcgaactgcccagtgttggccaggagggccaggagtacgctgctgccatcgaaggactgggttcctctggtccttctcccgaggacaaccacaatgctccctcttcccccgagcagacccgaagcgtgggcgacgacgtcaagctccatgcgccaaaacccaccgtaccggccatcagcgccaaacagcgtgtggctgccgtcacccgcaccgactcggacaaagccgcagcttttggaattggccgtccgagcagcgaggagcccttccagtctggccgcagtctcaagaagaaggccagcaccctaagccaactgtcccatcagagcgagcaagacgacgagcatggcattcctgagatcggccagcgtgtccccatgttggcatacgctggcgatgtgcaggctccttcaccggcacctcctcgcgccccgagtgtggacagtactaagagcggccgtcaccacacccgccggtcgagttcccgcactggcttcaacgagctaccgccgggaagctatggtctgcacggccacggcgttgagtctaccgacaagctggagaaggcttactacgagaagcatcccgagaaataccacaaagagcactacaaccacttgcgcgaccgcgatcacgactactccatgagcagtgagaatctcaacaagattgtccgggataccgccagccgtggggctggttctggtacctctggctacgtcggaattccaagcgagcaggtcggttaccaggccagtgacgagtatacctcgcgcatgtcaacgcctcagccaacggggtcgtcgcaaaaggccgaaaccagcagatcacctctttctagcgaatttgagaagaagagcaacgttattcacatcgatgaccatggcgaccacactggcttcgctaagtttggcgatgaacactcggcagagggttacggtgagcatgaagaatatgagcatcctatcttagctgccgacgaagtggcgaaggaccccaattcacacgaccagaaacctgctgttccgcatcaccaccgacgccagagtggcgacgagatccgcagccgcccttcaagcaggccggcaagtatctatagccctcctccggccgacttgatgtctactcctcttgatgatgtggaggagtacgaacccctcttccctgagggtgagggtgaaaagcccaagacggcagccgacaaactaaaggaatatcgtcagcgattcccgagccgtgatatttgggaagatgcacccaacagtgtgcatagcacggccgaagtttctaccccggaacccacggacgctcgtcccaagtcccggacatcgattgacttgccccctcgcgatactgagacacctgcccaggcttttgccaggaggcaagaagaacttgccgagaaagaagcctcacaccctgatgccttcttgaaccgcactcagcgccccaagtcctgggccgagcaccagccccacctcgccaaggaaatcaatagccgtcctagcacacagcgctttcccagtcgggatatttgggaagacacgcccgactcgttacaatttacgacgactgtttcgcggcgccagtccacagaggacacgccagtagaggaagaagaaaagcccaagcttggtgacgcaaatttccggggtagccagcctatgattccggcccgcccagctaagaggcagggctccggtgatgacaagcccactattccgggccgacctaaaccgcaaatcccggctcgtccggccaagtccgcatcggaatccagcgagcccgacgcacccagacaaaagcctgctgttcccgcgcgaccggttggcgggaagattgctgcattgcaagctggatttatgtccgatttaaacaaccgcttacgtttaggcccgcaggctcctaagaaagaggctccccccgaagaagcgatagaagagaaagagcgtgcaccgcttgcggatgcaagaaagagtcgtgcgagaggtccccagaggagggccccgactaaagctagcagtccggcgtcgggcgatagaaacgccccgccgcccgttagcaatggcggccttaccttttccatgacgaggacactattcagcatcaatgaagaggggactatgactgtcgaccattttggtgaggggaaggagggcttgagtgagaatgttgaggagattaggcctgaggagccagaaacaaagtcggaggttcatgaggttgaacctgaggctactgagatcaagtcggaaattcctgaggccaagtcggaaactcctcaggttagagaggagacgacgaaagaagagaagcccgctgttgatgtcccgagcgaaaaggaagacgttggggatgtggaggagactgaaaccgaaaccaagacgctggctacgaatacggctggtgaacctctgatttcagaaacgcttgataggggggagggtgatgtgatgaaggatgttgaggaggttgtttcatgacatttgctatgagaagatgtggcttgcatgcggagaggtgagagtgagggtgagaatggtagagagaattggaagtatgtcatacaacagcgttatgtagaatcaatggcgtgtatgggagagcatatggggacaagataggattgttgaggactgaagagttgtgttgtgttgatggcaaaatacattcctttttataacaaacctctatttaggctaatgtcactatgcttggtgatatggatagatgcccgatgtttgagcgttcattcttttacattatgattaaacttttgcgttatggtgaacattgaattgccgtggggtatggacagccttttaaatgat

SEQ ID NO: 36929 - DNA, 453 bp, Muscodor strobelii
  misc_feature: SGI cDNA ID NO. 572809
  misc_feature: Encodes the peptide sequence at SEQ ID NO 36930
atgggtatcaaggacgagttcgctacccgcaacttcagcatctacggacaatggctgggcatcttgtccctgattctgtgcttcgccctcggcatcgccaacttctttaacctgttcaagcccatcatcattctctttgccatcttctgcctggtttccgccttcatcatcctgttcctcgaggtgccccttctgctccgcatctgcccgacctcttccaccttcgatgccgccatccgcaagatctcctccaactacctgcgcgccgctgcctacctcgccatggccctcgtccagtggctcagcctcctgattcacccaaccagcctggtcgccgccgccgtcgttctcacctttacctccatctgctacctccttgccggtgtcaagggccaggccttcgtcggaagtaagactcttggcggccagggcgtcgcccagatgatcatataa

SEQ ID NO: 36930 - protein, 150 aa, Muscodor strobelii
  misc_feature: SGI Peptide ID NO. 572809
  misc_feature (1)..(150): NCBI GI: 145606186 Blast Desc: MGG_11897 [Magnaporthe grisea 70-15] gi|193806535|sp|A4R2N5.1|TVP18_MAGGR RecName: Full=Golgi apparatus membrane protein TVP18 gi|145013909|gb|EDJ98550.1|
  misc_feature (1)..(150): NCBI GI: 171682072 Blast Desc: protein product [Podospora anserina] gi|193806538|sp|B2AR67.1|TVP18_PODAN RecName: Full=Golgi apparatus membrane protein TVP18 gi|170940995|emb|CAP66645.1|
  misc_feature (1)..(150): NCBI GI: 85067737 Blast Desc: NCU04760 [Neurospora crassa OR74A] gi|74616070|sp|Q7S693.1|TVP18_NEUCR RecName: Full=Golgi apparatus membrane protein tvp-18 gi|28921779|gb|EAA31057.1| conserved
  misc_feature (1)..(150): NCBI GI: 261359587 Blast Desc: conserved [Verticillium albo-atrum VaMs.102]
  misc_feature (1)..(150): NCBI GI: 256727116 Blast Desc: [Nectria haematococca mpVI 77-13-4]
  misc_feature (1)..(150): NCBI GI: 193806590 Blast Desc: [Nectria haematococca mpVI 77-13-4]
  misc_feature (1)..(150): NCBI GI: 154284582 Blast Desc: conserved [Ajellomyces capsulatus NAm1] gi|193806531|sp|A6QRX6.1|TVP18_AJECN RecName: Full=Golgi apparatus membrane protein TVP18 gi|150406727|gb|EDN02268.1|
  misc_feature (1)..(150): NCBI GI: 261191212 Blast Desc: golgi apparatus membrane protein TVP18 [Ajellomyces dermatitidis SLH14081] gi|239589780|gb|EEQ72423.1| golgi apparatus membrane protein TVP18 [Ajellomyces dermatitidis golgi
  misc_feature (1)..(150): NCBI GI: 193806586 Blast Desc: golgi apparatus membrane protein TVP18 [Ajellomyces dermatitidis SLH14081] gi|239589780|gb|EEQ72423.1| golgi apparatus membrane protein TVP18 [Ajellomyces dermatitidis golgi
  misc_feature (1)..(150): NCBI GI: 46135979 Blast Desc: FG09505.1 [Gibberella zeae PH-1]
MGIKDEFATRNFSIYGQWLGILSLILCFALGIANFFNLFKPIIILFAIFCLVSAFIILFLEVPLLLRICPTSSTFDAAIRKISSNYLRAAAYLAMALVQWLSLLIHPTSLVAAAVVLTFTSICYLLAGVKGQAFVGSKTLGGQGVAQMII

SEQ ID NO: 36931 - DNA, 1526 bp, Muscodor strobelii
  misc_feature: SGI EST ID NO. CUFF.88203.0
  misc_feature: Variant of the nucleotide sequence at SEQ ID NO 36929
agcgaatattgccgcctggcccgtcgcccgtccaggtagtcgccaagccacaataatccagggtcgcatacccacccgagctttggttcatcaattggacatctgtcactcgatttccgacaggttggctgactgcatcgcatcaccaagcaacaaacattgcctccgcaaggaaacaaagaactactccaccaactcgccaataaccgacgccctgctgtgttcaatatccatcaaaaggacattaaaccttaccgccctgcagaattataccatcatccgcgagtaccgcatcgcatccgtcgtctgactgaagcttgtttggcttagctgtcaacaatcgcattccttcgtgcaactaccatctcgcccatcttcactatcctacacacatcgccaatatgggtatcaaggacgagttcgctacccgcaacttcagcatctacggacaatggtaagcagcatcacccaacgcatctacagttcgcaatgttttgccacattgataacaataatgaggcgtcgtcatcatgttttaagagatatgaaagctgatacttgactgcccacgataggctgggcatcttgtccctgattctgtgcttcgccctcggcatcgccaacttctttaacctgttcaagcccatcatcattctctttgccatcttctgcctggtttccgccttcatcatcctgttcctcgaggtgccccttctgctccgcatctgcccgacctcttccaccttcgatgccgccatccgcaagatctcctccaactacctgcgcgccgctgcctacctcgccatggccctcgtccagtggctcagcctcctgattcacccaaccagcctggtcgccgccgccgtcgttctcacctttacctccatctgctacctccttgccggtgtcaagggccaggccttcgtcggaagtaagactcttggcggccagggcgtcgcccagatgatcatataagctctagcttggaaagtacacatcatctacgacgaagaaaccgagagcacccggagcgaggataggagcttggcgatatgagagaaacgagtggtagccccagagagccggtatataacatcgtgaagcagaggggaaaacagtggagagatacgaacgaatgtgtcggactagtacgatggacgcggaggatgacgactacagtatttgacggattggtgtactggcgtcacggatattgtatgaacagggcccaaaatatctcttttcgatgccgcgggtttaggctctgaagcatttcttttcggtcgtgtccaacgcggtagataaacctcaggtttctgaagtgaaacggaatcagctgttattcttgaccccaattgcgagacccgtgccacatctgaatgccttggttgtcaaccggctggtcgaatcgagagatacaaaagttataaatcgaagctgccagatcttaaaatgcctgcggttatgtggtagaaaacatgaatgacttctttggtcattatagacctgtgagtgttacatgaagc

SEQ ID NO: 36932 - DNA, 1440 bp, Muscodor strobelii
  misc_feature: SGI cDNA ID NO. 572810
  misc_feature: Encodes the peptide sequence at SEQ ID NO 36933
atggcactgcacgggggaaaatacatcaaaaaattgggattgcgctacaaaaatctgccgatattcaccttgccggtaccaaactcacgcatctatatcgtgactgagccatcgctggcggctgcagtccagcgagcatcaaaggttctatcatttacgcctatcattcccgaagtaacacagcgtgttctggggttagacgatgctacaaatgaaatcgctcgcaagaatctggaccctggccctggagacgaacgcgggtttctggccgatatacaggatatggtctacgcctattttggtccgggaaactatttgaataaaataagtctggacgccgcacgagagttaaaagaggaagtcatggcattcataacctctgcggaaacccagcctgaaaatcggcagcgggtagacttgcttcaatgggttcgacacgtggtgacagcatcaactgctaaatatttctatggccctcagaaccctatggtacttgaccccagtcttgaagacgcgttctgggattttgacaacgggcttggcgggcttcttatgaatatgtttccatcgataactgcaagaaaggcatacacaggtagagaacgcctcgtgagagcgcttgaggattacctggaggaagggaagcacatgacgggatcaaagatcgttcagaaacgtgtcgaaattgcgcttcagcacggatggacgctccgcgcgacggcgcgatccgagctttcctttctcttcgccggcattgtcaatgcgactacatcgacattttggatactgctgcagatattcgctgatccacagctcctggccaccgtgcgcacggagatcatggacagcatcagacgcgatgaccgtcaacatgacgaaatgaacaagcgcgtaacactgagcatgacagatttgagagaccgatgcccaatgcttgttgccgtatatcgcgaatgtctgcgcctcggatccgacaactattcgacgcgtatggtgaaggagaatactctgctagcggatcaatattttctcaagaagggcgctgtgattcagatcgccgggggcgtcatacacgccgaccagtcgatatggggcgataatgttgatatgttcaatccgagtcgcttcctagacaagaagccacatacgggagacaagtcgaatgcgattcatccagctgcattccgggccttcggtggcgggaagacactttgtcccggtcggcatttcgcgatgaatgagatcttgagcttagtcgccgttgttgtcttgttcctcgacatcgaagccctgggagaaggccagatcacggtcccacgcaagaatgatggggtattgccggttcatatccttgaacctgttaccccggtcgaagttttgatttccaaacgccaagacggattcccgaagcaggggttccacgttgagttcgatctgtag

SEQ ID NO: 36933 - protein, 479 aa, Muscodor strobelii
  misc_feature: SGI Peptide ID NO. 572810
  misc_feature (3)..(457): Pfam Id: PF00067 Pfam Desc: Cytochrome P450
  misc_feature (245)..(415): Pfam Id: PF00067 Pfam Desc: Cytochrome P450
  misc_feature (19)..(466): NCBI GI: 154303094 Blast Desc: BC1G_09567 [Botryotinia fuckeliana B05.10] gi|150855030|gb|EDN30222.1| BC1G_09567 [Botryotinia fuckeliana B05.10]
  misc_feature (28)..(468): NCBI GI: 169615631 Blast Desc: SNOG_10975 [Phaeosphaeria nodorum SN15] gi|160703005|gb|EAT81474.2| SNOG_10975 [Phaeosphaeria nodorum SN15]
  misc_feature (20)..(465): NCBI GI: 242786552 Blast Desc: cytochrome P450, [Talaromyces stipitatus ATCC 10500] gi|218720975|gb|EED20394.1| cytochrome P450, [Talaromyces stipitatus ATCC 10500]
  misc_feature (4)..(448): NCBI GI: 67527680 Blast Desc: AN4117.2 [Aspergillus nidulans FGSC A4] gi|40740188|gb|EAA59378.1| AN4117.2 [Aspergillus nidulans FGSC A4] gi|259481291|tpe|CBF74671.1| TPA: cytochrome P450, (Eurofung)
  misc_feature (26)..(453): NCBI GI: 156058692 Blast Desc: SS1G_03358 [Sclerotinia sclerotiorum 1980] gi|154701145|gb|EDO00884.1| SS1G_03358 [Sclerotinia sclerotiorum 1980]
  misc_feature (18)..(428): NCBI GI: 169608169 Blast Desc: SNOG_07153 [Phaeosphaeria nodorum SN15] gi|160701581|gb|EAT85804.2| SNOG_07153 [Phaeosphaeria nodorum SN15]
  misc_feature (8)..(479): NCBI GI: 225558023 Blast Desc: conserved [Ajellomyces capsulatus G186AR]
  misc_feature (129)..(426): NCBI GI: 171681940 Blast Desc: protein product [Podospora anserina] gi|170940929|emb|CAP66579.1| protein product [Podospora anserina]
  misc_feature (7)..(444): NCBI GI: 240273269 Blast Desc: cytochrome P450 oxidoreductase [Ajellomyces capsulatus H143]
  misc_feature (7)..(429): NCBI GI: 154280549 Blast Desc: [Ajellomyces capsulatus NAm1] gi|150411266|gb|EDN06654.1| [Ajellomyces capsulatus NAm1]
  misc_feature (171)..(458): SWISSPROT Homolog: EC 1.14.13.17 Cholesterol 7-alpha-monooxygenase
MALHGGKYIKKLGLRYKNLPIFTLPVPNSRIYIVTEPSLAAAVQRASKVLSFTPIIPEVTQRVLGLDDATNEIARKNLDPGPGDERGFLADIQDMVYAYFGPGNYLNKISLDAARELKEEVMAFITSAETQPENRQRVDLLQWVRHVVTASTAKYFYGPQNPMVLDPSLEDAFWDFDNGLGGLLMNMFPSITARKAYTGRERLVRALEDYLEEGKHMTGSKIVQKRVEIALQHGWTLRATARSELSFLFAGIVNATTSTFWILLQIFADPQLLATVRTEIMDSIRRDDRQHDEMNKRVTLSMTDLRDRCPMLVAVYRECLRLGSDNYSTRMVKENTLLADQYFLKKGAVIQIAGGVIHADQSIWGDNVDMFNPSRFLDKKPHTGDKSNAIHPAAFRAFGGGKTLCPGRHFAMNEILSLVAVVVLFLDIEALGEGQITVPRKNDGVLPVHILEPVTPVEVLISKRQDGFPKQGFHVEFDL

SEQ ID NO: 36934 - DNA, 2082 bp, Muscodor strobelii
  misc_feature: SGI EST ID NO. CUFF.88196.0
  misc_feature: Variant of the nucleotide sequence at SEQ ID NO 36932
gccgggttggccgctatatatgctcttttgtatcatgcctcgacgcgaaaggttgacgccaatgaacctccaattcttgcctctggtgttccgttcgttggacatatcttggggatggcactgcacgggggaaaatacatcaaaaaattgggattgcgctacaaaaatctgccgatattcaccttgccggtaccaaactcacgcatctatatcgtgactgagccatcgctggcggctgcagtccagcgagcatcaaaggttctatcatttacgcctatcattcccgaagtaacacagcgtgttctggggttagacgatgctacaaatgaaatcgctcgcaagaatctggaccctggccctggagacgaacgcgggtttctggccgatatacaggatatggtctacgcctattttggtccgggaaactatttgaataaaataagtctggacgccgcacgagagttaaaagaggaagtcatggcattcataacctctgcggaaacccagcctgaaaatcggcagcgggtagacttgcttcaatgggttcgacacgtggtgacagcatcaactgctaaatatttctatggccctcagaaccctatggtacttgaccccagtcttgaagacgcgttctgggattttgacaacgggcttggcgggcttcttatgaatatgtttccatcgataactgcaagaaaggcatacacaggtagagaacgcctcgtgagagcgcttgaggattacctggaggaagggaagcacatgacgggatcaaagatcgttcagaaacgtgtcgaaattgcgcttcagcacggatggacgctccgcgcgacggcgcgatccgagctttcctttctcttcgccggcattgtcaatgcgactacatcgacattttggatactgctgcagatattcgctgatccacagctcctggccaccgtgcgcacggagatcatggacagcatcagacgcgatgaccgtcaacatgacgaaatgaacaagcgcgtaacactgagcatgacagatttgagagaccgatgcccaatgcttgttgccgtatatcgcgaatgtctgcgcctcggatccgacaactattcgacgcgtatggtgaaggagaatactctgctagcggatcaatattttctcaagaagggcgctgtgattcagatcgccgggggcgtcatacacgccgaccagtcgatatggggcgataatgttgatatgttcaatccgagtcgcttcctagacaagaagccacatacgggagacaagtcgaatgcgattcatccagctgcattccgggccttcggtggcgggaagacactttgtcccggtcggcatttcgcgatgaatgagatcttgagcttagtcgccgttgttgtcttgttcctcgacatcgaagccctgggagaaggccagatcacggtcccacgcaagaatgatggggtattgccggttcatatccttgaacctgttaccccggtcgaagttttgatttccaaacgccaagacggattcccgaagcaggggttccacgttgagttcgatctgtagcgggattctggagataaggtgatgctccctagtctattcggaccataccgtagtaagacgctactaataaacattgagaagcctctaacctggatgatcatcgcgtctcccaagcttagttttcaaatgtcaattgattagtccccgtttctgcctcgtttggtgaagaacgttggggtctgtcggctcagtcgccaaacatcatgactgcttcattgtcttacatacagcggcttggccgtctcacaagcatacatctagaaacaatctaacacgttctgacgagcacaagaattttccattgctacccttccgctcttccagacactctcacttcagcgcgactcgcgctactccagctgcatggcccctttctgcaataagatgcgccaagcctccaactgcacaaacgacgcacctcggtcccggggtctgccctctaaactctggctcgtaaacccctcttcccgtcaatctggtcttgattatggctagcctgctgaaaagagtagcattgctagagtgaat

SEQ ID NO: 36935 - DNA, 921 bp, Muscodor strobelii
  misc_feature: SGI cDNA ID NO. 572811
  misc_feature: Encodes the peptide sequence at SEQ ID NO 36936
atgtcgcacggctggcctagcagcataagcggtgggggttggggtggtggtttcccgacatgtttctcagtatgcggtaatataaggaactatggtatgaccatcggaaacgatccgacaatatgcaactctgatagttcattcctcgacgactacgccagatgcatagcatgcgtgaaagactatccgtcgccggagatatcaagccatctcgatgaactcggtccggaatatgagagttattgcgggatattagagaaaactgtgcctacggcgctcacgagcacggttgtcttcactgtcaatagcacacccgagacagtacccatcaccactactttcgctaccacgacacgtgccactagcattacaccgagctcgacgacgagtatatcgagttcgagttcaacttcttcatcatccatatccagtacagcttctactgaaacctctcccgcaccccaacaaacaacaacacccacgaactcaacaacacaacacgcaacaagccaggcaggagtcatcggcgcagccgtaggcggaacagcaggtggctttatactcgcattcttaataggcttcatgtggtaccggcggagaaaacaacgtctcgcaaaacaatcctcgacaacagcagcatcagaccagcaagcagaagagggaggagccggaagcggaacaggagtcgaaggcatatccagctcgcaatccccgaaatcagtcgaaatggcaggcacggaatctccgatacagatcaaggcttggccggaactcgataataattcgagatatgagatggacgctacgcaggaggcggtcgaggtacccgctgcggaacatgcggctgagttggacgatacgagtaaacggaggagccagttgggtgttaaggatagtcctacgttacagcagaaagggtga

SEQ ID NO: 36936 - protein, 306 aa, Muscodor strobelii
  misc_feature: SGI Peptide ID NO. 572811
  misc_feature (21)..(284): NCBI GI: 171689154 Blast Desc: protein product [Podospora anserina] gi|170944539|emb|CAP70650.1| protein product [Podospora anserina]
  misc_feature (21)..(202): NCBI GI: 256728676 Blast Desc: [Nectria haematococca mpVI 77-13-4]
MSHGWPSSISGGGWGGGFPTCFSVCGNIRNYGMTIGNDPTICNSDSSFLDDYARCIACVKDYPSPEISSHLDELGPEYESYCGILEKTVPTALTSTVVFTVNSTPETVPITTTFATTTRATSITPSSTTSISSSSSTSSSSISSTASTETSPAPQQTTTPTNSTTQHATSQAGVIGAAVGGTAGGFILAFLIGFMWYRRRKQRLAKQSSTTAASDQQAEEGGAGSGTGVEGISSSQSPKSVEMAGTESPIQIKAWPELDNNSRYEMDATQEAVEVPAAEHAAELDDTSKRRSQLGVKDSPTLQQKG

SEQ ID NO: 36937 - DNA, 1321 bp, Muscodor strobelii
  misc_feature: SGI EST ID NO. CUFF.88205.0
  misc_feature: Variant of the nucleotide sequence at SEQ ID NO 36935
tgaactgtcatgacacccacgagggggcgaacatgacggcctcattccgagccgcctttaatagctgaaaggcccaaaatatgaatgtgctagcatttgagatcctatgtagatttcccattcttgaaatgatttctccactgacctaattcccgtctcaccggctcccttctactcctcctcgcaagctgtctgcgatagctcgttcctctacacattaatatcccgcgatgtcgcacggctggcctagcagcataagcggtgggggttggggtggtggtttcccgacatgtttctcagtatgcggtaatataaggaactatggtatgaccatcggaaacgatccgacaatatgcaactctgatagttcattcctcgacgactacgccagatgcatagcatgcgtgaaagactatccgtcgccggagatatcaagccatctcgatgaactcggtccggaatatgagagttattgcgggatattagagaaaactgtgcctacggcgctcacgagcacggttgtcttcactgtcaatagcacacccgagacagtacccatcaccactactttcgctaccacgacacgtgccactagcattacaccgagctcgacgacgagtatatcgagttcgagttcaacttcttcatcatccatatccagtacagcttctactgaaacctctcccggtacgctcattcaactgccagtcgcgggatgtgaatgcaagactaataatgcgcaacagcaccccaacaaacaacaacacccacgaactcaacaacacaacacgcaacaagccaggcaggagtcatcggcgcagccgtaggcggaacagcaggtggctttatactcgcattcttaataggcttcatgtggtaccggcggagaaaacaacgtctcgcaaaacaatcctcgacaacagcagcatcagaccagcaagcagaagagggaggagccggaagcggaacaggagtcgaaggcatatccagctcgcaatccccgaaatcagtcgaaatggcaggcacggaatctccgatacagatcaaggcttggccggaactcgataataattcgagatatgagatggacgctacgcaggaggcggtcgaggtacccgctgcggaacatgcggctgagttggacgatacgagtaaacggaggagccagttgggtgttaaggatagtcctacgttacagcagaaagggtgatgtggggtgatgggaattttgtatatatatatgatgggaaagcgtatgtatattttcgagcgggattgggtaatgataatgatgatacctttcagaagaaccctttacggc

SEQ ID NO: 36938 - DNA, 1686 bp, Muscodor strobelii
  misc_feature: SGI cDNA ID NO. 572812
  misc_feature: Encodes the peptide sequence at SEQ ID NO 36939
atgatgcgaatggtcaatagtcgggcgctcgctatcgagcaattccctcgtcgcgatcttgcgccaaaatatgctgttctatcgcatgtctggtatgacgaggaacccacgctacagtcattctctggcgaaaggacatccaatagctcacctggctggcagaagattaaagaaagctgttccgcagcgttggagatgggtatcgaatacatctggattgatacgtgctgcattgacaagacagaccctgctgagctatcgaggtcgatcaactccatgtttaagtggtatgctgaagcggcagtgtgtctagtttatctgaatgattacgatgctcatgatccagctgcaaatctgagcgactgccgttggtttttgaggggctggacgctacaagagttgatcgcacctcaggccgtgtgcttctacgactgcgattggcgattctttggctctcgcgatagtctaacctcacagctctcgggcatcaccggggttcatgatagtattctgcagtccacgacagagcgcaatatcgaggacctcttgcagacggtacccgtggcaacacgcatgtcttgggcgtcgatgagagagacaagtgttgaagaggatattgcatactgcctcttaggtatctttgctgtgaatatgccactgttgtacggtgaaggaatgcgagccttcacccgcttgcaagaagaaattgtgaaggaaaggaacgacttgacgatctttggttggcaatccattgatcccgatcgtggctgcttcgcacgtcacccggttgagttcgcgcaagggtcaactctccagccactcgcggatctggtattttcccccgagtttaccatgacgaataagggcctcagaatacgcggtgtattgtatgcatcagaggatggtaatgtcatgatgcccttgcaatgtcattccgagtggacctcggaaccgatggggctcctactcaagaaccaaggtggcggtgtctacgtgcgaacacggccagaccgtgttttcaccatgtctctcccaaagggcacatttagtcaggcagaaagccattttttcattgcgaagaacgtgaactcccttacaactcaggcgatagaaactagaatcaaatccgccatttactgtcgatttagcctgcccctatttgatcgcatcgcaacggagcctgccaattgttgggatgacgccaattcgatgtttgtctcatcaggacaacctggagtcaaaggttaccaccgtttcgcgacgcgcgcgccgtatcaggcaagggacttcgtcgtggctttcggatggaagtcagatggcaaattttggttgtgtattgataaaccgacgggcaagatatctacagctacaaggtcgcagaatcttgacctggtagcaactctcggcgagaccttcgattccaaagtaataaacgtcatcatgaacactcaacctgttggtagtgcgaaggaaggcgatgtggacgtgtggacacaatacaaaactatcaatctgagaggccagaacaccacaatgattgaagtcggcgcagatccaatcataacaaacttttacccctttcgaaggcgggttgcccctccctacagtcctcttgataatcagtcgggatctgcgccacccatcgagaagtccactgactttactgtgtatgcgagtgctcgttag

SEQ ID NO: 36939 - protein, 561 aa, Muscodor strobelii
  misc_feature: SGI Peptide ID NO. 572812
  misc_feature (24)..(133): Pfam Id: PF06985 Pfam Desc: Heterokaryon incompatibility protein (HET)
  misc_feature (24)..(107): Pfam Id: PF06985 Pfam Desc: Heterokaryon incompatibility protein (HET)
  misc_feature (114)..(133): Pfam Id: PF06985 Pfam Desc: Heterokaryon incompatibility protein (HET)
  misc_feature (2)..(419): NCBI GI: 256720984 Blast Desc: NECHADRAFT_82249 [Nectria haematococca mpVI 77-13-4]
  misc_feature (2)..(419): NCBI GI: 46126619 Blast Desc: FG07687.1 [Gibberella zeae PH-1]
  misc_feature (2)..(440): NCBI GI: 145605569 Blast Desc: MGG_09177 [Magnaporthe grisea 70-15] gi|145013388|gb|EDJ98029.1| MGG_09177 [Magnaporthe grisea 70-15]
  misc_feature (2)..(296): NCBI GI: 256721662 Blast Desc: NECHADRAFT_18017 [Nectria haematococca mpVI 77-13-4]
  misc_feature (2)..(310): NCBI GI: 164425178 Blast Desc: NCU06304 [Neurospora crassa OR74A] gi|157070820|gb|EAA33330.2| conserved [Neurospora crassa OR74A]
  misc_feature (2)..(292): NCBI GI: 256722255 Blast Desc: NECHADRAFT_52327 [Nectria haematococca mpVI 77-13-4]
  misc_feature (2)..(440): NCBI GI: 145244357 Blast Desc: An11g06570 [Aspergillus niger] gi|134079325|emb|CAK96954.1| protein product [Aspergillus niger]
  misc_feature (6)..(348): NCBI GI: 171677823 Blast Desc: protein product [Podospora anserina] gi|170936980|emb|CAP61638.1| protein product [Podospora anserina]
  misc_feature (2)..(344): NCBI GI: 256734168 Blast Desc: NECHADRAFT_78015 [Nectria haematococca mpVI 77-13-4]
  misc_feature (2)..(290): NCBI GI: 85092369 Blast Desc: NCU04912 [Neurospora crassa OR74A] gi|28920765|gb|EAA30124.1| [Neurospora crassa OR74A]
MMRMVNSRALAIEQFPRRDLAPKYAVLSHVWYDEEPTLQSFSGERTSNSSPGWQKIKESCSAALEMGIEYIWIDTCCIDKTDPAELSRSINSMFKWYAEAAVCLVYLNDYDAHDPAANLSDCRWFLRGWTLQELIAPQAVCFYDCDWRFFGSRDSLTSQLSGITGVHDSILQSTTERNIEDLLQTVPVATRMSWASMRETSVEEDIAYCLLGIFAVNMPLLYGEGMRAFTRLQEEIVKERNDLTIFGWQSIDPDRGCFARHPVEFAQGSTLQPLADLVFSPEFTMTNKGLRIRGVLYASEDGNVMMPLQCHSEWTSEPMGLLLKNQGGGVYVRTRPDRVFTMSLPKGTFSQAESHFFIAKNVNSLTTQAIETRIKSAIYCRFSLPLFDRIATEPANCWDDANSMFVSSGQPGVKGYHRFATRAPYQARDFVVAFGWKSDGKFWLCIDKPTGKISTATRSQNLDLVATLGETFDSKVINVIMNTQPVGSAKEGDVDVWTQYKTINLRGQNTTMIEVGADPIITNFYPFRRRVAPPYSPLDNQSGSAPPIEKSTDFTVYASAR

SEQ ID NO: 36940 - DNA, 1173 bp, Muscodor strobelii
  misc_feature: SGI EST ID NO. CUFF.88199.0
  misc_feature: Variant of the nucleotide sequence at SEQ ID NO 36938
tgattccagttcttgggaataggagcagtagtttaaaatatcccgtgtagtcctttattgatggatctcaaaacagtggtgggcaagagtggggtcattggccccagtccactgtatcattcgtccttcagggcattagctcaatcggcaaaacattgattcaattcaatcaagctggtgtttgtaaccgcatcttccccaggcccagggtttcatcgagctgctgtggactgtcaaacagcagccacacggtagtatgcgcggctacggaagtcaactttggtcacatcaaccagagtcctatattgcgacactgttcactcagctcagtagccgtagcagggctcgcattataatgggagaaccccaaggctactcggccgggtagctacgccgtctaataatcttttcccctactatatgctaagcacacagatgttcaccttgccctaatctcttacaacaatgatgcgaatggtcaatagtcgggcgctcgctatcgagcaattccctcgtcgcgatcttgcgccaaaatatgctgttctatcgcatgtctgaagattaaagaaagctgttccgcagcgttggagatgggtatcgaatacatctggattgatacgtgctgcattgacaagacagaccctgctgagctatcgaggtcgatcaactccatgtttaagtggtatgctgaagcggcagtgtgtctagtttatctgaatgattacgatgctcatgatccagctgcaaatctgagcgactgccgttggtttttgaggggctggacgctacaagagttgatcgcacctcaggccgtgtgcttctacgactgcgattggcgattctttggctctcgcgatagtctaacctcacagctctcgggcatcaccggggttcatgatagtattctgcagtccacgacagagcgcaatatcgaggacctcttgcagacggtacccgtggcaacacgcatgtcttgggcgtcgatgagagagacaagtgttgaagaggatattgcatactgcctcttaggtatctttgctgtgaatatgccactgttgtacggtgaaggaatgcgagccttcacccgcttgcaagaagaaattgtgaaggaaaggaacgacttgacgatctttggttggcaatccattgatcccggtattggagatcaagtgg

SEQ ID NO: 36941 - DNA, 1329 bp, Muscodor strobelii
  misc_feature: SGI cDNA ID NO. 572813
  misc_feature: Encodes the peptide sequence at SEQ ID NO 36942
atggcttccgttcttcttggtacttttcttgctctgttctacctgagttacggatggctccatcggacactacgaggctatccaggtccattccttgcgaagttcaccaatgcatacaccgctgtctttgcgataaacggaactctccacacgaagatctggaggacacacgaagattacggtagcgtggtccgaattggtccgaacagacttgtcttcaactcagctacagctttgcaagacatatatcataatgagagaattagcaaacctccgatctacctagcaacgcaaatccaagccggcgctttcagtgtttggaatgtactggacaaagatctgcatcgtcggaagcgaaagatggtggggcgagcaaccagtgacgcctctatgaagtttttcgagtcctcgatgctagagcagatcgacatcttcatcagtcttttaaggaagaacgaaggccagccagttgacatgaagacttcgtgcagctacctaagctttgacatcatcggcctgctatcttttggttacgccttgcgactccagactgatgagacgaatcgatttttgccggagttgctatctcgtactaaccacaggatgaatgtatacatgcaaattcctataattccacgctataagcttcaaaggttcttgaatttaccatttagaaaagaacgcgagaagacagcacgtttgatcgaaatgatggtccgctctcggatgtctcaagataaagatgccatgcgagacctctacttccatgttgcagatgcagttcaagccaaagacgataaaactttgcgagttggtgatctttggttagaagcattctttttcatcattgcaggcggcgatactgttgctactgtcttgtgttcgacactcttctaccttactcgtaaccgcgcgtgttacttgaagctcactgaagagatcagaaatgctttccaagacaatagcgagatagtaggagccaaagcaggaaattgtacatatctgagagcatgcatcgacgaggcaatgaggatgtcaccacctgtccccggtacgttatggagacatcttgcgctagaagacatgaatgacgtccccctcgttgtggacggccataccatacccccgggaacacaagttggagtgaatatatactccttacatcacaatgcgcgctatttcccagaccccttcacttacaatccagatcgatggatatcatcatcgctgtctgagaacgaaccaagttattttggcatttcgactttgaagccgcaccagggaaattgggtgatattggggcgggacaacatggggaatttcatttaa

SEQ ID NO: 36942 - protein, 442 aa, Muscodor strobelii
  misc_feature: SGI Peptide ID NO. 572813
  misc_feature (28)..(433): Pfam Id: PF00067 Pfam Desc: Cytochrome P450
  misc_feature (115)..(405): Pfam Id: PF00067 Pfam Desc: Cytochrome P450
  misc_feature (27)..(416): NCBI GI: 121712150 Blast Desc: benzoate 4-monooxygenase cytochrome P450 [Aspergillus clavatus NRRL 1] gi|119401842|gb|EAW12264.1| benzoate 4-monooxygenase cytochrome P450 [Aspergillus clavatus NRRL 1]
  misc_feature (1)..(408): NCBI GI: 121710976 Blast Desc: benzoate 4-monooxygenase cytochrome P450 [Aspergillus clavatus NRRL 1] gi|119401254|gb|EAW11678.1| benzoate 4-monooxygenase cytochrome P450 [Aspergillus clavatus NRRL 1]
  misc_feature (24)..(411): NCBI GI: 46123381 Blast Desc: FG06068.1 [Gibberella zeae PH-1]
  misc_feature (4)..(407): NCBI GI: 145256217 Blast Desc: An10g00660 [Aspergillus niger CBS 513.88] gi|134078632|emb|CAK40505.1| protein product [Aspergillus niger]
  misc_feature (2)..(422): NCBI GI: 85092131 Blast Desc: NCU06895 [Neurospora crassa OR74A] gi|28920645|gb|EAA30006.1| conserved [Neurospora crassa OR74A]
  misc_feature (24)..(411): NCBI GI: 256733020 Blast Desc: [Nectria haematococca mpVI 77-13-4]
  misc_feature (24)..(407): NCBI GI: 169603764 Blast Desc: SNOG_04890 [Phaeosphaeria nodorum SN15] gi|111066161|gb|EAT87281.1| SNOG_04890 [Phaeosphaeria nodorum SN15]
  misc_feature (19)..(406): NCBI GI: 169782556 Blast Desc: [Aspergillus oryzae RIB40] gi|83774484|dbj|BAE64607.1| protein product [Aspergillus oryzae]
  misc_feature (19)..(406): NCBI GI: 242771379 Blast Desc: cytochrome P450, [Talaromyces stipitatus ATCC 10500] gi|218721449|gb|EED20867.1| cytochrome P450, [Talaromyces stipitatus ATCC 10500]
  misc_feature (24)..(410): NCBI GI: 145608110 Blast Desc: MGG_03375 [Magnaporthe grisea 70-15] gi|145015610|gb|EDK00100.1| MGG_03375 [Magnaporthe grisea 70-15]
  misc_feature (24)..(418): SWISSPROT Homolog: EC 1.14.13.12 Benzoate 4-monooxygenase
MASVLLGTFLALFYLSYGWLHRTLRGYPGPFLAKFTNAYTAVFAINGTLHTKIWRTHEDYGSVVRIGPNRLVFNSATALQDIYHNERISKPPIYLATQIQAGAFSVWNVLDKDLHRRKRKMVGRATSDASMKFFESSMLEQIDIFISLLRKNEGQPVDMKTSCSYLSFDIIGLLSFGYALRLQTDETNRFLPELLSRTNHRMNVYMQIPIIPRYKLQRFLNLPFRKEREKTARLIEMMVRSRMSQDKDAMRDLYFHVADAVQAKDDKTLRVGDLWLEAFFFIIAGGDTVATVLCSTLFYLTRNRACYLKLTEEIRNAFQDNSEIVGAKAGNCTYLRACIDEAMRMSPPVPGTLWRHLALEDMNDVPLVVDGHTIPPGTQVGVNIYSLHHNARYFPDPFTYNPDRWISSSLSENEPSYFGISTLKPHQGNWVILGRDNMGNFI

SEQ ID NO: 36943 - DNA, 363 bp, Muscodor strobelii
  misc_feature: SGI EST ID NO. CUFF.88188.0
  misc_feature: Variant of the nucleotide sequence at SEQ ID NO 36941
gaatgtatacatgcaaattcctataattccacgctataagcttcaaaggttcttgaatttaccatttagaaaagaacgcgagaagacagcacgtttgatcgaaatgatggtccgctctcggatgtctcaagataaagatgccatgcgagacctctacttccatgttgcagatgcagttcaagccaaagacgataaaactttgcgagttggtgatctttggttagaagcattctttttcatcattgcaggcggcgatactgttgctactgtcttgtgttcgacactcttctaccttactcgtaaccgcgcgtgttacttgaagctcactgaagagatcagaaatgctttccaagacaatagcga

SEQ ID NO: 36944 - DNA, 897 bp, Muscodor strobelii
  misc_feature: SGI cDNA ID NO. 572814
  misc_feature: Encodes the peptide sequence at SEQ ID NO 36945
atggctaacccgtggaatcttgccaatatgacggaggaaaagagactgaagaacacattcattgtcgcaacgttgtgctctacgctgattgggacattctcatcgtccattggtctttgggaccgtgttagcgagaagcgcaaacagaaacggcgggatacaaaacaggacgatgagattcgacgactacaagaaaaggtcgccgtggcagaaagccgtggtcaacaccgtgctgatgatagacattcccggcttgaagacgacgaaggaagcgacgaactgggtcgttcattagtgaaatctaccgatatgatccggagagaatatgacgaggccgccagcgctttggggaaacgatttgcaattggcgacatggttactgaaaatctgcttcaaactcaaattattgctctccagcaatcagtcatcgacgtcctgcaagatgccctgctccacggtcgtcagctgtctcgcgacgatgtgcgaaaacttgtatctgcatctgagagggctcgcgatggctctctacaagctcttcgactccaggttcgacgactacgacaagaagaacatccacgggaaagcgtagcaccactatcgagtcacgagtcacgaaacatgcatggcgatgacttgttttgccaatatagcatcgagctgcaaaattttgttaatggtatgaccctacactcgtcattcgcgcctgacggcaacggtgtctgccccaagtgtggtgttcgactgacaatcgaagcccccgaaatttattggcacattgagaagaaggcaccagtatggatcgaccacggggattacaaagaggaggtaattgagtcgcactactttgacttaggccaacgtttcctggtccaatgtcacactatgacaggtgaatag

SEQ ID NO: 36945 - protein, 298 aa, Muscodor strobelii
  misc_feature: SGI Peptide ID NO. 572814
  misc_feature (6)..(298): NCBI GI: 256722827 Blast Desc: NECHADRAFT_87152 [Nectria haematococca mpVI 77-13-4]
  misc_feature (6)..(298): NCBI GI: 46115320 Blast Desc: FG03502.1 [Gibberella zeae PH-1]
  misc_feature (6)..(298): NCBI GI: 189211018 Blast Desc: conserved [Pyrenophora tritici-repentis Pt-1C-BFP] gi|187977933|gb|EDU44559.1| conserved [Pyrenophora tritici-repentis Pt-1C-BFP]
  misc_feature (22)..(298): NCBI GI: 169612760 Blast Desc: SNOG_09506 [Phaeosphaeria nodorum SN15] gi|111061651|gb|EAT82771.1| SNOG_09506 [Phaeosphaeria nodorum SN15]
  misc_feature (6)..(293): NCBI GI: 171676442 Blast Desc: protein product [Podospora anserina] gi|170936287|emb|CAP60946.1| protein product [Podospora anserina]
  misc_feature (8)..(192): NCBI GI: 116200418 Blast Desc: CHGG_10754 [Chaetomium globosum CBS 148.51] gi|88175468|gb|EAQ82936.1| CHGG_10754 [Chaetomium globosum CBS 148.51]
  misc_feature (8)..(188): NCBI GI: 85074599 Blast Desc: NCU09676 [Neurospora crassa OR74A] gi|28922288|gb|EAA31530.1| [Neurospora crassa OR74A] gi|28949976|emb|CAD70737.1| conserved [Neurospora crassa]
  misc_feature (21)..(153): NCBI GI: 189202174 Blast Desc: conserved [Pyrenophora tritici-repentis Pt-1C-BFP] gi|187984522|gb|EDU50010.1| conserved [Pyrenophora tritici-repentis Pt-1C-BFP]
MANPWNLANMTEEKRLKNTFIVATLCSTLIGTFSSSIGLWDRVSEKRKQKRRDTKQDDEIRRLQEKVAVAESRGQHRADDRHSRLEDDEGSDELGRSLVKSTDMIRREYDEAASALGKRFAIGDMVTENLLQTQIIALQQSVIDVLQDALLHGRQLSRDDVRKLVSASERARDGSLQALRLQVRRLRQEEHPRESVAPLSSHESRNMHGDDLFCQYSIELQNFVNGMTLHSSFAPDGNGVCPKCGVRLTIEAPEIYWHIEKKAPVWIDHGDYKEEVIESHYFDLGQRFLVQCHTMTGE

SEQ ID NO: 36946 - DNA, 1914 bp, Muscodor strobelii
  misc_feature: SGI EST ID NO. CUFF.88225.1
  misc_feature: Variant of the nucleotide sequence at SEQ ID NO 36944
gaagccttcaaatagcgccagacaaatagtgtggtgtgctatctgctgactcacgatacagccatgcaggagctccaagtcccgatgacgtaggcaaaagcgtctacttttcgtcttcttttcgtctacaacccaagtactactctaaccaacactaactttgggtgccaacgattccgcacgcacaattgttcatgggcatcacactactctgtcctagttcgacccgctcggccatctgacacacgtccctagtcacgcattttaagtgcaagaggtggtatttataacccttgcgaggtgcaaggtccgatccccagccttgggtcctctctaaacatagacactggttctcattgtcacgatggctaacccgtggaatcttgccaatatgacggaggaaaagagactgaagaacacattcattgtcgcaacgttgtgctctacgctgattgggacattctcatcgtccattggtctttgggaccgtgttagcgagaagcgcaaacagaaacggcgggatacaaaacaggttggacagtatcgccgaggaatacctactcgatgctaatgcccgtataggacgatgagattcgacgactacaagaaaaggtcgccgtggcagaaagccgtggtcaacaccgtgctgatgatagacattcccggcttgaagacgacgaaggaagcgacgaactgggtcgttcattagtgaaatctaccgatatgatccggagagaatatgacgaggccgccagcgctttggggaaacgatttgcaattggcgacatggttactgaaaatctgcttcaaactcaaattattgctctccagcaatcagtcatcgacgtcctgcaagatgccctgctccacggtcgtcagctgtctcgcgacgatgtgcgaaaacttgtatctgcatctgagagggctcgcgatggctctctacaagctcttcgactccaggttcgacgactacgacaagaagaacatccacgggaaagcgtagcaccactatcgagtcacgagtcacgaaacatgcatggcgatgacttgttttgccaatatagcatcgagctgcaaaattttgttaatggtatgtgcggaaaatatcatacgatttatttctagtctatgattcctcaataccatcctaacctttttatagtaagtgatttaaacaatcagatatcagagcctggtcttttatcttgagaaactagcgcccgcatgggaataataggaaattatctaacgcgatacccttccggctactagaggaccctacactcgtcattcgcgcctgacggcaacggtgtctgccccaagtgtggtgttcgactgacaatcgaagcccccgaaatttattggcacattgagaagaaggcaccagtatggatcgaccacggggattacaaagaggaggtaattgagtcgcactactttgacttaggccaacgtttcctggtccaatgtcacactatgacaggtgaatatgcttgtgtcctgtgtagaaagcatagagatactgatgttgtttgtcggaccgttccaacattggtcaaccacattggcagggcacacaatgtttcggagctagggtcggaaccacacttaagagatcggagcaagcgcccagcaaatttgacagccttattacttgaagacggaagaggacgtggggtatcatagacgaagtatggcggtgtttgtatatatatatatcgtccttctaaaggaccactggatgtatacttcgtcagcctgatgtttaaacagctatataacagtttctctgtcttattaagctaagtctctggaatacgggatggtgcttagcgacaaattcaaacccaaagcaaccggcatcgagcttagtgtagcctgtaggtagctggtagcaaatgcagtggtaaaaat

SEQ ID NO: 36947 - DNA, 2307 bp, Muscodor strobelii
  misc_feature: SGI cDNA ID NO. 572815
  misc_feature: Reduced expression when VOC is produced
  misc_feature: Encodes the peptide sequence at SEQ ID NO 36948
atggactacgaggctctgaaggagcagtggagcgaggtggaagaccgagacggcgtccgcctcagctggaacgtgaagcctcccgccttgtcgtgcccattggcgctctctacaccccccctcaaggagaagccagacacccccatactgcagtttgagcccgtcacctgcaagcagccctgccgctccgtgctcaaccccttctgccaggtcgacgtgcgagcacgcctctggatctgccccttctgtctcaaccgcaatcctctgcccccgcactacaaagacatcaccaacaccgccatcccccccgagctgcacgcctccaacaccaccatcgagtacagactgtcccgcccggcccccagccctcccatctttctctatgtcgtcgacacctgccaggaggacgacagcttggctgccctcaaggagtccctcatcatgagcttgagcttgctgcccgagaatgccctcgtcggcctcatcaccttcggcaccatggtccaagtccacgagatcggctacaccgagtgcgccaaatcgtacgttttccgtggcagcaaggaatatgccgccaagcaggtccaggagatgctgggattgcttgcccccagccttcgccccggcatgccacagcagcagccgggtcgtcccatgatgcccatgggcccggccacgcgcttcctcttgcctgtacagcagtgtgagtttcagctcactaaggtcctcgagcagctacagaaggacccgtggcctgtcgccaatgacaggaggagtctgcgatgctctggtgtcgctctcagtgttgccgtcgggctcttggagtcttctttccagaacgccggtggacgcatcatgatgttcgctggtggccctgctaccgagggtcctggcatggttgtcggccctgagcttcgtgagcccattcgatctcaccatgatatcgatcgggataacatcaagtactacaagaaagccctcaagttctacgataacctagccaagcgcaccgctcacaacggccacatcattgatatttttgccggctgtcttgatcaggtggggttgctggagatgaagggcctgtgcaactctacaggcggacatatgattctgactgatagttttacctcgtccatgtttaaacagtccttcattcgcgtcttcgagaaggacggggacggtaatttgttgatgggcttcaacgccgtcctcgaggttctgaccaccaaggagctcaaagtcacgggtcttattggccacgccgtatcgcttaacaagaaatctacgtcggtcggtgagacagagtgcggtatcgggaatacctgttcctggaagatgtgtggcatcgatccaaacgctagctacggtatctatttcgagatcgccggtcaaagcggacctacgcaacaccagcaggggcagcagaaggggctgatgcagttcctcacctactatcagcattcttcgggtcagttccacctgcgtgtgacgacaatctctcgagccctcagtggccctgcaggcgatccggcgattgcgcagtccttcgaccaagaggcggcagccgtgctcatgtcgagaatagccgttttcaaggccgaggtggatgatgggccggatgtgttgcgctgggtcgatcgcatgctcatcaggctctgctcacgctttgccgactataggaaggacgacccttcgtctttcagactcgagaagaactttacgctttacccccagttcatgttccacttgcggcgcagtcaatttctacaggtcttcaacaattcgccggacgagacggcgttttaccgtcatgtactgaatcatgaagatgtaagcaactcgctgattatgatccagccaactctagattcctacaccttcgagcaagaaggcggccaaccagtgctcttggactccacatcgattcaaccgacgcacatcctgttgctggatactttcttccacatcttgatcttccacggcgagacgatcgcagaatggaagaaagcgggctaccaagaccaaggtggctacgaaaactttgccgcgctgctggagcagccaaaggaggatgccagggatctcatcggtgaccgatttcccttaccacgcttcatcgtttgtgacgcgggcggatcgcaggcgcgtttcctactatcaaaattgaacccgtcgacaacgcacacgaccggtgcatacggtggagtaggtgcacaatcggcccaaacaatatttacggatgatgtgtcgctccagacattcatggaccatctgatgaagcttgctgtgagcggcacgagttga

SEQ ID NO: 36948 - protein, 768 aa, Muscodor strobelii
  misc_feature: SGI Peptide ID NO. 572815
  misc_feature (629)..(719): Pfam Id: PF00626 Pfam Desc: Gelsolin repeat
  misc_feature (400)..(505): Pfam Id: PF08033 Pfam Desc: Sec23/Sec24 beta-sandwich domain
  misc_feature (519)..(619): Pfam Id: PF04815 Pfam Desc: Sec23/Sec24 helical domain
  misc_feature (121)..(389): Pfam Id: PF04811 Pfam Desc: Sec23/Sec24 trunk domain
  misc_feature (53)..(93): Pfam Id: PF04810 Pfam Desc: Sec23/Sec24 zinc finger
  misc_feature (1)..(768): NCBI GI: 261360784 Blast Desc: transport protein SEC23 [Verticillium albo-atrum VaMs.102]
  misc_feature (1)..(768): NCBI GI: 156037532 Blast Desc: conserved [Sclerotinia sclerotiorum 1980] gi|154697888|gb|EDN97626.1| conserved [Sclerotinia sclerotiorum 1980]
  misc_feature (1)..(768): NCBI GI: 116206622 Blast Desc: conserved [Chaetomium globosum CBS 148.51] gi|121788917|sp|Q2HB00.1|SEC23_CHAGB RecName: Full=Protein transport protein SEC23 gi|88183201|gb|EAQ90669.1| conserved CBS
  misc_feature (1)..(768): NCBI GI: 46110070 Blast Desc: FG01917.1 [Gibberella zeae PH-1]
  misc_feature (1)..(768): NCBI GI: 256728465 Blast Desc: [Nectria haematococca mpVI 77-13-4]
  misc_feature (1)..(768): NCBI GI: 74638434 Blast Desc: SEC23_NEUCR RecName: Full=Protein transport protein sec-23 gi|12718409|emb|CAC28788.1| SEC23 [Neurospora crassa]
  misc_feature (1)..(768): NCBI GI: 145605716 Blast Desc: conserved [Magnaporthe grisea 70-15] gi|158514083|sp|A4R1J7.1|SEC23_MAGGR RecName: Full=Protein transport protein SEC23 gi|145013521|gb|EDJ98162.1| conserved
  misc_feature (1)..(768): NCBI GI: 171692145 Blast Desc: protein product [Podospora anserina] gi|170946021|emb|CAP72822.1| protein product [Podospora anserina]
  misc_feature (1)..(764): NCBI GI: 164426315 Blast Desc: protein transport protein SEC23 [Neurospora crassa OR74A] gi|157071286|gb|EAA32168.2| protein transport protein SEC23 [Neurospora crassa OR74A]
  misc_feature (1)..(768): NCBI GI: 225562956 Blast Desc: protein transporter SEC23 [Ajellomyces capsulatus G186AR]
  misc_feature: Useful for introducing or modulating the production of volatile compounds
MDYEALKEQWSEVEDRDGVRLSWNVKPPALSCPLALSTPPLKEKPDTPILQFEPVTCKQPCRSVLNPFCQVDVRARLWICPFCLNRNPLPPHYKDITNTAIPPELHASNTTIEYRLSRPAPSPPIFLYVVDTCQEDDSLAALKESLIMSLSLLPENALVGLITFGTMVQVHEIGYTECAKSYVFRGSKEYAAKQVQEMLGLLAPSLRPGMPQQQPGRPMMPMGPATRFLLPVQQCEFQLTKVLEQLQKDPWPVANDRRSLRCSGVALSVAVGLLESSFQNAGGRIMMFAGGPATEGPGMVVGPELREPIRSHHDIDRDNIKYYKKALKFYDNLAKRTAHNGHIIDIFAGCLDQVGLLEMKGLCNSTGGHMILTDSFTSSMFKQSFIRVFEKDGDGNLLMGFNAVLEVLTTKELKVTGLIGHAVSLNKKSTSVGETECGIGNTCSWKMCGIDPNASYGIYFEIAGQSGPTQHQQGQQKGLMQFLTYYQHSSGQFHLRVTTISRALSGPAGDPAIAQSFDQEAAAVLMSRIAVFKAEVDDGPDVLRWVDRMLIRLCSRFADYRKDDPSSFRLEKNFTLYPQFMFHLRRSQFLQVFNNSPDETAFYRHVLNHEDVSNSLIMIQPTLDSYTFEQEGGQPVLLDSTSIQPTHILLLDTFFHILIFHGETIAEWKKAGYQDQGGYENFAALLEQPKEDARDLIGDRFPLPRFIVCDAGGSQARFLLSKLNPSTTHTTGAYGGVGAQSAQTIFTDDVSLQTFMDHLMKLAVSGTS

SEQ ID NO: 36949 - DNA, 3086 bp, Muscodor strobelii
  misc_feature: SGI EST ID NO. CUFF.88231.0
  misc_feature: Variant of the nucleotide sequence at SEQ ID NO 36947
gacagataggtgtgcctatccagtctctctcgcatcgaccacgataccctcaacaccctcaactcggcccacgtcagtctgcctcatatatcccacccgccgccgcaagacaaccccggcccgtcttctcttcgtagtcttctcttcgtagcgtcatctgcagctacctccaacgaactgcccatcaccggtctgttgcaacccccgccatctcggaccggccgccggcgccccatacgcattactctctccccatctgccctgcggccatcagccgcccaccatggactacgaggctctgaaggagcagtggagcgaggtggaagaccgagacggcgtccgcctcagctggaacgtgtttcccagctcccgcgtcgtgagttggcaccgagaaccatgtgcttccagagacacaccggcctgagcaagcccgctgatccctcttgtgcgtccaggaagcctcccgccttgtcgtgcccattggcgctctctacaccccccctcaaggagaagccagacacccccatactgcagtttgagcccgtcacctgcaagcagccctgccgctccgtgctcaaccccttctgccaggtcgacgtgcgagcacgcctctggatctgccccttctgtctcaaccgcaatcctctgcccccgcactacaaagacatcaccaacaccgccatcccccccgagctgcacgcctccaacaccaccatcgagtacagactgtcccgcccggcccccagccctcccatctttctctatgtcgtcgacacctgccaggaggacgacagcttggctgccctcaaggagtccctcatcatgagcttgagcttgctgcccgagaatgccctcgtcggcctcatcaccttcggcaccatggtccaagtccacgagatcggctacaccgagtgcgccaaatcgtacgttttccgtggcagcaaggaatatgccgccaagcaggtccaggagatgctgggattgcttgcccccagccttcgccccggcatgccacagcagcagccgggtcgtcccatgatgcccatgggcccggccacgcgcttcctcttgcctgtacagcagtgtgagtttcagctcactaaggtcctcgagcagctacagaaggacccgtggcctgtcgccaatgacaggaggagtctgcgatgctctggtgtcgctctcagtgttgccgtcgggctcttggagtcttctttccagaacgccggtggacgcatcatgatgttcgctggtggccctgctaccgagggtcctggcatggttgtcggccctgagcttcgtgagcccattcgatctcaccatgatatcgatcgggataacatcaagtactacaagaaagccctcaagttctacgataacctagccaagcgcaccgctcacaacggccacatcattgatatttttgccggctgtcttgatcaggtggggttgctggagatgaagggcctgtgcaactctacaggcggacatatgattctgactgatagttttacctcgtccatgtttaaacagtccttcattcgcgtcttcgagaaggacggggacggtaatttgttgatgggcttcaacgccgtcctcgaggttctgaccaccaaggagctcaaagtcacgggtcttattggccacgccgtatcgcttaacaagaaatctacgtcggtcggtgagacagagtgcggtatcgggaatacctgttcctggaagatgtgtggcatcgatccaaacgctagctacggtatctatttcgagatcgccggtcaaagcggacctacgcaacaccagcaggggcagcagaaggggctgatgcagttcctcacctactatcagcattcttcgggtcagttccacctgcgtgtgacgacaatctctcgagccctcagtggccctgcaggcgatccggcgattgcgcagtccttcgaccaagaggcggcagccgtgctcatgtcgagaatagccgttttcaaggccgaggtggatgatgggccggatgtgttgcgctgggtcgatcgcatgctcatcaggctctgctcacgctttgccgactataggaaggacgacccttcgtctttcagactcgagaagaactttacgctttacccccagttcatgttccacttgcggcgcagtcaatttctacaggtcttcaacaattcgccggacgagacggcgttttaccgtcatgtactgaatcatgaagatgtaagcaactcgctgattatgatccagccaactctagattcctacaccttcgagcaagaaggcggccaaccagtgctcttggactccacatcgattcaaccgacgcacatcctgttgctggatactttcttccacatcttgatcttccacggcgagacgatcgcagaatggaagaaagcgggctaccaagaccaaggtggctacgaaaactttgccgcgctgctggagcagccaaaggaggatgccagggatctcatcggtgaccgatttcccttaccacgcttcatcgtttgtgacgcgggcggatcgcaggcgcgtttcctactatcaaaattgaacccgtcgacaacgcacacgaccggtgcatacggtggagtaggtgcacaatcggcccaaacaatatttacggatgatgtgtcgctccagacattcatggaccatctgatgaagcttgctgtgagcggcacgagttgagtgtgatgactattggtaattttggagggcagaaaatcgttcatggctgtggtccaatagtagaggatgcggggcaagatggcagagtggaaagggtcgcatctttgatacataactgtacgtaaatgtagacattaatgctcacgaatgccggaaacccaaaatgcaatgttttccgtgctattccaatgctttctcatggctaaagacttaatggcagtaagaggatttggccgattacacgatgttgtacatgattgagatgacatggtcctcgtatgtgaagtcacgacatagctgtgttgtctatcagatgagctcgtggcggacgactttaacttggtggtctcgacatacggcactactcgttacactaatttgacacctttcaatttgac

SEQ ID NO: 36950 - DNA, 498 bp, Muscodor strobelii
  misc_feature: SGI cDNA ID NO. 572816
  misc_feature: Reduced expression when VOC is produced
  misc_feature: Encodes the peptide sequence at SEQ ID NO 36951
atgcctcccaagatcgaccccaacgaagtcaaggtcatcactctccgtgccaccggaggtgaggttggtgcctcgtcggcgctggctcccaagatcggtcccctcggtctgtcgcccaagaaggtcggtgaagatatcgctaaggccaccggtgactggaagggtctccgcgtcacggtcaaacttacgattcaaaaccgtcaagccgccgtctccgtcgtgcccacggcctcgaccctcgtcatcaaggctctgaaagagccgccgcgcgaccgcaagaaggaaaagaatatcaagcactcaaagtcgatccccattgacgagatcatcgagattgcacgcaccatgcgcttcaagtctctcgctaaggagctaagcggcaccgtcaaggagatcctcggcacctgcaatagcgtgggctgccaggtcgacggcaagagcccgagggccatccaggaggacatcgacaatggtgtgattacgattcccgacgagtaa

SEQ ID NO: 36951 - protein, 165 aa, Muscodor strobelii
  misc_feature: SGI Peptide ID NO. 572816
  misc_feature (75)..(143): Pfam Id: PF00298 Pfam Desc: Ribosomal protein L11, RNA binding domain
  misc_feature (12)..(70): Pfam Id: PF03946 Pfam Desc: Ribosomal protein L11, N-terminal domain
  misc_feature (1)..(165): NCBI GI: 154316163 Blast Desc: 60S ribosomal protein L12 [Botryotinia fuckeliana B05.10] gi|150846453|gb|EDN21646.1| 60S ribosomal protein L12 [Botryotinia fuckeliana B05.10]
  misc_feature (1)..(165): NCBI GI: 85102845 Blast Desc: 60S ribosomal protein L12 [Neurospora crassa OR74A] gi|30316286|sp|Q9C285.1|RL12_NEUCR RecName: Full=60S ribosomal protein L12 gi|12718408|emb|CAC28787.1| ribosomal protein L12 60S
  misc_feature (1)..(165): NCBI GI: 156037530 Blast Desc: 60S ribosomal protein L12 [Sclerotinia sclerotiorum 1980] gi|154697887|gb|EDN97625.1| 60S ribosomal protein L12 [Sclerotinia sclerotiorum 1980]
  misc_feature (1)..(165): NCBI GI: 169617868 Blast Desc: SNOG_12114 [Phaeosphaeria nodorum SN15] gi|111059406|gb|EAT80526.1| SNOG_12114 [Phaeosphaeria nodorum SN15]
  misc_feature (1)..(165): NCBI GI: 261360785 Blast Desc: 60S ribosomal protein L12 [Verticillium albo-atrum VaMs.102]
  misc_feature (1)..(165): NCBI GI: 145605732 Blast Desc: MGG_06895 [Magnaporthe grisea 70-15] gi|145013538|gb|EDJ98179.1| MGG_06895 [Magnaporthe grisea 70-15]
  misc_feature (1)..(165): NCBI GI: 116206624 Blast Desc: 60S ribosomal protein L12 [Chaetomium globosum CBS 148.51] gi|88183202|gb|EAQ90670.1| 60S ribosomal protein L12 [Chaetomium globosum CBS 148.51]
  misc_feature (1)..(165): NCBI GI: 189200521 Blast Desc: 60S ribosomal protein L12 [Pyrenophora tritici-repentis Pt-1C-BFP] gi|187983696|gb|EDU49184.1| 60S ribosomal protein L12 [Pyrenophora tritici-repentis Pt-1C-BFP]
  misc_feature (1)..(165): NCBI GI: 212539960 Blast Desc: 60S ribosomal protein L12 [Penicillium marneffei ATCC 18224] gi|210067434|gb|EEA21526.1| 60S ribosomal protein L12 [Penicillium marneffei ATCC 18224]
  misc_feature (1)..(165): NCBI GI: 242803203 Blast Desc: 60S ribosomal protein L12 [Talaromyces stipitatus ATCC 10500] gi|218717471|gb|EED16892.1| 60S ribosomal protein L12 [Talaromyces stipitatus ATCC 10500]
  misc_feature: Useful for introducing or modulating the production of volatile compounds
MPPKIDPNEVKVITLRATGGEVGASSALAPKIGPLGLSPKKVGEDIAKATGDWKGLRVTVKLTIQNRQAAVSVVPTASTLVIKALKEPPRDRKKEKNIKHSKSIPIDEIIEIARTMRFKSLAKELSGTVKEILGTCNSVGCQVDGKSPRAIQEDIDNGVITIPDE

SEQ ID NO: 36952 - DNA, 2215 bp, Muscodor strobelii
  misc_feature: SGI EST ID NO. CUFF.88312.0
  misc_feature: Variant of the nucleotide sequence at SEQ ID NO 36950
ggggaaactgcctagggctttgcttggtggcacgttcgcaagctggaacccacaagattttgaaggggcagccattttttcgttccccacgttgcaccgtcgccgccagccgtaccagatctcgaggagctgaattgatctctgccaacctcaccaccacgcctctccagaatcttgacaatcgcccatcatgcctcccaagatcgaccccaacgaagtcaaggtcatcactctccgtgccaccggaggtgaggttggtgcctcgtcggcgctggctcccaagatcggtcccctcggtctgtcgcccaagaaggtcggtgaagatatcgctaaggccaccggtgactggaagggtctccgcgtcacggtcaaacttacgattcaaaaccgtcaagccgccgtctccgtcgtgcccacggcctcgaccctcgtcatcaaggctctgaaagagccgccgcgcgaccgcaagaaggaaaagaatatcaagcactcaaagtcgatccccattgacgagatcatcgagattgcacgcaccatgcgcttcaagtctctcgctaaggagctaagcggcaccgtcaaggagatcctcggcacctgcaatagcgtgggctgccaggtcgacggcaagagcccgagggccatccaggaggacatcgacaatggtgtgattacgattcccgacgagtaaagcgacgaacatgacgagtagggagacggacaaatggggggaatgagtatggcgggtactatcaagatgtttatttgtgctgcatctttcacaggagttcaggaatggcttcgcaataggttttcacccaaggcccccacaaatgaaaagaacaagaaccaaagacattaaggcgctggacagtccgacagcggcagcggtgatacgacgcggcacgcaggtgatgtgtagccgcaggtgatgacacgaggtgactgcgcgtgtgtagcctgaggagacgtggtttcccagtgtttgttcgcccctgccctttccccctctcttgctggcgccccttgcctccgggcagctttgggccaacggcagccttgcctacactccgagatacgcgcctttctcccccatggcctatttctatttttgtgtcaaggaagactgaagatccgcggcggactactcaccgcgccctcccgagagcccttttcggggtctcgcgatggagggcgaggtccatcatttacccgcccacagaattttgattgtattttcctagatatttcatgacaagtagaggatgaagatagactgtgccgggatacgcatgtactcgatcttggctcgctctcgctgagatgcctaggcagaacctaggcgctttggcatgggtaatgcgttgggttgtgacgtgtaaggctgacggaaatagaggtggtctgagcgaggctgggttatgaggtgtcctcatgagtgtgtggtgacacaggattgacacagaattccaagggggtgtattgtttggatgggacaagcgtgcgtggccaatgcgtgctgaaattttctcttctcttgccttcttagactatcttcggtgaagtacctaagtgcgtggccgtcttctgatgggctcatgtcagaccaacgtcagatacgtgcatgttgccacaaacaacctaccttgcggccggcgggatctatcattatcggacggccgatctaaattccatacggaagacccctttgtctactctgcctgaagaagcgtggattaagaggcgttcttgtcgatacgcgtctgtgtgtgaagcagtttgccaatctaaaagccacctacataataccgggtaggcgtcagtccggcggacgtgggctgagtggacgtgagcgaggacaccgcttaggcggcacggaccagcttacttactataggtaggtagctggcgggagcaggtcgctggggactgggctgacctacctgagggcaccttggccggctctgatctactggcccagctagtgcgtaggtgcagctctaggccaggctctaggccatctctgctcaggccgtcgaggcggcatcgacgctacgacttcgcatctccgtccacaacccgcagcccgcaacccgcaacccgcaggcggcaacccacttgcatcaacgacagtactatagcattaagttaagctttgcccgtgccaacgtcgctccccgcgttgcaggacccggccgcccgttgccatcgtcgccgt

SEQ ID NO: 36953 - DNA, 1413 bp, Muscodor strobelii
  misc_feature: SGI cDNA ID NO. 572817
  misc_feature: Encodes the peptide sequence at SEQ ID NO 36954
atgtttgtcggtgtaacagaccttcatactcggagttgttgcaagggagtattatacaccattccaaacagagtgatctcgtgccacaatggccaccgaagtcttcgactttatcatagtcggagggggactgctggtctcgtcctcgccaatcgcctcagcgaaaatattgagttcagcgtgcttgttctcgaggctggcgaggacaaatcagatgattcacgagtgactacgcctgctcttttccccaccttgatcggcaccgatgcagattggaatacagtcaccgaaccccaggttgctctgcatggcagaaagattgatattccacatggacgtgttttaggtggcagcagtgctattaatggtcaagcgttcgtagctacctcgaaagcatgcattgatgcttggggcgacctgggcaacgatggatggtcgtgggaagctctggcgccttacttcaagaaatgccattctttggcaatccctagggacgatgcgctgtcagcacatttgagtttgaagtatatcgatcctgatgttatcgggacttctgggcctattcaagccagcttccctgatgctatcaataatccactgcctaaagcatggatcgaagcacttgagtctctcggccatacagcgactggcgatccattttcgggtcaatttgtaggagcatatacaaacgccgccgcaattgatccagagacacgccagaggagctttgctgcctcagcgtatctgaagcctgtccaaaacagaactggactacatgccattacaggtgcgcatgtgacccgcgtgcttttgcaaaaggcgcagtctagtgtcactgcggaaggtgtagagtatgtgcacgatgggtcgacaagaacggttcaagctcggaaagaagtcatcctgtgtgcaggggcccttcagtcgcccaagattctggagttgtccgggattggagaccccgatctgctctccgcggtgcccatacctctcattattgccaatcgcttcgtgggagagaacctccaagaccaccccatgtttggtcttagcttcgaggtagaggacgacttagagactatcgatgatcttctccgtcaggatcccaccgctatgagaacatgctctgaccagtataccgagtcaaagtcaggctcccttgctgttgctggcattttctcgtatgctttccttggactcaagcgttccgacattgaacttgacgtcaaacctgatgactttgttgatactcaccctatcaaacaaccgcagatgaagtactttcgcaagatattagaggaccctaacgaatctaccgcaagcttcttcacctacgctgcacagggcaactttggctcagcttctggctcatcattgatgaagtctggttttatgcccggaaaatactactga

SEQ ID NO: 36954 - protein, 470 aa, Muscodor strobelii
  misc_feature: SGI Peptide ID NO. 572817
  misc_feature (34)..(360): Pfam Id: PF00732 Pfam Desc: GMC oxidoreductase
  misc_feature (43)..(156): Pfam Id: PF00732 Pfam Desc: GMC oxidoreductase
  misc_feature (244)..(360): Pfam Id: PF00732 Pfam Desc: GMC oxidoreductase
  misc_feature (43)..(469): NCBI GI: 145247064 Blast Desc: An12g07280 [Aspergillus niger] gi|134080508|emb|CAK46356.1| protein product [Aspergillus niger]
  misc_feature (43)..(469): NCBI GI: 154288082 Blast Desc: [Ajellomyces capsulatus NAm1] gi|150408477|gb|EDN04018.1| [Ajellomyces capsulatus NAm1]
  misc_feature (43)..(469): NCBI GI: 225560142 Blast Desc: glucose-methanol-choline oxidoreductase [Ajellomyces capsulatus G186AR]
  misc_feature (43)..(450): NCBI GI: 171678515 Blast Desc: protein product [Podospora anserina] gi|170937327|emb|CAP61985.1| protein product [Podospora anserina]
  misc_feature (43)..(469): NCBI GI: 256726130 Blast Desc: NECHADRAFT_94455 [Nectria haematococca mpVI 77-13-4]
  misc_feature (43)..(445): NCBI GI: 261356447 Blast Desc: choline dehydrogenase [Verticillium albo-atrum VaMs.102]
  misc_feature (43)..(451): NCBI GI: 238508294 Blast Desc: glucose-methanol-choline (gmc) oxidoreductase, [Aspergillus flavus NRRL3357] gi|220688863|gb|EED45215.1| glucose-methanol-choline (gmc) oxidoreductase, [Aspergillus
  misc_feature (43)..(383): NCBI GI: 116195700 Blast Desc: CHGG_04448 [Chaetomium globosum CBS 148.51] gi|88180361|gb|EAQ87829.1| CHGG_04448 [Chaetomium globosum CBS 148.51]
  misc_feature (43)..(404): NCBI GI: 145248171 Blast Desc: An13g01960 [Aspergillus niger] gi|134081083|emb|CAK41595.1| protein product [Aspergillus niger]
  misc_feature (43)..(391): NCBI GI: 261353694 Blast Desc: choline dehydrogenase [Verticillium albo-atrum VaMs.102]
  misc_feature (43)..(356): SWISSPROT Homolog: EC 1.1.99.1 Choline dehydrogenase
MFVGVTDLHTRSCCKGVLYTIPNRVISCHNGHRSLRLYHSRRGTAGLVLANRLSENIEFSVLVLEAGEDKSDDSRVTTPALFPTLIGTDADWNTVTEPQVALHGRKIDIPHGRVLGGSSAINGQAFVATSKACIDAWGDLGNDGWSWEALAPYFKKCHSLAIPRDDALSAHLSLKYIDPDVIGTSGPIQASFPDAINNPLPKAWIEALESLGHTATGDPFSGQFVGAYTNAAAIDPETRQRSFAASAYLKPVQNRTGLHAITGAHVTRVLLQKAQSSVTAEGVEYVHDGSTRTVQARKEVILCAGALQSPKILELSGIGDPDLLSAVPIPLIIANRFVGENLQDHPMFGLSFEVEDDLETIDDLLRQDPTAMRTCSDQYTESKSGSLAVAGIFSYAFLGLKRSDIELDVKPDDFVDTHPIKQPQMKYFRKILEDPNESTASFFTYAAQGNFGSASGSSLMKSGFMPGKYY

SEQ ID NO: 36955 - DNA, 1278 bp, Muscodor strobelii
  misc_feature: SGI cDNA ID NO. 572818
  misc_feature: Encodes the peptide sequence at SEQ ID NO 36956
atgcctgtaaccacttcaaagagagcagctctaatcacaggctgcagcgatggcggcatcggcgctgccatggctagaatccttcgaagcaaagattattatgtgttcgctaccctacgtgatatctccaaatccggcacccttgcaaatctcaccgatgtagaagtcctagagctcgacgtaacatctaacgactcaatttcacaatgcgctgatcgggtgagaacgcgcaccggcgggaccctcgatcttcttgtcaacaacgctgggcgcgattttctcatgccgttgctagacgtcgacgtgaacgaagcaaaaagcttcttcgacgtcaacgtttggagcatcctcactgttacacaggcctttgcgcccatgatcgtcgccgctaaaggcgtcatcctcaatcattcctctattgtctggaacctcgcgatagcatggggcggtatggataagcactcccttcagatcacatattgcatgattatttcaagttgttgtcgttcaggatattttccgaagcagcctctgaataacccttcaacagcgcctggcccaaactcgtggaaggttgtcttcctactggaagagcttggcctcaactacgaaatcaagtcatttagtttcgccgacgtgaaaaaaaagccattcaccgacctaaaccccaatggccgcgttccagcgatcgaggatcccaatactgacttgacactttgggagtctggtgctatcttgcaatacatcatcgagcaatacgatgttgaacatcgtttgtcttacacgacaatgaaagagcaacagctcagctctcaatggttgcacttccagatgagcggacaagggccgtactacggacagtgcggttggttcaaacatttgcacccagagccgatacagtcagccattgaccgttacatcaacgaaatcaagcgtatcatcaatgtcatggaaggtgtgctcgccaacaaagattcccaatggctagtcggcgacaaaatgacgttcgttgacatggcttttgcgccgtggaactctcggctcagcgaactcattggggaggattgggacgcggtccgggagggtgcacctcatgttcgtgcatggcatgagcatatgatggaattaccttcctggaagcgatgcatgaaaatacgctctcgtctaatggctgagcaaaatctgcaatggaacggcgtgccaaaagggattgagacttttaatgattacgagaaacagctcgctgcgaagggcgagattactggaaagccgcaatag

SEQ ID NO: 36956 - protein, 425 aa, Muscodor strobelii
  misc_feature: SGI Peptide ID NO. 572818
  misc_feature (8)..(155): Pfam Id: PF00106 Pfam Desc: short chain dehydrogenase
  misc_feature (252)..(377): Pfam Id: PF00043 Pfam Desc: Glutathione S-transferase, C-terminal domain
  misc_feature (180)..(251): Pfam Id: PF02798 Pfam Desc: Glutathione S-transferase, N-terminal domain
  misc_feature (309)..(377): Pfam Id: PF00043 Pfam Desc: Glutathione S-transferase, C-terminal domain
  misc_feature (185)..(251): Pfam Id: PF02798 Pfam Desc: Glutathione S-transferase, N-terminal domain
  misc_feature (174)..(420): NCBI GI: 171695582 Blast Desc: protein product [Podospora anserina] gi|170948033|emb|CAP60197.1| protein product [Podospora anserina]
  misc_feature (174)..(419): NCBI GI: 116203029 Blast Desc: CHGG_09399 [Chaetomium globosum CBS 148.51] gi|88177917|gb|EAQ85385.1| CHGG_09399 [Chaetomium globosum CBS 148.51]
  misc_feature (176)..(416): NCBI GI: 169605545 Blast Desc: SNOG_05798 [Phaeosphaeria nodorum SN15] gi|111065742|gb|EAT86862.1| SNOG_05798 [Phaeosphaeria nodorum SN15]
  misc_feature (183)..(419): NCBI GI: 256724436 Blast Desc: NECHADRAFT_73170 [Nectria haematococca mpVI 77-13-4]
  misc_feature (185)..(423): NCBI GI: 189208264 Blast Desc: glutathione S-transferase II [Pyrenophora tritici-repentis Pt-1C-BFP] gi|187976558|gb|EDU43184.1| glutathione S-transferase II [Pyrenophora tritici-repentis
  misc_feature (183)..(415): NCBI GI: 154282777 Blast Desc: HCAG_02355 [Ajellomyces capsulatus NAm1] gi|150410364|gb|EDN05752.1| HCAG_02355 [Ajellomyces capsulatus NAm1]
  misc_feature (176)..(419): NCBI GI: 67525595 Blast Desc: AN3255.2 [Aspergillus nidulans FGSC A4] gi|40743974|gb|EAA63156.1| AN3255.2 [Aspergillus nidulans FGSC A4] gi|259485780|tpe|CBF83091.1| TPA: glutathione transferase 1
  misc_feature (183)..(404): NCBI GI: 169784574 Blast Desc: [Aspergillus oryzae RIB40] gi|83775495|dbj|BAE65615.1| protein product [Aspergillus oryzae]
  misc_feature (184)..(415): NCBI GI: 239612820 Blast Desc: glutathione transferase [Ajellomyces dermatitidis ER-3]
  misc_feature (191)..(415): NCBI GI: 225561513 Blast Desc: glutathione transferase [Ajellomyces capsulatus G186AR]
  misc_feature (182)..(384): SWISSPROT Homolog: EC 2.5.1.18 Glutathione transferase
MPVTTSKRAALITGCSDGGIGAAMARILRSKDYYVFATLRDISKSGTLANLTDVEVLELDVTSNDSISQCADRVRTRTGGTLDLLVNNAGRDFLMPLLDVDVNEAKSFFDVNVWSILTVTQAFAPMIVAAKGVILNHSSIVWNLAIAWGGMDKHSLQITYCMIISSCCRSGYFPKQPLNNPSTAPGPNSWKVVFLLEELGLNYEIKSFSFADVKKKPFTDLNPNGRVPAIEDPNTDLTLWESGAILQYIIEQYDVEHRLSYTTMKEQQLSSQWLHFQMSGQGPYYGQCGWFKHLHPEPIQSAIDRYINEIKRIINVMEGVLANKDSQWLVGDKMTFVDMAFAPWNSRLSELIGEDWDAVREGAPHVRAWHEHMMELPSWKRCMKIRSRLMAEQNLQWNGVPKGIETFNDYEKQLAAKGEITGKPQ

SEQ ID NO: 36957 - DNA, 501 bp, Muscodor strobelii
  misc_feature: SGI cDNA ID NO. 572819
  misc_feature: Encodes the peptide sequence at SEQ ID NO 36958
atggatgacgatatgagcagcatgacgaccccggccgatatggccatggtcttcttccagagcacgatgacgcctctctattcaatgtcatggacacctactagtatgggagcctatgcctggacgaatatcttcttgatcgttttggcggttgtcaaccgcttgttgctggcttttcgctcggtcgtattcgagagcaatcccaacattgtcgccgacgcctacgttgcagtttcacacgcagaatcgccaacaccagaccgaattcaccctccgcgtatcggcaatatatttgaactattccaccagagacacaaaaagatcccattcaatgcaacgcgcgaagctgaacgagcatttctcgaatttgttatcggaggcacggcctatctgctcatgattgctgttatgacattaaatgtgggatattttctatccgtcttagccggcacgtttcttggtacctttgcagtcggtcgatacggcgcttccggacactga

SEQ ID NO: 36958 - protein, 166 aa, Muscodor strobelii
  misc_feature: SGI Peptide ID NO. 572819
  misc_feature (14)..(166): Pfam Id: PF04145 Pfam Desc: Ctr copper transporter family
  misc_feature (15)..(161): NCBI GI: 242809173 Blast Desc: Ctr copper transporter, [Talaromyces stipitatus ATCC 10500] gi|218715939|gb|EED15361.1| Ctr copper transporter, [Talaromyces stipitatus ATCC 10500]
  misc_feature (14)..(164): NCBI GI: 256734088 Blast Desc: NECHADRAFT_91955 [Nectria haematococca mpVI 77-13-4]
  misc_feature (16)..(166): NCBI GI: 256723927 Blast Desc: NECHADRAFT_37128 [Nectria haematococca mpVI 77-13-4]
  misc_feature (14)..(161): NCBI GI: 46128639 Blast Desc: FG08697.1 [Gibberella zeae PH-1]
  misc_feature (17)..(161): NCBI GI: 70984579 Blast Desc: Ctr copper transporter [Aspergillus fumigatus Af293] gi|66845423|gb|EAL85758.1| Ctr copper transporter, [Aspergillus fumigatus Af293] gi|159122577|gb|EDP47698.1| Ctr copper fumigatus
  misc_feature (15)..(161): NCBI GI: 115386632 Blast Desc: conserved [Aspergillus terreus NIH2624] gi|114190855|gb|EAU32555.1| conserved [Aspergillus terreus NIH2624]
  misc_feature (5)..(164): NCBI GI: 154277472 Blast Desc: [Ajellomyces capsulatus NAm1] gi|150413162|gb|EDN08545.1| [Ajellomyces capsulatus NAm1]
  misc_feature (5)..(164): NCBI GI: 94483236 Blast Desc: low affinity copper transporter [Ajellomyces capsulatus]
  misc_feature (17)..(161): NCBI GI: 119467334 Blast Desc: Ctr copper transporter, [Neosartorya fischeri NRRL 181] gi|119405625|gb|EAW15576.1| Ctr copper transporter, [Neosartorya fischeri NRRL 181]
  misc_feature (14)..(161): NCBI GI: 226293151 Blast Desc: low affinity copper transporter [Paracoccidioides brasiliensis Pb18]
MDDDMSSMTTPADMAMVFFQSTMTPLYSMSWTPTSMGAYAWTNIFLIVLAVVNRLLLAFRSVVFESNPNIVADAYVAVSHAESPTPDRIHPPRIGNIFELFHQRHKKIPFNATREAERAFLEFVIGGTAYLLMIAVMTLNVGYFLSVLAGTFLGTFAVGRYGASGH

SEQ ID NO: 36959 - DNA, 2115 bp, Muscodor strobelii
  misc_feature: SGI cDNA ID NO. 572820
  misc_feature: Encodes the peptide sequence at SEQ ID NO 36960
atgaaatattctgtaggttttgccttggcacttatcgtgccgccagttctctgtgcgttgatcggtcccgtgccggtcagcaagactggactggcaggcataaacggcttcaccttttacgatccctattgcgggcatggttgttttcgttccatttctcctttcactcttcaatgctctaagatccttagtcctggaggtcttgcaacgtctgcggaagcggcgcgagatctcgccgcttgtcgatcctcaaacttcgaatatcttggctcaattgcttggtgcatgcatctctactgcaccgacgatgtcacggctaccactagagagaaattttgggcttccgaaattactggtgtggttgatattccgcctatctggagttacggcgagactctagccaatatttcggagccgcctacaatcactgtcctccctgcccaggcagatgggttcatcttgaacacaaccatactcacaagttatgagatatggcaggaaactcaaggtacccttcggtatttcttccgtgagactattctcgaatcgtactttggactttcaatattcttggcatctgtgggactgccgatagtggctacaacgctcaactacctccctttcgcaacccgtatgctacaacttgtaaagccatatctatactcgagcaccattggatcgtatcatgaccgcccactaccctacctgctcggcaacgccccaacagttggacagagttgctatatagctactatcactatcttgaatgtggttttcttagcggctgggtataagacgtcgtatccgcagcacgtattccagtggtacaccaatcgatatcaagagcttttggcatacttcgtgtggcggactggcgtattggcattctgcaacctaccagttcttgttctattttcgagcaggaataacatccttttatggctgacaaattggtctcatccgacatatctactgcttcatcgttggatcgcacgcctgtttctctttcatactctccttcactccatcgcgtctgttgtgctatacaaagacacaggatattatgtatcaaccgtgatacaggaatggtggatttggggtattatcgggaccgtgacagctgtcatcgtgatattagccagtcccctcttttttcgacaacgggtgtacgagttgttcctcgttacgcatataatcttctctgttgtgtgtgtcgtcgggtgctggtatcacgtttactataaatacgtcaatactttcggttacgaaacgtggctttatataacatttgccatctgggcatttgatcgccttgcccgtatcggtcgaatgctaaagacaggcatccgccgtgcaactgtcagcgatgtcggtagatcgatcgtccgcgtcgatataccaggcatccgatggagagaacctagccaccatgtttacgtctattttccgacgcttcgacctcttagcccttgggagaaccatcctttctccatgattcccacagcgatgctcaggaccaacatgtctaagccgcacaacgagtcgcaagcacaacaaaaggagctcagtaacgtggaaaaaagccagcattctaacagtaccttaaggagcgtcgaaggctcgtcgttgacgagtcatggcatttcccttttcatgcggaagaacgccggtcttactaacttgattgagcgtcaccaaagtctactcacactcgtcgaggggccatacgcaacgaatccaacccgcactgttctcgaatgtgaccgtctgctattgatcggtggaggaataggtattacggggcttctaccattcgtgcgagctcattcaagtgtgaagctcttctacagcattaagtctgccgatgaatgcatcctatcagccctaaaagaagttctggatagtgttattgaaaaggatgtcatgataggcaagcgattagatctgagtgctctcctgcgtgacgaagctgccctcgggtgggctcgaattgcagttatcgtgtgcgggccgagcgggatgtgtgatgatactcgggctgccgtagcgtgcattggtcgtgagacttcaggccgaacatcctttgagctagaggtggattcattctcgtggtaa

SEQ ID NO: 36960 - protein, 704 aa, Muscodor strobelii
  misc_feature: SGI Peptide ID NO. 572820
  misc_feature (291)..(408): Pfam Id: PF01794 Pfam Desc: Ferric reductase like transmembrane component
  misc_feature (587)..(607): Pfam Id: PF08030 Pfam Desc: Ferric reductase NAD binding domain
  misc_feature (36)..(704): NCBI GI: 171679020 Blast Desc: protein product [Podospora anserina] gi|170937581|emb|CAP62238.1| protein product [Podospora anserina]
  misc_feature (24)..(704): NCBI GI: 46119588 Blast Desc: FG04780.1 [Gibberella zeae PH-1]
  misc_feature (39)..(704): NCBI GI: 261357112 Blast Desc: ferric reductase transmembrane component 4 [Verticillium albo-atrum VaMs.102]
  misc_feature (30)..(704): NCBI GI: 145616516 Blast Desc: metalloreductase [Magnaporthe grisea 70-15] gi|145010071|gb|EDJ94727.1| metalloreductase [Magnaporthe grisea 70-15]
  misc_feature (27)..(677): NCBI GI: 46114748 Blast Desc: FG03216.1 [Gibberella zeae PH-1]
  misc_feature (36)..(704): NCBI GI: 171679813 Blast Desc: protein product [Podospora anserina] gi|170939532|emb|CAP64760.1| protein product [Podospora anserina]
  misc_feature (36)..(605): NCBI GI: 116196552 Blast Desc: CHGG_04874 [Chaetomium globosum CBS 148.51] gi|88180787|gb|EAQ88255.1| CHGG_04874 [Chaetomium globosum CBS 148.51]
  misc_feature (25)..(504): NCBI GI: 116181428 Blast Desc: CHGG_01342 [Chaetomium globosum CBS 148.51] gi|88185639|gb|EAQ93107.1| CHGG_01342 [Chaetomium globosum CBS 148.51]
  misc_feature (40)..(504): NCBI GI: 256720266 Blast Desc: NECHADRAFT_56211 [Nectria haematococca mpVI 77-13-4]
  misc_feature (324)..(704): NCBI GI: 169614638 Blast Desc: SNOG_10465 [Phaeosphaeria nodorum SN15] gi|160702790|gb|EAT81859.2| SNOG_10465 [Phaeosphaeria nodorum SN15]
MKYSVGFALALIVPPVLCALIGPVPVSKTGLAGINGFTFYDPYCGHGCFRSISPFTLQCSKILSPGGLATSAEAARDLAACRSSNFEYLGSIAWCMHLYCTDDVTATTREKFWASEITGVVDIPPIWSYGETLANISEPPTITVLPAQADGFILNTTILTSYEIWQETQGTLRYFFRETILESYFGLSIFLASVGLPIVATTLNYLPFATRMLQLVKPYLYSSTIGSYHDRPLPYLLGNAPTVGQSCYIATITILNVVFLAAGYKTSYPQHVFQWYTNRYQELLAYFVWRTGVLAFCNLPVLVLFSSRNNILLWLTNWSHPTYLLLHRWIARLFLFHTLLHSIASVVLYKDTGYYVSTVIQEWWIWGIIGTVTAVIVILASPLFFRQRVYELFLVTHIIFSVVCVVGCWYHVYYKYVNTFGYETWLYITFAIWAFDRLARIGRMLKTGIRRATVSDVGRSIVRVDIPGIRWREPSHHVYVYFPTLRPLSPWENHPFSMIPTAMLRTNMSKPHNESQAQQKELSNVEKSQHSNSTLRSVEGSSLTSHGISLFMRKNAGLTNLIERHQSLLTLVEGPYATNPTRTVLECDRLLLIGGGIGITGLLPFVRAHSSVKLFYSIKSADECILSALKEVLDSVIEKDVMIGKRLDLSALLRDEAALGWARIAVIVCGPSGMCDDTRAAVACIGRETSGRTSFELEVDSFSW

SEQ ID NO: 36961 - DNA, 3252 bp, Muscodor strobelii
  misc_feature: SGI EST ID NO. CUFF.88279.0
  misc_feature: Variant of the nucleotide sequence at SEQ ID NO 36959
cgacggaaaagtctctgagctctagagcatctgggttggttgccctcttcattatgtaagattcacatgatcccaatatctccccaaacagcaacaggggcatattgagcggggcaagtcttattggaggcgatgtggcctactatcagaatgcattgggatctccccgcaaagtcatgcagccgcctgcctgggccgatactcgcgtcgatatagtcgataagcaatcgactctgtatgtgtagtacaagatgcatcttagacccagttgtcactccgcattccttcactgcaatctgatgttcttctgttttggacaatgaaatattctgtaggttttgccttggcacttatcgtgccgccagttctctgtgcgttgatcggtcccgtgccggtcagcaagactggactggcaggcataaacggcttcaccttttacgatccctattgcgggcatggttgttttcgttccatttctcctttcactcttcaatgctctaagatccttagtcctggaggtcttgcaacgtctgcggaagcggcgcgagatctcgccgcttgtcgatcctcaaacttcgaatatcttggctcaattgcttggtgcatgcatctctactgcaccgacgatgtcacggctaccactagagagaaattttgggcttccgaaattactggtgtggttgatattccgcctatctggagttacggcgagactctagccaatatttcggagccgcctacaatcactgtcctccctgcccaggcagatgggttcatcttgaacacaaccatactcacaagttatgagatatggcaggaaactcaaggtacccttcggtatttcttccgtgagactattctcgaatcgtactttggactttcaatattcttggcatctgtgggactgccgatagtggctacaacgctcaactacctccctttcgcaacccgtatgctacaacttgtaaagccatatctatactcgagcaccattggatcgtatcatgaccgcccactaccctacctgctcggcaacgccccaacagttggacagagttgctatatagctactatcactatcttgaatgtggttttcttagcggctgggtataagacgtcgtatccgcagcacgtattccagtggtacaccaatcgatatcaagagcttttggcatacttcgtgtggcggactggcgtattggcattctgcaacctaccagttcttgttctattttcgagcaggaataacatccttttatggctgacaaattggtctcatccgacatatctactgcttcatcgttggatcgcacgcctgtttctctttcatactctccttcactccatcgcgtctgttgtgctatacaaagacacaggatattatgtatcaaccgtgatacaggaatggtggatttggggtattatcgggaccgtgacagctgtcatcgtgatattagccagtcccctcttttttcgacaacgggtgtacgagttgttcctcgttacgcatataatcttctctgttgtgtgtgtcgtcgggtgctggtatcacgtttactataaatacgtcaatactttcggttacgaaacgtggctttatataacatttgccatctgggcatttgatcgccttgcccgtatcggtcgaatgctaaagacaggcatccgccgtgcaactgtcagcgatgtcggtagatcgatcgtccgcgtcgatataccaggcatccgatggagagaacctagccaccatgtttacgtctattttccgacgcttcgacctcttagcccttgggagaaccatcctttctccatgattcccacagcgatgctcaggaccaacatgtctaagccgcacaacgagtcgcaagcacaacaaaaggagctcagtaacgtggaaaaaagccagcattctaacagtaccttaaggagcgtcgaaggctcgtcgttgacgagtcatggcatttcccttttcatgcggaagaacgccggtcttactaacttgattgagcgtcaccaaagtctactcacactcgtcgaggggccatacgcaacgaatccaacccgcactgttctcgaatgtgaccgtctgctattgatcggtggaggaataggtattacggggcttctaccattcgtgcgagctcattcaagtgtgaagctcttctacagcattaagtctgccgatgaatgcatcctatcagccctaaaagaagttctggatagtgttattgaaaaggatgtcatgataggcaagcgattagatctgagtgctctcctgcgtgacgaagctgccctcgggtgggctcgaattgcagttatcgtgtgcgggccgagcgggatgtgtgatgatactcgggctgccgtagcgtgcattggtcgtgagacttcaggccgaacatcctttgagctagaggtggattcattctcgtggtaatctcggcacatgcggtcgtatgaacaagacgcattcaactgcaaattgtggctggcaggaacgacagagagtgcactgacctcggtcgatgtctttgaagtttattagtatttcttcaaaacaatcaaattgtaagacacgtatgttggacacacgacttcacaggagtagctggtgggaacaagacaagcggttcgcagcaatcagcaatgataccaagactgtctatgatcagtaagtcctacaatggcccgagagcaaatcttggctctcatgcatgaggaagacatgagagtggccttgtagcgagtgggaagaggatagcgattgtatatcatcaagggtgggctgatacacataggtttctcagaaggcttaataatttactttcacccagattatcgccatctctagatcaaccaaaaagaaggtagtctttcatttcgacgtatttccaagagccctgggtgatccatcattgtccttatgccttctccacgcctattgtctcgagatactgacctgccacatcaatgactgcgctctcccagcttctgaagcccccgaggatcctctccatatcacttgcatcataatcaagtggaatcgatgggctacttcccctcttgaaaatgcccgctgcaacagctttggggaaagccttctcgacgtaatcgaagatcttaatgaagtccgcttttagcgcaatgccgaaatcacgcggctcgtcgcccctcgggtttagaaatgcaactgcaaggtgtgcatccgccagatcatcaacatgtacaaaactttcgtgaaggggatatggaaat

SEQ ID NO: 36962 - DNA, 1023 bp, Muscodor strobelii
  misc_feature: SGI cDNA ID NO. 572821
  misc_feature: Encodes the peptide sequence at SEQ ID NO 36963
atgagtgctacaattcttgtcaccggcgccactggcttaatcggctttcgtgttcttcttacggcgctcacagctgggcatattgtgcgatacgtcgcccgcagcgagggaaaagctcgtacggtatcttcaaatcctgccatacaaaggttgggatgtggggatcgtctctcgtcagtcatcgtcccggacatgacagttgatggtgccttcgattcggcccttgaaggcatcactcatgttatacacgccggggctccgttaccactgccgacttatgatcccatgacccaagttttcgagcctacactgaagggtgcagccggtctgcttgagtctgctctcaagacgccgaccatacagcgagttgttatcactgcatcattcttcagcaacttgccattggaagggccaccacctactactccagttctcggatcgtcccgagaacctatcccggatccagtaccaacgacattggacagcccgtatgaggcttacgtggccagcaaaattatccaactacacgaaacagacaatttcgtaaagacacgagatccccacttctccgtatcccacgtcatgcctggctatgtcttcggtcgcaatgaactcgtgctagacgccaagacaatgctggagatgaacagctctaacactttgctcatggcggctatactaggaggtgaatttccatatccccttcacgaaagttttgtacatgttgatgatctggcggatgcacaccttgcagttgcatttctaaacccgaggggcgacgagccgcgtgatttcggcattgcgctaaaagcggacttcattaagatcttcgattacgtcgagaaggctttccccaaagctgttgcagcgggcattttcaagaggggaagtagcccatcgattccacttgattatgatgcaagtgatatggagaggatcctcgggggcttcagaagctgggagagcgcagtcattgatgtggcaggtcagtatctcgagacaataggcgtggagaaggcataa

SEQ ID NO: 36963 - protein, 340 aa, Muscodor strobelii
  misc_feature: SGI Peptide ID NO. 572821
  misc_feature (5)..(268): Pfam Id: PF01370 Pfam Desc: NAD dependent epimerase/dehydratase family
  misc_feature (5)..(47): Pfam Id: PF05368 Pfam Desc: NmrA-like family
  misc_feature (1)..(340): NCBI GI: 238482847 Blast Desc: cinnamoyl-CoA reductase, [Aspergillus flavus NRRL3357] gi|220700712|gb|EED57050.1| cinnamoyl-CoA reductase, [Aspergillus flavus NRRL3357]
  misc_feature (1)..(340): NCBI GI: 169766168 Blast Desc: [Aspergillus oryzae RIB40] gi|83765410|dbj|BAE55553.1| protein product [Aspergillus oryzae]
  misc_feature (1)..(337): NCBI GI: 169608622 Blast Desc: SNOG_07395 [Phaeosphaeria nodorum SN15] gi|160701683|gb|EAT84861.2| SNOG_07395 [Phaeosphaeria nodorum SN15]
  misc_feature (1)..(339): NCBI GI: 169617483 Blast Desc: SNOG_11921 [Phaeosphaeria nodorum SN15] gi|111059845|gb|EAT80965.1| SNOG_11921 [Phaeosphaeria nodorum SN15]
  misc_feature (5)..(333): NCBI GI: 171681259 Blast Desc: protein product [Podospora anserina] gi|170940588|emb|CAP65816.1| protein product [Podospora anserina]
  misc_feature (5)..(335): NCBI GI: 145229605 Blast Desc: An01g06880 [Aspergillus niger] gi|134055219|emb|CAK43806.1| protein product [Aspergillus niger]
  misc_feature (1)..(333): NCBI GI: 256721072 Blast Desc: NECHADRAFT_102239 [Nectria haematococca mpVI 77-13-4]
  misc_feature (5)..(333): NCBI GI: 261353477 Blast Desc: reductase [Verticillium albo-atrum VaMs.102]
  misc_feature (5)..(333): NCBI GI: 118162016 Blast Desc: reductase [Cercospora nicotianae]
  misc_feature (5)..(339): NCBI GI: 242789236 Blast Desc: 3-beta hydroxysteroid dehydrogenase/isomerase, [Talaromyces stipitatus ATCC 10500] gi|218717908|gb|EED17328.1| 3-beta hydroxysteroid dehydrogenase/isomerase, [Talaromyces ATCC
MSATILVTGATGLIGFRVLLTALTAGHIVRYVARSEGKARTVSSNPAIQRLGCGDRLSSVIVPDMTVDGAFDSALEGITHVIHAGAPLPLPTYDPMTQVFEPTLKGAAGLLESALKTPTIQRVVITASFFSNLPLEGPPPTTPVLGSSREPIPDPVPTTLDSPYEAYVASKIIQLHETDNFVKTRDPHFSVSHVMPGYVFGRNELVLDAKTMLEMNSSNTLLMAAILGGEFPYPLHESFVHVDDLADAHLAVAFLNPRGDEPRDFGIALKADFIKIFDYVEKAFPKAVAAGIFKRGSSPSIPLDYDASDMERILGGFRSWESAVIDVAGQYLETIGVEKA

SEQ ID NO: 36964 - DNA, 479 bp, Muscodor strobelii
  misc_feature: SGI EST ID NO. CUFF.88266.0
  misc_feature: Variant of the nucleotide sequence at SEQ ID NO 36962
gtttacgcttctactctatttgtttttagcatatttaccataaatcaggcttaagtacatccatcacgttagacgttatgagtgctacaattcttgtcaccggcgccactggcttaatcggctttcgtgttcttcttacggcgctcacagctgggcatattgtgcgatacgtcgcccgcagcgagggaaaagctcgtacggtatcttcaaatcctgccatacaaaggttgggatgtggggatcgtctctcgtcagtcatcgtcccggacatgacagttgatggtgccttcgattcggcccttgaaggcatcactcatgttatacacgccggggctccgttaccactgccgacttatgatcccatgacccaagttttcgagcctacactgaagggtgcagccggtctgcttgagtctgctctcaagacgccgaccatacagcgagttgttatcactgcatcattcttcagcaacttgcca

SEQ ID NO: 36965 - DNA, 309 bp, Muscodor strobelii
  misc_feature: SGI cDNA ID NO. 572822
  misc_feature: Encodes the peptide sequence at SEQ ID NO 36966
atgccctttcgtcctatatccttctcgtcctacttcaagccccatataattctcgtttcaatccatcccaccttcgaccgcttccgacagatccacaagaagctccgcgtcgacgtctctgagcgcctcaatggcgaaggctcctccacgaccactcctcttacctctcccgccggcgtcaagaagaagacagccactccccgcaaaggccaggccaagaagacggagaagctcgctgccgctctggccaaaaacgaggatgacgagaagatggaggacgttgacaagaaggaggaattcgaggcttag

SEQ ID NO: 36966 - protein, 102 aa, Muscodor strobelii
  misc_feature: SGI Peptide ID NO. 572822
MPFRPISFSSYFKPHIILVSIHPTFDRFRQIHKKLRVDVSERLNGEGSSTTTPLTSPAGVKKKTATPRKGQAKKTEKLAAALAKNEDDEKMEDVDKKEEFEA

SEQ ID NO: 36967 - DNA, 1995 bp, Muscodor strobelii
  misc_feature: SGI cDNA ID NO. 572823
  misc_feature: Encodes the peptide sequence at SEQ ID NO 36968
atgccgcccaggctgccgacccaattggggcctcgcgggcgccctttgcccctcttgaagcgacgagggcatcctggaccatcgtccgcctgtttcttttgttcgtccgccctatattttcccccttcaacagctagtcgtcgaccacgaaaaccccaaactactccgcgccgatccgcgtcttcgacgacctctgcgacacccaacgctactacttcagacacacgcaaggagcttgagctagctctaatcgatctcaagaagcatgctgccaagtatgtcgaccgctccaggcttgagcttgccctcactggtctgcgccaacagcccggtcgcgaatccattcgcattggaattttgggtctgaggcctgcggagttcggtgtggactctgtgagaacggctcgggaagttctgagactaatgctcgccgatccgctgaaagatgaggagccgtgggagctcgaagtcacaacaggccccggtcttccgagtggcatcctgatcgttcggattgggcccaaggttcccgacaacaaaatcgccatagattttgctgacgacaacgagtttgatatagaaagactcaacgtatcttctccaacgctgaacggacacaatattgagatcttgtgctcaggaatgattcttagcggggagagccatacagaccaccactcgggcattgaagacccattaccccgtgacaagatggtcgattacgccctggctccaagtttgtcaacacaaacgtatgtagatgaagacgggaacgaggaagaagtcgcaattcctgtacacaagacactcttgatatctgacggtatcctcggtgcaggagcggtcatgtcggtccataacgaagattcacattgggaagcacgtgtaggacccggagtcctcgcatctgcagtcaatctgccagggttcacgcctatcagacgtgagatgagaggccccccacatatcgataccgtctcggccagagctggattacattcaatccgcaaagacatcgcaaatgccatggaatatgagaagctctggtctcgaagcaatctgcccgaactggttgagtttctgaaggacggcacattcaacactccggacggtactactaaggaagctgtccgcaatttcatcttcaccgaactgagcaggacaggctacgctctgcatgttgaagaagaaaaacgcaataatgcatcaccgcatagttcatcccttggtgttaccactgctctccgacgcggcctagacgagtgggcagagggcgcccactcagagcttcaagaacagcttgatgaggcgttttccagccgaagatggcgaaagctacgctggtggaaattgttctggcgggtggacgacgtggggatgctcacaaccgacatcctgacccagaagttccttcccgcctccgagaggacctcgatctaccttgcagggcggatgaaagaggcaggtgcaggttttggctccttccagctcccgactccgataaactcggagcacgtgacttccgccaccgacaacactccaagtccctcctccgcctccagtgctggtcaatggccggtacaaatacctactgcccggaactatctgcaaagcgaaaccatacctgccctacaggctcttgctcagaagcttgtactccagacactcagtacatcaggattcacaaccgccctcggtgccttggtttatgtgggcactctttcaacatcattgtatgaagcgagtgcagtggcagccctcggcattgtctggagtatgaagcgcatgcaaaagcaatgggaagtggcgcgggacttttgggaaggagaggttagaaaagaaggccggaaggcagtcaaaggtgtcgaggacacgatgggtaccgttttggagaagcagacgctcgagcagagcaaacgagccgacttgcaagacataagagaagtgcgagagcttcttagtaaggcacatgtgctgctgcaaaggctcaagtag

SEQ ID NO: 36968 - protein, 664 aa, Muscodor strobelii
  misc_feature: SGI Peptide ID NO. 572823
  misc_feature (11)..(664): NCBI GI: 256731492 Blast Desc: NECHADRAFT_84992 [Nectria haematococca mpVI 77-13-4]
  misc_feature (19)..(664): NCBI GI: 261358069 Blast Desc: conserved [Verticillium albo-atrum VaMs.102]
  misc_feature (11)..(664): NCBI GI: 46123177 Blast Desc: FG05966.1 [Gibberella zeae PH-1]
  misc_feature (1)..(664): NCBI GI: 85102540 Blast Desc: NCU03624 [Neurospora crassa OR74A] gi|12718395|emb|CAC28703.1| [Neurospora crassa] gi|28922895|gb|EAA32115.1| [Neurospora crassa OR74A]
  misc_feature (1)..(664): NCBI GI: 39944142 Blast Desc: MGG_04082 [Magnaporthe grisea 70-15] gi|145014806|gb|EDJ99374.1| MGG_04082 [Magnaporthe grisea 70-15]
  misc_feature (196)..(662): NCBI GI: 156063338 Blast Desc: SS1G_01785 [Sclerotinia sclerotiorum 1980] gi|154697121|gb|EDN96859.1| SS1G_01785 [Sclerotinia sclerotiorum 1980]
  misc_feature (262)..(657): NCBI GI: 116206380 Blast Desc: CHGG_02483 [Chaetomium globosum CBS 148.51] gi|88183080|gb|EAQ90548.1| CHGG_02483 [Chaetomium globosum CBS 148.51]
  misc_feature (301)..(661): NCBI GI: 154319315 Blast Desc: BC1G_02609 [Botryotinia fuckeliana B05.10] gi|150857040|gb|EDN32232.1| BC1G_02609 [Botryotinia fuckeliana B05.10]
  misc_feature (1)..(654): NCBI GI: 239612145 Blast Desc: conserved [Ajellomyces dermatitidis ER-3]
  misc_feature (1)..(632): NCBI GI: 159126562 Blast Desc: conserved [Aspergillus fumigatus A1163]
MPPRLPTQLGPRGRPLPLLKRRGHPGPSSACFFCSSALYFPPSTASRRPRKPQTTPRRSASSTTSATPNATTSDTRKELELALIDLKKHAAKYVDRSRLELALTGLRQQPGRESIRIGILGLRPAEFGVDSVRTAREVLRLMLADPLKDEEPWELEVTTGPGLPSGILIVRIGPKVPDNKIAIDFADDNEFDIERLNVSSPTLNGHNIEILCSGMILSGESHTDHHSGIEDPLPRDKMVDYALAPSLSTQTYVDEDGNEEEVAIPVHKTLLISDGILGAGAVMSVHNEDSHWEARVGPGVLASAVNLPGFTPIRREMRGPPHIDTVSARAGLHSIRKDIANAMEYEKLWSRSNLPELVEFLKDGTFNTPDGTTKEAVRNFIFTELSRTGYALHVEEEKRNNASPHSSSLGVTTALRRGLDEWAEGAHSELQEQLDEAFSSRRWRKLRWWKLFWRVDDVGMLTTDILTQKFLPASERTSIYLAGRMKEAGAGFGSFQLPTPINSEHVTSATDNTPSPSSASSAGQWPVQIPTARNYLQSETIPALQALAQKLVLQTLSTSGFTTALGALVYVGTLSTSLYEASAVAALGIVWSMKRMQKQWEVARDFWEGEVRKEGRKAVKGVEDTMGTVLEKQTLEQSKRADLQDIREVRELLSKAHVLLQRLK

SEQ ID NO: 36969 - DNA, 2132 bp, Muscodor strobelii
  misc_feature: SGI EST ID NO. CUFF.88276.0
  misc_feature: Variant of the nucleotide sequence at SEQ ID NO 36967
tttcgacaagggcgaagcttcagaacctcatccgagctaaggcgcgacaactgacgacatgccgcccaggctgccgacccaattggggcctcgcgggcgccctttgcccctcttgaagcgacgagggcatcctggaccatcgtccgcctgtttcttttgttcgtccgccctatattttcccccttcaacagctagtcgtcgaccacgaaaaccccaaactactccgcgccgatccgcgtcttcgacgacctctgcgacacccaacgctactacttcagacacacgcaaggagcttgagctagctctaatcgatctcaagaagcatgctgccaagtatgtcgaccgctccaggcttgagcttgccctcactggtctgcgccaacagcccggtcgcgaatccattcgcattggaattttgggtctgaggcctgcggagttcggtgtggactctgtgagaacggctcgggaagttctgagactaatgctcgccgatccgctgaaagatgaggagccgtgggagctcgaagtcacaacaggccccggtcttccgagtggcatcctgatcgttcggattgggcccaaggttcccgacaacaaaatcgccatagattttgctgacgacaacgagtttgatatagaaagactcaacgtatcttctccaacgctgaacggacacaatattgagatcttgtgctcaggaatgattcttagcggggagagccatacagaccaccactcgggcattgaagacccattaccccgtgacaagatggtcgattacgccctggctccaagtttgtcaacacaaacgtatgtagatgaagacgggaacgaggaagaagtcgcaattcctgtacacaagacactcttgatatctgacggtatcctcggtgcaggagcggtcatgtcggtccataacgaagattcacattgggaagcacgtgtaggacccggagtcctcgcatctgcagtcaatctgccagggttcacgcctatcagacgtgagatgagaggccccccacatatcgataccgtctcggccagagctggattacattcaatccgcaaagacatcgcaaatgccatggaatatgagaagctctggtctcgaagcaatctgcccgaactggttgagtttctgaaggacggcacattcaacactccggacggtactactaaggaagctgtccgcaatttcatcttcaccgaactgagcaggacaggctacgctctgcatgttgaagaagaaaaacgcaataatgcatcaccgcatagttcatcccttggtgttaccactgctctccgacgcggcctagacgagtgggcagagggcgcccactcagagcttcaagaacagcttgatgaggcgttttccagccgaagatggcgaaagctacgctggtggaaattgttctggcgggtggacgacgtggggatgctcacaaccgacatcctgacccagaagttccttcccgcctccgagaggacctcgatctaccttgcagggcggatgaaagaggcaggtgcaggttttggctccttccagctcccgactccgataaactcggagcacgtgacttccgccaccgacaacactccaagtccctcctccgcctccagtgctggtcaatggccggtacaaatacctactgcccggaactatctgcaaagcgaaaccatacctgccctacaggctcttgctcagaagcttgtactccagacactcagtacatcaggattcacaaccgccctcggtgccttggtttatgtgggcactctttcaacatcattgtatgaagcgagtgcagtggcagccctcggcattgtctggagtatgaagcgcatgcaaaagcaatgggaagtggcgcgggacttttgggaaggagaggttagaaaagaaggccggaaggcagtcaaaggtgtcgaggacacgatgggtaccgttttggagaagcagacgctcgagcagagcaaacgagccgacttgcaagacataagagaagtgcgagagcttcttagtaaggcacatgtgctgctgcaaaggctcaagtagggtgctattgctgcgtgtactgatatatagtcagaaactcttgttctaataaactgtacaacaacctcatctctcctgt

SEQ ID NO: 36970 - DNA, 498 bp, Muscodor strobelii
  misc_feature: SGI cDNA ID NO. 572824
  misc_feature: Encodes the peptide sequence at SEQ ID NO 36971
atgtcgtccacagcacagcgtcggctcttacaagagtacaaagccctcaccaacaacccgccagaaggtataaccgccggccccgtgaccgaggatgacatgctgcactgggaggcattgatccaaggccccgagggtacgcccttcgaaggcggcatctttccagctgagctcaagtttcctaaggattatcccttggctcctcccaagatgacctttctcggcgagatcttccaccccaacgtctatacgaacggcgtagtatgcatctccatcctccacccgcccggtgacgatccaaaccaatacgagcacgcctcggagcgctggagccccatccagtccgtcgagaagatcctgatatccgtcatgtccatgctcgccgagcccaacgacgagagtcccgcgaacgtcgaggctgccaagatgtggcgcgagaatagaccggagtacgagcagcgcgtcagagacggcgtgaggcgcatgctcgggctttaa

SEQ ID NO: 36971 - protein, 165 aa, Muscodor strobelii
  misc_feature: SGI Peptide ID NO. 572824
  misc_feature (8)..(159): Pfam Id: PF00179 Pfam Desc: Ubiquitin-conjugating enzyme
  misc_feature (3)..(165): NCBI GI: 116206382 Blast Desc: conserved [Chaetomium globosum CBS 148.51] gi|88183081|gb|EAQ90549.1| conserved [Chaetomium globosum CBS 148.51]
  misc_feature (3)..(165): NCBI GI: 261358068 Blast Desc: ubiquitin-conjugating enzyme [Verticillium albo-atrum VaMs.102]
  misc_feature (1)..(165): NCBI GI: 256731489 Blast Desc: [Nectria haematococca mpVI 77-13-4]
  misc_feature (2)..(165): NCBI GI: 156062772 Blast Desc: conserved [Sclerotinia sclerotiorum 1980] gi|154696838|gb|EDN96576.1| conserved [Sclerotinia sclerotiorum 1980]
  misc_feature (3)..(165): NCBI GI: 39944140 Blast Desc: conserved [Magnaporthe grisea 70-15] gi|145014805|gb|EDJ99373.1| conserved [Magnaporthe grisea 70-15]
  misc_feature (3)..(165): NCBI GI: 46123199 Blast Desc: FG05977.1 [Gibberella zeae PH-1]
  misc_feature (2)..(165): NCBI GI: 154313091 Blast Desc: ubiquitin-conjugating enzyme [Botryotinia fuckeliana B05.10] gi|150849632|gb|EDN24825.1| ubiquitin-conjugating enzyme [Botryotinia fuckeliana B05.10]
  misc_feature (1)..(165): NCBI GI: 145242700 Blast Desc: An09g06110 [Aspergillus niger] gi|134078478|emb|CAL00341.1| protein product [Aspergillus niger]
  misc_feature (3)..(165): NCBI GI: 85102538 Blast Desc: ubiquitin-conjugating enzyme E2-18 kDa [Neurospora crassa OR74A] gi|12718396|emb|CAC28704.1| ubiquitin-conjugating enzyme ubcP3 [Neurospora crassa] gi|28922894|gb|EAA32114.1| E2-18
  misc_feature (2)..(165): NCBI GI: 242792907 Blast Desc: ubiquitin conjugating enzyme (UbcH), [Talaromyces stipitatus ATCC 10500] gi|218718640|gb|EED18060.1| ubiquitin conjugating enzyme (UbcH), [Talaromyces stipitatus ATCC 10500]
  misc_feature (3)..(165): SWISSPROT Homolog: EC 6.3.2.19 Ubiquitin--protein ligase
MSSTAQRRLLQEYKALTNNPPEGITAGPVTEDDMLHWEALIQGPEGTPFEGGIFPAELKFPKDYPLAPPKMTFLGEIFHPNVYTNGVVCISILHPPGDDPNQYEHASERWSPIQSVEKILISVMSMLAEPNDESPANVEAAKMWRENRPEYEQRVRDGVRRMLGL

SEQ ID NO: 36972 - DNA, 1784 bp, Muscodor strobelii
  misc_feature: SGI EST ID NO. CUFF.88288.0
  misc_feature: Variant of the nucleotide sequence at SEQ ID NO 36970
ttaccccacacagcagctttaactgttggcgcattccccgcggtcggaatctccaactcaactcaattccattgattttcacatcgcagattcaccgcgtcactacctcagccagtattacgagtcttgcacatctcacagacagagcaaatatgtcgtccacagcacagcgtcggctcttacaagagtacaaagccctcaccaacaacccgccagaaggtataaccgccggccccgtgaccgaggatgacatgctgcactgggaggcattgatccaaggccccgagggtacgcccttcgaaggcggcatctttccagctgagctcaagtttcctaaggattatcccttggctcctcccaagatgacctttctcggcgagatcttccaccccaacgtctatacgaacggcgtagtatgcatctccatcctccacccgcccggtgacgatccaaaccaatacgagcacgcctcggagcgctggagccccatccagtccgtcgagaagatcctgatatccgtcatgtccatgctcgccgagcccaacgacgagagtcccgcgaacgtcgaggctgccaagatgtggcgcgagaatagaccggagtacgagcagcgcgtcagagacggcgtgaggcgcatgctcgggctttaagagaggcctggtattttccgtacaagtggagagtttttgggtagagagtgaccaagtgtggtggtcggcaaacttgaggagaacatatgtagaatgattgcgatgattatgcatagcgaggagttcctcttttcgagccagggaataaatggttgatgagcatgtggttaatgtttattaatgaatgtatacggttgccctctgtctaacctttcttctttccttccattacacgccgtgatgatgacattgctgggttctgatctactattcccaatccctcttatgccaatcccaaccaaaacgccaaattcatcgtgattataccagttctaatatcgtctatgaactagtccaaggccactctaggaggcagtgacagtgatattagaaacaaaagtattaatacccatctgaccactcgcgcccacaatatacggcacagcagcaacgagctgccaagcacccgcggactgagtcgcaggaatcttcacctccacagtgaaattattcaacttctctgtgtctgttccgtagaggggcgtgtacgcgatctgggtgccgatcgcggggctgttggtcccgcttgagatgtgcagagaagagggagcgattccccagacgatgttgtagtcctcccagttttgcacgtagattgatgtccccagtgttgcttttatggaggacccggctgcgacggtggatggtgttgagagggagccgattgtgggggatgcggtggtaagtgagatgatgcttgcgagcactgcgcttgtgatggacttggtggaaaccattttggcgatttggtctcttgtgtttgggagattagttgagttgatacgtgatgttggtgatgctggtgatgctggtgatgctggtgatgctggtgatgctggtgatgctggtgatgctggtgatgctggtgatgctggtgatgctggtgatgtcaatgcggtatgggtgtagagctgctttgtcgttgcctgatgatgacgagctattcacgatgacaacaaagcgcgaaaagctaactctttatataattatcaatcttaccaaaggatctacgagagcagcatatgtgcctaccgatctatccgacccatcctgttggcaaggttggtgttccgg

SEQ ID NO: 36973 - DNA, 432 bp, Muscodor strobelii
  misc_feature: SGI cDNA ID NO. 572825
  misc_feature: Reduced expression when VOC is produced
  misc_feature: Encodes the peptide sequence at SEQ ID NO 36974
atggtttccaccaagtccatcacaagcgcagtgctcgcaagcatcatctcacttaccaccgcatcccccacaatcggctccctctcaacaccatccaccgtcgcagccgggtcctccataaaagcaacactggggacatcaatctacgtgcaaaactgggaggactacaacatcgtctggggaatcgctccctcttctctgcacatctcaagcgggaccaacagccccgcgatcggcacccagatcgcgtacacgcccctctacggaacagacacagagaagttgaataatttcactgtggaggtgaagattcctgcgactcagtccgcgggtgcttggcagctcgttgctgctgtgccgtatattgtgggcgcgagtggtcagatgggtattaatacttttgtttctaatatcactgtcactgcctcctag

SEQ ID NO: 36974 - protein, 143 aa, Muscodor strobelii
  misc_feature: SGI Peptide ID NO. 572825
  misc_feature (11)..(141): NCBI GI: 39968509 Blast Desc: MGG_02347 [Magnaporthe grisea 70-15] gi|145014071|gb|EDJ98712.1| MGG_02347 [Magnaporthe grisea 70-15]
  misc_feature (1)..(143): NCBI GI: 134108480 Blast Desc: CNBB4220 [Cryptococcus neoformans var. neoformans B-3501A] gi|50259876|gb|EAL22544.1| CNBB4220 [Cryptococcus neoformans var. neoformans B-3501A]
  misc_feature: Useful for introducing or modulating the production of volatile compounds
MVSTKSITSAVLASIISLTTASPTIGSLSTPSTVAAGSSIKATLGTSIYVQNWEDYNIVWGIAPSSLHISSGTNSPAIGTQIAYTPLYGTDTEKLNNFTVEVKIPATQSAGAWQLVAAVPYIVGASGQMGINTFVSNITVTAS

SEQ ID NO: 36975 - DNA, 1113 bp, Muscodor strobelii
  misc_feature: SGI cDNA ID NO. 572826
  misc_feature: Encodes the peptide sequence at SEQ ID NO 36976
atggctttgggcctcgtaggaggcacatcagacctgcagcttgcattcctgcagtccctatggccaagtttgacgctccatgagttcaaaaagaatcaagttcaatactccacattctttgagttcgtggatgggagattggcttgtatgatgaaagaccccaaccattactctcagtgtacagtcgacggtgtcgggaaatacattgataacatgcggcagcacatgactttcaccaaacaagttctttccgtcaatgataggctttccggtatcgataaacagatagtctcacagacatttgaagctgtcgcaacgatttggctcactattcgttttcgaatcggcagccttgacgacgctcattatgactccctctatgaccaccatctggattggcacaataaccatagtctgcatgacattctcgggacgacattcaaatcatcgccaaccgactaccagattttcaaggtcgatatcattcatgctgatttctccatggctcgactgtgcaatcattatcgattccgcattaagtggacggactatcttcaggatcacttgttgattgattggggaagcagggaaatcagatgctaccagcacgttatgtatctccggaactacctggacaacaaaggcgctaccccaattccccggagcatcatcgaagaagctctcgatacgataaacctcttctttcccaggaacgacaatgagacaaaaaagttcttgcaaaagcacaagcagcatttccatgagcttccatcttgtggccgccggcgaagattacaagtatctcattataagtactggtattccacaatacgtattattaaagaaatttcggaggggccaccacagcaatttcgccttcagattctaccacctagaggacaacgtaattacaacgaattgggcatgcttactatcaccatgtttgctgctttcttggcatttgtcagtataggccttgctgctgcgaccttggtatttgccatatgggactataatacggaagagttggaattgaaggcaataaaagcaatggcttgcgctgatacaaatgtggtggagcatctcatgcacggctattgcgaggacctgtga

SEQ ID NO: 36976 - protein, 370 aa, Muscodor strobelii
  misc_feature: SGI Peptide ID NO. 572826
  misc_feature (11)..(346): NCBI GI: 169618469 Blast Desc: SNOG_12425 [Phaeosphaeria nodorum SN15] gi|111059118|gb|EAT80238.1| SNOG_12425 [Phaeosphaeria nodorum SN15]
  misc_feature (58)..(331): NCBI GI: 256734970 Blast Desc: NECHADRAFT_75762 [Nectria haematococca mpVI 77-13-4]
  misc_feature (135)..(322): NCBI GI: 169601684 Blast Desc: SNOG_03713 [Phaeosphaeria nodorum SN15] gi|160705991|gb|EAT88918.2| SNOG_03713 [Phaeosphaeria nodorum SN15]
  misc_feature (158)..(288): NCBI GI: 238508650 Blast Desc: conserved [Aspergillus flavus NRRL3357] gi|220688404|gb|EED44757.1| conserved [Aspergillus flavus NRRL3357]
  misc_feature (93)..(334): NCBI GI: 189199848 Blast Desc: conserved [Pyrenophora tritici-repentis Pt-1C-BFP] gi|187983360|gb|EDU48848.1| conserved [Pyrenophora tritici-repentis Pt-1C-BFP]
MALGLVGGTSDLQLAFLQSLWPSLTLHEFKKNQVQYSTFFEFVDGRLACMMKDPNHYSQCTVDGVGKYIDNMRQHMTFTKQVLSVNDRLSGIDKQIVSQTFEAVATIWLTIRFRIGSLDDAHYDSLYDHHLDWHNNHSLHDILGTTFKSSPTDYQIFKVDIIHADFSMARLCNHYRFRIKWTDYLQDHLLIDWGSREIRCYQHVMYLRNYLDNKGATPIPRSIIEEALDTINLFFPRNDNETKKFLQKHKQHFHELPSCGRRRRLQVSHYKYWYSTIRIIKEISEGPPQQFRLQILPPRGQRNYNELGMLTITMFAAFLAFVSIGLAAATLVFAIWDYNTEELELKAIKAMACADTNVVEHLMHGYCEDL

SEQ ID NO: 36977 - DNA, 253 bp, Muscodor strobelii
  misc_feature: SGI EST ID NO. CUFF.88294.0
  misc_feature: Variant of the nucleotide sequence at SEQ ID NO 36975
ggggccaccacagcaatttcgccttcagattctaccacctagaggacaacgtaattacaacgaattgggcatgcttactatcaccatgtttgctgctttcttggcatttgtcagtataggccttgctgctgcgaccttggtatttgccatatgggactataatacggaagagttggaattgaaggcaataaaagcaatggcttgcgctgatacaaatgtggtggagcatctcatgcacggctattgcgaggac

SEQ ID NO: 36978 - DNA, 1596 bp, Muscodor strobelii
  misc_feature: SGI cDNA ID NO. 572827
  misc_feature: Elevated expression when VOC is produced
  misc_feature: Encodes the peptide sequence at SEQ ID NO 36979
atggagttccgattatggcaatatgtgttcattgcgaatattctctttgcgaatctcctgtttgccggtcgcatgcatgagagaagtcggagaaggggattcaccgaggcattcatcaatgatttccaagctcgtgaccaatatcgcctaaagaaaaaagatgaattcagattcttaagtaacgctacaaaaaattatgccgtggattctctgcctgatgtaccgttcgatgtgggtgagctatactctgggctcatatctatcaatacgaacgagccatcacgagctttattctttgtcttccaaccgacaatcggggagccagtagacgagatcaccatctggctaaacgggggcccaggatgtagttcactcgagggattcttgcaagagacaggtctcttccagtggtcctggggtcaatactcaccaatcatcaacaaatactcgtgggtaaatctaacaaatgtgttgtgggttgaacagcctgttggtgttggtttctcgaccggcgaagttcgtgcgacaagtgaggcagatgtgtcgaaagacttcgttgactggtttctgaacttccaagagattttcgacatatctaaattcaagatctatgtcaccggtgagagttatgctgggatatatgtcccgtacatctcgacagagatgatggaccgtgatgatccggagcatcttgacgttcgagggaatctgatatatgatccatgtatcggctcatgggtctacacacaatcacaggcagtagcggttccttggattcaacaaaacaacaacatactaggcttcaataagacattcctcgcatatcttgatgcccaagacaagacatgtggatacgctgaataccgcgagaattatctcacatttcctagctccggccagcaagagccaaaatacttcaatttcacgtcagattccgagtgcgatctgtggacactagcttacgatgccgcttatcacacaaacccatgtttcaatgtgtacgaacccaacctccaatgcccgcttttgagcgatccccttgggtatccgacggacttgcagttcagctacccaggaatgccagtatacttcaaccgtactgatgtcaaagccgccatgcatgcacctcaagatgtcaactgggtggactgcgccccatctcccgtcttcctcggcgatgacgggctcgaggacgaaggtgatctctctcccgaccccatacaatctgtcctgccgcgcgtcatcgaagcaactaatcgcgtcttgattgccaatggtgctctcgattacgatatcatcaccaacgggacactcatcgcgatacagaacatgacgtggggtaatgtcatggggtttgagaagcagccgagcacacctgtggtcatcaccttacctgatctacaatacggcccaaccttcagagcgaatggctggggcgaatttgaggagccaatgggaacaatgggcgttcagcattatgagagagggctattgttcaccgagacactgctgagcgggcatatggagccacagttccaaccaagagttagctatcgtcatcttcaatggctcctgggtcatattgatgagctttaa

SEQ ID NO: 36979 - protein, 531 aa, Muscodor strobelii
  misc_feature: SGI Peptide ID NO. 572827
  misc_feature (72)..(526): Pfam Id: PF00450 Pfam Desc: Serine carboxypeptidase
  misc_feature (1)..(531): NCBI GI: 154321760 Blast Desc: BC1G_01027 [Botryotinia fuckeliana B05.10] gi|150850274|gb|EDN25467.1| BC1G_01027 [Botryotinia fuckeliana B05.10]
  misc_feature (43)..(531): NCBI GI: 169786105 Blast Desc: [Aspergillus oryzae RIB40] gi|83776261|dbj|BAE66380.1| protein product [Aspergillus oryzae]
  misc_feature (23)..(531): NCBI GI: 70989273 Blast Desc: pheromone processing carboxypeptidase (Sxa2) [Aspergillus fumigatus Af293] gi|40850668|gb|AAR96057.1| carboxypeptidase 5 [Aspergillus fumigatus] pheromone processing
  misc_feature (23)..(531): NCBI GI: 159128898 Blast Desc: pheromone processing carboxypeptidase (Sxa2), [Aspergillus fumigatus A1163]
  misc_feature (23)..(531): NCBI GI: 119498315 Blast Desc: pheromone processing carboxypeptidase (Sxa2), [Neosartorya fischeri NRRL 181] gi|119414079|gb|EAW24018.1| pheromone processing carboxypeptidase (Sxa2), [Neosartorya NRRL
  misc_feature (44)..(531): NCBI GI: 121710426 Blast Desc: pheromone processing carboxypeptidase (Sxa2), [Aspergillus clavatus NRRL 1] gi|119400979|gb|EAW11403.1| pheromone processing carboxypeptidase (Sxa2), [Aspergillus NRRL
  misc_feature (23)..(531): NCBI GI: 255943061 Blast Desc: Pc18g04660 [Penicillium chrysogenum Wisconsin 54-1255] gi|211587032|emb|CAP94690.1| Pc18g04660 [Penicillium chrysogenum Wisconsin 54-1255]
  misc_feature (51)..(531): NCBI GI: 115442704 Blast Desc: serine-type carboxypeptidase F precursor [Aspergillus terreus NIH2624] gi|114188028|gb|EAU29728.1| serine-type carboxypeptidase F precursor [Aspergillus terreus NIH2624]
  misc_feature (14)..(531): NCBI GI: 212527182 Blast Desc: pheromone processing carboxypeptidase (Sxa2), [Penicillium marneffei ATCC 18224] gi|210073146|gb|EEA27233.1| pheromone processing carboxypeptidase (Sxa2), [Penicillium ATCC
  misc_feature (44)..(531): NCBI GI: 169779013 Blast Desc: [Aspergillus oryzae RIB40] gi|83772710|dbj|BAE62838.1| protein product [Aspergillus oryzae]
  misc_feature (112)..(517): SWISSPROT Homolog: EC 3.4.16.6 Carboxypeptidase D
  misc_feature: Useful for introducing or modulating the production of volatile compounds
MEFRLWQYVFIANILFANLLFAGRMHERSRRRGFTEAFINDFQARDQYRLKKKDEFRFLSNATKNYAVDSLPDVPFDVGELYSGLISINTNEPSRALFFVFQPTIGEPVDEITIWLNGGPGCSSLEGFLQETGLFQWSWGQYSPIINKYSWVNLTNVLWVEQPVGVGFSTGEVRATSEADVSKDFVDWFLNFQEIFDISKFKIYVTGESYAGIYVPYISTEMMDRDDPEHLDVRGNLIYDPCIGSWVYTQSQAVAVPWIQQNNNILGFNKTFLAYLDAQDKTCGYAEYRENYLTFPSSGQQEPKYFNFTSDSECDLWTLAYDAAYHTNPCFNVYEPNLQCPLLSDPLGYPTDLQFSYPGMPVYFNRTDVKAAMHAPQDVNWVDCAPSPVFLGDDGLEDEGDLSPDPIQSVLPRVIEATNRVLIANGALDYDIITNGTLIAIQNMTWGNVMGFEKQPSTPVVITLPDLQYGPTFRANGWGEFEEPMGTMGVQHYERGLLFTETLLSGHMEPQFQPRVSYRHLQWLLGHIDEL

SEQ ID NO: 36980 - DNA, 7347 bp, Muscodor strobelii
  misc_feature: SGI EST ID NO. CUFF.88346.0
  misc_feature: Variant of the nucleotide sequence at SEQ ID NO 36978
cgaccggcgaagttcgtgcgacaagtgaggcagatgtgtcgaaagacttcgttgactggtttctgaacttccaagagattttcgacatatctaaattcaagatctatgtcaccggtgagagttatgctgggatatatgtcccgtacatctcgacagagatgatggaccgtgatgatccggagcatcttgacgttcgagggaatctgatatatgatccatgtatcggctcatgggtctacacacaatcacaggcagtagcggttccttggattcaacaaaacaacaacatactaggcttcaataagacattcctcgcatatcttgatgcccaagacaagacatgtggatacgctgaataccgcgagaattatctcacatttcctagctccggccagcaagagccaaaatacttcaatttcacgtcagattccgagtgcgatctgtggacactagcttacgatgccgcttatcacacaaacccatgtttcaatgtgtacgaacccaacctccaatgcccgcttttgagcgatccccttgggtatccgacggacttgcagttcagctacccaggaatgccagtatacttcaaccgtactgatgtcaaagccgccatgcatgcacctcaagatgtcaactgggtggactgcgccccatctcccgtcttcctcggcgatgacgggctcgaggacgaaggtgatctctctcccgaccccatacaatctgtcctgccgcgcgtcatcgaagcaactaatcgcgtcttgattgccaatggtgctctcgattacgatatcatcaccaacgggacactcatcgcgatacagaacatgacgtggggtaatgtcatggggtttgagaagcagccgagcacacctgtggtcatcaccttacctgatctacaatacggcccaaccttcagagcgaatggctggggcgaatttgaggagccaatgggaacaatgggcgttcagcattatgagagagggctattgttcaccgagacactgctgagcgggcatatggagccacagttccaaccaagagttagctatcgtcatcttcaatggctcctgggtcatattgatgagctttaagttggtgagattcacgacttgtcttacaggcgtgagagtgggtaatagataaggcttatgcaagaactctagctgctcattacaattgccaacgaactcgtccgagactaggcgctcgatacagcttatggcctctgttctcgaaacgattgagtgaatctggttagctcagtgcacttggccatatgcgggtacttcatacgcaactttacattcgagacatttgaatattttgaattcctatacttccgaagagattggattataggtgcaatgagttttgcccccgcaacctggaggaagtggtaccttgctatcgcttatgtccaaaagaaccgctatcacgccggacaatgccaatttattttaaaaacatagacaagaaacccaaggagcctgccattaatataaaatgcgacgctcccatatgacacatgcaaagagtcattaaaactcgaagtccccccaaccaccaccactgtaatcggtcgacgaagtccagtcagtggatgaagtgatgtcaacggcttggacggtgtcgaatgacgtcatgttcgtatcagtataagtcatggagttcatatccacactgttgttaatgttgacatccgtagcatatgtagtgtccgtattgaccatggtcgagttatcgacaacataggttgtattgttgacgattgtcgtattttccgtagcgtaagtttggtcggtgtaactatctggctgttgttggtcgaaataggagtcttgattagaaccatgagcattggtgtcgtgaccaacaccgtgactctcgtaccctcctccgtgcgactcagtatggccttgattaataccctgactgtttccctgattgttcccggcagtattatgtgtgcgaatcgcattgttgatgatgttgccgaggaatgctgtgcctaacacgagattagcgttcatgttcgtctgcgtttgagctgtcaggccgccgtttgaatcgactccaatggttgcgccgggtcgttcctgctgaaactggcccattggcggttggccggctatgggtccgcccatctgtcctggcatttgatactgttgttgcgcattgccgttgatctgtgcttgtgcagtgaagttcgcagcgaccccagaggccagtgcgggattttgaatgaccggaggccggccgggagtctgaataccggctggctgatatcctggttgagggcgaacctgctgggcagccaattgcgaagccgtaattggcggattcagggcttgagccggtatttgttgaggccgacctggttgaacctgtgttggctgcgtttgtccgggctgcggaaatcctggctgcgatgcttgatactgaattggctggccctgttggtaatacgtttgttgagacggaatttgttgggaggggaggggagccgactggagactgctttgctgcggttgggcttgttgctgatttgcttgggtatgaacttgctgttgatgctgagcctgaggatagcctggctgggcgcctggcatttgttgaagtcctggctgaggatgatttggctgtgtttgcatttgttgatgctgtccaggtagtgtctgcattggctgcatctgcacaagctgtggttggccaacttgctggtttggctggaacacaccaggctgagctgtcacattaggcggccgcccgattggcaattgaccaggctgaggcattgcagtttgatgtgggataacttgactctgtactacctggccttgtcccagttgtgggggtcggccagcttgagacagcatcggctgcatctgagctggcacctgagtcggtaagtggcctggcacatgactgggaatctgacttggctgagtcaatgatggaacaggttgttgcggtataccatttgtctgcggaggtgctgtttgagcgtgagcgacttggggtcgttgctggaatgtactgtatattttactcccgatagctgcgcctcccgcagcggtgcctcctattgactctgagatgattgcaccgctgatcgcagctgttgcttgcttaacggcaggacttttcaacatcttcttgccccatttcttcattcccttaccggcatctttgagagcggcggtggtctgcgcggagttgaacggtttccctgcagactggaggcttggagaattaatagtagggctttgaatgggttgaccttgtgccgatggtggcgctgcgaatacttgttgacctggaactggggtgcttgttgcagatggaggctgagcgatctgcgggacggcaggatgacttgttgtcgcagtttgttgagaatttggactttgctgaggcggaaatgggtgcgtaggctgattattcacaagcggttggttttgagggtgcgggaaagtcagatgtggaccattattgagttgctgggggctgttcgcctgctgtgcgttttgctgtgagttgtgctgtgagcctcctgcgacttgagacgcaacaggctttcgcgatggccgatgtgataggggtgaggctcctgtgtgcggcaccataccaacctgtggttgctgcccggccagctgagcattatttgtcgtcgaccccatttgcatcgattgttgagcaggatgtatcgttgattgcatagggctctgtgatacttgagactgaggcgacatcgggatagacgtcggacctagctgtgaaggaagtggtgtaacctgccctggaagcattgggaacggcttcggcggtgacgccggtgtggggctttgagtcggggatggctgtccaacgggagattcattcgatgatggtggccgtatttgcgtatgcggctgaggttcgttgcctcctgtctgttgtgctatcatgtgcggcgggatagatgagggccggtgtattgtaggattggtctgattcatatttatcttcgcacctggatttggagtaatggcagcgctcatcgttgtttgcacattagacgatggaggtagtgggtgggacatatggagcgaggcaatcgactgagcgggagacgacacttgactctgaagaggcgatacaggttgtgttacaggagatggctgttgtagctgtggagaaattcgacccggtcctgattgctgggcatgttgtccactcggaggcctggcagcaacttgaggacccggaaacactgttgctgttgtttgttgcacattctggccattgaaagaggaattcagccccattgttgacgttgcgccttggctgctttgcccgttggattgctgagacggttgtgccccgtacaaatgactttgtagaccattaggacctgggtgattatgagcttgcgacgccagagatgattgagcagcaactgtcgcgttctgtccaggcttggcttgcattacagattgattggacgttccttgatgtatagcatattgcgacgactgagcggttgtctgaggtgcactcgatggttgaggatggctggaagacacctgcgtcactaagtttgaactggtactttgcggacgagtcaaggttgatgctgtcacaacttcaccttgccctgccattgatgacgatgaattcagacccattgtcgaaacggaattgcctgcagcggaattctcatggtttggcatggcaggcaatgacgtatggcctgttggtttggcgttcataccgacgctaggcgttggtcgattatcaacttgtccttcacctgtgttttgcgtagttgaattttcgggatgtgtttgcgatggtggtggctgcgaaggaccagatactggtaccggcgtcccatgcggtgtaaattcattgctaataacagatattgcttctgaaatatcatcaaacgacgtggaactgggcttatccagacacgaggcagattccaaactttcgctaacatgtgaggaattctgagacccctttgatgaattgcgttttacgaaattcagtggtgcgacacctgggtaagcctcactcatgttaaaatgagtctgcgaacctggtcggcttgagctgttcgtagactgtgcatcgccttgagtctcaggccttagcggcatattgccttgagacaagttagagccgtccgaacttgtgatgttcggcgtgctggaaatctcatgaaagaataaaaaccctggacctccagtcctcttgggcggtgatgttgagtctgctgatgagagattgttaggtaaagtgtttacccttgtcgcacctggccggccgtgtggcccaggcgtgtggaaacgatcgggtgttggcattgaaatcacatcttgtggacctgacgtttttgattcgaccttctccggtcttatagggtccgatagattcgtgctttgtctgcggccgccgggtttgagaatggacggagcatatgctaagccctgtgtaccggatgagatgctttcatgcctcgcgcctattcccggtatgggtcgctgctgaggcccttgcgaaggctgtagaaccgctggatgttgactattttggggcgaaggagtaggactagaaggttgaggtcctgaagctggcgccagggcacttggcacatcaaccggatcaggtgcggtcgcattctcgcccgagttcttccgctcgatgccaccgagctcgctgttctgatgttcaagaaccgtagtttgcgccggaatcccggaacttctctcgggaattcgagcttcttgcccagcgacttcgtgtgtcggattccacggctgatacttattctggccgttttgaactgctggggggtcttgagcaggttgaccgatcaccccttgtcctgctgatgagatatcttgagcttttatactgctgtcttttaagggggcaaacgcgaatgatgctgataccaagggatatgcgctaacaggttgtgaagttggcggtgtcggctttggttcagaagccttctcctcaaccggacttcggtgcgtgggaagctcagccggctcattctggatgatatcggtccggatagaagctggcgcaaaggatgctgcatcaagttcaactggtgcaagctcttccgcacatttgatcgtatcttgagttgctagctcagcaacaaatcctacaggagaccacatttggcgatttccctctggtagttcggccgcggtagggtgtacattcgccgtagatacagttagtgctgaatccaaacggggactatcgttgtccatagggcttatgtcattgtaggccccgggaaagtatcccatgaagctacttgggtcaaagtatccgttggcgctcataccgttactatcctcctcttcaatcgcttcaatcttctttttgtcccttttacttccgcttgtttttgttccgacaattgtctcggcctccccttctatcccgctccttcgcttcgcttgacgttcgatcgcaagactttcttccggcgtgagctccaagggcccagagccatcatcgagaaagaactctgcatattcatctccaggttgtggaaagtggtattgcactgtacctgtcgctttgtagcgatagaaccaacgtgtcccatcgtaatccgattcccaaccatcaggcagtcgtgccatcttagagatgatgaggagcaatcaggatgtggctatcctgcgacttcgccggggcaacaacactaaaagatgagctacggacaggatcacgcgattggtgttcgggggctcgtcgaatcacgattcctctcaggatggagattgggccttgacacgtcgtcgttgttcacaacatggcggggtcgtagatggtcggaccgtctcacggcctagtagcagcggctatcacgtcgacgtccggatcacgctcgaggtattgatcgcgactcaaaataattgtatgaagctgtggaacactgaagtgacgacgggcagccgaggagtacgccagagcgaaaaccctcgcttggcgtcgtgagacggcggagcagcggctgaaaagtcatgtcgggataactgaaccccgggcgaggctcaattctaaccctcttcagcaaagagcaagaatttctatgtcgagacaagccagcccggttacggctccaatcacaacgcgacattgtcgcggccgtctgttctagatgtcggtatcattggatggtggcttgctagctgcaggagctgaacttgacgactccatcacgtccacgaatgccggacactatctatgttaggcatcgaaaaaattctatctccatttagatactgccaacccgaaagcgtgattggggtgtgtctagacagtgatcta

SEQ ID NO: 36981 - DNA, 5118 bp, Muscodor strobelii
  misc_feature: SGI cDNA ID NO. 572828
  misc_feature: Encodes the peptide sequence at SEQ ID NO 36982
atggcacgactgcctgatggttgggaatcggattacgatgggacacgttggttctatcgctacaaagcgacaggtacagtgcaataccactttccacaacctggagatgaatatgcagagttctttctcgatgatggctctgggcccttggagctcacgccggaagaaagtcttgcgatcgaacgtcaagcgaagcgaaggagcgggatagaaggggaggccgagacaattgtcggaacaaaaacaagcggaagtaaaagggacaaaaagaagattgaagcgattgaagaggaggatagtaacggtatgagcgccaacggatactttgacccaagtagcttcatgggatactttcccggggcctacaatgacataagccctatggacaacgatagtccccgtttggattcagcactaactgtatctacggcgaatgtacaccctaccgcggccgaactaccagagggaaatcgccaaatgtggtctcctgtaggatttgttgctgagctagcaactcaagatacgatcaaatgtgcggaagagcttgcaccagttgaacttgatgcagcatcctttgcgccagcttctatccggaccgatatcatccagaatgagccggctgagcttcccacgcaccgaagtccggttgaggagaaggcttctgaaccaaagccgacaccgccaacttcacaacctgttagcgcatatcccttggtatcagcatcattcgcgtttgcccccttaaaagacagcagtataaaagctcaagatatctcatcagcaggacaaggggtgatcggtcaacctgctcaagaccccccagcagttcaaaacggccagaataagtatcagccgtggaatccgacacacgaagtcgctgggcaagaagctcgaattcccgagagaagttccgggattccggcgcaaactacggttcttgaacatcagaacagcgagctcggtggcatcgagcggaagaactcgggcgagaatgcgaccgcacctgatccggttgatgtgccaagtgccctggcgccagcttcaggacctcaaccttctagtcctactccttcgccccaaaatagtcaacatccagcggttctacagccttcgcaagggcctcagcagcgacccataccgggaataggcgcgaggcatgaaagcatctcatccggtacacagggcttagcatatgctccgtccattctcaaacccggcggccgcagacaaagcacgaatctatcggaccctataagaccggagaaggtcgaatcaaaaacgtcaggtccacaagatgtgatttcaatgccaacacccgatcgtttccacacgcctgggccacacggccggccaggtgcgacaagggtaaacactttacctaacaatctctcatcagcagactcaacatcaccgcccaagaggactggaggtccagggtttttattctttcatgagatttccagcacgccgaacatcacaagttcggacggctctaacttgtctcaaggcaatatgccgctaaggcctgagactcaaggcgatgcacagtctacgaacagctcaagccgaccaggttcgcagactcattttaacatgagtgaggcttacccaggtgtcgcaccactgaatttcgtaaaacgcaattcatcaaaggggtctcagaattcctcacatgttagcgaaagtttggaatctgcctcgtgtctggataagcccagttccacgtcgtttgatgatatttcagaagcaatatctgttattagcaatgaatttacaccgcatgggacgccggtaccagtatctggtccttcgcagccaccaccatcgcaaacacatcccgaaaattcaactacgcaaaacacaggtgaaggacaagttgataatcgaccaacgcctagcgtcggtatgaacgccaaaccaacaggccatacgtcattgcctgccatgccaaaccatgagaattccgctgcaggcaattccgtttcgacaatgggtctgaattcatcgtcatcaatggcagggcaaggtgaagttgtgacagcatcaaccttgactcgtccgcaaagtaccagttcaaacttagtgacgcaggtgtcttccagccatcctcaaccatcgagtgcacctcagacaaccgctcagtcgtcgcaatatgctatacatcaaggaacgtccaatcaatctgtaatgcaagccaagcctggacagaacgcgacagttgctgctcaatcatctctggcgtcgcaagctcataatcacccaggtcctaatggtctacaaagtcatttgtacggggcacaaccgtctcagcaatccaacgggcaaagcagccaaggcgcaacgtcaacaatggggctgaattcctctttcaatggccagaatgtgcaacaaacaacagcaacagtgtttccgggtcctcaagttgctgccaggcctccgagtggacaacatgcccagcaatcaggaccgggtcgaatttctccacagctacaacagccatctcctgtaacacaacctgtatcgcctcttcagagtcaagtgtcgtctcccgctcagtcgattgcctcgctccatatgtcccacccactacctccatcgtctaatgtgcaaacaacgatgagcgctgccattactccaaatccaggtgcgaagataaatatgaatcagaccaatcctacaatacaccggccctcatctatcccgccgcacatgatagcacaacagacaggaggcaacgaacctcagccgcatacgcaaatacggccaccatcatcgaatgaatctcccgttggacagccatccccgactcaaagccccacaccggcgtcaccgccgaagccgttcccaatgcttccagggcaggttacaccacttccttcacagctaggtccgacgtctatcccgatgtcgcctcagtctcaagtatcacagagccctatgcaatcaacgatacatcctgctcaacaatcgatgcaaatggggtcgacgacaaataatgctcagctggccgggcagcaaccacaggttggtatggtgccgcacacaggagcctcacccctatcacatcggccatcgcgaaagcctgttgcgtctcaagtcgcaggaggctcacagcacaactcacagcaaaacgcacagcaggcgaacagcccccagcaactcaataatggtccacatctgactttcccgcaccctcaaaaccaaccgcttgtgaataatcagcctacgcacccatttccgcctcagcaaagtccaaattctcaacaaactgcgacaacaagtcatcctgccgtcccgcagatcgctcagcctccatctgcaacaagcaccccagttccaggtcaacaagtattcgcagcgccaccatcggcacaaggtcaacccattcaaagccctactattaattctccaagcctccagtctgcagggaaaccgttcaactccgcgcagaccaccgccgctctcaaagatgccggtaagggaatgaagaaatggggcaagaagatgttgaaaagtcctgccgttaagcaagcaacagctgcgatcagcggtgcaatcatctcagagtcaataggaggcaccgctgcgggaggcgcagctatcgggagtaaaatatacagtacattccagcaacgaccccaagtcgctcacgctcaaacagcacctccgcagacaaatggtataccgcaacaacctgttccatcattgactcagccaagtcagattcccagtcatgtgccaggccacttaccgactcaggtgccagctcagatgcagccgatgctgtctcaagctggccgacccccacaactgggacaaggccaggtagtacagagtcaagttatcccacatcaaactgcaatgcctcagcctggtcaattgccaatcgggcggccgcctaatgtgacagctcagcctggtgtgttccagccaaaccagcaagttggccaaccacagcttgtgcagatgcagccaatgcagacactacctggacagcatcaacaaatgcaaacacagccaaatcatcctcagccaggacttcaacaaatgccaggcgcccagccaggctatcctcaggctcagcatcaacagcaagttcatacccaagcaaatcagcaacaagcccaaccgcagcaaagcagtctccagtcggctcccctcccctcccaacaaattccgtctcaacaaacgtattaccaacagggccagccaattcagtatcaagcatcgcagccaggatttccgcagcccggacaaacgcagccaacacaggttcaaccaggtcggcctcaacaaataccggctcaagccctgaatccgccaattacggcttcgcaattggctgcccagcaggttcgccctcaaccaggatatcagccagccggtattcagactcccggccggcctccggtcattcaaaatcccgcactggcctctggggtcgctgcgaacttcactgcacaagcacagatcaacggcaatgcgcaacaacagtatcaaatgccaggacagatgggcggacccatagccggccaaccgccaatgggccagtttcagcaggaacgacccggcgcaaccattggagtcgattcaaacggcggcctgacagctcaaacgcagacgaacatgaacgctaatctcgtgttaggcacagcattcctcggcaacatcatcaacaatgcgattcgcacacataatactgccgggaacaatcagggaaacagtcagggtattaatcaaggccatactgagtcgcacggaggagggtacgagagtcacggtgttggtcacgacaccaatgctcatggttctaatcaagactcctatttcgaccaacaacagccagatagttacaccgaccaaacttacgctacggaaaatacgacaatcgtcaacaatacaacctatgttgtcgataactcgaccatggtcaatacggacactacatatgctacggatgtcaacattaacaacagtgtggatatgaactccatgacttatactgatacgaacatgacgtcattcgacaccgtccaagccgttgacatcacttcatccactgactggacttcgtcgaccgattacagtggtggtggttggggggacttcgagttttaa

SEQ ID NO: 36982 - protein, 1705 aa, Muscodor strobelii
  misc_feature: SGI Peptide ID NO. 572828
  misc_feature (1)..(154): NCBI GI: 171693527 Blast Desc: protein product [Podospora anserina] gi|170946712|emb|CAP73515.1| protein product [Podospora anserina]
  misc_feature (1)..(128): NCBI GI: 116206348 Blast Desc: CHGG_02467 [Chaetomium globosum CBS 148.51] gi|88183064|gb|EAQ90532.1| CHGG_02467 [Chaetomium globosum CBS 148.51]
  misc_feature (1)..(251): NCBI GI: 261357970 Blast Desc: [Verticillium albo-atrum VaMs.102]
  misc_feature (1)..(376): NCBI GI: 256731101 Blast Desc: NECHADRAFT_105372 [Nectria haematococca mpVI 77-13-4]
MARLPDGWESDYDGTRWFYRYKATGTVQYHFPQPGDEYAEFFLDDGSGPLELTPEESLAIERQAKRRSGIEGEAETIVGTKTSGSKRDKKKIEAIEEEDSNGMSANGYFDPSSFMGYFPGAYNDISPMDNDSPRLDSALTVSTANVHPTAAELPEGNRQMWSPVGFVAELATQDTIKCAEELAPVELDAASFAPASIRTDIIQNEPAELPTHRSPVEEKASEPKPTPPTSQPVSAYPLVSASFAFAPLKDSSIKAQDISSAGQGVIGQPAQDPPAVQNGQNKYQPWNPTHEVAGQEARIPERSSGIPAQTTVLEHQNSELGGIERKNSGENATAPDPVDVPSALAPASGPQPSSPTPSPQNSQHPAVLQPSQGPQQRPIPGIGARHESISSGTQGLAYAPSILKPGGRRQSTNLSDPIRPEKVESKTSGPQDVISMPTPDRFHTPGPHGRPGATRVNTLPNNLSSADSTSPPKRTGGPGFLFFHEISSTPNITSSDGSNLSQGNMPLRPETQGDAQSTNSSSRPGSQTHFNMSEAYPGVAPLNFVKRNSSKGSQNSSHVSESLESASCLDKPSSTSFDDISEAISVISNEFTPHGTPVPVSGPSQPPPSQTHPENSTTQNTGEGQVDNRPTPSVGMNAKPTGHTSLPAMPNHENSAAGNSVSTMGLNSSSSMAGQGEVVTASTLTRPQSTSSNLVTQVSSSHPQPSSAPQTTAQSSQYAIHQGTSNQSVMQAKPGQNATVAAQSSLASQAHNHPGPNGLQSHLYGAQPSQQSNGQSSQGATSTMGLNSSFNGQNVQQTTATVFPGPQVAARPPSGQHAQQSGPGRISPQLQQPSPVTQPVSPLQSQVSSPAQSIASLHMSHPLPPSSNVQTTMSAAITPNPGAKINMNQTNPTIHRPSSIPPHMIAQQTGGNEPQPHTQIRPPSSNESPVGQPSPTQSPTPASPPKPFPMLPGQVTPLPSQLGPTSIPMSPQSQVSQSPMQSTIHPAQQSMQMGSTTNNAQLAGQQPQVGMVPHTGASPLSHRPSRKPVASQVAGGSQHNSQQNAQQANSPQQLNNGPHLTFPHPQNQPLVNNQPTHPFPPQQSPNSQQTATTSHPAVPQIAQPPSATSTPVPGQQVFAAPPSAQGQPIQSPTINSPSLQSAGKPFNSAQTTAALKDAGKGMKKWGKKMLKSPAVKQATAAISGAIISESIGGTAAGGAAIGSKIYSTFQQRPQVAHAQTAPPQTNGIPQQPVPSLTQPSQIPSHVPGHLPTQVPAQMQPMLSQAGRPPQLGQGQVVQSQVIPHQTAMPQPGQLPIGRPPNVTAQPGVFQPNQQVGQPQLVQMQPMQTLPGQHQQMQTQPNHPQPGLQQMPGAQPGYPQAQHQQQVHTQANQQQAQPQQSSLQSAPLPSQQIPSQQTYYQQGQPIQYQASQPGFPQPGQTQPTQVQPGRPQQIPAQALNPPITASQLAAQQVRPQPGYQPAGIQTPGRPPVIQNPALASGVAANFTAQAQINGNAQQQYQMPGQMGGPIAGQPPMGQFQQERPGATIGVDSNGGLTAQTQTNMNANLVLGTAFLGNIINNAIRTHNTAGNNQGNSQGINQGHTESHGGGYESHGVGHDTNAHGSNQDSYFDQQQPDSYTDQTYATENTTIVNNTTYVVDNSTMVNTDTTYATDVNINNSVDMNSMTYTDTNMTSFDTVQAVDITSSTDWTSSTDYSGGGWGDFEF

SEQ ID NO: 36983 - DNA, 7412 bp, Muscodor strobelii
  misc_feature: SGI EST ID NO. CUFF.88346.1
  misc_feature: Variant of the nucleotide sequence at SEQ ID NO 36981
tagatcactgtctagacacaccccaatcacgctttcgggttggcagtatctaaatggagatagaattttttcgatgcctaacatagatagtgtccggcattcgtggacgtgatggagtcgtcaagttcagctcctgcagctagcaagccaccatccaatgataccgacatctagaacagacggccgcgacaatgtcgcgttgtgattggagccgtaaccgggctggcttgtctcgacatagaaattcttgctctttgctgaagagggttagaattgagcctcgcccggggttcagttatcccgacatgacttttcagccgctgctccgccgtctcacgacgccaagcgagggttttcgctctggcgtactcctcggctgcccgtcgtcacttcagtgttccacagcttcatacaattattttgagtcgcgatcaatacctcgagcgtgatccggacgtcgacgtgatagccgctgctactaggccgtgagacggtccgaccatctacgaccccgccatgttgtgaacaacgacgacgtgtcaaggcccaatctccatcctgagaggaatcgtgattcgacgagcccccgaacaccaatcgcgtgatcctgtccgtagctcatcttttagtgttgttgccccggcgaagtcgcaggatagccacatcctgattgctcctcatcatctctaagatggcacgactgcctgatggttgggaatcggattacgatgggacacgttggttctatcgctacaaagcgacaggtacagtgcaataccactttccacaacctggagatgaatatgcagagttctttctcgatgatggctctgggcccttggagctcacgccggaagaaagtcttgcgatcgaacgtcaagcgaagcgaaggagcgggatagaaggggaggccgagacaattgtcggaacaaaaacaagcggaagtaaaagggacaaaaagaagattgaagcgattgaagaggaggatagtaacggtatgagcgccaacggatactttgacccaagtagcttcatgggatactttcccggggcctacaatgacataagccctatggacaacgatagtccccgtttggattcagcactaactgtatctacggcgaatgtacaccctaccgcggccgaactaccagagggaaatcgccaaatgtggtctcctgtaggatttgttgctgagctagcaactcaagatacgatcaaatgtgcggaagagcttgcaccagttgaacttgatgcagcatcctttgcgccagcttctatccggaccgatatcatccagaatgagccggctgagcttcccacgcaccgaagtccggttgaggagaaggcttctgaaccaaagccgacaccgccaacttcacaacctgttagcgcatatcccttggtatcagcatcattcgcgtttgcccccttaaaagacagcagtataaaagctcaagatatctcatcagcaggacaaggggtgatcggtcaacctgctcaagaccccccagcagttcaaaacggccagaataagtatcagccgtggaatccgacacacgaagtcgctgggcaagaagctcgaattcccgagagaagttccgggattccggcgcaaactacggttcttgaacatcagaacagcgagctcggtggcatcgagcggaagaactcgggcgagaatgcgaccgcacctgatccggttgatgtgccaagtgccctggcgccagcttcaggacctcaaccttctagtcctactccttcgccccaaaatagtcaacatccagcggttctacagccttcgcaagggcctcagcagcgacccataccgggaataggcgcgaggcatgaaagcatctcatccggtacacagggcttagcatatgctccgtccattctcaaacccggcggccgcagacaaagcacgaatctatcggaccctataagaccggagaaggtcgaatcaaaaacgtcaggtccacaagatgtgatttcaatgccaacacccgatcgtttccacacgcctgggccacacggccggccaggtgcgacaagggtaaacactttacctaacaatctctcatcagcagactcaacatcaccgcccaagaggactggaggtccagggtttttattctttcatgagatttccagcacgccgaacatcacaagttcggacggctctaacttgtctcaaggcaatatgccgctaaggcctgagactcaaggcgatgcacagtctacgaacagctcaagccgaccaggttcgcagactcattttaacatgagtgaggcttacccaggtgtcgcaccactgaatttcgtaaaacgcaattcatcaaaggggtctcagaattcctcacatgttagcgaaagtttggaatctgcctcgtgtctggataagcccagttccacgtcgtttgatgatatttcagaagcaatatctgttattagcaatgaatttacaccgcatgggacgccggtaccagtatctggtccttcgcagccaccaccatcgcaaacacatcccgaaaattcaactacgcaaaacacaggtgaaggacaagttgataatcgaccaacgcctagcgtcggtatgaacgccaaaccaacaggccatacgtcattgcctgccatgccaaaccatgagaattccgctgcaggcaattccgtttcgacaatgggtctgaattcatcgtcatcaatggcagggcaaggtgaagttgtgacagcatcaaccttgactcgtccgcaaagtaccagttcaaacttagtgacgcaggtgtcttccagccatcctcaaccatcgagtgcacctcagacaaccgctcagtcgtcgcaatatgctatacatcaaggaacgtccaatcaatctgtaatgcaagccaagcctggacagaacgcgacagttgctgctcaatcatctctggcgtcgcaagctcataatcacccaggtcctaatggtctacaaagtcatttgtacggggcacaaccgtctcagcaatccaacgggcaaagcagccaaggcgcaacgtcaacaatggggctgaattcctctttcaatggccagaatgtgcaacaaacaacagcaacagtgtttccgggtcctcaagttgctgccaggcctccgagtggacaacatgcccagcaatcaggaccgggtcgaatttctccacagctacaacagccatctcctgtaacacaacctgtatcgcctcttcagagtcaagtgtcgtctcccgctcagtcgattgcctcgctccatatgtcccacccactacctccatcgtctaatgtgcaaacaacgatgagcgctgccattactccaaatccaggtgcgaagataaatatgaatcagaccaatcctacaatacaccggccctcatctatcccgccgcacatgatagcacaacagacaggaggcaacgaacctcagccgcatacgcaaatacggccaccatcatcgaatgaatctcccgttggacagccatccccgactcaaagccccacaccggcgtcaccgccgaagccgttcccaatgcttccagggcaggttacaccacttccttcacagctaggtccgacgtctatcccgatgtcgcctcagtctcaagtatcacagagccctatgcaatcaacgatacatcctgctcaacaatcgatgcaaatggggtcgacgacaaataatgctcagctggccgggcagcaaccacaggttggtatggtgccgcacacaggagcctcacccctatcacatcggccatcgcgaaagcctgttgcgtctcaagtcgcaggaggctcacagcacaactcacagcaaaacgcacagcaggcgaacagcccccagcaactcaataatggtccacatctgactttcccgcaccctcaaaaccaaccgcttgtgaataatcagcctacgcacccatttccgcctcagcaaagtccaaattctcaacaaactgcgacaacaagtcatcctgccgtcccgcagatcgctcagcctccatctgcaacaagcaccccagttccaggtcaacaagtattcgcagcgccaccatcggcacaaggtcaacccattcaaagccctactattaattctccaagcctccagtctgcagggaaaccgttcaactccgcgcagaccaccgccgctctcaaagatgccggtaagggaatgaagaaatggggcaagaagatgttgaaaagtcctgccgttaagcaagcaacagctgcgatcagcggtgcaatcatctcagagtcaataggaggcaccgctgcgggaggcgcagctatcgggagtaaaatatacagtacattccagcaacgaccccaagtcgctcacgctcaaacagcacctccgcagacaaatggtataccgcaacaacctgttccatcattgactcagccaagtcagattcccagtcatgtgccaggccacttaccgactcaggtgccagctcagatgcagccgatgctgtctcaagctggccgacccccacaactgggacaaggccaggtagtacagagtcaagttatcccacatcaaactgcaatgcctcagcctggtcaattgccaatcgggcggccgcctaatgtgacagctcagcctggtgtgttccagccaaaccagcaagttggccaaccacagcttgtgcagatgcagccaatgcagacactacctggacagcatcaacaaatgcaaacacagccaaatcatcctcagccaggacttcaacaaatgccaggcgcccagccaggctatcctcaggctcagcatcaacagcaagttcatacccaagcaaatcagcaacaagcccaaccgcagcaaagcagtctccagtcggctcccctcccctcccaacaaattccgtctcaacaaacgtattaccaacagggccagccaattcagtatcaagcatcgcagccaggatttccgcagcccggacaaacgcagccaacacaggttcaaccaggtcggcctcaacaaataccggctcaagccctgaatccgccaattacggcttcgcaattggctgcccagcaggttcgccctcaaccaggatatcagccagccggtattcagactcccggccggcctccggtcattcaaaatcccgcactggcctctggggtcgctgcgaacttcactgcacaagcacagatcaacggcaatgcgcaacaacagtatcaaatgccaggacagatgggcggacccatagccggccaaccgccaatgggccagtttcagcaggaacgacccggcgcaaccattggagtcgattcaaacggcggcctgacagctcaaacgcagacgaacatgaacgctaatctcgtgttaggcacagcattcctcggcaacatcatcaacaatgcgattcgcacacataatactgccgggaacaatcagggaaacagtcagggtattaatcaaggccatactgagtcgcacggaggagggtacgagagtcacggtgttggtcacgacaccaatgctcatggttctaatcaagactcctatttcgaccaacaacagccagatagttacaccgaccaaacttacgctacggaaaatacgacaatcgtcaacaatacaacctatgttgtcgataactcgaccatggtcaatacggacactacatatgctacggatgtcaacattaacaacagtgtggatatgaactccatgacttatactgatacgaacatgacgtcattcgacaccgtccaagccgttgacatcacttcatccactgactggacttcgtcgaccgattacagtggtggtggttggggggacttcgagttttaatgactctttgcatgtgtcatatgggagcgtcgcattttatattaatggcaggctccttgggtttcttgtctatgtttttaaaataaattggcattgtccggcgtgatagcggttcttttggacataagcgatagcaaggtaccacttcctccaggttgcgggggcaaaactcattgcacctataatccaatctcttcggaagtataggaattcaaaatattcaaatgtctcgaatgtaaagttgcgtatgaagtacccgcatatggccaagtgcactgagctaaccagattcactcaatcgtttcgagaacagaggccataagctgtatcgagcgcctagtctcggacgagttcgttggcaattgtaatgagcagctagagttcttgcataagccttatctattacccactctcacgcctgtaagacaagtcgtgaatctcaccaacttaaagctcatcaatatgacccaggagccattgaagatgacgatagctaactcttggttggaactgtggctccatatgcccgctcagcagtgtctcggtgaacaatagccctctctcataatgctgaacgcccattgttcccattggctcctcaaattcgccccagccattcgctctgaaggttgggccgtattgtagatcaggtaaggtgatgaccacaggtgtgctcggctgcttctcaaaccccatgacattaccccacgtcatgttctgtatcgcgatgagtgtcccgttggtgatgatatcgtaatcgagagcaccattggcaatcaagacgcgattagttgcttcgatgacgcgcggcaggacagattgtatggggtcgggagagagatcaccttcgtcctcgagcccgtcatcgccgaggaagacgggagatggggcgcagtccacccagttgacatcttgaggtgcatgcatggcggctttgacatcagtacggttgaagtatactggcattcctgggtagctgaactgcaagtccgtcggatacccaaggggatcgctcaaaagcgggcattggaggttgggttcgtacacattgaaacatgggtttgtgtgataagcggcatcgtaagctagtgtccacagatcgcactcggaatctgacgtgaaattgaagtattttggctcttgctggccggagctaggaaatgtgagataattctcgcggtattcagcgtatccacatgtcttgtcttgggcatcaagatatgcgaggaatgtcttattgaagcctagtatgttgttgttttgttgaatccaaggaaccgctactgcctgtgattgtgtgtagacccatgagccgatacatggatcatatatcagattccctgttacagttcagaatatcgcattaattgccctcttgattctatctgatcacttcaaaacttacctcgaacgtcaagatgctccggatcatcacggtccatcatctctgtcgagatgtacgggacatatatcccagcataactctcaccggtgacatagatcttgaatttagatatgtcgaaaatctcttggaagttcagaaaccagtcaacgaagtctttcgacacatctgcctcacttgtcgcacgaacttcgccggtcg

SEQ ID NO: 36984 - DNA, 258 bp, Muscodor strobelii
  misc_feature: SGI cDNA ID NO. 572829
  misc_feature: Encodes the peptide sequence at SEQ ID NO 36985
atggattcagcaggcgccaagtcagttctatcggaggatatgcaggagctcaatcagggcagagagcaagtctcccatgccgtccaaggacacaaagcgaatctgtcaaatccaaacacaagcgagcaatcgaaagagaacagtcgtaaggcaatcgaggagctcggcggcgacagtgcgcattacggagataaagacgagccgcgatcaaagacggctgccgaggagattgatggaagccgtgccatgctaaaatga

SEQ ID NO: 36985 - protein, 85 aa, Muscodor strobelii
  misc_feature: SGI Peptide ID NO. 572829
  misc_feature (1)..(83): NCBI GI: 261360018 Blast Desc: conserved [Verticillium albo-atrum VaMs.102]
  misc_feature (1)..(82): NCBI GI: 256725982 Blast Desc: NECHADRAFT_70036 [Nectria haematococca mpVI 77-13-4]
  misc_feature (1)..(82): NCBI GI: 116198651 Blast Desc: CHGG_07481 [Chaetomium globosum CBS 148.51] gi|88178760|gb|EAQ86228.1| CHGG_07481 [Chaetomium globosum CBS 148.51]
  misc_feature (1)..(73): NCBI GI: 85104134 Blast Desc: NCU01064 [Neurospora crassa OR74A] gi|18376211|emb|CAD21327.1| related to conidiation protein con-6 [Neurospora crassa] gi|28923224|gb|EAA32440.1| [Neurospora crassa
  misc_feature (10)..(63): NCBI GI: 189192542 Blast Desc: PTRG_02277 [Pyrenophora tritici-repentis Pt-1C-BFP] gi|187974216|gb|EDU41715.1| PTRG_02277 [Pyrenophora tritici-repentis Pt-1C-BFP]
  misc_feature (10)..(63): NCBI GI: 169600415 Blast Desc: SNOG_03041 [Phaeosphaeria nodorum SN15] gi|111068652|gb|EAT89772.1| SNOG_03041 [Phaeosphaeria nodorum SN15]
  misc_feature (30)..(67): NCBI GI: 39968307 Blast Desc: MGG_02246 [Magnaporthe grisea 70-15] gi|145014193|gb|EDJ98834.1| MGG_02246 [Magnaporthe grisea 70-15]
MDSAGAKSVLSEDMQELNQGREQVSHAVQGHKANLSNPNTSEQSKENSRKAIEELGGDSAHYGDKDEPRSKTAAEEIDGSRAMLK

SEQ ID NO: 36986 - DNA, 1454 bp, Muscodor strobelii
  misc_feature: SGI EST ID NO. CUFF.88340.1
  misc_feature: Variant of the nucleotide sequence at SEQ ID NO 36984
cggcacacaaaggaagcgcttagttttcgaatgggaaattcctgtaattatattcttccttcccattgcttatcctgagcctaatctttatagaatggcgaacaacatataaaccaagattatgatctattgataaatagcgcaatgaggacgcattctgagatggtggtaatccaacacgactcagccctgcgagttgtgacacccctagacacatgccttacaatgcattcaatagctttatacgaatgcgaatgagcgcgcgataagtatcttcagcctacttcgaaattatcttgatacctcgaacttatgccgcatagttataggcgctttggtgcccgtctcaagcgcgatcgacgatgtagctgcgttgtcgttaggcatgtgcaaggcgaaaacctgccagggtcgccggatgacgtacagcttgcccgggctaccattatgcacaactatttactcgaatgaatttctgcaacgtaggcgctgcgcatgaacccccaaatttccgaacgcgattatgacatagcaatcgagatcctctgctgctgcgccaaggacggatgcaagatagaagagtgttataaagagaagaaccttcctggcccaattcattaatccaatccccgcagctcagcaatacaacaactcaagttccagactcatttcgcaatcgcaacaaacacagacagaccatggattcagcaggcgccaagtcagttctatcggaggatatgcaggagctcaatcagggcagagagcaagtctcccatgccgtccaaggacacaaagcgaatctgtcaaatccaaacacaagcgagcaatcgaaagagaacagtcgtaaggcaatcgaggagctcggcggcgacagtgcgcattacggagataaagacgagccgcgatcaaagacggctgccgaggagattgatggaagccgtgccatgctaaaatgattacatcaagggttgtttgatttggtgaattggtgtgatgataaccgtggatggcaacgaggtcagatattgggacaagacagagatgaaaatctaagaagttgatagcgtatttcaattcaagtttcacttatgcccacattttcacactcgaaagatgttgaagcattaaagtattgctcttattgatgttgcttctcgtaatgcatgtacgtcctcaggaaacctctcggttatagcggggtgaaccactttgggacctctacccacccagtgttttttcgtggccaatattttacagagcttgaagaagagacgcttcacgtctggctggaactggtcactgaggcgctgagatccggtgcattcgttcccttgatgttgagcaaggttgaatatgcactttaatatgtcaattaatggattatgacgctatttgtttgacatctgtagcacaggtcgtggcagacgtgttggaaatgcaagctagaacactag

SEQ ID NO: 36987 - DNA, 666 bp, Muscodor strobelii
  misc_feature: SGI cDNA ID NO. 572830
  misc_feature: Encodes the peptide sequence at SEQ ID NO 36988
atggcgcccctcaaccgtctacacatcgacatcggcattcccatcccaactatcacccttcgctccatccttccatcctcaatactcccccgcgcgtcaccttcaaccgttccacaaacctacggcgggcacttcggtcccccaccaggcacagtagtcggcatagtcctcggctccatcgccggcttcctactactcctctggttaatctactcgtgcgtaaacctcggcaccggcccgcgcgtgatcgaagagggctcagtaggcggtgggggaaactcctccgtagtctcgcgacactctcgcccacgcggaacaccaaaaccgcaccatcgacggaaatcctccggtcgcgtccgggagacggttgaattgcgacgcgaacgcgtcgtccccgtggtggaggaccaaatcgtagtcgaagagttctctggcgctgtgccagtgcgcagtagaagtcgcagtgtgtcgcgcggcccaccgccgagagttgtaccggttagtgatacggatgatgatgagattgtggtcgaggaggaacggtctacgccccctagacgaccgcgcagagatagcatgaggagccaacggacgagacggagtgatgataggcggagtagtgcgtatagagatgtgagtcggaggaggagtggttcgaggagataa

SEQ ID NO: 36988 - protein, 221 aa, Muscodor strobelii
  misc_feature: SGI Peptide ID NO. 572830
  misc_feature (29)..(115): NCBI GI: 85107083 Blast Desc: NCU07660 [Neurospora crassa OR74A] gi|28923905|gb|EAA33066.1| [Neurospora crassa OR74A]
  misc_feature (25)..(101): NCBI GI: 39951691 Blast Desc: [Magnaporthe grisea 70-15] gi|145020668|gb|EDK04797.1| [Magnaporthe grisea 70-15]
  misc_feature (28)..(162): NCBI GI: 261352509 Blast Desc: [Verticillium albo-atrum VaMs.102]
  misc_feature (41)..(130): NCBI GI: 116196134 Blast Desc: [Chaetomium globosum CBS 148.51] gi|88180578|gb|EAQ88046.1| [Chaetomium globosum CBS 148.51]
  misc_feature (40)..(142): NCBI GI: 189192210 Blast Desc: conserved [Pyrenophora tritici-repentis Pt-1C-BFP] gi|187974050|gb|EDU41549.1| conserved [Pyrenophora tritici-repentis Pt-1C-BFP]
  misc_feature (40)..(180): NCBI GI: 169599681 Blast Desc: SNOG_02664 [Phaeosphaeria nodorum SN15] gi|111068275|gb|EAT89395.1| SNOG_02664 [Phaeosphaeria nodorum SN15]
  misc_feature (26)..(77): NCBI GI: 255941608 Blast Desc: Pc16g12740 [Penicillium chrysogenum Wisconsin 54-1255] gi|211586196|emb|CAP93944.1| Pc16g12740 [Penicillium chrysogenum Wisconsin 54-1255]
  misc_feature (50)..(81): NCBI GI: 256733905 Blast Desc: [Nectria haematococca mpVI 77-13-4]
  misc_feature (25)..(77): NCBI GI: 115492147 Blast Desc: [Aspergillus terreus NIH2624] gi|114197561|gb|EAU39261.1| [Aspergillus terreus NIH2624]
  misc_feature (1)..(75): NCBI GI: 145604645 Blast Desc: [Magnaporthe grisea 70-15] gi|145012619|gb|EDJ97273.1| [Magnaporthe grisea 70-15]
MAPLNRLHIDIGIPIPTITLRSILPSSILPRASPSTVPQTYGGHFGPPPGTVVGIVLGSIAGFLLLLWLIYSCVNLGTGPRVIEEGSVGGGGNSSVVSRHSRPRGTPKPHHRRKSSGRVRETVELRRERVVPVVEDQIVVEEFSGAVPVRSRSRSVSRGPPPRVVPVSDTDDDEIVVEEERSTPPRRPRRDSMRSQRTRRSDDRRSSAYRDVSRRRSGSRR

SEQ ID NO: 36989 - DNA, 897 bp, Muscodor strobelii
  misc_feature: SGI cDNA ID NO. 572831
  misc_feature: Elevated expression when VOC is produced
  misc_feature: Encodes the peptide sequence at SEQ ID NO 36990
atgacagaccaccccctacaaacctacagggcaaactgccactgcgcagcgtacatctacgaagtgacactccccaccatcacagacccatcacaatgcaattgtagcatatgctacaaaaagggcgcgatttgggtgtttcccaaacccgccgatgtcaaattcgtgaagggggatccgaagacgatgacggagtatactttcgggaagaaggcttttgcgcataggttctgtcctacatgcggaagttccatcatggtggtgggacatcttgaaccgcctaaacctggcgaggagaaagagcctgagaatgggattaatgtgaggttgtttcagcacggacaggtcgatttgtggagtattccgttgaagaaattcgatggagcaaatatcatccagcctccctatgacgcgccgaaattcaccggcccggagcccacggcaaagatcgagggtgggaagttgtacactgggagttgtcactgcggagctgtcactttggcagtgaagaacaaaccaattgtcaaagaatctgatgagatgttcatggagtgcaactgcagtttttgtggcaaggccggcgcggtatggaactatcccactaagtcccaagtagtgatccaaggccaagagaatctggggctgtacatagcaggcaacaagacaaccgggaagtcattctgcaagatctgcggtgtgccggtgcataacgagattttgaagtttagcgatgaggaacttgctaagatgacgcaggagaagaaggaatgggtgcttggtggtcagaatctgtgcccgattaatttaaggattattaatgggttggatgtgacggagttgaatacgaagaggttcaatgggtatgagaagctgttgccgctttatgaggagccttag

SEQ ID NO: 36990 - protein, 298 aa, Muscodor strobelii
  misc_feature: SGI Peptide ID NO. 572831
  misc_feature (31)..(120): Pfam Id: PF04828 Pfam Desc: Glutathione-dependent formaldehyde-activating enzyme
  misc_feature (183)..(260): Pfam Id: PF04828 Pfam Desc: Glutathione-dependent formaldehyde-activating enzyme
  misc_feature (31)..(83): Pfam Id: PF04828 Pfam Desc: Glutathione-dependent formaldehyde-activating enzyme
  misc_feature (7)..(298): NCBI GI: 145603382 Blast Desc: MGG_06088 [Magnaporthe grisea 70-15] gi|145011621|gb|EDJ96277.1| MGG_06088 [Magnaporthe grisea 70-15]
  misc_feature (4)..(298): NCBI GI: 85079296 Blast Desc: NCU04342 [Neurospora crassa OR74A] gi|28917382|gb|EAA27087.1| [Neurospora crassa OR74A]
  misc_feature (2)..(281): NCBI GI: 171688400 Blast Desc: protein product [Podospora anserina] gi|170944162|emb|CAP70272.1| protein product [Podospora anserina]
  misc_feature (24)..(286): NCBI GI: 156061777 Blast Desc: SS1G_03034 [Sclerotinia sclerotiorum 1980] gi|154700435|gb|EDO00174.1| SS1G_03034 [Sclerotinia sclerotiorum 1980]
  misc_feature (105)..(289): NCBI GI: 261352510 Blast Desc: conserved [Verticillium albo-atrum VaMs.102]
  misc_feature (135)..(298): NCBI GI: 116196628 Blast Desc: CHGG_04912 [Chaetomium globosum CBS 148.51] gi|88180825|gb|EAQ88293.1| CHGG_04912 [Chaetomium globosum CBS 148.51]
  misc_feature (9)..(286): NCBI GI: 145240555 Blast Desc: An08g08090 [Aspergillus niger] gi|134077446|emb|CAK45700.1| protein product [Aspergillus niger]
  misc_feature (6)..(193): NCBI GI: 154292388 Blast Desc: BC1G_14683 [Botryotinia fuckeliana B05.10] gi|150846162|gb|EDN21355.1| BC1G_14683 [Botryotinia fuckeliana B05.10]
  misc_feature (5)..(148): NCBI GI: 46117070 Blast Desc: FG04377.1 [Gibberella zeae PH-1]
  misc_feature (8)..(139): NCBI GI: 238841194 Blast Desc: DUF636 domain-containing protein [Microsporum canis CBS 113480]
  misc_feature: Useful for introducing or modulating the production of volatile compounds
MTDHPLQTYRANCHCAAYIYEVTLPTITDPSQCNCSICYKKGAIWVFPKPADVKFVKGDPKTMTEYTFGKKAFAHRFCPTCGSSIMVVGHLEPPKPGEEKEPENGINVRLFQHGQVDLWSIPLKKFDGANIIQPPYDAPKFTGPEPTAKIEGGKLYTGSCHCGAVTLAVKNKPIVKESDEMFMECNCSFCGKAGAVWNYPTKSQVVIQGQENLGLYIAGNKTTGKSFCKICGVPVHNEILKFSDEELAKMTQEKKEWVLGGQNLCPINLRIINGLDVTELNTKRFNGYEKLLPLYEEP

SEQ ID NO: 36991 - DNA, 3153 bp, Muscodor strobelii
  misc_feature: SGI EST ID NO. CUFF.88349.0
  misc_feature: Variant of the nucleotide sequence at SEQ ID NO 36989
ccgtgaccaggatcatcgcgaaatccagcctaagaaaagacgttgcacttggactatctgaggtaaaccagtgagatttgaagatgaatcgtatgaaggatccactggaccttccaaatcatcgttactcgttgcagtcgatgactttgttgagggcgctgctcatggtattatcagcttaggtacgctcctcaacgaacgacgtcaacgcctgtctaagcggcggtcagcttgttcgagctgaatggacgtcgcggaagctaatacggattgaacatcctcaagtacgtggcgcagtgtagtaccatagcaaacttctagatatgtttccgaagactagtcaatctgccaagaccgcgaacatataagacaaaccgccgaccacactcttcctccctatcacccacgcccataccctatcctcaactcttctagaatccgttcaaaaacctccaacaaaaccactctaccaaaaatgacagaccaccccctacaaacctacagggcaaactgccactgcgcagcgtacatctacgaagtgacactccccaccatcacagacccatcacaatgcaattgtagcatatgctacaaaaagggcgcgatttgggtgtttcccaaacccgccgatgtcaaattcgtgaagggggatccgaagacgatgacggagtatactttcgggaagaaggcttttgcgcataggttctgtcctacatgcggaagttccatcatggtggtgggacatcttgaaccgcctaaacctggcgaggagaaagagcctgagaatgggattaatgtgaggttgtttcagcacggacaggtcgatttgtggagtattccgttgaagaaattcgatggagcaaatatcatccagcctccctatgacgcgccgaaattcaccggcccggagcccacggcaaagatcgagggtgggaagttgtacactgggagttgtcactgcggagctgtcactttggcagtgaagaacaaaccaattgtcaaagaatctgatgagatgttcatggagtgcaactgcagtttttgtggcaaggccggcgcggtatggaactatcccactaagtcccaagtagtgatccaaggccaagagaatctggggctgtacatagcaggcaacaagacaaccgggaagtcattctgcaagatctgcggtgtgccggtgcataacgagattttgaagtttagcgatgaggaacttgctaagatgacgcaggagaagaaggaatgggtgcttggtggtcagaatctgtgcccgattaatttaaggattattaatgggttggatgtgacggagttgaatacgaagaggttcaatgggtatgagaagctgttgccgctttatgaggagccttagggcgttggttaggtggtgggaggaccatgggtgtaagatacggtagagaaggttataggcttcactccgctaaatcattattttcaaacaaaagctgaaagaaggaataccgagacaaggatggagggagagatcttatgaattgctctgttcttctggcttactttcctctggcttgctttcctccatcgtaaccatcttaaccatctgttctccatcaggctctgccttcatcgtcaacccctttttataccgtgccttatcccagctcggcatcccatcatcatcgaactccgcccactggaagaacgagcagttctccttccctggcgaattacctatatgacacatccagaagtactttccccatgtctccttctttcgctgcacggttcttagaacagctggcagattacacctacaccttggtgtaaacttcgggtggtaattcgccttgtagtctcgatacgtaacattaatccttcgattcccagaaataggatgaggatcgatggcttgcgccggcgcgatgctgtgtttccactcttcttgcatctctgcgtgcatgactaggagagagttgtggggtaagtggatggcgatttgtccttgtgcgttttcgtcttcgacgaagttgttgtctgcgtctttaggcactattttacggacgcggaattctcgcgccacgcccagggagagtgacccgatgacggcgcgtggtccgaggtatgtgagtgtgtcgctgtgataacctactgcttgctgggggccattgtagcagttcacgaatgctgcgtttggtgcccattcgtctggacattgatatcgcagctttttcccgcctggataggctgttgcgatgcggttttggatttccttgttgactgcttcttttaccaatggtcttacttgcgttagatgtggcgtaatcgcacggacatcctaaaagcttgttagttaagtctctttggacaggcaatgagatcccgcgccgtgcatggcgataaatatgtgtaaatcattctacaagtacgactcaccgataaacgtgtgccctggtaataatactcatgcttctgcgcatctatctcagcctccgtcgccacgaagaagctccaggtatgtgggctctgaacgacatgatcgaacagtttgaaagtagcagcgtagaaagttttggactcttctagtagctctcgaagcaagtcatttgctagttccggtgggagaaagttgtgtacaatactacatggtgtgtgctctgcaatgtcctttggatcgtaaagatgaagcgtagcgcctttttttgacagcagcttcgcctttttgggcgattctaacccgtcaggttgtcgcgaggtagatgcgaaagatctcaaggatgtctgtgaccctacggtcggtgcctttttcttgggtccagggggtccgtcgatcagtgcagaagccgcacgttcaaccgagccattttcagccaagagggtgtcaagtaatgcgtcttgcgatattgaagggaataacgacgcaagcatcgccagcttcatctcagtcgattcctcctcgtcattttggatagttggctcatcaacggcagacgacttgcgtttggtgcctctaaggaacgcatccatgttgtctacaggtagtcgattgaagctgcctcatggtcgttgctatgcgcaagcggcatctctcattcgattaatggtggatgaagtcacgcaagaggcagtgaatattagtcatttatagattcatttgcctcctcggaagctctcagc

SEQ ID NO: 36992 - DNA, 1398 bp, Muscodor strobelii
  misc_feature: SGI cDNA ID NO. 572832
  misc_feature: Elevated expression when VOC is produced
  misc_feature: Encodes the peptide sequence at SEQ ID NO 36993
atggatgcgttccttagaggcaccaaacgcaagtcgtctgccgttgatgagccaactatccaaaatgacgaggaggaatcgactgagatgaagctggcgatgcttgcgtcgttattcccttcaatatcgcaagacgcattacttgacaccctcttggctgaaaatggctcggttgaacgtgcggcttctgcactgatcgacggaccccctggacccaagaaaaaggcaccgaccgtagggtcacagacatccttgagatctttcgcatctacctcgcgacaacctgacgggttagaatcgcccaaaaaggcgaagctgctgtcaaaaaaaggcgctacgcttcatctttacgatccaaaggacattgcagagcacacaccatgtagtattgtacacaactttctcccaccggaactagcaaatgacttgcttcgagagctactagaagagtccaaaactttctacgctgctactttcaaactgttcgatcatgtcgttcagagcccacatacctggagcttcttcgtggcgacggaggctgagatagatgcgcagaagcatgagtattattaccagggcacacgtttatcggatgtccgtgcgattacgccacatctaacgcaagtaagaccattggtaaaagaagcagtcaacaaggaaatccaaaaccgcatcgcaacagcctatccaggcgggaaaaagctgcgatatcaatgtccagacgaatgggcaccaaacgcagcattcgtgaactgctacaatggcccccagcaagcagtaggttatcacagcgacacactcacatacctcggaccacgcgccgtcatcgggtcactctccctgggcgtggcgcgagaattccgcgtccgtaaaatagtgcctaaagacgcagacaacaacttcgtcgaagacgaaaacgcacaaggacaaatcgccatccacttaccccacaactctctcctagtcatgcacgcagagatgcaagaagagtggaaacacagcatcgcgccggcgcaagccatcgatcctcatcctatttctgggaatcgaaggattaatgttacgtatcgagactacaaggcgaattaccacccgaagtttacaccaaggtgtaggtgtaatctgccagctgttctaagaaccgtgcagcgaaagaaggagacatggggaaagtacttctggatgtgtcatataggtaattcgccagggaaggagaactgctcgttcttccagtgggcggagttcgatgatgatgggatgccgagctgggataaggcacggtataaaaaggggttgacgatgaaggcagagcctgatggagaacagatggttaagatggttacgatggaggaaagcaagccagaggaaagtaagccagaagaacagagcaattcataa

SEQ ID NO: 36993 - protein, 465 aa, Muscodor strobelii
  misc_feature: SGI Peptide ID NO. 572832
  misc_feature (1)..(421): NCBI GI: 261352511 Blast Desc: GRF zinc finger domain-containing protein [Verticillium albo-atrum VaMs.102]
  misc_feature (22)..(465): NCBI GI: 164423854 Blast Desc: NCU07663 [Neurospora crassa OR74A] gi|157070260|gb|EAA33069.2| conserved [Neurospora crassa OR74A]
  misc_feature (1)..(456): NCBI GI: 116196186 Blast Desc: CHGG_04691 [Chaetomium globosum CBS 148.51] gi|88180604|gb|EAQ88072.1| CHGG_04691 [Chaetomium globosum CBS 148.51]
  misc_feature (1)..(424): NCBI GI: 156061789 Blast Desc: SS1G_03040 [Sclerotinia sclerotiorum 1980] gi|154700441|gb|EDO00180.1| SS1G_03040 [Sclerotinia sclerotiorum 1980]
  misc_feature (1)..(423): NCBI GI: 154292394 Blast Desc: BC1G_14686 [Botryotinia fuckeliana B05.10] gi|150846165|gb|EDN21358.1| BC1G_14686 [Botryotinia fuckeliana B05.10]
  misc_feature (1)..(443): NCBI GI: 225681850 Blast Desc: conserved [Paracoccidioides brasiliensis Pb03]
  misc_feature (1)..(443): NCBI GI: 226288938 Blast Desc: GRF zinc finger domain-containing protein [Paracoccidioides brasiliensis Pb18]
  misc_feature (15)..(443): NCBI GI: 226284402 Blast Desc: GRF zinc finger domain-containing protein [Paracoccidioides brasiliensis Pb01]
  misc_feature (1)..(429): NCBI GI: 256727465 Blast Desc: NECHADRAFT_66333 [Nectria haematococca mpVI 77-13-4]
  misc_feature (74)..(425): NCBI GI: 46121463 Blast Desc: FG05110.1 [Gibberella zeae PH-1]
  misc_feature: Useful for introducing or modulating the production of volatile compounds
MDAFLRGTKRKSSAVDEPTIQNDEEESTEMKLAMLASLFPSISQDALLDTLLAENGSVERAASALIDGPPGPKKKAPTVGSQTSLRSFASTSRQPDGLESPKKAKLLSKKGATLHLYDPKDIAEHTPCSIVHNFLPPELANDLLRELLEESKTFYAATFKLFDHVVQSPHTWSFFVATEAEIDAQKHEYYYQGTRLSDVRAITPHLTQVRPLVKEAVNKEIQNRIATAYPGGKKLRYQCPDEWAPNAAFVNCYNGPQQAVGYHSDTLTYLGPRAVIGSLSLGVAREFRVRKIVPKDADNNFVEDENAQGQIAIHLPHNSLLVMHAEMQEEWKHSIAPAQAIDPHPISGNRRINVTYRDYKANYHPKFTPRCRCNLPAVLRTVQRKKETWGKYFWMCHIGNSPGKENCSFFQWAEFDDDGMPSWDKARYKKGLTMKAEPDGEQMVKMVTMEESKPEESKPEEQSNS

SEQ ID NO: 36994 - DNA, 2400 bp, Muscodor strobelii
  misc_feature: SGI EST ID NO. CUFF.88350.1
  misc_feature: Variant of the nucleotide sequence at SEQ ID NO 36992
gctgagagcttccgaggaggcaaatgaatctataaatgactaatattcactgcctcttgcgtgacttcatccaccattaatcgaatgagagatgccgcttgcgcatagcaacgaccatgaggcagcttcaatcgactacctgtagacaacatggatgcgttccttagaggcaccaaacgcaagtcgtctgccgttgatgagccaactatccaaaatgacgaggaggaatcgactgagatgaagctggcgatgcttgcgtcgttattcccttcaatatcgcaagacgcattacttgacaccctcttggctgaaaatggctcggttgaacgtgcggcttctgcactgatcgacggaccccctggacccaagaaaaaggcaccgaccgtagggtcacagacatccttgagatctttcgcatctacctcgcgacaacctgacgggttagaatcgcccaaaaaggcgaagctgctgtcaaaaaaaggcgctacgcttcatctttacgatccaaaggacattgcagagcacacaccatgtagtattgtacacaactttctcccaccggaactagcaaatgacttgcttcgagagctactagaagagtccaaaactttctacgctgctactttcaaactgttcgatcatgtcgttcagagcccacatacctggagcttcttcgtggcgacggaggctgagatagatgcgcagaagcatgagtattattaccagggcacacgtttatcggatgtccgtgcgattacgccacatctaacgcaagtaagaccattggtaaaagaagcagtcaacaaggaaatccaaaaccgcatcgcaacagcctatccaggcgggaaaaagctgcgatatcaatgtccagacgaatgggcaccaaacgcagcattcgtgaactgctacaatggcccccagcaagcagtaggttatcacagcgacacactcacatacctcggaccacgcgccgtcatcgggtcactctccctgggcgtggcgcgagaattccgcgtccgtaaaatagtgcctaaagacgcagacaacaacttcgtcgaagacgaaaacgcacaaggacaaatcgccatccacttaccccacaactctctcctagtcatgcacgcagagatgcaagaagagtggaaacacagcatcgcgccggcgcaagccatcgatcctcatcctatttctgggaatcgaaggattaatgttacgtatcgagactacaaggcgaattaccacccgaagtttacaccaaggtgtaggtgtaatctgccagctgttctaagaaccgtgcagcgaaagaaggagacatggggaaagtacttctggatgtgtcatataggtaattcgccagggaaggagaactgctcgttcttccagtgggcggagttcgatgatgatgggatgccgagctgggataaggcacggtataaaaaggggttgacgatgaaggcagagcctgatggagaacagatggttaagatggttacgatggaggaaagcaagccagaggaaagtaagccagaagaacagagcaattcataagatctctccctccatccttgtctcggtattccttctttcagcttttgtttgaaaataatgatttagcggagtgaagcctataaccttctctaccgtatcttacacccatggtcctcccaccacctaaccaacgccctaaggctcctcataaagcggcaacagcttctcatacccattgaacctcttcgtattcaactccgtcacatccaacccattaataatccttaaattaatcgggcacagattctgaccaccaagcacccattccttcttctcctgcgtcatcttagcaagttcctcatcgctaaacttcaaaatctcgttatgcaccggcacaccgcagatcttgcagaatgacttcccggttgtcttgttgcctgctatgtacagccccagattctcttggccttggatcactacttgggacttagtgggatagttccataccgcgccggcctgtttgaggggttagtcgaatactaaatgagaggagaagaggaggtagaggcttgtgagtggtatcacctaccttgccacaaaaactgcagttgcactccatgaacatctcatcagattctttgacaattggtttgttcttcactgccaaagtgacagctccgcagtgacaactcccagtgtacaacttcccaccctcgatctttgccgtgggctccgggccggtgaatttcggcgcgtcatagggaggctggatgatatttgctccatcgaatctttcccacgtcatcagtcaagattcccaagatgagcaaactagagggaaatgaaaacatacttcttcaacggaatactccacaaatcgacctgtccgtgctgaaacaacctcacctgaac

SEQ ID NO: 36995 - DNA, 1056 bp, Muscodor strobelii
  misc_feature: SGI cDNA ID NO. 572833
  misc_feature: Encodes the peptide sequence at SEQ ID NO 36996
atggcgtccatgctggaatttcgtacacctggatttaatccctatgccgtcaaatactcgccctattacgattcgcgcatagctgtcgcatctgccgccaactttggtatcgtaggaaatggccgactcttttgcttgggcttggggccacaaggcgtccagatagaaaagacctacgacaccaatgatgcacagtatgatttggcttggtcagaaatcaatgagaaccagctcctcgcggcctgcggtgatggttcgatcaagctctacgatgttaacgtaaacgaatttcctgtaatgaacttccacgagcataagcgcgaaacatttgccgttgcatggagccctgtcaccaaagacacatttgcttcgagttcgtgggatggaactgttaagatttggtcgccgatgaggcaagactctctgaagacactgcctgtcggaaactgtacctacagtaccgcatactgcccttcaaatcccaacattatctccgccgtctcaaccgactcccaccttcgcatcttcgacttacgaacaccttccagcgcccaatatcacctcaccacaaaaataccagtgcaccaactgccgccagtaccgatgcctcctggaatcaaaccacctgcgatgccggccgagatcttaacgcatgactggaacaagtatagggacactgtgattgcgacaggtggtgtagaccgagcaatcaggacctttgatatcaggaatcctacaggcggcccttcttcaattatgatgggtcatgactatgcagtacggagattggcgtggagccctcatgctgccgatattctactcagtgctagctacgatatgactgtacggctatggacagatggatctaccatggcccccgaccaagcctcacccgtgaaaccgggcctgcagctcggtgtcatgaataggcataccgagtttgtgacgggtgtcgattggtgcctgtttggtgtcggtggctgggttgcgacagtagggtgggatgagaggcttctgctatgggatgccagcatgatgctccaaggacggggttga

SEQ ID NO: 36996 - protein, 351 aa, Muscodor strobelii
  misc_feature: SGI Peptide ID NO. 572833
  misc_feature (247)..(286): Pfam Id: PF00400 Pfam Desc: WD domain, G-beta repeat
  misc_feature (96)..(135): Pfam Id: PF00400 Pfam Desc: WD domain, G-beta repeat
  misc_feature (302)..(342): Pfam Id: PF00400 Pfam Desc: WD domain, G-beta repeat
  misc_feature (3)..(347): NCBI GI: 261352512 Blast Desc: peroxisomal targeting signal 2 receptor [Verticillium albo-atrum VaMs.102]
  misc_feature (1)..(349): NCBI GI: 85107091 Blast Desc: NCU07662 [Neurospora crassa OR74A] gi|24061757|gb|AAN39560.1| peroxisome biogenesis factor 7 [Neurospora crassa] gi|28923907|gb|EAA33068.1| NCU07662 crassa
  misc_feature (1)..(348): NCBI GI: 171690428 Blast Desc: protein product [Podospora anserina] gi|111607547|gb|ABH10691.1| PTS2-targeted peroxisomal matrix protein import [Podospora anserina] gi|170945162|emb|CAP71273.1|
  misc_feature (2)..(348): NCBI GI: 170083793 Blast Desc: peroxisome targeting signal type 2 receptor [Magnaporthe grisea]
  misc_feature (1)..(349): NCBI GI: 116196188 Blast Desc: CHGG_04692 [Chaetomium globosum CBS 148.51] gi|88180605|gb|EAQ88073.1| CHGG_04692 [Chaetomium globosum CBS 148.51]
  misc_feature (1)..(350): NCBI GI: 256726896 Blast Desc: [Nectria haematococca mpVI 77-13-4]
  misc_feature (1)..(346): NCBI GI: 46121461 Blast Desc: FG05109.1 [Gibberella zeae PH-1]
  misc_feature (2)..(348): NCBI GI: 39951677 Blast Desc: MGG_01481 [Magnaporthe grisea 70-15] gi|145020676|gb|EDK04805.1| MGG_01481 [Magnaporthe grisea 70-15]
  misc_feature (4)..(347): NCBI GI: 119186553 Blast Desc: CIMG_03324 [Coccidioides immitis RS]
  misc_feature (4)..(347): NCBI GI: 240108529 Blast Desc: peroxisome biogenesis factor 7, [Coccidioides posadasii C735 delta SOWgp]
  misc_feature (54)..(350): SWISSPROT Homolog: EC 2.3.1.48 Histone acetyltransferase
MASMLEFRTPGFNPYAVKYSPYYDSRIAVASAANFGIVGNGRLFCLGLGPQGVQIEKTYDTNDAQYDLAWSEINENQLLAACGDGSIKLYDVNVNEFPVMNFHEHKRETFAVAWSPVTKDTFASSSWDGTVKIWSPMRQDSLKTLPVGNCTYSTAYCPSNPNIISAVSTDSHLRIFDLRTPSSAQYHLTTKIPVHQLPPVPMPPGIKPPAMPAEILTHDWNKYRDTVIATGGVDRAIRTFDIRNPTGGPSSIMMGHDYAVRRLAWSPHAADILLSASYDMTVRLWTDGSTMAPDQASPVKPGLQLGVMNRHTEFVTGVDWCLFGVGGWVATVGWDERLLLWDASMMLQGRG

SEQ ID NO: 36997 - DNA, 1621 bp, Muscodor strobelii
  misc_feature: SGI EST ID NO. CUFF.88343.0
  misc_feature: Variant of the nucleotide sequence at SEQ ID NO 36995
cctgcatgtgtcgccattttcatagaatcgctctccccgaatgtgaaaacgacgtcactttgcggtctgaacggccttcatttggcttttatttctgagtagaccatggcgtccatgctggaatttcgtacacctggatttaatccctatgccgtcaaatactcgccctattacgattcgcgcatagctgtcgcatctgccgccaactttggtatcgtaggaaatggccgactcttttgcttgggcttggggccacaaggcgtccagatagaaaagacctacgacaccaatgatgcacagtatgatttggcttggtcagaaatcaatgagaaccagctcctcgcggcctgcggtgatggttcgatcaagctctacgatgttaacgtaaacgaatttcctgtaatgaacttccacgagcataagcgcgaaacatttgccgttgcatggagccctgtcaccaaagacacatttgcttcgagttcgtgggatggaactgttaagattgtatgcatacggacatccttgagcttgccagactggatactaaagcgcgacttgcaatagtggtcgccgatgaggcaagactctctgaagacactgcctgtcggaaactgtacctacagtaccgcatactgcccttcaaatcccaacattatctccgccgtctcaaccgactcccaccttcgcatcttcgacttacgaacaccttccagcgcccaatatcacctcaccacaaaaataccagtgcaccaactgccgccagtaccgatgcctcctggaatcaaaccacctgcgatgccggccgagatcttaacgcatgactggaacaagtatagggacactgtgattgcgacaggtggtgtagaccgagcaatcaggacctttgatatcaggaatcctacaggcggcccttcttcaattatgatgggtcatgactatgcagtacggagattggcgtggagccctcatgctgccgatattctactcagtgctagctacgatatgactgtacggctatggacagatggatctaccatggcccccgaccaagcctcacccgtgaaaccgggcctgcagctcggtgtcatgaataggcataccgagtttgtgacgggtgtcgattggtgcctgtttggtgtcggtggctgggttgcgacagtagggtgggatgagaggcttctgctatgggatgccagcatgatgctccaaggacggggttgagctctcaggttgtgggatgcaacgtgtgtgttggggactctgggatggtatataaaagcattgacaggcgttcgggcgaccgcttttgggctatggcatgataccatgtaggtcatatttgagcaatgagcgacggatagacatatttgacattaagtaatgttgcgagatggcatattgtatgttatttccttaattcgagatgcatgcgtacccgacctccatctcaaatagagttataagatacattataggcagtgattggagagatggcgtaaaacgaattgtattccgcgcgttgaagttttcatagtcgcattgaagtgtgtgagtgaaagcacagtggtattggtattggacaagctgtaaggggaaaagacggaaaaaattaggtaccgta

SEQ ID NO: 36998 - DNA, 1152 bp, Muscodor strobelii
  misc_feature: SGI cDNA ID NO. 572834
  misc_feature: Encodes the peptide sequence at SEQ ID NO 36999
atgcctgccaacgcccgcacgctcgagaacactgacggccttttcatcttgacggaaatgttcatggccctttatacggcgaaggctgtcaggtccaagcttgttgaccttctctatttctaccttatgcccaaggcgccgtccatcccatctgccaatggccgccggcgctgccactctgatcgacgccctaaacacagaaggatggataaaaagttgttacacaacttctccgcgcgatcgtcttcgggtgagatggtatgccatcagctactcccggtcgagccgccggctcctcatgtactagaaggccgtgcttctagtgccgaggtggcagaggagatgagacaacttgtcagcagtctgggtgaccacctggccataattagtgagcaggtagcagacatggagacgcgacgtggtggaagcgacaatgagactgacgatgaggatctcgatacccatactaccggaacctcgatgaatccatccgtctatcataatgccgtccatctttggaagatgtcgagagcgacgacaatgattctccaagccctgcaagcaataggagtggaacatgtcgcaggaagatgtgtccccgggaagaaaggccttgccagcttagaggacgatgaattcatcgagtcattcacgactccaatcgcctctctttaccagaaggtgaaggaattcgaacgcgatggctacgctgttgacgctctacccgccgatgccaaccacaacccaaccaagtgcgaataccgcagcgattccgagctgcgcatgtgggatcacatcctgacccatgatgctattgagcaaggtgccaatggtctttggaccaacgaaatgcgccaccaactggtggaagcggtcctccagcacggccaagtcgtccgcggcacggatcccggatcctttgtgaaggtcgcctcgggcagatggccctttatcgtgcgagctctgttggatcagcataacttcacagtcactctcaccggcttgcacagagtggtctcgtatctgccgagagcacttctcgccgacgctaatttggcagtgccgcaggcaaacacgcctctctcacccgaggacgatcgcgcggctatggtcaatcttgggccacggttccgagccgttaaggccgtgtag

SEQ ID NO: 36999 - protein, 383 aa, Muscodor strobelii
  misc_feature: SGI Peptide ID NO. 572834
  misc_feature (2)..(137): NCBI GI: 154271676 Blast Desc: conserved [Ajellomyces capsulatus NAm1] gi|150409361|gb|EDN04811.1| conserved [Ajellomyces capsulatus NAm1]
  misc_feature (2)..(53): NCBI GI: 225557928 Blast Desc: cell division control protein [Ajellomyces capsulatus G186AR]
  misc_feature (2)..(53): NCBI GI: 240272924 Blast Desc: cell division control protein [Ajellomyces capsulatus H143]
  misc_feature (2)..(53): NCBI GI: 226280624 Blast Desc: cell division control protein [Paracoccidioides brasiliensis Pb01]
  misc_feature (2)..(55): NCBI GI: 256732187 Blast Desc: [Nectria haematococca mpVI 77-13-4]
  misc_feature (2)..(55): NCBI GI: 46137169 Blast Desc: FG10100.1 [Gibberella zeae PH-1]
  misc_feature (2)..(84): NCBI GI: 156044022 Blast Desc: SS1G_10114 [Sclerotinia sclerotiorum 1980] gi|154694503|gb|EDN94241.1| SS1G_10114 [Sclerotinia sclerotiorum 1980]
  misc_feature (2)..(53): NCBI GI: 119181723 Blast Desc: CIMG_05947 [Coccidioides immitis RS]
  misc_feature (2)..(53): NCBI GI: 240109034 Blast Desc: conserved [Coccidioides posadasii C735 delta SOWgp]
  misc_feature (2)..(53): NCBI GI: 261198603 Blast Desc: cell division control protein 14 [Ajellomyces dermatitidis SLH14081] gi|239594855|gb|EEQ77436.1| cell division control protein 14 [Ajellomyces dermatitidis SLH14081] cell 14
MPANARTLENTDGLFILTEMFMALYTAKAVRSKLVDLLYFYLMPKAPSIPSANGRRRCHSDRRPKHRRMDKKLLHNFSARSSSGEMVCHQLLPVEPPAPHVLEGRASSAEVAEEMRQLVSSLGDHLAIISEQVADMETRRGGSDNETDDEDLDTHTTGTSMNPSVYHNAVHLWKMSRATTMILQALQAIGVEHVAGRCVPGKKGLASLEDDEFIESFTTPIASLYQKVKEFERDGYAVDALPADANHNPTKCEYRSDSELRMWDHILTHDAIEQGANGLWTNEMRHQLVEAVLQHGQVVRGTDPGSFVKVASGRWPFIVRALLDQHNFTVTLTGLHRVVSYLPRALLADANLAVPQANTPLSPEDDRAAMVNLGPRFRAVKAV

SEQ ID NO: 37000 - DNA, 1179 bp, Muscodor strobelii
  misc_feature: SGI cDNA ID NO. 572835
  misc_feature: Encodes the peptide sequence at SEQ ID NO 37001
atgaatgtgaggcctgccgaccacactcactcctggaaggtcttcgtgaagggccccgaagacactgatgtcttctattggctgcgtcgtgtgcagttcaagcttcacgagtcgatccctaaccacttgcgaactatcgacgccgagactattatcaaggagaatgaggctgccgccaagtcgggcaagaccagaccagcactaccatccaaagagctaagcagcttgaactgggtaagaggtcttccccgcgcacctccatacaccaatatcaggaccgattctctggatgccctgggactaacgaacaaaatctggcaagaagccggtgaaggagtttgctgttcacgagactggctggatgtcccaattcgctataatgagctcggacttgcttcccgccagaagatctggcagaatctctgcggaaaggtcccaggcaactttatggtcaatcagaaagacttccagaagcttgccagacaaccccttaatggtcgccagatcaagaatgcatcaagctgtattatgacagcaagagcggcgagaagactggccctaggcagagggcagtggcacaacttcaagtctagcatcgagggcggtggagatgatacagccatgccacggcgagtccccgattctcatcaaaatccacactcattactaagcgaagatgatggagcctttggagcgtctcctgaagctggatgcagaatcagcctcgtgtgggagcgttggtccatggatcaccggagtggcatgtgttcagtgagggaaagtacacgtagggagggaagtattggctctggagtgccagctccgtctgctctagcagaagctctcacgcttcaccagctaacctcacttacactgcgtaactgtcccggagcgaggggctttatttcagaactccgtcacgctatcgatgaagataagccgatcttcccagagcttccccgcggtgccatcgaggagttgcagaatgttggtaaccaggttcgctccacgcgactgatgccgccccgccgcaacacccgccctgttggcgacaaggccaacgacaagggcagccagtcctccccccacgtcgtccacgacaacactccctacgacaggcccgctgagcctgccgccgaccccagtgtccctgacgctgaagaaattgccgaggcctga

SEQ ID NO: 37001 - protein, 392 aa, Muscodor strobelii
  misc_feature: SGI Peptide ID NO. 572835
  misc_feature (9)..(46): Pfam Id: PF03366 Pfam Desc: YEATS family
  misc_feature (5)..(49): NCBI GI: 39940124 Blast Desc: MGG_05178 [Magnaporthe grisea 70-15] gi|145010558|gb|EDJ95214.1| MGG_05178 [Magnaporthe grisea 70-15]
  misc_feature (5)..(49): NCBI GI: 261360381 Blast Desc: YEATS domain-containing protein [Verticillium albo-atrum VaMs.102]
  misc_feature (5)..(48): NCBI GI: 171685860 Blast Desc: protein product [Podospora anserina] gi|170942891|emb|CAP68544.1| protein product [Podospora anserina]
  misc_feature (5)..(49): NCBI GI: 116207358 Blast Desc: CHGG_02972 [Chaetomium globosum CBS 148.51] gi|88183569|gb|EAQ91037.1| CHGG_02972 [Chaetomium globosum CBS 148.51]
  misc_feature (5)..(49): NCBI GI: 46124719 Blast Desc: FG06737.1 [Gibberella zeae PH-1] gi|84027754|sp|Q4I7S1.1|AF9_GIBZE RecName: Full=Protein AF-9 homolog
  misc_feature (5)..(48): NCBI GI: 85087105 Blast Desc: NCU00359 [Neurospora crassa OR74A] gi|74614354|sp|Q7RZK7.1|AF9_NEUCR RecName: Full=Protein AF-9 homolog gi|28918925|gb|EAA28594.1| NCU00359 [Neurospora crassa
  misc_feature (2)..(49): NCBI GI: 256732750 Blast Desc: [Nectria haematococca mpVI 77-13-4]
  misc_feature (5)..(47): NCBI GI: 156044949 Blast Desc: SS1G_09663 [Sclerotinia sclerotiorum 1980] gi|154694058|gb|EDN93796.1| SS1G_09663 [Sclerotinia sclerotiorum 1980]
  misc_feature (5)..(47): NCBI GI: 115492437 Blast Desc: conserved [Aspergillus terreus NIH2624] gi|114197706|gb|EAU39406.1| conserved [Aspergillus terreus NIH2624]
  misc_feature (5)..(47): NCBI GI: 119500550 Blast Desc: histone acetyltransferase subunit (Yaf9), [Neosartorya fischeri NRRL 181] gi|119415197|gb|EAW25135.1| histone acetyltransferase subunit (Yaf9), [Neosartorya fischeri NRRL 181]
MNVRPADHTHSWKVFVKGPEDTDVFYWLRRVQFKLHESIPNHLRTIDAETIIKENEAAAKSGKTRPALPSKELSSLNWVRGLPRAPPYTNIRTDSLDALGLTNKIWQEAGEGVCCSRDWLDVPIRYNELGLASRQKIWQNLCGKVPGNFMVNQKDFQKLARQPLNGRQIKNASSCIMTARAARRLALGRGQWHNFKSSIEGGGDDTAMPRRVPDSHQNPHSLLSEDDGAFGASPEAGCRISLVWERWSMDHRSGMCSVRESTRREGSIGSGVPAPSALAEALTLHQLTSLTLRNCPGARGFISELRHAIDEDKPIFPELPRGAIEELQNVGNQVRSTRLMPPRRNTRPVGDKANDKGSQSSPHVVHDNTPYDRPAEPAADPSVPDAEEIAEA

SEQ ID NO: 37002 - DNA, 690 bp, Muscodor strobelii
  misc_feature: SGI cDNA ID NO. 572836
  misc_feature: Encodes the peptide sequence at SEQ ID NO 37003
atggccagctgcatagtgtctattagtattttatttcttttgaagctaatcaaacccgaagggatagcctcaacccaaaacacggccaaacagtcatcgcaaaaaagcagagcccctaatgctttagcacaaaactctgagctgcagagtatcttgccagagcttccccacggtgccacccaggtggtgcagaatgttggcaaccagtttggctcggtcgacgacgttcctgcggatggcactcctcgtgaacctcgttctatgcccgctccccgtcaggacggcccggagcagcagcagcctcgataccaaaccttgacccaagaccaagcccgaaaccttctggaccagccagccgtgttcatccccgttaaccccgacactcattttgtgtccaacgacgaccctgctctgcacgcactgatcacacaaccgcctgtccatgcttgggaatatgttgggaaggcctgtacctgcgtacgcagatgcaccgtcaacaatataaacgcttgggagtatggtgcccctcccgcccaaatgcacgagcctgacacccgaccactggctgagattccctacaacgaagactatgacgattacgaggatgatgatattggctcgctgcccaatcattatgaacctattcctcatgtcggtcgtcttgcacgtcacgcgccccagcctgtctga

SEQ ID NO: 37003 - protein, 229 aa, Muscodor strobelii
  misc_feature: SGI Peptide ID NO. 572836
MASCIVSISILFLLKLIKPEGIASTQNTAKQSSQKSRAPNALAQNSELQSILPELPHGATQVVQNVGNQFGSVDDVPADGTPREPRSMPAPRQDGPEQQQPRYQTLTQDQARNLLDQPAVFIPVNPDTHFVSNDDPALHALITQPPVHAWEYVGKACTCVRRCTVNNINAWEYGAPPAQMHEPDTRPLAEIPYNEDYDDYEDDDIGSLPNHYEPIPHVGRLARHAPQPV

SEQ ID NO: 37004 - DNA, 993 bp, Muscodor strobelii
  misc_feature: SGI cDNA ID NO. 572837
  misc_feature: Encodes the peptide sequence at SEQ ID NO 37005
atgcgcctcctcaatgtatcgaccctggaattgacatctttctataatgagcagacccgaccagaatatgcaattctgtctcacacatggctttccgatgaggaagaagtgagttttcaagatttagaaagatatcacgaggctatcgcacatgatgaagccgcagtggcagaatcgattgcatgccgtcccggatttggaaagattcaaggtttctgtaacctcacgtcgcaatcattcgccctacagtgggcttgggtcgacacttgctgtattgacaagcgaagcagctcagagttatcggaatcaatcaattccatgttcaaatggtaccagaaatcaagtatctgtgttgtcttcatgcaagatgttgaagcacctgatcatgaagatttgatgtttcgtaatagtaaatggttcaagagaggctggacactccaagagctgcttgcaccacagagagagcttctctttcacgactcgcagtggaatttcttgggcaatttgaaaaaggacactcgagtcaaagatcttgtaagcgaactcacggagattcccaccgcttttcttggagagacaccattatcagaagcttgcgttgcgaaaaagatgtcttgggcatcgaaaagagagacaaagagtgccgaggaccgtgcatattcattgatgggtatattcgacatctccatgccgttattgtatggcgagggtgaccgagcatttattcgtcttcaggagcacatcatcaatcagacacacgatcattctatccttgcctggggccactgcgcaccatcgccatctcgaaatcatcaccacgaggagcacgttggcgcactcgcagtatctcctgctgactatgttgattgtggggactttgagaaagcatccggattccttgaattcaatggcaatttggagttccaggtcacaacggcaggaattcgatttggcgccaatgtggctcatttgcctcaagattgccgtgggtaa

SEQ ID NO: 37005 - protein, 330 aa, Muscodor strobelii
  misc_feature: SGI Peptide ID NO. 572837
  misc_feature (23)..(148): Pfam Id: PF06985 Pfam Desc: Heterokaryon incompatibility protein (HET)
  misc_feature (86)..(120): Pfam Id: PF06985 Pfam Desc: Heterokaryon incompatibility protein (HET)
  misc_feature (134)..(148): Pfam Id: PF06985 Pfam Desc: Heterokaryon incompatibility protein (HET)
  misc_feature (1)..(291): NCBI GI: 238507085 Blast Desc: conserved [Aspergillus flavus NRRL3357] gi|220689457|gb|EED45808.1| conserved [Aspergillus flavus NRRL3357]
  misc_feature (1)..(291): NCBI GI: 169786143 Blast Desc: [Aspergillus oryzae RIB40] gi|83776280|dbj|BAE66399.1| protein product [Aspergillus oryzae]
  misc_feature (1)..(319): NCBI GI: 46139697 Blast Desc: FG11363.1 [Gibberella zeae PH-1]
  misc_feature (1)..(293): NCBI GI: 145244357 Blast Desc: An11g06570 [Aspergillus niger] gi|134079325|emb|CAK96954.1| protein product [Aspergillus niger]
  misc_feature (1)..(317): NCBI GI: 238485594 Blast Desc: ankyrin repeat-containing protein, [Aspergillus flavus NRRL3357] gi|220698914|gb|EED55253.1| ankyrin repeat-containing protein, [Aspergillus flavus NRRL3357]
  misc_feature (1)..(315): NCBI GI: 256720502 Blast Desc: NECHADRAFT_55867 [Nectria haematococca mpVI 77-13-4]
  misc_feature (1)..(328): NCBI GI: 145605569 Blast Desc: MGG_09177 [Magnaporthe grisea 70-15] gi|145013388|gb|EDJ98029.1| MGG_09177 [Magnaporthe grisea 70-15]
  misc_feature (1)..(290): NCBI GI: 171689682 Blast Desc: protein product [Podospora anserina] gi|170944803|emb|CAP70915.1| protein product [Podospora anserina]
  misc_feature (1)..(315): NCBI GI: 169776259 Blast Desc: [Aspergillus oryzae RIB40] gi|83771331|dbj|BAE61463.1| protein product [Aspergillus oryzae]
  misc_feature (1)..(260): NCBI GI: 256720831 Blast Desc: NECHADRAFT_28122 [Nectria haematococca mpVI 77-13-4]
MRLLNVSTLELTSFYNEQTRPEYAILSHTWLSDEEEVSFQDLERYHEAIAHDEAAVAESIACRPGFGKIQGFCNLTSQSFALQWAWVDTCCIDKRSSSELSESINSMFKWYQKSSICVVFMQDVEAPDHEDLMFRNSKWFKRGWTLQELLAPQRELLFHDSQWNFLGNLKKDTRVKDLVSELTEIPTAFLGETPLSEACVAKKMSWASKRETKSAEDRAYSLMGIFDISMPLLYGEGDRAFIRLQEHIINQTHDHSILAWGHCAPSPSRNHHHEEHVGALAVSPADYVDCGDFEKASGFLEFNGNLEFQVTTAGIRFGANVAHLPQDCRG

SEQ ID NO: 37006 - DNA, 924 bp, Muscodor strobelii
  misc_feature: SGI cDNA ID NO. 572838
  misc_feature: Encodes the peptide sequence at SEQ ID NO 37007
atggcaatcaatattggtactgccaataccacttcatccctgatctcagaacgggctactttacctacaatagcacaactcactaccttcatacaatcagtctttccccttcgcaacaatgatactaaattcgactaccacgtgcctcgctcctggaaattcaatgctcggcaaagcgtcacgtcccgagtcgttctgagcatcacacctacagaaggcttctacacctctctcgcagcagtatcttcgtcaccatattcagcgcctctggcattcctacatagaccatggcagctccatcgtcgacgagttcctcgtcacgcgacagtgctgtcttgccacaagggtttcgatgaagtcctcactgtcggaaataatgcgattttggcttcgctcttaggcatggatctcacgcgcagcggcgtgatacagggatataagggagaccctgagcgcacaatagggattgtcgggcctgtgtcgagtagatcacgcacagatatggtagatttgatcaaggcgcagttctcatctgtggagggctgtttcggggtcgacgaagatggcgatgcagaggacggcgagagcacagagatcactactttggcgattatgaacgcgtttcatcccgaggaagtcgagagagtaattgaactgaggaaacagctaggtttggcgtcatcggaagaaccacacggcaaaggcgtgttgtatctcacgggagcagtgagggagccaggtttgcaggcggcgcttgagaaggggatggtcgttgtttgtgttgggcatcgaacttgtgaggaatgggggattcggtatttgggcaggctactgcgagatacttggccttcacttggggttgatgtcattttggaagatgaggagatcccaagtgttcaggataggaatttagtcgaacgataa

SEQ ID NO: 37007 - protein, 307 aa, Muscodor strobelii
  misc_feature: SGI Peptide ID NO. 572838
  misc_feature (22)..(296): NCBI GI: 169596418 Blast Desc: SNOG_00970 [Phaeosphaeria nodorum SN15] gi|111071345|gb|EAT92465.1| SNOG_00970 [Phaeosphaeria nodorum SN15]
  misc_feature (92)..(278): NCBI GI: 284041077 Blast Desc: protein of function DUF34 [Spirosoma linguale DSM 74] gi|283820370|gb|ADB42208.1| protein of function DUF34 [Spirosoma linguale DSM 74]
  misc_feature (92)..(289): NCBI GI: 220908579 Blast Desc: protein of function DUF34 [Cyanothece sp. PCC 7425] gi|219865190|gb|ACL45529.1| protein of function DUF34 [Cyanothece sp. PCC 7425]
  misc_feature (87)..(290): NCBI GI: 15807453 Blast Desc: DR_2466 [Deinococcus radiodurans R1] gi|6460287|gb|AAF12010.1|AE002076_2 conserved [Deinococcus radiodurans R1]
  misc_feature (21)..(293): NCBI GI: 159899756 Blast Desc: Haur_3238 [Herpetosiphon aurantiacus ATCC 23779] gi|159892795|gb|ABX05875.1| protein of function DUF34 [Herpetosiphon aurantiacus ATCC 23779]
MAINIGTANTTSSLISERATLPTIAQLTTFIQSVFPLRNNDTKFDYHVPRSWKFNARQSVTSRVVLSITPTEGFYTSLAAVSSSPYSAPLAFLHRPWQLHRRRVPRHATVLSCHKGFDEVLTVGNNAILASLLGMDLTRSGVIQGYKGDPERTIGIVGPVSSRSRTDMVDLIKAQFSSVEGCFGVDEDGDAEDGESTEITTLAIMNAFHPEEVERVIELRKQLGLASSEEPHGKGVLYLTGAVREPGLQAALEKGMVVVCVGHRTCEEWGIRYLGRLLRDTWPSLGVDVILEDEEIPSVQDRNLVER

SEQ ID NO: 37008 - DNA, 3083 bp, Muscodor strobelii
  misc_feature: SGI EST ID NO. CUFF.88419.0
  misc_feature: Variant of the nucleotide sequence at SEQ ID NO 37006
ttacgctatcttttcaacgtgtccgatgacagcagaaactaacgtatatattctacctcttgccattcagacttggtcggcgactattagacttgagggtcttgtcttgatacctgcgaaccctaagtcaggaaagacatacagtcgtattggcatggtaatgttgtctttggtacatgggaatagggatattgatccgcgggatgttacagaatcagagcttgttgatccgcgggatgttacagaattagagcttgaggaagcgaaagagagtcttgcatcacatctttcgagtctatccgttcacgatattgtcttggtctagttcacttaaggaatagcttggcatatatcgatgtgagaaaaccatgtctatctccatataccgagtttttcgtaagcctagtcactggcattgcttcgcgcactcattgaatggaaagacaattcattatttcccctagctaaatcaaatgtacttctcgatttgccggccaccaggctacatcctacataacgtcattgatccagatcatcacacgctagccttggaccctgaattacttccgtctttagagaaagcgccgtattaaaaccattcggaagaaatcgaattggtggtatttctccatttaaactgcttcggtattacaagcgctagtcatggcaatcaatattggtactgccaataccacttcatccctgatctcagaacgggctactttacctacaatagcacaactcactaccttcatacaatcagtctttccccttcgcaacaatgatactaaattcgactaccacgtgcctcgctcctggaaattcaatgctcggcaaagcgtcacgtcccgagtcgttctgagcatcacacctacagaaggcttctacacctctctcgcagcagtatcttcgtcaccatattcagcgcctctggcattcctacatagaccatggcagctccatcgtcgacgagttcctcgtcacgcgacagtgctgtcttgccacaagggtttcgatgaagtcctcactgtcggaaataatgcgattttggcttcgctcttaggcatggatctcacgcgcagcggcgtgatacagggatataagggagaccctgagcgcacaatagggattgtcgggcctgtgtcgagtagatcacgcacagatatggtagatttgatcaaggcgcagttctcatctgtggagggctgtttcggggtcgacgaagatggcgatgcagaggacggcgagagcacagagatcactactttggcgattatgaacgcgtttcatcccgaggaagtcgagagagtaattgaactgaggaaacagctaggtttggcgtcatcggaagaaccacacggcaaaggcgtgttgtatctcacgggagcagtgagggagccaggtttgcaggcggcgcttgagaaggggatggtcgttgtttgtgttgggcatcgaacttgtgaggaatgggggattcggtatttgggcaggctactgcgagatacttggccttcacttggggttgatgtcattttggaagatgaggagatcccaagtgttcaggataggaatttagtcgaacgataaatatcttgtacagtatattcgcactgtgatttgaagccatatcgcatgtcaccttggatgaccgcattacattaaaaatttccttaggttctcaattttgacctcctacagcgatgacagcaggcatgataggttgtagtatggctggcttttcgatgctagcattatacaaaaatgctatgttggtttatattgagatggacgtcgagcacagtaagcccgatcggaagtggaattacttgaaaagatcggcgtgatgaccgggactatgatttacccctaagtatcgactggaaatatgacccagtcagggccgatctacatttgctgtatatcaaaaatttgaaggtctcagatagtttttgtacgattgtgcggtgagtgcgaatatcagtgacgtacagaagaggaagaactccgaagtgtcgaggtacaagatggatgggctaactccactccttcattcagttcacgcacccatcggaaggaaaagagaacgactttcagataaactgcattgtcttgaactctttcctcgtaatctaactcgtacttacacttgttaatatgtttatttctggtatcaccataaacacgctgatccatgttgccgtaatattatgccacattcaccacagtggcgcctatagtagtgattcacacgaggagtcaacgacaacgactcttggaacagcaagtgcattacagtggaacgatattgcaaactcggatcagcaagttataacgcacaatataacgcccgatgagagctcaaattccttccctactatcgcatcgtcaacacgtgagcactggatgcgccgtgccattcaagcgctttcagatcttgcatcaccttgtccctacgcagcgttcgggtccgttatcgtcaatcacaccgacacctcctcatctcctcttggtcgtctcatttgtattggtgccaatgcggcaatcaaccaaggcaatccgactctgcacggggagatagaagccatcaataactgctctaaggtactgcagagtcccgctttcggcctcagtccagaggctgcgatactcgccctcagcgatctgacactctatacgactgctgagccatgccctatgtgcgcaagtgccattcgctggtctcgatttcgcgagtgtgtatatggcaccagtatcgagaccctgagacgacttggttggaatcaactggaagtgtctagtcgggaaatattcgaacgaagcctgctcttgtcgccaacaacgtcactggttccggatgtgctgacggctgagacggatcccttgttttcttggcaggatgatgtccatgctccgtgtccagattcgtgtactagggatgatactggcacatgtgcgcctgtttgatcaacgggatatctttcgaagctcaattgaatataaattgtaaaggctgtgattagaaatgtcttaatactaaggacttaaaaacattgactagcaaagatgaagcaattgttccccat

SEQ ID NO: 37009 - DNA, 1338 bp, Muscodor strobelii
  misc_feature: SGI cDNA ID NO. 572839
  misc_feature: Encodes the peptide sequence at SEQ ID NO 37010
atgctatggacatatgcagaagactccaaatcgaatatatctggattgactcgctctgtatcatccaaggcaacgaagacggattggaaagagcagtctgaacagattcaaaacatatatgagaatgcatatgtcacgatcgccgctaccaagtcccaagacggtgaaggtggatgctactcaaaggctgatctagatggtggtttccgctgctggccagtcatggagggattggtatatgtccatctaagtctgcccagattcagccttgaacatctagacgaatggccactcctcactagaggttggatctaccaggaaatgcaagtctcgccaagggttatacattttggatcacgggaagtgatatggcagtgccgtacatgtagacgaagtgagagcatgatcaacgatgatgaaagtaaatcaacattcactgcacagcgactctactcagggacagatggctggtataatgcggtcactgaatactcggctctatccctcacctttgagaaggatagatttgcggcgctggcagccattagtctgcgtgaggcgaataaaagaggtcccgatgatgtttattttctcggactttggaagacgacatttcgaagagatcttctctggcaattggccgatccacactcgcgtggaaaggccagaaggagggcattagggaaagccccgacctggtcctgggcatctgtcatgtctcgcgtcagatggattttgataggtcatactgtatttgagggtcagcattttcatggtcaagatcgcacagagaatcagggccagcaatttcatgatctggattgcacagagattctggacattgacattcgctacattggatcacctttcttaggagactacgatacagcagaacttaagatccgcggtcccttgattcggactacattgcgtgcactagcttataaaggctctgattattctttccctcttggaggaaaacgattcgaccctagacttattactgactacgattacgctatcttttcaacgtgtccgatgacagcagaaactaacgtatatattctacctcttgccattcagacttggtcggcgactattagacttgagggtcttgtcttgatacctgcgaaccctaagtcaggaaagacatacagtcgtattggcatggtaatgttgtctttggtacatgggaatagggatattgatccgcgggatgttacagaatcagagcttgttgatccgcgggatgttacagaattagagcttgaggaagcgaaagagagtcttgcatcacatctttcgagtctatccgttcacgatattgtcttggtctag

SEQ ID NO: 37010 - protein, 445 aa, Muscodor strobelii
  misc_feature: SGI Peptide ID NO. 572839
  misc_feature (23)..(307): NCBI GI: 256721365 Blast Desc: NECHADRAFT_82410 [Nectria haematococca mpVI 77-13-4]
  misc_feature (28)..(307): NCBI GI: 256725280 Blast Desc: NECHADRAFT_82999 [Nectria haematococca mpVI 77-13-4]
  misc_feature (25)..(309): NCBI GI: 189188512 Blast Desc: tol protein [Pyrenophora tritici-repentis Pt-1C-BFP] gi|187972201|gb|EDU39700.1| tol protein [Pyrenophora tritici-repentis Pt-1C-BFP]
  misc_feature (16)..(395): NCBI GI: 169608838 Blast Desc: SNOG_07504 [Phaeosphaeria nodorum SN15] gi|111063850|gb|EAT84970.1| SNOG_07504 [Phaeosphaeria nodorum SN15]
  misc_feature (28)..(391): NCBI GI: 256721585 Blast Desc: NECHADRAFT_78531 [Nectria haematococca mpVI 77-13-4]
  misc_feature (28)..(307): NCBI GI: 189192244 Blast Desc: conserved [Pyrenophora tritici-repentis Pt-1C-BFP] gi|187974067|gb|EDU41566.1| conserved [Pyrenophora tritici-repentis Pt-1C-BFP]
  misc_feature (28)..(237): NCBI GI: 169617423 Blast Desc: SNOG_11890 [Phaeosphaeria nodorum SN15] gi|111059814|gb|EAT80934.1| SNOG_11890 [Phaeosphaeria nodorum SN15]
  misc_feature (28)..(311): NCBI GI: 154302410 Blast Desc: BC1G_09989 [Botryotinia fuckeliana B05.10] gi|150855477|gb|EDN30669.1| BC1G_09989 [Botryotinia fuckeliana B05.10]
  misc_feature (28)..(394): NCBI GI: 226291939 Blast Desc: conserved [Paracoccidioides brasiliensis Pb18]
  misc_feature (25)..(242): NCBI GI: 256728739 Blast Desc: NECHADRAFT_85989 [Nectria haematococca mpVI 77-13-4]
MLWTYAEDSKSNISGLTRSVSSKATKTDWKEQSEQIQNIYENAYVTIAATKSQDGEGGCYSKADLDGGFRCWPVMEGLVYVHLSLPRFSLEHLDEWPLLTRGWIYQEMQVSPRVIHFGSREVIWQCRTCRRSESMINDDESKSTFTAQRLYSGTDGWYNAVTEYSALSLTFEKDRFAALAAISLREANKRGPDDVYFLGLWKTTFRRDLLWQLADPHSRGKARRRALGKAPTWSWASVMSRVRWILIGHTVFEGQHFHGQDRTENQGQQFHDLDCTEILDIDIRYIGSPFLGDYDTAELKIRGPLIRTTLRALAYKGSDYSFPLGGKRFDPRLITDYDYAIFSTCPMTAETNVYILPLAIQTWSATIRLEGLVLIPANPKSGKTYSRIGMVMLSLVHGNRDIDPRDVTESELVDPRDVTELELEEAKESLASHLSSLSVHDIVLV

SEQ ID NO: 37011 - DNA, 946 bp, Muscodor strobelii
  misc_feature: SGI EST ID NO. CUFF.88416.0
  misc_feature: Variant of the nucleotide sequence at SEQ ID NO 37009
acccgacatttcaggatgctatggacatatgcagaagactccaaatcgaatatatctggattgactcgctctgtatcatccaaggcaacgaagacggattggaaagagcagtctgaacagattcaaaacatatatgagaatgcatatgtcacgatcgccgctaccaagtcccaagacggtgaaggtggatgctactcaaaggctgatctagatggtggtttccgctgctggccagtcatggagggattggtatatgtccatctaagtctgcccagattcagccttgaacatctagacgaatggccactcctcactagaggttggatctaccaggaaatgcaagtctcgccaagggttatacattttggatcacgggaagtgatatggcagtgccgtacatgtagacgaagtgagagcatgatcaacgatgatgaaagtaaatcaacattcactgcacagcgactctactcagggacagatggctggtataatgcggtcactgaatactcggctctatccctcacctttgagaaggatagatttgcggcgctggcagccattagtctgcgtgaggcgaataaaagaggtcccgatgatgtttattttctcggactttggaagacgacatttcgaagagatcttctctggcaattggccgatccacactcgcgtggaaaggccagaaggagggcattagggaaagccccgacctggtcctgggcatctgtcatgtctcgcgtcagatggattttgataggtcatactgtatttgagggtcagcattttcatggtcaagatcgcacagagaatcagggccagcaatttcatgatctggattgcacagagattctggacattgacattcgctacattggatcacctttcttaggagactacgatacagcagaacttaagatccgcggtcccttgattcggactacattgc

SEQ ID NO: 37012 - DNA, 2025 bp, Muscodor strobelii
  misc_feature: SGI cDNA ID NO. 572840
  misc_feature: Reduced expression when VOC is produced
  misc_feature: Encodes the peptide sequence at SEQ ID NO 37013
atgcttaagaactcgatacagcggcaagtccgcttgggcaatgttgcccgtcagttttccaccgcctctctactacgcaaccctcgcgccgcccagcttgttagcctgcgccagccatcatctctgacgactctacgcgctctccctcccgtcacacacaacatcacccgcctgtattcccaagagtccgaagctgcggtcgccagccggagcgatgaatttgctgcccctgccaatgccgatgtcacaaaattctcagagctcgagcgcctcggcgtcgacgagcgcctcgttcaggccctgaccgaaggcatgggctacgagaatatgacagaggttcagtccatggccatcaaccctgcactcaagggaaaggacatggttgcccaggccaagaccggaacaggaaagacattggctttcttggtccccatcttccagcgtattctgaccgatatgcccgaattgagagcccggaggcccgctcgtggcactggcgccaagaacattcgcgccatcattctctccccgacgcgtgagctggctgagcagatcggcgtcgaggccaggaagcttgctaagcacaccggcgtcattgtccagaccgctgttggtggcactagaaagagggaggctctgtggaggatgcaggatcaaggttgtgacatcctcgtcgccactcccggacgtctgaacgatatcctctccgattcctctgctggtgttgctgctcccaacctgcaatctttcgtgctcgacgaagctgatcgtatgcttgacgtcggctttgctgacgagctgcgctccatcaacgacatgctccccgaccagcgccaatcccagcgacagacccttctcttctctgctacgatcccttcttcggtcgttcatcttgccaagggcatggtccgaccggacaactttgagttcgtccagaccatcaaggcagatgacgagcccacccatcaccgcgttccccagcacctgatcaccgtcaagtcgtacgagaacattctgcccgccattctagagatcgtcgataaagccactaaagagcacaaggagctccccttcaaggctgtcctcttcttcaactccacagccatggtgcagttcgcatatcgagtcttccagcaaacagacgccagccgcagggtacgcagctttgagattcactcgagattgactcagcaaggacgtacccaggccgcagagatgttccgtcgctccgactcggccatgctgttctcgtcagacgtcactgccagaggcatggatttccccaatgttacacatgtcatccaagttggtttgccccctgaccgagaccagtacattcacagggtaggcagaacaggtcgcgctggaaatgctggtcaaggctacttgctcttgtcggaacaagagaaggcagagggccgcgtacgtctccctggtctgcctatcaaaccagacaacagcttcgagtctgccctacacgtaccaggtcagggtggtgaagccgagtcgtacttccaaacggtggaacaagcctatggtcgtgtgccaaagtcttacttccgcgctgcatatttgtcaatacttggtcagaagtttggcagatatttccaagccgaggatgtgatcgctttgctgacctcatgggttcagaatggtctgcgctgggatgagccccctgccattcctcctaagatagctcagatgcgtaacatccgtaggatgcctggtgttcggatcggacacgatgtggacgaggatgacttcggtggccgtgatggtggccgtgatggtggccgtggtggctttggaaacaaccgtggtttcgggaacgaccgtggctttggaggaaacagccgtggaaacagccgtggattcggcggtggacgcgacgggggacgtcgacaagatgatttcggcagccagttcggcaacgccaggggtcgtgattctcgtggaggctcccgtggaggctcaaggggaggttacggtaatgatggaggctatggcggcagctccagcttctaa

SEQ ID NO: 37013 - protein, 674 aa, Muscodor strobelii
  misc_feature: SGI Peptide ID NO. 572840
  misc_feature (111)..(298): Pfam Id: PF00270 Pfam Desc: DEAD/DEAH box helicase
  misc_feature (380)..(456): Pfam Id: PF00271 Pfam Desc: Helicase conserved C-terminal domain
  misc_feature (2)..(579): NCBI GI: 85107121 Blast Desc: NCU07670 [Neurospora crassa OR74A] gi|21552987|gb|AAM62413.1|AF497975_1 CYT-19 DEAD-box protein precursor [Neurospora crassa] gi|28923915|gb|EAA33076.1| crassa
  misc_feature (55)..(588): NCBI GI: 261352513 Blast Desc: ATP-dependent RNA helicase mss116 [Verticillium albo-atrum VaMs.102]
  misc_feature (1)..(581): NCBI GI: 171690426 Blast Desc: protein product [Podospora anserina] gi|170945161|emb|CAP71272.1| protein product [Podospora anserina]
  misc_feature (75)..(638): NCBI GI: 70996346 Blast Desc: DEAD box RNA helicase HelA [Aspergillus fumigatus Af293] gi|74672187|sp|Q4WRP2.1|MS116_ASPFU RecName: Full=ATP-dependent RNA helicase mss116, mitochondrial; Flags: box
  misc_feature (24)..(579): NCBI GI: 46121459 Blast Desc: FG05108.1 [Gibberella zeae PH-1]
  misc_feature (72)..(639): NCBI GI: 119494753 Blast Desc: DEAD box RNA helicase HelA, [Neosartorya fischeri NRRL 181] gi|119412350|gb|EAW22291.1| DEAD box RNA helicase HelA, [Neosartorya fischeri NRRL 181]
  misc_feature (40)..(596): NCBI GI: 256727466 Blast Desc: NECHADRAFT_12700 [Nectria haematococca mpVI 77-13-4]
  misc_feature (10)..(630): NCBI GI: 225681866 Blast Desc: ATP-dependent RNA helicase mss116 [Paracoccidioides brasiliensis Pb03]
  misc_feature (37)..(631): NCBI GI: 226284418 Blast Desc: ATP-dependent RNA helicase mss116 [Paracoccidioides brasiliensis Pb01]
  misc_feature (110)..(585): NCBI GI: 145612393 Blast Desc: MGG_07099 [Magnaporthe grisea 70-15] gi|145019567|gb|EDK03795.1| MGG_07099 [Magnaporthe grisea 70-15]
  misc_feature: Useful for introducing or modulating the production of volatile compounds
MLKNSIQRQVRLGNVARQFSTASLLRNPRAAQLVSLRQPSSLTTLRALPPVTHNITRLYSQESEAAVASRSDEFAAPANADVTKFSELERLGVDERLVQALTEGMGYENMTEVQSMAINPALKGKDMVAQAKTGTGKTLAFLVPIFQRILTDMPELRARRPARGTGAKNIRAIILSPTRELAEQIGVEARKLAKHTGVIVQTAVGGTRKREALWRMQDQGCDILVATPGRLNDILSDSSAGVAAPNLQSFVLDEADRMLDVGFADELRSINDMLPDQRQSQRQTLLFSATIPSSVVHLAKGMVRPDNFEFVQTIKADDEPTHHRVPQHLITVKSYENILPAILEIVDKATKEHKELPFKAVLFFNSTAMVQFAYRVFQQTDASRRVRSFEIHSRLTQQGRTQAAEMFRRSDSAMLFSSDVTARGMDFPNVTHVIQVGLPPDRDQYIHRVGRTGRAGNAGQGYLLLSEQEKAEGRVRLPGLPIKPDNSFESALHVPGQGGEAESYFQTVEQAYGRVPKSYFRAAYLSILGQKFGRYFQAEDVIALLTSWVQNGLRWDEPPAIPPKIAQMRNIRRMPGVRIGHDVDEDDFGGRDGGRDGGRGGFGNNRGFGNDRGFGGNSRGNSRGFGGGRDGGRRQDDFGSQFGNARGRDSRGGSRGGSRGGYGNDGGYGGSSSF

SEQ ID NO: 37014 - DNA, 2778 bp, Muscodor strobelii
  misc_feature: SGI EST ID NO. CUFF.89098.1
  misc_feature: Variant of the nucleotide sequence at SEQ ID NO 37012
tcttttcttgctgtcgattttatcatcgccaggcaagcagaagcttgaagtcccttccttttcaatcatccactcccatccttctaggtatacttcgtatcccatttcttcgtcctcaatttttgtaatacacgggttctatacaaactattaaatacgtcgttttctccatctcccacaatcacaaccaaatccctgcaatgcttaagaactcgatacagcggcaagtccgcttgggcaatgttgcccgtcagttttccaccgcctctctactacgcaaccctcgcgccgcccagcttgttagcctgcgccagccatcatctctgacgactctacgcgctctccctcccgtcacacacaacatcacccgcctgtattcccaagagtccgaagctgcggtcgccagccggagcgatgaatttgctgcccctgccaatgccgatgtcacaaaattctcagagctcgagcgcctcggcgtcgacgagcgcctcgttcaggccctgaccgaaggcatgggctacgagaatatgacagaggttcagtccatggccatcaaccctgcactcaagggaaaggacatggttgcccaggccaagaccggaacaggaaagacattggctttcttggtccccatcttccagcgtattctgaccgatatgcccgaattgagagcccggaggcccgctcgtggcactggcgccaagaacattcgcgccatcattctctccccgacgcgtgagctggctgagcagatcggcgtcgaggccaggaagcttgctaagcacaccggcgtcattgtccagaccgctgttggtggcactagaaagagggaggctctgtggaggatgcaggatcaaggttgtgacatcctcgtcgccactcccggacgtctgaacgatatcctctccgattcctctgctggtgttgctgctcccaacctgcaatctttcgtgctcgacgaagctgatcgtatgcttgacgtcggctttgctgacgagctgcgctccatcaacgacatgctccccgaccagcgccaatcccagcgacagacccttctcttctctgctacgatcccttcttcggtcgttcatcttgccaagggcatggtccgaccggacaactttgagttcgtccagaccatcaaggcagatgacgagcccacccatcaccgcgttccccagcacctgatcaccgtcaagtcgtacgagaacattctgcccgccattctagagatcgtcgataaagccactaaagagcacaaggagctccccttcaaggctgtcctcttcttcaactccacagccatggtgcagttcgcatatcgagtcttccagcaaacagacgccagccgcagggtacgcagctttgagattcactcgagattgactcagcaaggacgtacccaggccgcagagatgttccgtcgctccgactcggccatgctgttctcgtcagacgtcactgccagaggcatggatttccccaatgttacacatgtcatccaagttggtttgccccctgaccgagaccagtacattcacagggtaggcagaacaggtcgcgctggaaatgctggtcaaggctacttgctcttgtcggaacaagagaaggcagagggccgcgtacgtctccctggtctgcctatcaaaccagacaacagcttcgagtctgccctacacgtaccaggtcagggtggtgaagccgagtcgtacttccaaacggtggaacaagcctatggtcgtgtgccaaagtcttacttccgcgctgcatatttgtcaatacttggtcagaagtttggcagatatttccaagccgaggatgtgatcgctttgctgacctcatgggttcagaatggtctgcgctgggatgagccccctgccattcctcctaagatagctcagatgcgtaacatccgtaggatgcctggtgttcggatcggacacgatgtggacgaggatgacttcggtggccgtgatggtggccgtgatggtggccgtggtggctttggaaacaaccgtggtttcgggaacgaccgtggctttggaggaaacagccgtggaaacagccgtggattcggcggtggacgcgacgggggacgtcgacaagatgatttcggcagccagttcggcaacgccaggggtcgtgattctcgtggaggctcccgtggaggctcaaggggaggttacggtaatgatggaggctatggcggcagctccagcttctaaattcgcaaacccagcatttggttgatctgcgatctaagtcatttaacctaactactcacaccttacaccatcgacactcaggcgctcagcaaatctgagccacttcatgtagcatattcaggttcaggatctcgtgtacattgcggccgcagcccagcacaaaggctgtgtgaatgggccaaaagggttgttttgtgttcacataaaggcacggcggcgttgaaggtcttgacttgcttactttccttccacttatcccggaagctaggaatagaaggcatacgggaaaggagaggagattgtcattagccgggcaaaatggttttgtttgcgctatggaaaaagcaatattatttgctgggaaatctctacttcacactcccctactgactaaatgtctgtatgtatgtatcatagaaataagcgaagtgtaataacagagggcctttgtgccatggaacatttgaaggttctttttaagtttgccgtgagatctgttcgataaggagagtgtgttcactttgttatattgaaatcgaaaattggagagctt

SEQ ID NO: 37015 - DNA, 897 bp, Muscodor strobelii
  misc_feature: SGI cDNA ID NO. 572841
  misc_feature: Encodes the peptide sequence at SEQ ID NO 37016
atggctttcatcagctggctaccctccgcgattatagaacgcgtccctgtcctcagtcatatccgtcgatccgcgaacctctcatatctcggcatgcggtgtaaagtgggcggactagagatggagcagcaaatgatgatggcgcgtgatggcgagatcatggggtttgacgctcagcaactaccgtccacctgcacggcccctataccgtctaagaagcagcacgacggtaggcaagtcatacagaaagggtccctcgacatcgcgcaactagatgacccttctaaagagccggtgaatgtggaaccaagcataccaggccccgaatggatatatgcgagtcaaggaacgagtctccaccacatggcctggaaccaaagagaaatcaacgagaaatattcccggaaatcgtacatcgacggagtagcctacatgctcatggccctaccaccagatctctccgcgacagaaaccggcataatccgagacgcactcccacccaccctctccgcacccgtcgaacccagagccggccagaagaccataggctggcttcccccaccatcaggacgaacggttctgcagcgctgcgtagcgaacatcgtcaccgtgctcgtggtcgtgatcctcgctcttgcttcctcgttgactaccgtagcgaaactcggcaccgagtgcgagaagaagtataatctaagccagtatttactgaagcttacggcggctatgggcaagagtggtgtcacgctgggcacgaaagtttgtgaggttagcgacagtagctttgggcgctggatggcggctatgatgtcttggaccatagaaggtgttacggcgggtattcaggatggtgtaggccagggtcttctcttcgttgaacctgggatgaagaactga

SEQ ID NO: 37016 - protein, 298 aa, Muscodor strobelii
  misc_feature: SGI Peptide ID NO. 572841
  misc_feature (95)..(292): NCBI GI: 256727467 Blast Desc: NECHADRAFT_66336 [Nectria haematococca mpVI 77-13-4]
  misc_feature (94)..(292): NCBI GI: 46121457 Blast Desc: FG05107.1 [Gibberella zeae PH-1]
  misc_feature (107)..(298): NCBI GI: 154292388 Blast Desc: BC1G_14683 [Botryotinia fuckeliana B05.10] gi|150846162|gb|EDN21355.1| BC1G_14683 [Botryotinia fuckeliana B05.10]
  misc_feature (81)..(295): NCBI GI: 189191236 Blast Desc: conserved [Pyrenophora tritici-repentis Pt-1C-BFP] gi|187973563|gb|EDU41062.1| conserved [Pyrenophora tritici-repentis Pt-1C-BFP]
  misc_feature (135)..(292): NCBI GI: 121700873 Blast Desc: conserved [Aspergillus clavatus NRRL 1] gi|119396844|gb|EAW07275.1| conserved [Aspergillus clavatus NRRL 1]
  misc_feature (130)..(292): NCBI GI: 255930403 Blast Desc: Pc06g01560 [Penicillium chrysogenum Wisconsin 54-1255] gi|211581374|emb|CAP79149.1| Pc06g01560 [Penicillium chrysogenum Wisconsin 54-1255]
  misc_feature (135)..(292): NCBI GI: 242778372 Blast Desc: TSTA_095080 [Talaromyces stipitatus ATCC 10500] gi|218722844|gb|EED22262.1| TSTA_095080 [Talaromyces stipitatus ATCC 10500]
  misc_feature (122)..(298): NCBI GI: 156061781 Blast Desc: SS1G_03036 [Sclerotinia sclerotiorum 1980] gi|154700437|gb|EDO00176.1| SS1G_03036 [Sclerotinia sclerotiorum 1980]
  misc_feature (135)..(292): NCBI GI: 212533549 Blast Desc: PMAA_074560 [Penicillium marneffei ATCC 18224] gi|210072295|gb|EEA26384.1| PMAA_074560 [Penicillium marneffei ATCC 18224]
  misc_feature (125)..(292): NCBI GI: 70996336 Blast Desc: AFUA_1G15560 [Aspergillus fumigatus Af293] gi|66850558|gb|EAL90885.1| AFUA_1G15560 [Aspergillus fumigatus Af293] gi|159131677|gb|EDP56790.1| AFUB_015100 [Aspergillus
MAFISWLPSAIIERVPVLSHIRRSANLSYLGMRCKVGGLEMEQQMMMARDGEIMGFDAQQLPSTCTAPIPSKKQHDGRQVIQKGSLDIAQLDDPSKEPVNVEPSIPGPEWIYASQGTSLHHMAWNQREINEKYSRKSYIDGVAYMLMALPPDLSATETGIIRDALPPTLSAPVEPRAGQKTIGWLPPPSGRTVLQRCVANIVTVLVVVILALASSLTTVAKLGTECEKKYNLSQYLLKLTAAMGKSGVTLGTKVCEVSDSSFGRWMAAMMSWTIEGVTAGIQDGVGQGLLFVEPGMKN

SEQ ID NO: 37017 - DNA, 4079 bp, Muscodor strobelii
  misc_feature: SGI EST ID NO. CUFF.88682.0
  misc_feature: Variant of the nucleotide sequence at SEQ ID NO 37015
gcgactttcacatgtgatcgaacgatttgttatctctgctctgcagaatataggcgagtggagatccgatcttcaacacccccgaatctagacctgagagatatcttgctctcactaactgcgcttttctctttcttctctctattttctacaattttcatgtttctacgcgataacgaagaggatttaagacttgcggcacaataatctagtagtaggaagcagccaatcggtgacatcacgttcttagtcggttggtattcgagattggaataaggcggacaaatcaaccattttgcgtctgagaatgcccaacgccgatacttagctgcatcagtcgtttatgatcaggggttccggaggaatcttcatattgttctccattaggtccagagctatcggaactactcatctagtcacacaacgttactgttactatatctcgctggaggaaacaaacgaacaaccgtaggatatcatacctcatcaaccggcccaatgacggtttgagtcggccaaggagatcgcttgggaatttggctttgttgggagaacactcgtcgaaaaaatcctttcgcgccatcatccgctccttcaaaatggctttcatcagctggctaccctccgcgattatagaacgcgtccctgtcctcagtcatatccgtcgatccgcgaacctctcatatctcggcatgcggtgtaaagtgggcggactagagatggagcagcaaatgatgatggcgcgtgatggcgagatcatggggtttgacgctcagcaactaccgtccacctgcacggcccctataccgtctaagaagcagcacgacggtaggcaagtcatacagaaagggtccctcgacatcgcgcaactagatgacccttctaaagagccggtgaatgtggaaccaagcataccaggccccgaatggatatatgcgagtcaaggaacgagtctccaccacatggcctggaaccaaagagaaatcaacgagaaatattcccggaaatcgtacatcgacggagtagcctacatgctcatggccctaccaccagatctctccgcgacagaaaccggcataatccgagacgcactcccacccaccctctccgcacccgtcgaacccagagccggccagaagaccataggctggcttcccccaccatcaggacgaacggttctgcagcgctgcgtagcgaacatcgtcaccgtgctcgtggtcgtgatcctcgctcttgcttcctcgttgactaccgtagcgaaactcggcaccgagtgcgagaagaagtataatctaagccagtatttactgaagcttacggcggctatgggcaagagtggtgtcacgctgggcacgaaagtttgtgaggttagcgacagtagctttgggcgctggatggcggctatgatgtcttggaccatagaaggtgttacggcgggtattcaggatggtgtaggccagggtcttctcttcgttgaacctgggatgaagaactgagttctaccatccaccatccaccatctacaggcttctttggaccttatatgattagacgagtcacgaatgcatctgctcccgtaaacggaccttggacttgggttgggtgaatcggatccggcgtttgggtagacggtttatgatcatgcaatacaggtataacggtatcatagaggttttgctcaaggcagttatagacttgcaatatatgatacaatatcatagctacggactccaactcacccaatctcacaagtgatacagcatttacaaacatccccattgaaaactccatctcacatcatacctcacaccactatgctatgtccgcgaatatcgatattcaaattttgatatacttggcctgaacaataactctgcacaccatgtaattatttcacaacagagcaacatgcccttccatttcgcctctgaccaaaatgccaaacaagagaccaccccttcaaacgccgaaccccatatcaacatattaaacccaatacagtaacactatcattcccagttccagtcgatcttatttacgcaccactacttccagcagccttctcagcagcgatcttggcctccatcttccgtctagccgctaggatcatctcgtctcgtcgcttctgcagcgctgactggcgttcgtcgcggtttgaactccaggctttttgcttttgctcgctagtgcctgctggtgggctcgctgcgctcgctgaggttgattcggatggggtgactttgttttgtagtttgtagcgcgtgattaggtcgggttcggtgggtttgaagggcgttttggaggcagtttgcgaggcggtggagggactgggagatgttgggggtggtggtggttggaaggttactggaggctgtgggaagaggtattagcatttttgtcacattggaacagatacgaagttcgtgatatcgaagcgcagcatctcatcacttctgtttgtagaagagagtagttcaagggggtagctcactgtctcaacgcggcccgccagtatgcgctcagtcgcagcagtcatattgcctccattgcgctgcaactcccagagtatcgttctcctgtctatttgtgggaacatctgctgtatgcgttcgaccgctgcctctctagctctcgcggcggacgctgcatctcgtcccctcccagacccttgggcgccggccgtcgatgatccgaagaagaggtagcgaattacgaggccgccgaatactactaccaaaactaatgacgtgagcgagaactgttcgtctgccatcgtgggcgcagaggtgtgggagttgttgggttgtagtcagaggagataccgctggttctggtattgatatcgatgtctgttggctacggttaccgaggagttgttggtggcgtggccgcgagtcgtttgatgggagcagtgcagtgattcgcctgcctcgggccgttgatggcccacctaagaagtatctggaatacttattcgagttgttattcgcaatgaatttgagaattcgaatgatatcaaattcatccgagccgtgcagctattgcaaccgtgttttagacgtcacttttagtaaggaggagcagtagagtagcagtctacaaatgacgaagcagggatattcgacggtcggaatcccgctgtcgcgtgcagcaaatgcagtctgaaaagtcacggtgatcgggagaccccacaagccgactatcggcaatcagagcaccgtcgagctaatactgttgatgccatattttttcgaccacgaaacctccaagaaattgacatcgtggcaaaaccattgaagcacttcacagaaggatcgagcatggagaaaataattctacgctgggagtcaatgccttcaagacgaatcgtcctcggccagtatctattcatcaggaaatgaacgccaggtacgcctgcaacatgggatattgcaggttccactccatacatgtcttggacgcatcagacggggttcaaaataggctcattgttgtcagggcattccgaccgtactattacatgtctggctacttgtacgtactttcgctctttcaatgatctatgagactgaaccgggtctgctacctatcagcgtcgagcgatgtggcgtgtcaccagcaaatccaccatgttggtacttaatgagcaaacccttaggagtgacgagaatgaatgccatgaatatccgcgagtcatttggcaggcgctctatcatgacttcaacatgacccatgtgtgacgttgcttgagtcaagcgtctcttcttcacacctgtggatgcaccacagattgcaatgaaaagaatgaagatttcgcgtcgcctggaggcagtgttataccagggacacggtggaagcgatcatgcgcaagcacagaggatcgccaccggagtataaaaattagaataatctagattgaatccagtaggactctttcagagattaaactgaaaagaacagatactacacttgatctatagtacaggttagcatacatatattaggtgcggcggtctttgccttttgtcttagtttaaacgaccgagaaaaaagcggaatgtgacgtacctaagccaaaa

SEQ ID NO: 37018 - DNA, 618 bp, Muscodor strobelii
  misc_feature: SGI cDNA ID NO. 572842
  misc_feature: Reduced expression when VOC is produced
  misc_feature: Encodes the peptide sequence at SEQ ID NO 37019
atggcagacgaacagttctcgctcacgtcattagttttggtagtagtattcggcggcctcgtaattcgctacctcttcttcggatcatcgacggccggcgcccaagggtctgggaggggacgagatgcagcgtccgccgcgagagctagagaggcagcggtcgaacgcatacagcagatgttcccacaaatagacaggagaacgatactctgggagttgcagcgcaatggaggcaatatgactgctgcgactgagcgcatactggcgggccgcgttgagacacctccagtaaccttccaaccaccaccacccccaacatctcccagtccctccaccgcctcgcaaactgcctccaaaacgcccttcaaacccaccgaacccgacctaatcacgcgctacaaactacaaaacaaagtcaccccatccgaatcaacctcagcgagcgcagcgagcccaccagcaggcactagcgagcaaaagcaaaaagcctggagttcaaaccgcgacgaacgccagtcagcgctgcagaagcgacgagacgagatgatcctagcggctagacggaagatggaggccaagatcgctgctgagaaggctgctggaagtagtggtgcgtaa

SEQ ID NO: 37019 - protein, 205 aa, Muscodor strobelii
  misc_feature: SGI Peptide ID NO. 572842
  misc_feature (49)..(91): Pfam Id: PF02845 Pfam Desc: CUE domain
  misc_feature (1)..(204): NCBI GI: 156050277 Blast Desc: SS1G_07725 [Sclerotinia sclerotiorum 1980] gi|154692126|gb|EDN91864.1| SS1G_07725 [Sclerotinia sclerotiorum 1980]
  misc_feature (1)..(200): NCBI GI: 256726900 Blast Desc: NECHADRAFT_99195 [Nectria haematococca mpVI 77-13-4]
  misc_feature (1)..(204): NCBI GI: 154289894 Blast Desc: BC1G_15901 [Botryotinia fuckeliana B05.10] gi|150848560|gb|EDN23753.1| BC1G_15901 [Botryotinia fuckeliana B05.10]
  misc_feature (1)..(190): NCBI GI: 46121441 Blast Desc: FG05099.1 [Gibberella zeae PH-1]
  misc_feature (1)..(191): NCBI GI: 85107129 Blast Desc: NCU07672 [Neurospora crassa OR74A] gi|28923917|gb|EAA33078.1| [Neurospora crassa OR74A]
  misc_feature (1)..(190): NCBI GI: 171690424 Blast Desc: protein product [Podospora anserina] gi|170945160|emb|CAP71271.1| protein product [Podospora anserina]
  misc_feature (1)..(198): NCBI GI: 154273332 Blast Desc: [Ajellomyces capsulatus NAm1] gi|150416030|gb|EDN11374.1| [Ajellomyces capsulatus NAm1]
  misc_feature (1)..(198): NCBI GI: 225555770 Blast Desc: conserved [Ajellomyces capsulatus G186AR]
  misc_feature (1)..(196): NCBI GI: 258577139 Blast Desc: conserved [Uncinocarpus reesii 1704] gi|237903017|gb|EEP77418.1| conserved [Uncinocarpus reesii 1704]
  misc_feature (1)..(198): NCBI GI: 240279092 Blast Desc: AMFR protein [Ajellomyces capsulatus H143]
  misc_feature: Useful for introducing or modulating the production of volatile compounds
MADEQFSLTSLVLVVVFGGLVIRYLFFGSSTAGAQGSGRGRDAASAARAREAAVERIQQMFPQIDRRTILWELQRNGGNMTAATERILAGRVETPPVTFQPPPPPTSPSPSTASQTASKTPFKPTEPDLITRYKLQNKVTPSESTSASAASPPAGTSEQKQKAWSSNRDERQSALQKRRDEMILAARRKMEAKIAAEKAAGSSGA

SEQ ID NO: 37020 - DNA, 3066 bp, Muscodor strobelii
  misc_feature: SGI EST ID NO. CUFF.88683.1
  misc_feature: Variant of the nucleotide sequence at SEQ ID NO 37018
cttactaaaagtgacgtctaaaacacggttgcaatagctgcacggctcggatgaatttgatatcattcgaattctcaaattcattgcgaataacaactcgaataagtattccagatacttcttaggtgggccatcaacggcccgaggcaggcgaatcactgcactgctcccatcaaacgactcgcggccacgccaccaacaactcctcggtaaccgtagccaacagacatcgatatcaataccagaaccagcggtatctcctctgactacaacccaacaactcccacacctctgcgcccacgatggcagacgaacagttctcgctcacgtcattagttttggtagtagtattcggcggcctcgtaattcgctacctcttcttcggatcatcgacggccggcgcccaagggtctgggaggggacgagatgcagcgtccgccgcgagagctagagaggcagcggtcgaacgcatacagcagatgttcccacaaatagacaggagaacgatactctgggagttgcagcgcaatggaggcaatatgactgctgcgactgagcgcatactggcgggccgcgttgagacacctccagtaaccttccaaccaccaccacccccaacatctcccagtccctccaccgcctcgcaaactgcctccaaaacgcccttcaaacccaccgaacccgacctaatcacgcgctacaaactacaaaacaaagtcaccccatccgaatcaacctcagcgagcgcagcgagcccaccagcaggcactagcgagcaaaagcaaaaagcctggagttcaaaccgcgacgaacgccagtcagcgctgcagaagcgacgagacgagatgatcctagcggctagacggaagatggaggccaagatcgctgctgagaaggctgctggaagtagtggtgcgtaaataagatcgactggaactgggaatgatagtgttactgtattgggtttaatatgttgatatggggttcggcgtttgaaggggtggtctcttgtttggcattttggtcagaggcgaaatggaagggcatgttgctctgttgtgaaataattacatggtgtgcagagttattgttcaggccaagtatatcaaaatttgaatatcgatattcgcggacatagcatagtggtgtgaggtatgatgtgagatggagttttcaatggggatgtttgtaaatgctgtatcacttgtgagattgggtgagttggagtccgtagctatgatattgtatcatatattgcaagtctataactgccttgagcaaaacctctatgataccgttatacctgtattgcatgatcataaaccgtctacccaaacgccggatccgattcacccaacccaagtccaaggtccgtttacgggagcagatgcattcgtgactcgtctaatcatataaggtccaaagaagcctgtagatggtggatggtggatggtagaactcagttcttcatcccaggttcaacgaagagaagaccctggcctacaccatcctgaatacccgccgtaacaccttctatggtccaagacatcatagccgccatccagcgcccaaagctactgtcgctaacctcacaaactttcgtgcccagcgtgacaccactcttgcccatagccgccgtaagcttcagtaaatactggcttagattatacttcttctcgcactcggtgccgagtttcgctacggtagtcaacgaggaagcaagagcgaggatcacgaccacgagcacggtgacgatgttcgctacgcagcgctgcagaaccgttcgtcctgatggtgggggaagccagcctatggtcttctggccggctctgggttcgacgggtgcggagagggtgggtgggagtgcgtctcggattatgccggtttctgtcgcggagagatctggtggtagggccatgagcatgtaggctactccgtcgatgtacgatttccgggaatatttctcgttgatttctctttggttccaggccatgtggtggagactcgttcctttgtggtatcagtcactggaaattcgctatttgtacgatactaatgaatgaaaataccttgactcgcatatatccattcggggcctggtatgcttggttccacattcaccggctctttagaagggtcatctagttgcgcgatgtcgagggaccctttctgtatgacttgcctaccgtcgtgctgcttcttagacggtataggggccgtgcaggtggacggtagttgctgagcgtcaaaccccatgatctcgccatcacgcgccatcatcatttgctgctccatctctagtccgcccactttacaccgcatgccgagatatgagaggttcgcggatcgacggatatgactgaggacagggacgcgttctataatcgcggagggtagccagctgatgaaagccattttgaaggagcggatgatggcgcgaaaggattttttcgacgagtgttctcccaacaaagccaaattcccaagcgatctccttggccgactcaaaccgtcattgggccggttgatgaggtatgatatcctacggttgttcgtttgtttcctccagcgagatatagtaacagtaacgttgtgtgactagatgagtagttccgatagctctggacctaatggagaacaatatgaagattcctccggaacccctgatcataaacgactgatgcagctaagtatcggcgttgggcattctcagacgcaaaatggttgatttgtccgcctgcgaaaaatatgagtaggccatttcaaggtttaacgctacttggttgtaccttattccaatctcgaataccaaccgactaagaacgtgatgtcaccgattggctgcttcctactactagattattgtgccgcaagtcttaaatcctcttcgttatcgcgtagaaacatgaaaattgtagaaaatagagagaagaaagagaaaagcgcagttagtgagagcaagatatctctcaggtctagattcgggggtgttgaagatcggatctccactcgcctatattctgcagagcagagataacaaatcgttcgatcacatgtgaaagtcgc

SEQ ID NO: 37021 - DNA, 3480 bp, Muscodor strobelii
  misc_feature: SGI cDNA ID NO. 572843
  misc_feature: Encodes the peptide sequence at SEQ ID NO 37022
atgagggtcacagaagttatcatagatggcttcaaatcgtacgccgtacgaacagtcatttcaggatgggacgaaagcttcaattccatcaccggcctcaatggaagtggcaaatccaacattctagatgccatttgcttcgtgctaggtatcacaaatatgtcgacagtccgagcccaaaacttgcaggatctaatatacaaaagaggccaagccggcgtcacgaaagcgagcgttaccatcgtgttcgacaacagagataaagaaaagtcgcccataggtttcgaggagtatgccaccatcagcgtcacgagacagattgttctgggaggaacgtcgaaatacctaatcaatggccaccgtgcgcaacaacagacagtccaaaacttgttccagtctgtacaattgaacatcaacaaccccaacttcctgattatgcagggtcgcattacaaaggtcttgaatatgaaggcagttgagatccttgccatgattgaagaggctgctggtacaaggatgttcgaggacagacgagacaaagccctcaagacgatggccaagaaagagatgaaattgcaagagatcactgccttgctgcgggaggaaatcgaacctaaactcgaaaaactacggaccgaaaagcgcgctttcctagacttccaacaaacgcaaaacgacctcgaaagattgacacgagtggttgtggcccacgattacataagatatcaagagcgcctggctcagtctgagacggatctcgagaataagcagcacagacggaaggacctcgaagactcggctgccagactcaagagcgaaatcgcccatctagaagacgacgtaaagcgagtaagagcagaacgcgacaaagaattgaagaagggcggcaaggcacaagcgattagaagagacaagggggaagaagaagagcgcaaaacagctgtccagaagaatgttgccgagctcgaggcgacgctcaaagaaaagacgaaggcttacgaaaagataaaggcaaaatatgactcggcaaaagaggaaaacgagaagcaaagcgaagaagcagaatcaaaagaagaactgctacagactctacaaacaggtgtcgcatccaaggaaggccaagaaagcgggtatcagggacaactgtcagacgcaagaaaccgggtagccgccgctgcaacagagcaagaacaagcgaagatcaagatagcccatcttgagaagcgcatcaaagaagaggagcctcgagctaagaaggccaaggagcaaaatgccggcctactcaaggacctagaaggtctccgaaaggagtcacaaaagcttgaagcgcaattaagcgcaatgggctttgagccaggccaggaagatgagttgtataagaaagagtcctctttgcagcagtcaatacgtggctttcggcaagaagctgatgctctgaaacgcaaggtcgccaatatcgacttcaactacgcagatccaacaccaaactttgaccgttccaaggtcaaaggtcttgtcgctcagctcttcacgcttgataagaatcacactcaagcaggcaccgctttggaaatatgtgctggtggacgtctttacaatgtggtcgtagacagtgaagtcacaggcactcaactccttcagggcggcaaactccgaaagcgagtgaccatcatccccttgaacaagatcgcagcattcaaggcttccgctcaaactatcgctactgcacagaaaattgctccaggcaaagtcgatctcgctttgtctcttgtaggatacgatgatgaggtctctgcagctatggagtatgtttttggcaacacactcgtctgccacgacgcggagaccgcgaaaaaggtgactttcgacccgaatgtccgcatgagaagtatcacattagagggcgatgcatatgatccatccggaacgttatctggcggtagcgcacccacttcaagcggcgtgcttgtcactcttcagaaacttaaccaaataaaccgacaattgagagaagctgaaatctctttacgggagctgcaagctgagatttcacgagagaagtctaagctcgatcaagctcggaaggttaagcaaaatctagatctgaaaactcatgaaatcaaacttgcagaggaacagatcggtggcaattcttcatcgtcaattatacaagaagttgagaaaatgaaggagaccatatcacagctcaaggagagcagtgcagatgcgaagaaacgacaagccgaggctagcgccgatacaaagagaatagagaaggatatgaaggactttgagaacaataaagactcgaagctcgttgagctgcaagcgtctctcgacaagctgagggaaacattagcgaaaaattcaagcactgtgaagaccctacaaaaggagcttcaaaatgctcagctcgactccgagcaagtatcatcagatctcgctgccgctagggaatcacttctcgaggtcgaacttgctatcaaagctcagcaagaggagattgaagatctagccaagaagcaagccaagctacaagagacccacgatcttgcccaagcagagctcgacgacgagcgcgccaaactcacaggcttcgatgacgagttacgtgctcttgaagaggctacgaggtcgaagaatgcccgcatcgcagaggagagtctcgagatgcagaaactcggtcaccaagtcgacaagttcaacaaagaacaacagaactcggtccaagctgtagctcacatggagcaagaacatgagtggatcgcagacgagaaagacaaattcggacgaagcggtacaccatacgatttcaagtcacaaaatatcacagagtgcaaggctacgctcaagaacctcactgagcgcttccaaggcatgaagaagaagatcaaccccaaagtcatgaacatgattgacagcgtggagaagaaggaagttggcctcaaacagatgatgaagactgtcatccgtgataagcggaagatcgaagagacgatcatcagtcttgatgattataagaagaaggctctgctacagacgtggcagaaggtcaatggtgatttcggcaatatcttctctgagttattacctggtggtagttttgcgaagctcgatccgccggagggcaagactattaatgagggtcttgaggtcaaggtgtgcttgggcaaagtatggaaacagagtttaacggagttgagtggtggtcaaagatcacttgttgctctatccctcatcatggcccttctacaattcaagccagcacccatgtacattctcgacgaagtcgacgctgcgctcgatctctcacatacgcagaacattggccgactgatcaagacccgattcaagggctctcagtttatcgtcgtctcactcaaggacggcatgttccagaacgccaaccgtatcttccgtactcgtttctcggagggcacgagtatggtgcaggcgctaactgcggcggactttaagtaa

SEQ ID NO: 37022 - protein, 1159 aa, Muscodor strobelii
  misc_feature: SGI Peptide ID NO. 572843
  misc_feature (499)..(621): Pfam Id: PF06470 Pfam Desc: SMC proteins Flexible Hinge Domain
  misc_feature (2)..(1149): Pfam Id: PF02463 Pfam Desc: RecF/RecN/SMC N terminal domain
  misc_feature (1)..(1159): NCBI GI: 39971565 Blast Desc: MGG_07098 [Magnaporthe grisea 70-15] gi|145019566|gb|EDK03794.1| MGG_07098 [Magnaporthe grisea 70-15]
  misc_feature (1)..(1159): NCBI GI: 85107158 Blast Desc: NCU07679 [Neurospora crassa OR74A] gi|28923924|gb|EAA33085.1| NCU07679 [Neurospora crassa OR74A]
  misc_feature (1)..(1159): NCBI GI: 116196206 Blast Desc: conserved [Chaetomium globosum CBS 148.51] gi|88180614|gb|EAQ88082.1| conserved [Chaetomium globosum CBS 148.51]
  misc_feature (1)..(1159): NCBI GI: 256726897 Blast Desc: condensin complex component SMC2 [Nectria haematococca mpVI 77-13-4]
  misc_feature (1)..(1159): NCBI GI: 46121453 Blast Desc: FG05105.1 [Gibberella zeae PH-1]
  misc_feature (1)..(1159): NCBI GI: 261352499 Blast Desc: conserved [Verticillium albo-atrum VaMs.102]
  misc_feature (10)..(1159): NCBI GI: 171690412 Blast Desc: protein product [Podospora anserina] gi|170945154|emb|CAP71265.1| protein product [Podospora anserina]
  misc_feature (1)..(1159): NCBI GI: 67539458 Blast Desc: AN5899.2 [Aspergillus nidulans FGSC A4] gi|40738572|gb|EAA57762.1| AN5899.2 [Aspergillus nidulans FGSC A4] gi|259479933|tpe|CBF70609.1| TPA: Condensin subunit nidulans
  misc_feature (1)..(1159): NCBI GI: 25991997 Blast Desc: condensin subunit [Emericella nidulans]
  misc_feature (1)..(1159): NCBI GI: 225682237 Blast Desc: condensin subunit Cut14 [Paracoccidioides brasiliensis Pb03]
MRVTEVIIDGFKSYAVRTVISGWDESFNSITGLNGSGKSNILDAICFVLGITNMSTVRAQNLQDLIYKRGQAGVTKASVTIVFDNRDKEKSPIGFEEYATISVTRQIVLGGTSKYLINGHRAQQQTVQNLFQSVQLNINNPNFLIMQGRITKVLNMKAVEILAMIEEAAGTRMFEDRRDKALKTMAKKEMKLQEITALLREEIEPKLEKLRTEKRAFLDFQQTQNDLERLTRVVVAHDYIRYQERLAQSETDLENKQHRRKDLEDSAARLKSEIAHLEDDVKRVRAERDKELKKGGKAQAIRRDKGEEEERKTAVQKNVAELEATLKEKTKAYEKIKAKYDSAKEENEKQSEEAESKEELLQTLQTGVASKEGQESGYQGQLSDARNRVAAAATEQEQAKIKIAHLEKRIKEEEPRAKKAKEQNAGLLKDLEGLRKESQKLEAQLSAMGFEPGQEDELYKKESSLQQSIRGFRQEADALKRKVANIDFNYADPTPNFDRSKVKGLVAQLFTLDKNHTQAGTALEICAGGRLYNVVVDSEVTGTQLLQGGKLRKRVTIIPLNKIAAFKASAQTIATAQKIAPGKVDLALSLVGYDDEVSAAMEYVFGNTLVCHDAETAKKVTFDPNVRMRSITLEGDAYDPSGTLSGGSAPTSSGVLVTLQKLNQINRQLREAEISLRELQAEISREKSKLDQARKVKQNLDLKTHEIKLAEEQIGGNSSSSIIQEVEKMKETISQLKESSADAKKRQAEASADTKRIEKDMKDFENNKDSKLVELQASLDKLRETLAKNSSTVKTLQKELQNAQLDSEQVSSDLAAARESLLEVELAIKAQQEEIEDLAKKQAKLQETHDLAQAELDDERAKLTGFDDELRALEEATRSKNARIAEESLEMQKLGHQVDKFNKEQQNSVQAVAHMEQEHEWIADEKDKFGRSGTPYDFKSQNITECKATLKNLTERFQGMKKKINPKVMNMIDSVEKKEVGLKQMMKTVIRDKRKIEETIISLDDYKKKALLQTWQKVNGDFGNIFSELLPGGSFAKLDPPEGKTINEGLEVKVCLGKVWKQSLTELSGGQRSLVALSLIMALLQFKPAPMYILDEVDAALDLSHTQNIGRLIKTRFKGSQFIVVSLKDGMFQNANRIFRTRFSEGTSMVQALTAADFK

SEQ ID NO: 37023 - DNA, 4158 bp, Muscodor strobelii
  misc_feature: SGI EST ID NO. CUFF.88464.0
  misc_feature: Variant of the nucleotide sequence at SEQ ID NO 37021
cgcgtagcaacgccgttaaggagtcttcaactcaattgacagcatcaccaaaccagactctcggcgacaacacacttgtcgcgttctcgaaaatgagggtcacagaagttatcatagatggcttcaaatcgtacgccgtacgaacagtcatttcaggatgggacgaaagcttcaattccatcaccggcctcaatggaagtggcaaatccaacattctagatgccatttgcttcgtgctaggtatcacaaatatgtcgacagtccgagcccaaaacttgcaggatctaatatacaaaagaggccaagccggcgtcacgaaagcgagcgttaccatcgtgttcgacaacagagataaagaaaagtcgcccataggtttcgaggagtatgccaccatcagcgtcacgagacagattgttctgggaggaacgtcgaaatacctaatcaatggccaccgtgcgcaacaacagacagtccaaaacttgttccagtctgtacaattgaacatcaacaaccccaacttcctgattatgcagggtcgcattacaaaggtcttgaatatgaaggcagttgagatccttgccatgattgaagaggctgctggtacaaggatgttcgaggacagacgagacaaagccctcaagacgatggccaagaaagagatgaaattgcaagagatcactgccttgctgcgggaggaaatcgaacctaaactcgaaaaactacggaccgaaaagcgcgctttcctagacttccaacaaacgcaaaacgacctcgaaagattgacacgagtggttgtggcccacgattacataagatatcaagagcgcctggctcagtctgagacggatctcgagaataagcagcacagacggaaggacctcgaagactcggctgccagactcaagagcgaaatcgcccatctagaagacgacgtaaagcgagtaagagcagaacgcgacaaagaattgaagaagggcggcaaggcacaagcgattagaagagagtgtcaagaaacattccaacgaactcgtccgcttggctacagtggtggacttgaagaactcgagcaagggggaagaagaagagcgcaaaacagctgtccagaagaatgttgccgagctcgaggcgacgctcaaagaaaagacgaaggcttacgaaaagataaaggcaaaatatgactcggcaaaagaggaaaacgagaagcaaagcgaagaagcagaatcaaaagaagaactgctacagactctacaaacaggtgtcgcatccaaggaaggccaagaaagcgggtatcagggacaactgtcagacgcaagaaaccgggtagccgccgctgcaacagagcaagaacaagcgaagatcaagatagcccatcttgagaagcgcatcaaagaagaggagcctcgagctaagaaggccaaggagcaaaatgccggcctactcaaggacctagaaggtctccgaaaggagtcacaaaagcttgaagcgcaattaagcgcaatgggctttgagccaggccaggaagatgagttgtataagaaagagtcctctttgcagcagtcaatacgtggctttcggcaagaagctgatgctctgaaacgcaaggtcgccaatatcgacttcaactacgcagatccaacaccaaactttgaccgttccaaggtcaaaggtcttgtcgctcagctcttcacgcttgataagaatcacactcaagcaggcaccgctttggaaatatgtgctggtggacgtctttacaatgtggtcgtagacagtgaagtcacaggcactcaactccttcagggcggcaaactccgaaagcgagtgaccatcatccccttgaacaagatcgcagcattcaaggcttccgctcaaactatcgctactgcacagaaaattgctccaggcaaagtcgatctcgctttgtctcttgtaggatacgatgatgaggtctctgcagctatggagtatgtttttggcaacacactcgtctgccacgacgcggagaccgcgaaaaaggtgactttcgacccgaatgtccgcatgagaagtatcacattagagggcgatgcatatgatccatccggaacgttatctggcggtagcgcacccacttcaagcggcgtgcttgtcactcttcagaaacttaaccaaataaaccgacaattgagagaagctgaaatctctttacgggagctgcaagctgagatttcacgagagaagtctaagctcgatcaagctcggaaggttaagcaaaatctagatctgaaaactcatgaaatcaaacttgcagaggaacagatcggtggcaattcttcatcgtcaattatacaagaagttgagaaaatgaaggagaccatatcacagctcaaggagagcagtgcagatgcgaagaaacgacaagccgaggctagcgccgatacaaagagaatagagaaggatatgaaggactttgagaacaataaagactcgaagctcgttgagctgcaagcgtctctcgacaagctgagggaaacattagcgaaaaattcaagcactgtgaagaccctacaaaaggagcttcaaaatgctcagctcgactccgagcaagtatcatcagatctcgctgccgctagggaatcacttctcgaggtcgaacttgctatcaaagctcagcaagaggagattgaagatctagccaagaagcaagccaagctacaagagacccacgatcttgcccaagcagagctcgacgacgagcgcgccaaactcacaggcttcgatgacgagttacgtgctcttgaagaggctacgaggtcgaagaatgcccgcatcgcagaggagagtctcgagatgcagaaactcggtcaccaagtcgacaagttcaacaaagaacaacagaactcggtccaagctgtagctcacatggagcaagaacatgagtggatcgcagacgagaaagacaaattcggacgaagcggtacaccatacgatttcaagtcacaaaatatcacagagtgcaaggctacgctcaagaacctcactgagcgcttccaaggcatgaagaagaagatcaaccccaaagtcatgaacatgattgacagcgtggagaagaaggaagttggcctcaaacagatgatgaagactgtcatccgtgataagcggaagatcgaagagacgatcatcagtcttgatgattataagaagaaggctctgctacagacgtggcagaaggtcaatggtgatttcggcaatatcttctctgagttattacctggtggtagttttgcgaagctcgatccgccggagggcaagactattaatgagggtcttgaggtcaaggtgtgcttgggcaaagtatggaaacagagtttaacggagttgagtggtggtcaaagatcacttgttgctctatccctcatcatggcccttctacaattcaagccagcacccatgtacattctcgacgaagtcgacgctgcgctcgatctctcacatacgcagaacattggccgactgatcaagacccgattcaagggctctcagtttatcgtcgtctcactcaaggacggcatgttccagaacgccaaccgtatcttccgtactcgtttctcggagggcacgagtatggtgcaggcgctaactgcggcggactttaagtaagctcacccagccatgtgtactgagtttatcagccatggggaaaggggcgtagagtgcggtaactgctcataagactgttgttgatgatgaagtcatgatcattgcgcttggggtatgtcggcggcgaagtttggagaacaattatgataccaggcaggcatggatagggtttggcaatgcggtggtatatggattggtagcttggcgcgagtgatacatagcgtgcgggttttgtgtatttgcttcatacactgttgttgtttgttatgagacttcacgagatactttaactggacttcgaaggttcttttcgcttatatgactgaggttcggagacacttattcacttgtacatgcacgtttgaagaaggcatgcgttgattatggacatatgacacatgacctaacgagttggatataatattcaacgtgcatgattccattttacgtgatgcgtgaaacaacatacacgtgaccggctgcctgtcttgttgagatggtgatcatgatagatgctaccgc

SEQ ID NO: 37024 - DNA, 1446 bp, Muscodor strobelii
  misc_feature: SGI cDNA ID NO. 572844
  misc_feature: Encodes the peptide sequence at SEQ ID NO 37025
atggaagcttcaccagctgcggtcacgctgccagacatgtcgctcatcatgggtcaatcggtactgagcgatctgaatctggacttcagcgctctatttcttctattcgtcacaatatgtgcattcatgataccggtaattgtgatcttgccgccagtcccgatccgcaaaagcgatgcgctactacagactcacacgcaagcgggtttaagaaaagccaagagcaatttgagtgatcagtatgcatccgatcatggagcaaaaggggggaagtcaacaacggttcagagccttctcctctatcccgtgaaatcatgtcgtggcatcgaggtcacaaggagccgtgtcctcccccagggccttgagttcgatcgccttttcatgttcgcacagctcaaaagtcctttcccggtatctgttaatgcaggagaagaggagaagaatcagcacaaatgggtttttgctacccagcggcaatttccccttttggctaccgtgaaggttgacctttggctgccggacgagatgaaactgcgaaggcaatctctcaagaccaacgaggcatttctcatcctgcgcttcccgtggaaagagaccggatggcgagggaccatgtcgtctgttttcgccaagctcggaggaggtgcaggcgctcatcctgagaaagagatcatgttacccgtagatttcccgcccgcgagcgaaatcaaggataggggctacacgttcgaaagtgtgaaaatatggaacgagaccatcacggcgctaaacatgtccaccgaactgccggaggagctttgccggtacctcggtgtgagtaataagctagggctcttccgggttgatccatcaagactccgtgaagtttacagaacggcgccgtgcaaagagagtgcgggttaccaaccggtgacagggttccaggatgcttttccgctccatatgatgaccctcagcagcatgcaacagtttagtaaggaggtgccgaaagattccgatcttgagcaagtggacgtgctccggttccgtgccaacgttatcctttcgggctcgccagcttacgacgaggagacctggaagatcgttcgttttaggccggggaagtcaagtttgcataacgatgcactgttccatgtctcatgccggaccgtaagatgcaaaatgcccaacgtcgatccagagacagggatcaggcatccgcgggaaccagaccgcactttgcgagcgaagcgggatgtagacgaaggcgccaagggaaatggatgtctgggtatgcaacttacgcctctgttcgaagacgcagtttctatatctggatctaagtctggattattgggtgacgacgatggggacgatgggtacgggcagtctacctggatcgaggttggtatggcggttgaagtggaagagaggggcaatcatgtctatataccgcagggtaaatga

SEQ ID NO: 37025 - protein, 481 aa, Muscodor strobelii
  misc_feature: SGI Peptide ID NO. 572844
  misc_feature (305)..(429): Pfam Id: PF03473 Pfam Desc: MOSC domain
  misc_feature (311)..(414): Pfam Id: PF03473 Pfam Desc: MOSC domain
  misc_feature (92)..(175): Pfam Id: PF03476 Pfam Desc: MOSC N-terminal beta barrel domain
  misc_feature (11)..(479): NCBI GI: 261352500 Blast Desc: MOSC domain-containing protein [Verticillium albo-atrum VaMs.102]
  misc_feature (28)..(479): NCBI GI: 145612391 Blast Desc: MGG_07097 [Magnaporthe grisea 70-15] gi|145019565|gb|EDK03793.1| MGG_07097 [Magnaporthe grisea 70-15]
  misc_feature (31)..(477): NCBI GI: 85107154 Blast Desc: NCU07678 [Neurospora crassa OR74A] gi|28923923|gb|EAA33084.1| conserved [Neurospora crassa OR74A]
  misc_feature (26)..(479): NCBI GI: 256727469 Blast Desc: NECHADRAFT_32656 [Nectria haematococca mpVI 77-13-4]
  misc_feature (27)..(479): NCBI GI: 171690414 Blast Desc: protein product [Podospora anserina] gi|170945155|emb|CAP71266.1| protein product [Podospora anserina]
  misc_feature (27)..(429): NCBI GI: 116196204 Blast Desc: CHGG_04700 [Chaetomium globosum CBS 148.51] gi|88180613|gb|EAQ88081.1| CHGG_04700 [Chaetomium globosum CBS 148.51]
  misc_feature (37)..(445): NCBI GI: 154294650 Blast Desc: BC1G_13795 [Botryotinia fuckeliana B05.10] gi|150844674|gb|EDN19867.1| BC1G_13795 [Botryotinia fuckeliana B05.10]
  misc_feature (16)..(445): NCBI GI: 156045133 Blast Desc: SS1G_09755 [Sclerotinia sclerotiorum 1980] gi|154694150|gb|EDN93888.1| SS1G_09755 [Sclerotinia sclerotiorum 1980]
  misc_feature (16)..(477): NCBI GI: 189210365 Blast Desc: MOSC domain containing protein [Pyrenophora tritici-repentis Pt-1C-BFP] gi|187977607|gb|EDU44233.1| MOSC domain containing protein [Pyrenophora tritici-repentis
  misc_feature (69)..(434): NCBI GI: 67541118 Blast Desc: AN6729.2 [Aspergillus nidulans FGSC A4] gi|40739357|gb|EAA58547.1| AN6729.2 [Aspergillus nidulans FGSC A4]
MEASPAAVTLPDMSLIMGQSVLSDLNLDFSALFLLFVTICAFMIPVIVILPPVPIRKSDALLQTHTQAGLRKAKSNLSDQYASDHGAKGGKSTTVQSLLLYPVKSCRGIEVTRSRVLPQGLEFDRLFMFAQLKSPFPVSVNAGEEEKNQHKWVFATQRQFPLLATVKVDLWLPDEMKLRRQSLKTNEAFLILRFPWKETGWRGTMSSVFAKLGGGAGAHPEKEIMLPVDFPPASEIKDRGYTFESVKIWNETITALNMSTELPEELCRYLGVSNKLGLFRVDPSRLREVYRTAPCKESAGYQPVTGFQDAFPLHMMTLSSMQQFSKEVPKDSDLEQVDVLRFRANVILSGSPAYDEETWKIVRFRPGKSSLHNDALFHVSCRTVRCKMPNVDPETGIRHPREPDRTLRAKRDVDEGAKGNGCLGMQLTPLFEDAVSISGSKSGLLGDDDGDDGYGQSTWIEVGMAVEVEERGNHVYIPQGK

SEQ ID NO: 37026 - DNA, 1946 bp, Muscodor strobelii
  misc_feature: SGI EST ID NO. CUFF.88462.0
  misc_feature: Variant of the nucleotide sequence at SEQ ID NO 37024
cacaagtgcgtgatatcgtgaacccgcaacgtgatccggctaaccgccggaatgggtgccggtatttcacacgtggttggtcacgtggaggcagcccctgatttgtttctcaagtgtctcagaatgtttccgaactgcccacgacgttgtttcatggcgcctgtagattgagagacattcgagacgacttttcaatgtcttttcgtagattgtctcttcatctatgaaattatatgcagaactttgctttacaatgtacttttaatgagaaacaaaactctcacggtgcttgctggccaggaaactaaccgtgctaaactcggctaattacatactactttctacccgcgcggctcgcccacagagcaatttctggacgcgatggaagcttcaccagctgcggtcacgctgccagacatgtcgctcatcatgggtcaatcggtactgagcgatctgaatctggacttcagcgctctatttcttctattcgtcacaatatgtgcattcatgataccggtaattgtgatcttgccgccagtcccgatccgcaaaagcgatgcgctactacagactcacacgcaagcgggtttaagaaaagccaagagcaatttgagtgatcagtatgcatccgatcatggagcaaaaggggggaagtcaacaacggttcagagccttctcctctatcccgtgaaatcatgtcgtggcatcgaggtcacaaggagccgtgtcctcccccagggccttgagttcgatcgccttttcatgttcgcacagctcaaaagtcctttcccggtatctgttaatgcaggagaagaggagaagaatcagcacaaatgggtttttgctacccagcggcaatttccccttttggctaccgtgaaggttgacctttggctgccggacgagatgaaactgcgaaggcaatctctcaagaccaacgaggcatttctcatcctgcgcttcccgtggaaagagaccggatggcgagggaccatgtcgtctgttttcgccaagctcggaggaggtgcaggcgctcatcctgagaaagagatcatgttacccgtagatttcccgcccgcgagcgaaatcaaggataggggctacacgttcgaaagtgtgaaaatatggaacgagaccatcacggcgctaaacatgtccaccgaactgccggaggagctttgccggtacctcggtgtgagtaataagctagggctcttccgggttgatccatcaagactccgtgaagtttacagaacggcgccgtgcaaagagagtgcgggttaccaaccggtgacagggttccaggatgcttttccgctccatatgatgaccctcagcagcatgcaacagtttagtaaggaggtgccgaaagattccgatcttgagcaagtggacgtgctccggttccgtgccaacgttatcctttcgggctcgccagcttacgacgaggagacctggaagatcgttcgttttaggccggggaagtcaagtttgcataacgatgcactgttccatgtctcatgccggaccgtaagatgcaaaatgcccaacgtcgatccagagacagggatcaggcatccgcgggaaccagaccgcactttgcgagcgaagcgggatgtagacgaaggcgccaagggaaatggatgtctgggtatgcaacttacgcctctgttcgaagacgcagtttctatatctggatctaagtctggattattgggtgacgacgatggggacgatgggtacgggcagtctacctggatcgaggttggtatggcggttgaagtggaagagaggggcaatcatgtctatataccgcagggtaaatgatcagtcccgggatatagattaagagtgcattcaagaccctatattaggataaaacggcacaaccactatatcttagacgcaagaatctaaacatagaaaaataacgtactgcagaatca

SEQ ID NO: 37027 - DNA, 2130 bp, Muscodor strobelii
  misc_feature: SGI cDNA ID NO. 572845
  misc_feature: Encodes the peptide sequence at SEQ ID NO 37028
atgagtggctactaccactcctcttcctcctttccggagatggggtatctacccaatatgaatccccaggatgagcaggacacacaataccaccaccaacagttaaccccgcagttagaaagttcacctgttacctttgtcagtccgtatcaaagccttgggtatttcacagggtttcctgatcccaatgtatatcaacaacaagcaaagcctccatctcaaaacaatcgaagtcgaaagaagtcaacgcctggagcagatcatgtcaagcaccgtagaacacgatccggatgttacacatgtcggagtagacgagtcaagtgtgacgaggcgcgtcccatttgcgaccgatgtcgcaaagggaaaagagactgtgtgtaccccgatccgccagcaaccaaaggatcgaccggcatcggtacgtcgaaagacgcagccttgaccagtcaaggaacaagtccagagttgtcgtcagacgacgaagacgatttagacaaggagcccaaattggaatccattccagatgaggacttattcgttgataattcaagccaacagaccaggtcatcgaaagcattgcgccggaaaaacacaatttcgtctctgaatctgcataaaatgtccattcgtcatagctcggaaacaccatcactcgaaggaacaaagagctcttcaccttccatctctacagctacttctgcaagcttctctacgacgatacaatcatccgacccagcgttaccaccgagtacggcaaatcccgagtggtcccatcttccgaaagagctgcaatactacctggcttacttccgtgacaatattagctccttgaactacggtatacccaacgacccagacgatttcttcaattcaatcttgttgagtctggcggtccaagacggaaacgagtcgttactctacgcgatagtagggttcgcagcctatcaatgcactatacgaaacccccaagggaagattgaagacttttttgggtactacaacaaaagcgtcaacctgcttttaaccaatttgaagcgggaaaagaaaaggcgaacaacaatattactcactattcttcaactcgctacaatcgaagaatacctcggcgattgggtaaatctatcaggacaccaaaaagcggctttggagatattgacacttctctttacacccgaaacgatcacacaatctcccgtcagccggtcgctcttgacgtggtatgttcggttcgatgttaccatcgctatgatggcaaattttgcgccagatgtacaaagagaatacatggccgccgctgtcagtttttgccagaaaatgatagaccagagcccggataacctactatggcgaatcgagcgcgaagccaccgctttacgattaatatcggccgatatggctgtcttatttgccaaggctgctcgtggagacgtatccggcaaagaatttgccttcgaacattctcagatttcagcacagctatctgattggaaatcctcgcttgatcccaggatcatggactcgaaatatctgataacggagtttccggaccgagggtcattgacagaagacgatgtcatagaccctcatcaagcgggcgatttgtacatgggacccatctttgggacgactataatcatacaagagtggcactcgatcctcttaatgcacaggagccaggaaggcctcacattgcagcaagagccgtcccaagaacttaagcgcacagctcttacaatatgtgcggtttttgaagccttgaggcggctaccatctattcctaacggggcactcattgccgcccacgctccacttgcaatggcatctatttttgtacccagagatgagaaacaccacatgtggatccgacgaagatttgcggaattagaaataggaggatacatattccctaccacaatgcggaaccggatggccgatttcttccacgacaaatcatgtcaacagtggtgggtgcccaatgacgaggggctgaactcgacgcttcgaggaatacgtgcatttaccgacgagaataaccacaaacctgtgtctgctcagacagaagctgttcgagaaatgtgcgccatcttctcaaaaattgcacgtagatcaagaagacacaccacctcctaa

SEQ ID NO: 37028 - protein, 709 aa, Muscodor strobelii
  misc_feature: SGI Peptide ID NO. 572845
  misc_feature (96)..(134): Pfam Id: PF00172 Pfam Desc: Fungal Zn(2)-Cys(6) binuclear cluster domain
  misc_feature (1)..(699): NCBI GI: 116196198 Blast Desc: CHGG_04697 [Chaetomium globosum CBS 148.51] gi|88180610|gb|EAQ88078.1| CHGG_04697 [Chaetomium globosum CBS 148.51]
  misc_feature (4)..(702): NCBI GI: 171690416 Blast Desc: protein product [Podospora anserina] gi|170945156|emb|CAP71267.1| protein product [Podospora anserina]
  misc_feature (4)..(699): NCBI GI: 46121447 Blast Desc: FG05102.1 [Gibberella zeae PH-1]
  misc_feature (4)..(700): NCBI GI: 256726898 Blast Desc: NECHADRAFT_32532 [Nectria haematococca mpVI 77-13-4]
  misc_feature (159)..(699): NCBI GI: 261352501 Blast Desc: conserved [Verticillium albo-atrum VaMs.102]
  misc_feature (118)..(632): NCBI GI: 154298422 Blast Desc: BC1G_11666 [Botryotinia fuckeliana B05.10] gi|150858119|gb|EDN33311.1| BC1G_11666 [Botryotinia fuckeliana B05.10]
  misc_feature (118)..(699): NCBI GI: 156045121 Blast Desc: SS1G_09749 [Sclerotinia sclerotiorum 1980] gi|154694144|gb|EDN93882.1| SS1G_09749 [Sclerotinia sclerotiorum 1980]
  misc_feature (65)..(700): NCBI GI: 225556228 Blast Desc: conserved [Ajellomyces capsulatus G186AR]
  misc_feature (65)..(700): NCBI GI: 240276690 Blast Desc: C6 finger domain-containing protein [Ajellomyces capsulatus H143]
  misc_feature (84)..(700): NCBI GI: 119481059 Blast Desc: C6 finger domain protein, [Neosartorya fischeri NRRL 181] gi|119408712|gb|EAW18661.1| C6 finger domain protein, [Neosartorya fischeri NRRL 181]
MSGYYHSSSSFPEMGYLPNMNPQDEQDTQYHHQQLTPQLESSPVTFVSPYQSLGYFTGFPDPNVYQQQAKPPSQNNRSRKKSTPGADHVKHRRTRSGCYTCRSRRVKCDEARPICDRCRKGKRDCVYPDPPATKGSTGIGTSKDAALTSQGTSPELSSDDEDDLDKEPKLESIPDEDLFVDNSSQQTRSSKALRRKNTISSLNLHKMSIRHSSETPSLEGTKSSSPSISTATSASFSTTIQSSDPALPPSTANPEWSHLPKELQYYLAYFRDNISSLNYGIPNDPDDFFNSILLSLAVQDGNESLLYAIVGFAAYQCTIRNPQGKIEDFFGYYNKSVNLLLTNLKREKKRRTTILLTILQLATIEEYLGDWVNLSGHQKAALEILTLLFTPETITQSPVSRSLLTWYVRFDVTIAMMANFAPDVQREYMAAAVSFCQKMIDQSPDNLLWRIEREATALRLISADMAVLFAKAARGDVSGKEFAFEHSQISAQLSDWKSSLDPRIMDSKYLITEFPDRGSLTEDDVIDPHQAGDLYMGPIFGTTIIIQEWHSILLMHRSQEGLTLQQEPSQELKRTALTICAVFEALRRLPSIPNGALIAAHAPLAMASIFVPRDEKHHMWIRRRFAELEIGGYIFPTTMRNRMADFFHDKSCQQWWVPNDEGLNSTLRGIRAFTDENNHKPVSAQTEAVREMCAIFSKIARRSRRHTTS

SEQ ID NO: 37029 - DNA, 4012 bp, Muscodor strobelii
  misc_feature: SGI EST ID NO. CUFF.88467.0
  misc_feature: Variant of the nucleotide sequence at SEQ ID NO 37027
gtgccgccgacatcaaaatgctgcaggtgaggattacagtagaagcaatagagaaggacgtagtagccggcctatcccgatttcgatgtcgatttcacaccaccctatctctagacagccctactttagtaaactatgttcccgcgaaggggaccttgcccagattaagacccctaatactctagtagttaatgacaatcaggctgctctcaattaaagatgcaggcggcaccagaattatagcaactgtcgattctttactttacactcactaggtaccatataagatgaagggtttccccttactacaagttacgacaagagcatacccagtcatcaacggtttgacaatctgccgcacgagggagagccccgctacccatacatgtccagtcatccccgtcaaacgatcttcgacaagctacttctgataggaccgaactgtaacgtcgaggagaacgacaaggtagacaacgaaccccacagtgccgtcaattggggcacagatccttttcttcacaagcttgatacatataattgagatctgtatcacgtttgggttatttggatggagcttggtcctcttgagcctcgggataccagatcactataggccaagggtgatattatttgtaccggtctacttcacatcttcatttcacgagcaacttactattccagcattcatccaatttgagaagcgcccagggggatgccaaccgccgtagaaggacgggtgcgacactccaacgagttggatggttgacttggtgcataactaccgcccgctaacccaatgaaatccgtctgcatactcatacgttgttgaaacccgttcagcaaatgacatctcaccggcataatatatcaacgaactacatttcagccactcagggagtctgccggtccttctcggaaagcaacttagctacacatctgagtacatgctcgattgctactctctgaatctatccgaggagacatagttgtgtcttcatagaagatcaccgaatgaatctatacacgaagaataacaacaagttcagagcagataacagcaagactagaccattgtacaagttgtaacattttactcactatcatacgcccgcccggacacgctttcagatccgaagctctgccatgagtggctactaccactcctcttcctcctttccggagatggggtatctacccaatatgaatccccaggatgagcaggacacacaataccaccaccaacagttaaccccgcagttagaaagttcacctgttacctttgtcagtccgtatcaaagccttgggtatttcacagggtttcctgatcccaatgtatatcaacaacaagcaaagcctccatctcaaaacaatcgaagtcgaaagaagtcaacgcctggagcagatcatgtcaagcaccgtagaacacgatccggatgttacacatgtcggagtagacgagtcaagtgtgacgaggcgcgtcccatttgcgaccgatgtcgcaaagggaaaagagactgtgtgtaccccgatccgccagcaaccaaaggatcgaccggcatcggtacgtcgaaagacgcagccttgaccagtcaaggaacaagtccagagttgtcgtcagacgacgaagacgatttagacaaggagcccaaattggaatccattccagatgaggacttattcgttgataattcaagccaacagaccaggtcatcgaaagcattgcgccggaaaaacacaatttcgtctctgaatctgcataaaatgtccattcgtcatagctcggaaacaccatcactcgaaggaacaaagagctcttcaccttccatctctacagctacttctgcaagcttctctacgacgatacaatcatccgacccagcgttaccaccgagtacggcaaatcccgagtggtcccatcttccgaaagagctgcaatactacctggcttacttccgtgacaatattagctccttgaactacggtatacccaacgacccagacgatttcttcaattcaatcttgttgagtctggcggtccaagacggaaacgagtcgttactctacgcgatagtagggttcgcagcctatcaatgcactatacgaaacccccaagggaagattgaagacttttttgggtactacaacaaaagcgtcaacctgcttttaaccaatttgaagcgggaaaagaaaaggcgaacaacaatattactcactattcttcaactcgctacaatcgaagaatacctcggcgattgggtaaatctatcaggacaccaaaaagcggctttggagatattgacacttctctttacacccgaaacgatcacacaatctcccgtcagccggtcgctcttgacgtggtatgttcggttcgatgttaccatcgctatgatggcaaattttgcgccagatgtacaaagagaatacatggccgccgctgtcagtttttgccagaaaatgatagaccagagcccggataacctactatggcgaatcgagcgcgaagccaccgctttacgattaatatcggccgatatggctgtcttatttgccaaggctgctcgtggagacgtatccggcaaagaatttgccttcgaacattctcagatttcagcacagctatctgattggaaatcctcgcttgatcccaggatcatggactcgaaatatctgataacggagtttccggaccgagggtcattgacagaagacgatgtcatagaccctcatcaagcgggcgatttgtacatgggacccatctttgggacgactataatcatacaagagtggcactcgatcctcttaatgcacaggagccaggaaggcctcacattgcagcaagagccgtcccaagaacttaagcgcacagctcttacaatatgtgcggtttttgaagccttgaggcggctaccatctattcctaacggggcactcattgccgcccacgctccacttgcaatggcatctatttttgtacccagagatgagaaacaccacatgtggatccgacgaagatttgcggaattagaaataggaggatacatattccctaccacaatgcggaaccggatggccgatttcttccacgacaaatcatgtcaacagtggtgggtgcccaatgacgaggggctgaactcgacgcttcgaggaatacgtgcatttaccgacgagaataaccacaaacctgtgtctgctcagacagaagctgttcgagaaatgtgcgccatcttctcaaaaattgcacgtagatcaagaagacacaccacctcctaattacgagacttatggatccaacacggcagcacaagacaaaggcaagagtgttgagggcagaagctaaaggatcaccgcatcatcaacgacactattctcggtaccgatgcgatactcggtgaaattgttgaaacttcggaactgcaatgccaccgacttgaatgtctgcttgagcataaagaagcttgaactgcgaattttggtcgacgatggacgtcagacaataagacgcatgttaagacttccgaagagccgcaatgcaccaagtgaccagggtatgaaacaccatagagtaccacaggatgggctgtggtgggctcaacgctcgggatgagaccgaacccgctacgtaccggctggtgtttcatgcgggtcaaggttcatgggttatgtacatgaggtggcatgcgcatgaacctgtgtgcgttcatcatcaacggcgccgttcgggaagagcgcatcatctcacatgagctgcatgatattgccaaggcccccagggagaaccagactctcggaaagtcttgtctgtcccggccggcagatcttaggatgaatatctatctggtcgacggttctaacaaggttctcacgtaatcctccacgatagaggatctacttagacactctactatagaaacatgatcaacgaaccataaatgaacaagcttatactgatacgtcactatgcttgtgaagatgacactaaacccactctcagcttacgttgcacaacagg

SEQ ID NO: 37030 - DNA, 1389 bp, Muscodor strobelii
  misc_feature: SGI cDNA ID NO. 572846
  misc_feature: Reduced expression when VOC is produced
  misc_feature: Encodes the peptide sequence at SEQ ID NO 37031
atgtcgctggcccaaggttcgcctaggctgcctagccccccgccgcctgctgagatccagctcgggcccaaatcacctggactgggcaacaccaaccagatggaacagaccatcgccgacgccaactctaagcggcgcatacatcccggcaccaaggcagaggacatggctgccggtccgcctctggtgcctctgaacgagcttgactcagctttccagctccaagagcatctcgcagccttgcactggcaccacaccgcccacaacaccatccccatatcccgccagacagcagcccacctgacccagccgccgcccggcgtagaccgaactatgtggctctatgagctatgccgattcctcatcgcccagtgcaacggcctgatcgtcggcttcctcttcgactcgccgccctgctcatccgctacctgtcccgagatgcgagcctccgaatggcagttcctatgcgccgtccacgagcagcccaagagctgctgcgccatcgactactgctgtcacacccttgactgggccgccaacatcgtcacgaaccccaagatattccccagtcgctttgtgctggtgtctgaaggcgtcgataagagcgccgtgctgaagaacctgatcaacgtgtttcgacgactgcacagaatcttcgcgcatgcctggttccagcaccgaggtgtgttctggtcggtggagtcacagactggcctatatgccttcttcaagacggtctgcgacatgtacgatctcttacccgcggagaactacaagctaccacccgaggccgagggtctagaacctgagccctcagccaaagatgagaagcgacaggtcacggccatcgccaaaccaccttcaaatcacagcgacagcttcgagcacgacgatgataggatcggtcttcaagcccgtagaagcaatacagctagacactcgagtcggccatcaaccggtagtgccgtgacgactgtcatcgaggaacgagaagacgagcattcagaggtcaccgacaagttcagaggcatgcacatctccgcccccgaactcgtagaagaagagtccgaggtcgaggtccccgtcatcgtcgaaagtggcatgatggaggaacccacgcccacaaccgcccaaccaccaacagatctcacgcgcaaccgtgacacggcgacacacacagaagatgcagcagagcaaagcgatgaatcttccgatactccattactcggtcaagatacgcccatctcaggagatagcgactctgcgagcggcgatgaagacgcaccgccctcgacggcaatccaagatttcgcggagccatcatctacatccacagagaaaacggacgagggagaagagaaatccacagagagtgcggagaaggaatag

SEQ ID NO: 37031 - protein, 462 aa, Muscodor strobelii
  misc_feature: SGI Peptide ID NO. 572846
  misc_feature (84)..(262): Pfam Id: PF03637 Pfam Desc: Mob1/phocein family
  misc_feature (139)..(262): Pfam Id: PF03637 Pfam Desc: Mob1/phocein family
  misc_feature (18)..(384): NCBI GI: 261352502 Blast Desc: Mob1 family protein [Verticillium albo-atrum VaMs.102]
  misc_feature (18)..(349): NCBI GI: 256727470 Blast Desc: NECHADRAFT_32367 [Nectria haematococca mpVI 77-13-4]
  misc_feature (17)..(365): NCBI GI: 116196196 Blast Desc: CHGG_04696 [Chaetomium globosum CBS 148.51] gi|88180609|gb|EAQ88077.1| CHGG_04696 [Chaetomium globosum CBS 148.51]
  misc_feature (18)..(349): NCBI GI: 46121445 Blast Desc: FG05101.1 [Gibberella zeae PH-1]
  misc_feature (18)..(455): NCBI GI: 156045565 Blast Desc: SS1G_09973 [Sclerotinia sclerotiorum 1980] gi|154694366|gb|EDN94104.1| SS1G_09973 [Sclerotinia sclerotiorum 1980]
  misc_feature (18)..(390): NCBI GI: 164423842 Blast Desc: NCU07674 [Neurospora crassa OR74A] gi|157070254|gb|EAA33080.2| conserved [Neurospora crassa OR74A]
  misc_feature (17)..(365): NCBI GI: 145612383 Blast Desc: MGG_07095 [Magnaporthe grisea 70-15] gi|145019561|gb|EDK03789.1| MGG_07095 [Magnaporthe grisea 70-15]
  misc_feature (64)..(385): NCBI GI: 171690418 Blast Desc: protein product [Podospora anserina] gi|170945157|emb|CAP71268.1| protein product [Podospora anserina]
  misc_feature (18)..(449): NCBI GI: 121715700 Blast Desc: Mob1 family protein [Aspergillus clavatus NRRL 1] gi|119403616|gb|EAW14033.1| Mob1 family protein [Aspergillus clavatus NRRL 1]
  misc_feature (18)..(333): NCBI GI: 258577419 Blast Desc: conserved [Uncinocarpus reesii 1704] gi|237903157|gb|EEP77558.1| conserved [Uncinocarpus reesii 1704]
  misc_feature: Useful for introducing or modulating the production of volatile compounds
MSLAQGSPRLPSPPPPAEIQLGPKSPGLGNTNQMEQTIADANSKRRIHPGTKAEDMAAGPPLVPLNELDSAFQLQEHLAALHWHHTAHNTIPISRQTAAHLTQPPPGVDRTMWLYELCRFLIAQCNGLIVGFLFDSPPCSSATCPEMRASEWQFLCAVHEQPKSCCAIDYCCHTLDWAANIVTNPKIFPSRFVLVSEGVDKSAVLKNLINVFRRLHRIFAHAWFQHRGVFWSVESQTGLYAFFKTVCDMYDLLPAENYKLPPEAEGLEPEPSAKDEKRQVTAIAKPPSNHSDSFEHDDDRIGLQARRSNTARHSSRPSTGSAVTTVIEEREDEHSEVTDKFRGMHISAPELVEEESEVEVPVIVESGMMEEPTPTTAQPPTDLTRNRDTATHTEDAAEQSDESSDTPLLGQDTPISGDSDSASGDEDAPPSTAIQDFAEPSSTSTEKTDEGEEKSTESAEKE

SEQ ID NO: 37032 - DNA, 2437 bp, Muscodor strobelii
  misc_feature: SGI EST ID NO. CUFF.88498.0
  misc_feature: Variant of the nucleotide sequence at SEQ ID NO 37030
cagctccagcagctctgccagcttcaatcaatattcagtgtttggattggatgaaacttaggcgtgcaaacaacacatcttcaacaccacgaaacaacgcacccgcatcgtacaaacaacccccacccgaccttaacgagagagcgccggccttgaagtaaccagagcaatcccaaatgacgatgtcgctggcccaaggttcgcctaggctgcctagccccccgccgcctgctgagatccagctcgggcccaaatcacctggactgggcaacaccaaccagatggaacagaccatcgccgacgccaactctaagcggcgcatacatcccggcaccaaggcagaggacatggctgccggtccgcctctggtgcctctgaacgagcttgactcagctttccagctccaagagcatctcgcagccttgcactggcaccacaccgcccacaacaccatccccatatcccgccagacagcagcccacctgacccagccgccgcccggcgtagaccgaactatgtggctctatgagctatgccgattcctcatcgcccagtgcaacggcctgatcgtcggcttcctcttcgactcgccgccctgctcatccgctacctgtcccgagatgcgagcctccgaatggcagttcctatgcgccgtccacgagcagcccaagagctgctgcgccatcgactactgctgtcacacccttgactgggccgccaacatcgtcacgaaccccaagatattccccagtcgctttgtgctggtgtctgaaggcgtcgataagagcgccgtgctgaagaacctgatcaacgtgtttcgacgactgcacagaatcttcgcgcatgcctggttccagcaccgaggtgtgttctggtcggtggagtcacagactggcctatatgccttcttcaagacggtctgcgacatgtacgatctcttacccgcggagaactacaagctaccacccgaggccgagggtctagaacctgagccctcagccaaagatgagaagcgacaggtcacggccatcgccaaaccaccttcaaatcacagcgacagcttcgagcacgacgatgataggatcggtcttcaagcccgtagaagcaatacagctagacactcgagtcggccatcaaccggtagtgccgtgacgactgtcatcgaggaacgagaagacgagcattcagaggtcaccgacaagttcagaggcatgcacatctccgcccccgaactcgtagaagaagagtccgaggtcgaggtccccgtcatcgtcgaaagtggcatgatggaggaacccacgcccacaaccgcccaaccaccaacagatctcacgcgcaaccgtgacacggcgacacacacagaagatgcagcagagcaaagcgatgaatcttccgatactccattactcggtcaagatacgcccatctcaggagatagcgactctgcgagcggcgatgaagacgcaccgccctcgacggcaatccaagatttcgcggagccatcatctacatccacagagaaaacggacgagggagaagagaaatccacagagagtgcggagaaggaataggagtccaaaacccgccagcgaatggaggagcaccgtatcaatctctcggacgtagacgatgtcatgaaacgcggaagacaactcagtctgcaactgcaaaagatggaacaatccatcagtgcgtcggggaacgaggaatcaagccctgacccgggcgcgaagagactcgttgagcagacgagagaggttgctagtaggctgcgcgagagcctgaatcagcaggttgtggggaggaagaggaagtctacctaagggaacagcctgctgttttgtgctgtgatgcatgcctgagcgaagaggatgaagcatagtgggtttgaggcgagagagcgagcatggtctgcgcgtgcgaatgtatgatctctgaacaatgagaatattgtaggattaagatgcgcgcagcatcatgaacatattgcatgttacggattacataccgctgcatggaatcataattataaccattgtatctatgctctacttcgtctcattacttcttggatctctccccaccgttcaagtgctgtgactagaaaaagggtggtgtagtgagtggaagtggttcgttcagaccgtgcagatcggtcatcgaattcagactattcaagagtctgaagccatgatgattgagggaggaggcatccaacacgcaaaagatcgagccagcaagtcaaatcaattgctcaaatcccgaaaaagatgccaaaaaaatggtttgcttctctttgattacatgtgtcatccttagtgcaggggccatgctactgcgaagttcgttagttgggcaattcatgtgacaacgtggggaatcgaacgggtggtcttcttacatcttctctgtatcgtttcaaattgaccaaatgccc

SEQ ID NO: 37033 - DNA, 1056 bp, Muscodor strobelii
  misc_feature: SGI cDNA ID NO. 572847
  misc_feature: Elevated expression when VOC is produced
  misc_feature: Encodes the peptide sequence at SEQ ID NO 37034
atgtggctctatgagctatgccgattcctcatcgcccagtgcaacggcctgatcgtcggcttcctcttcgactcgccgccctgctcatccgctacctgtcccgagatgcgagcctccgaatggcagttcctatgcgccgtccacgagcagcccaagagctgctgcgccatcgactactgctgtcacacccttgactgggccgccaacatcgtcacgaaccccaagatattccccagtcgctttgtgctggtgtctgaaggcgtcgataagagcgccgtgctgaagaacctgatcaacgtgtttcgacgactgcacagaatcttcgcgcatgcctggttccagcaccgaggtgtgttctggtcggtggagtcacagactggcctatatgccttcttcaagacggtctgcgacatgtacgatctcttacccgcggagaactacaagctaccacccgaggccgagggtctagaacctgagccctcagccaaagatgagaagcgacaggtcacggccatcgccaaaccaccttcaaatcacagcgacagcttcgagcacgacgatgataggatcggtcttcaagcccgtagaagcaatacagctagacactcgagtcggccatcaaccggtagtgccgtgacgactgtcatcgaggaacgagaagacgagcattcagaggtcaccgacaagttcagaggcatgcacatctccgcccccgaactcgtagaagaagagtccgaggtcgaggtccccgtcatcgtcgaaagtggcatgatggaggaacccacgcccacaaccgcccaaccaccaacagatctcacgcgcaaccgtgacacggcgacacacacagaagatgcagcagagcaaagcgatgaatcttccgatactccattactcggtcaagatacgcccatctcaggagatagcgactctgcgagcggcgatgaagacgcaccgccctcgacggcaatccaagatttcgcggagccatcatctacatccacagagaaaacggacgagggagaagagaaatccacagagagtgcggagaaggaatag

SEQ ID NO: 37034 - protein, 351 aa, Muscodor strobelii
  misc_feature: SGI Peptide ID NO. 572847
  misc_feature (28)..(151): Pfam Id: PF03637 Pfam Desc: Mob1/phocein family
  misc_feature (1)..(273): NCBI GI: 261352502 Blast Desc: Mob1 family protein [Verticillium albo-atrum VaMs.102]
  misc_feature (1)..(238): NCBI GI: 256727470 Blast Desc: NECHADRAFT_32367 [Nectria haematococca mpVI 77-13-4]
  misc_feature (1)..(254): NCBI GI: 116196196 Blast Desc: CHGG_04696 [Chaetomium globosum CBS 148.51] gi|88180609|gb|EAQ88077.1| CHGG_04696 [Chaetomium globosum CBS 148.51]
  misc_feature (1)..(238): NCBI GI: 46121445 Blast Desc: FG05101.1 [Gibberella zeae PH-1]
  misc_feature (1)..(274): NCBI GI: 171690418 Blast Desc: protein product [Podospora anserina] gi|170945157|emb|CAP71268.1| protein product [Podospora anserina]
  misc_feature (1)..(344): NCBI GI: 156045565 Blast Desc: SS1G_09973 [Sclerotinia sclerotiorum 1980] gi|154694366|gb|EDN94104.1| SS1G_09973 [Sclerotinia sclerotiorum 1980]
  misc_feature (1)..(279): NCBI GI: 164423842 Blast Desc: NCU07674 [Neurospora crassa OR74A] gi|157070254|gb|EAA33080.2| conserved [Neurospora crassa OR74A]
  misc_feature (1)..(254): NCBI GI: 145612383 Blast Desc: MGG_07095 [Magnaporthe grisea 70-15] gi|145019561|gb|EDK03789.1| MGG_07095 [Magnaporthe grisea 70-15]
  misc_feature (1)..(338): NCBI GI: 121715700 Blast Desc: Mob1 family protein [Aspergillus clavatus NRRL 1] gi|119403616|gb|EAW14033.1| Mob1 family protein [Aspergillus clavatus NRRL 1]
  misc_feature (1)..(222): NCBI GI: 258577419 Blast Desc: conserved [Uncinocarpus reesii 1704] gi|237903157|gb|EEP77558.1| conserved [Uncinocarpus reesii 1704]
  misc_feature: Useful for introducing or modulating the production of volatile compounds
MWLYELCRFLIAQCNGLIVGFLFDSPPCSSATCPEMRASEWQFLCAVHEQPKSCCAIDYCCHTLDWAANIVTNPKIFPSRFVLVSEGVDKSAVLKNLINVFRRLHRIFAHAWFQHRGVFWSVESQTGLYAFFKTVCDMYDLLPAENYKLPPEAEGLEPEPSAKDEKRQVTAIAKPPSNHSDSFEHDDDRIGLQARRSNTARHSSRPSTGSAVTTVIEEREDEHSEVTDKFRGMHISAPELVEEESEVEVPVIVESGMMEEPTPTTAQPPTDLTRNRDTATHTEDAAEQSDESSDTPLLGQDTPISGDSDSASGDEDAPPSTAIQDFAEPSSTSTEKTDEGEEKSTESAEKE

SEQ ID NO: 37035 - DNA, 2437 bp, Muscodor strobelii; identical to SEQ ID NO: 37032
  misc_feature: SGI EST ID NO. CUFF.88498.0
  misc_feature: Variant of the nucleotide sequence at SEQ ID NO 37033

SEQ ID NO: 37036 - DNA, 1146 bp, Muscodor strobelii
  misc_feature: SGI cDNA ID NO. 572848
  misc_feature: Elevated expression when VOC is produced
  misc_feature: Encodes the peptide sequence at SEQ ID NO 37037
atggatcttgacgatgatgcccctccagagctcgtcgaagcggggcctggcgagaacaacgaggctccggaagagaaatcgatcaaagtgccaataactatagtcactggatacttgggtgctggcaaaactactcttctgaattacatcttaactgcccgtcatggcaagaaaatcgctgtcatcatgaatgagttcggtgactcgctcgatatagagaagtctctcacggtgaacagaggtggcgagcaggtcgaggagtggctcgaagtcggcaatggctgcatctgctgctcagtgaaggataccggagttaatgcgattgaagccctgatggaaaagaagggagccttcgactacattctgctcgagacaacgggtttagcagaccctggcaaccttgcgcccctattctgggttgatgacggtcttggcagcaccatctaccttgatggcatcgtcactttagtcgatgcaaagaatatcctgctcagtctcgatgatcccgctgggaaggctgaaggtcatgaagatcatgatcaccatggccccttgatgacgacagcccatgtccagatatctcatgccgatgttgtggtcatcaacaaatctgatctagtcactgccgatgaactcgaaaatgtcaaggcgcggatacaagcaattaatggcctcgcaaaaattcatgtcacatcacaaagcgaagtaccccagctggaaggtgttttacttgacttacatgcctacgatcaagtcgagacgctggataataccgccaaggggcacagtcatcttgaccctactatctcgacgacttccttcaatgtgcccttattagaagcaacccagctcgacgaagtcgaccgatggctaagatcaattctatgggagggcgaagtcccaaattctacagataaaactacgtctcttgagatacaccgttcgaaagcgcgattggtgttcaaaaacggagatgtaaagatcgttcaaggagtccgcgagatattcgagatatttgacggtgaaaagataacgtctggcgatccagcatcgcagacgggcaagatcgtgctgataggaaggggcgtacatggcatcgactttgagaagagctttcttgacggaatacgggtcacaaatgattga

SEQ ID NO: 37037 - protein, 381 aa, Muscodor strobelii
  misc_feature: SGI Peptide ID NO. 572848
  misc_feature (31)..(230): Pfam Id: PF02492 Pfam Desc: CobW/HypB/UreG, nucleotide-binding domain
  misc_feature (1)..(372): NCBI GI: 261352503 Blast Desc: COBW domain-containing protein [Verticillium albo-atrum VaMs.102]
  misc_feature (1)..(377): NCBI GI: 171690420 Blast Desc: protein product [Podospora anserina] gi|170945158|emb|CAP71269.1| protein product [Podospora anserina]
  misc_feature (1)..(360): NCBI GI: 46121443 Blast Desc: FG05100.1 [Gibberella zeae PH-1]
  misc_feature (2)..(363): NCBI GI: 119178666 Blast Desc: CIMG_08141 [Coccidioides immitis RS]
  misc_feature (2)..(363): NCBI GI: 240104677 Blast Desc: CobW/HypB/UreG, nucleotide-binding domain containing protein [Coccidioides posadasii C735 delta SOWgp]
  misc_feature (1)..(371): NCBI GI: 256726899 Blast Desc: NECHADRAFT_90950 [Nectria haematococca mpVI 77-13-4]
  misc_feature (4)..(363): NCBI GI: 255946183 Blast Desc: Pc20g13810 [Penicillium chrysogenum Wisconsin 54-1255] gi|211588594|emb|CAP86710.1| Pc20g13810 [Penicillium chrysogenum Wisconsin 54-1255]
  misc_feature (4)..(372): NCBI GI: 238496471 Blast Desc: CobW domain protein [Aspergillus flavus NRRL3357] gi|220694351|gb|EED50695.1| CobW domain protein [Aspergillus flavus NRRL3357]
  misc_feature (4)..(361): NCBI GI: 212543979 Blast Desc: CobW domain protein [Penicillium marneffei ATCC 18224] gi|210067051|gb|EEA21144.1| CobW domain protein [Penicillium marneffei ATCC 18224]
  misc_feature (4)..(352): NCBI GI: 259479616 Blast Desc: TPA: CobW domain protein (AFU_orthologue; AFUA_2G11720) [Aspergillus nidulans FGSC A4]
  misc_feature: Useful for introducing or modulating the production of volatile compounds
MDLDDDAPPELVEAGPGENNEAPEEKSIKVPITIVTGYLGAGKTTLLNYILTARHGKKIAVIMNEFGDSLDIEKSLTVNRGGEQVEEWLEVGNGCICCSVKDTGVNAIEALMEKKGAFDYILLETTGLADPGNLAPLFWVDDGLGSTIYLDGIVTLVDAKNILLSLDDPAGKAEGHEDHDHHGPLMTTAHVQISHADVVVINKSDLVTADELENVKARIQAINGLAKIHVTSQSEVPQLEGVLLDLHAYDQVETLDNTAKGHSHLDPTISTTSFNVPLLEATQLDEVDRWLRSILWEGEVPNSTDKTTSLEIHRSKARLVFKNGDVKIVQGVREIFEIFDGEKITSGDPASQTGKIVLIGRGVHGIDFEKSFLDGIRVTND

SEQ ID NO: 37038 - DNA, 1711 bp, Muscodor strobelii
  misc_feature: SGI EST ID NO. CUFF.88531.1
  misc_feature: Variant of the nucleotide sequence at SEQ ID NO 37036
tcactaagcatcctataccgacagcctgaagtttacgaaatttcatatacatcagacccattagatttttgttcattttcgttcaaaacttcatactgagaagcatacgggaagtccctaagctatcaccatggatcttgacgatgatgcccctccagagctcgtcgaagcggggcctggcgagaacaacgaggctccggaagagaaatcgatcaaagtgccaataactatagtcactggatacttgggtgctggcaaaactactcttctgaattacatcttaactgcccgtcatggcaagaaaatcgctgtcatcatgaatgagttcggtgactcgctcgatatagagaagtctctcacggtgaacagaggtggcgagcaggtcgaggagtggctcgaagtcggcaatggctgcatctgctgctcagtgaaggataccggagttaatgcgattgaagccctgatggaaaagaagggagccttcgactacattctgctcgagacaacgggtttagcagaccctggcaaccttgcgcccctattctgggttgatgacggtcttggcagcaccatctaccttgatggcatcgtcactttagtcgatgcaaagaatatcctgctcagtctcgatgatcccgctgggaaggctgaaggtcatgaagatcatgatcaccatggccccttgatgacgacagcccatgtccagatatctcatgccgatgttgtggtcatcaacaaatctgatctagtcactgccgatgaactcgaaaatgtcaaggcgcggatacaagcaattaatggcctcgcaaaaattcatgtcacatcacaaagcgaagtaccccagctggaaggtgttttacttgacttacatgcctacgatcaagtcgagacgctggataataccgccaaggggcacagtcatcttgaccctactatctcgacgacttccttcaatgtgcccttattagaagcaacccagctcgacgaagtcgaccgatggctaagatcaattctatgggagggcgaagtcccaaattctacagataaaactacgtctcttgagatacaccgttcgaaagcgcgattggtgttcaaaaacggagatgtaaagatcgttcaaggagtccgcgagatattcgagatatttgacggtgaaaagataacgtctggcgatccagcatcgcagacgggcaagatcgtgctgataggaaggggcgtacatggcatcgactttgagaagagctttcttgacggaatacgggtcacaaatgattgatagcccacaagccatcatcaatctcgcgatagacttcatttgaggtaattgacatcgagcgatgaggagctaacgtatccaccgctagtcacacccagctctcgtctacaagagggcaagtctttgatctagggccaggctttagcttttgaaaagtctacggtactatcaaagtctagacatcatcagcataatggcctagaggctgctcagacaaagaaacgtcagacgctcaattagatctctacctttgaaattggcgagaagaaaacgccacaaggacaagtagacaaagaataggctatctttagtacattgaaacaagactcttgttttgtaaataaagaactcattacatgatcctcttgaagagcgcgtttataagagttgacaatgtcctgagattctatcacagctagcatcaagcagtccaat

SEQ ID NO: 37039 - DNA, 276 bp, Muscodor strobelii
  misc_feature: SGI cDNA ID NO. 572849
  misc_feature: Encodes the peptide sequence at SEQ ID NO 37040
atgcaacgaccaggagcaataccacagaccttgagagggatgccgcaaggctttggaaaccagcaacagcaacaacagcccggtagaggagtatcaaatcgaatgccaaatgggaaactagcaaacaatggtggcggatgggcttttggcaacgtccctatgggtggtgcggcggcgagctctcttcaaaactcctccaggtcgctagggggcaacaaccttagcttcgcacagagcctcggcgcctcacaatctacatcactagacccctcgtaa

SEQ ID NO: 37040 - protein, 91 aa, Muscodor strobelii
  misc_feature: SGI Peptide ID NO. 572849
  misc_feature (1)..(91): NCBI GI: 46121443 Blast Desc: FG05100.1 [Gibberella zeae PH-1]
  misc_feature (1)..(91): NCBI GI: 116196194 Blast Desc: CHGG_04695 [Chaetomium globosum CBS 148.51] gi|88180608|gb|EAQ88076.1| CHGG_04695 [Chaetomium globosum CBS 148.51]
  misc_feature (1)..(89): NCBI GI: 156045119 Blast Desc: SS1G_09748 [Sclerotinia sclerotiorum 1980] gi|154694143|gb|EDN93881.1| SS1G_09748 [Sclerotinia sclerotiorum 1980]
  misc_feature (4)..(91): NCBI GI: 256726899 Blast Desc: NECHADRAFT_90950 [Nectria haematococca mpVI 77-13-4]
  misc_feature (5)..(91): NCBI GI: 154298420 Blast Desc: BC1G_11665 [Botryotinia fuckeliana B05.10] gi|150858118|gb|EDN33310.1| BC1G_11665 [Botryotinia fuckeliana B05.10]
  misc_feature (1)..(89): NCBI GI: 212543755 Blast Desc: NOT2 family protein [Penicillium marneffei ATCC 18224] gi|210066939|gb|EEA21032.1| NOT2 family protein [Penicillium marneffei ATCC 18224]
  misc_feature (1)..(89): NCBI GI: 242787621 Blast Desc: NOT2 family protein [Talaromyces stipitatus ATCC 10500] gi|218721198|gb|EED20617.1| NOT2 family protein [Talaromyces stipitatus ATCC 10500]
  misc_feature (1)..(89): NCBI GI: 242787624 Blast Desc: NOT2 family protein [Talaromyces stipitatus ATCC 10500] gi|218721199|gb|EED20618.1| NOT2 family protein [Talaromyces stipitatus ATCC 10500]
  misc_feature (1)..(89): NCBI GI: 242787626 Blast Desc: NOT2 family protein [Talaromyces stipitatus ATCC 10500] gi|218721200|gb|EED20619.1| NOT2 family protein [Talaromyces stipitatus ATCC 10500]
  misc_feature (5)..(88): NCBI GI: 164423846 Blast Desc: NCU11372 [Neurospora crassa OR74A] gi|157070256|gb|EDO64999.1| conserved [Neurospora crassa OR74A]
MQRPGAIPQTLRGMPQGFGNQQQQQQPGRGVSNRMPNGKLANNGGGWAFGNVPMGGAAASSLQNSSRSLGGNNLSFAQSLGASQSTSLDPS

SEQ ID NO: 37041 - DNA, 7093 bp, Muscodor strobelii
  misc_feature: SGI EST ID NO. CUFF.88537.2
  misc_feature: Variant of the nucleotide sequence at SEQ ID NO 37039
gcaaggctgagatgggggcctaggatagaatggcgcctattggctggtatgacccaaggcgggtcaccgtcattgagtaacgaattaagctttacatagacaacatctgaacccgagctgcgactcgcatcccacatcagctactattatccataacgccatttctaccaacatccctccacaatcccatcgccgcaatccctcccaaccccgaaacgatcgagaccaacgattgaaatcgagctcctcgaacacagactttgtagtcatgcaacgaccaggagcaataccacagaccttgagagggatgccgcaaggctttggaaaccagcaacagcaacaacagcccggtagaggagtatcaaatcgaatgccaaatgggaaactagcaaacaatggtggcggatgggcttttggcaacgtccctatgggtggtgcggcggcgagctctcttcaaaactcctccaggtcgctagggggcaacaaccttagcttcgcacagagcctcggcgcctcacaatctacatcactagacccctccgaattcccgtctctgtccaacaaccctcagatgtcgagtggcaactcatcatccatgtggaatgctggtggtcgatcgatgggtggttcgatacctcgtaatcagcctacaccccattctcagcagggccagcaggacgacttctttacttcttcttcccgaatgaacacgaatcagagcgccttccgcttcggcaaccagagcacaatgggccagtcatcccagccccaacccagtagtatcgatgactttcctcctctgaacaacagcttacgcaacggtgagggtgagattggtcaggagcgaggctccaacctgatgtcaactctcggttttggtgctcagggaagcacagctggcggttccatgcagggagctcgtgcaggcaacggtctgctgaacgcccttacggccaactcgcgaagctcagatgtgcgctcacctgatgctcttggctctttaggcatgcgaggtggtagcgaggaggttcgacagagacctcctggattcatggatgatgacgctgccgacttctctaaactccaatctctctcctcgcagtcgcctcataacgctggccagcaatcggacagtcgcaatcctctcggtgccatcggtagcagtgatccctcgtcgagtaaagacaagggtgacaaggagaaggagcctcagggtcccgctgttcatgaccccctagctggcatggcagagatcgacaaatggggcatcaaaggcctccgtactctaatgaacaactatcctgacttcaacgctgctatcatcggcattgatccttcgaccttcaacctcgatctcgctagcccctccagccagaaaatctcgacgcagatctggtcgctctacgatgatgctccacctcggcctgccatccccaactttcgtcttccagagtgctacaaggtcacaaacgtgcagcctctgcgaaacaagatgcccaatttcaacgaggagacgttgatgtggatcttctacagctgtcccggtgacgagcagcagcacatggctgctgaacagcttttccaacgccagtggcgctggcacaagaagctaaagctctggctgactaaggacgagcagatgcagccccgcccgctgagccagaaccacgaggagggctactacattgtctggagcaccaccgagtggcgcaaggagcgacgccagctcacgcttcactacgccgacttggagcaagcccccaactcaacgttgtagacagaggtaatgcgttttcgtactcggtgatgagaggagatgaatgatcacgagtcggttgatcgtttggcgtttgtttttgtaggagtatcagcaagggaaccacggacatgtgatctggcatgatcggtcaggcttggtcatggcccggcgcggccttacacgaaacggatcctggatggccgggacaaaaatacggcgattgccacgcttgctacgagaacgttggtgttcccacgcctgtgggaccccaggagtagctcaagtagatatccatggtccattgaaaggggctacggataatgccttgctcggaccagtaaatgataatgagctttgctcacaacatgcctttgctctatacggtgtgactgtggttctgatgatttgactcccagtatgatgaagactatctgggcttatgttatgaagacaattttccacgatcttcctacaaagtgtgtatcattcacttcattgacgacctgattgtttagctacatctctgaaggatattggctccgcgcgttacctagtcacaaatttgacgttactgggaaacaaaggcgatgagatcgcgcagttgcagaccacgggtcgcgttccacagtggtggtttagtggcctgcgtcacctatttgtggtgggtggggcgtcttgtaggggctcacagctggttggccaaagctctatgtttacaacgtcaaaagaggagccaatcatattcctgaattgccccttcagtcatgccccagcagctagcccaccttaccacaaccgaacccgcacccgccaatatcacgtcccatcccattcccaccatcgtcatatcaccaaacaatagactcaacttttcatttcgcatactgctttggcgtcttgatttttatctgcaaaagcaatgattcattgacgtattcccgtcccatacgcgccttgtacatagtgcttgtgcaatcagccacgcgacccaaaacaacccgacgcgtccaagactttcaacttcagcaaattcgttacgatggctggccggacgcgactgcaggtggcctcagggccatggatggaagaggagcgatcgtctgccatacagatcgcacaatccgagatcgaagagtttacgttcgcagcacgcaacgactgcgactggttgaatgagcatatgaacgacatcttcagcgagaaccagataaacgttgccgagatcttcaagactcccggcaaactacgaggcaaaacacctcgaaccactcgaaaagcaaacctgggcgagaagcgcgtccctctctccaacatattctcctctacacccaaaggaggcccaaatcctctctctctatcaaaccttgccaggtctaacactccccgcgtcaaaattgctgtcgaccctcaaccctctcctcctaaagctgccgcacccgccagcccccagaaaccaccttctccactcaaacctgcagcagcaaaggcgcctgtacctgtcgtcgactctggctactatggaagccaatcccaagagggcgccatggaccttgatgatcccacctccgaacatactcagcctttcagctctcctggcaacacacagccggctcacgtcgctttccatctctctcccacggttgatgaaggattcaagagcccaactatagatgccggagcagatgatgtctccactcagtttttcactgctcatatcccagctccaacttcgtcagctaataaggctaaacacaatgaaagcacgacaccgtcaggctccccatctcaacctcacgcctcagatgccgcccaggactcgacgacacctgccaacgtgccacaagacagccacactccctctgtggagccgccggccaccacggaagtgaacatggaagacgaagtcttggaggatcccccgagatcgccctctgacggctcaagtcccattcgtccccctatccggaagagcagccttaatttcgcttcactacctgctcgtgaacccataacgcataaaagcattggaacccgggtttccagaaccagtcacttggaccagaaccgcgcgagttattaccgtcacactggtggcaaaagcttgggacatgccaagcaggacatagctgatgacgatgatgatgacgaaattgacgaggacaacgatgatatggatgtggaagagtttcccgcgcctccaaaagttcaaccacgggttgaaaccgagactgcagctaatcataacaagacatacacacaacggctccaggatcaaatcagtaagcttggaaaatctcaggctattgtgccccaagtcacaaagactgtacctgagtctacgacatctaaagcctctgccatagctgcgcctgtgcagcaagcttcagctccagtggcgcaaccagcttcgccgcccataaaatcaccacccaagaaggttaccactactcccggtgcattcccaacagacgacgaagatgatgactggactcaggcacttggcactcctgatgctgcgtccaactttgtgagcccgcgccctggcctacccaaaagctactcgacggatgttatggaaggcgtctcgggcaaagatactgtcggtggacaggacttcggattgccaaagacgcggccccaatcaagtcattacggatcgcctcagcgcgcttatacgagtggcccggagagaaccgccggcgcatttgggcatcacaagtctatgtccgttcctgttcttcctatcattggccagtatgaggacgatgagaacaacctccacaagaccgtttccgcctcaaaccccatgcttgctactgtgatggaggatgcagatgctcgacccaccacaccgaagtcaccgtcacgtggctttaacaacagccctctcaagcaggtgaaaaacaagctttcctctattcttaagagttctagaggtctcttagcaagtagtgccgccattagtgctgaaggcaaatcttccctcttgtctccttcaaccacgagactgggcttgcacttaggtgcatcgacggagactttgggatcgccaaggatccaacaatctcaacctctatatcctggcctctcacggcagaccagtgaaacccaaactctagcgagcacggctagtccaacgagaaatgaaagcaggagaacccgggcctctatcgagaaagagaaagcagaggaaaagaggaagaaagatgaagctaaagaggcacgccgcttggcccaggagaccgagaagctggagaaagctcgacagaaagagcgagagaaggcccgcgtcttcagcaaggaacaggaacgcatcgccgagctggagaagcaggttgcctcacagaaggagaaggagaagagagctgccgctgctacaccaggcaatattccaaagcccaccagatctagccccaggaaggctaaagcgcagaacgataccgatgaactgatgtctgatgctccggtatccgacgacaaaattggcgatgatgtggaaatgacagatgctacgatcgcaatgcctccaccatctatcccccgtcaagcaccttcttcggctatgaaagctagggaaatcaagcgacctgtgaagccagccaaggagccagctggcaaggccaagcaagcccccacggtcattagagtcaatatgggatcacagcataaccagtatcagccttcgaacagcacattggcatccaatctccaggataccttatcgcagccccagttgaagagcaaagcgagccagccttctcttcaaaccaaacagtccatgcaaagcctcaagagctccacgtcctcatctggtagacccaaggcacttgaagcggcagcacgaagaaaagagcaggaagagcgtgaagcccagcgcaagcgtgatgcaaaggctgaaattgaacgcaaacgcgcagctatgcaggaagaagagaagcgacaggaacagcagcgaaagctcgaggctgagcgccaaagagatgaagaacggaagcaagcagaggctaagaagacggcccagcgacaagctatgctggaaaaggcgaagcagacccgcgcccctcctccagctgcccgtagccaacccaatggtcctccagactatacccgtccgccctcgcgcatgaactcattagcccctgaacctagccggcctgtcaacactacactctccaatgcgtctaaagctcaagggaaacggcctctgcagcaggaacagaatgacgacagctctcgtccaaaccaagtccgtaatggcaatgctattcagacgaaggaaaccaaacggatgcgtctgaccgatgaactcaatgagcctggtgatagagagaagcagcctagcctgaagggtgcaccagtacgcccctcaggcggcgttcggaaggaattgcccacgaaggcaatgttcccggctggatacaccaatgtaccacctagtgccagcaaaacccaggatctcttcaaggctactgtcacaagccagcataacagccacgtcaaggctgccgctcatcctatggatgtggcacagctatcgaagggcgccattccattcgcatcttctagcaagactccggcgcggcccatgggaatggcaggtgccaagtccgccgccaagtcagctacacggtcatcaccccgcttccagaatggcgagtcaatcgagcttccagaaatcaataccgatgatgaatctgacgaagatgatgacgatgatgctgggaagggcatgatcgcggattgggctgattcaccaaatcttcgacaggcacttgtgagacaagagagccagaaccccttcgaggtgttcgggcctccggctcctatcaacatggaagaggtgtttgccaagaacagagaccgcttcgctaagttccgaaagcgtacttcgagcgcaaattgggatggacctgatggcttgacggagcaggatattcgcaaagatttggcggctagggacaagatgagacgggagggtaaatggacttatgacatgggtattgatatggcgtaatgctgttgttttgttgttatgcgaaagcattcttaggggttatatacgcacagggagggaagaaaagagtgcttgcttgccggttggttgattggttggagtaataaggctgtacttgcatcagatcggtgttggatggttggctatggttattgtctcttttgtctcgccttcttggcttgagactgatgtttttatgctgtttttactgtcgtcgctgtattgttagctgatgcttcgtgctgaaatgcagatagatacatggacagacagggagatgaatgaatagcattggactatgtgtgtggttttaatcttgg

SEQ ID NO: 37042 - DNA, 1635 bp, Muscodor strobelii
  misc_feature: SGI cDNA ID NO. 572850
  misc_feature: Encodes the peptide sequence at SEQ ID NO 37043
atggatcaagacactcccactccctctccccctcaacctctgggtcctccctcgaccaaggctgtcaagaagtctgtcagcaggcccctcctcaagaaagttcttcttcaatcttgtggccctgttacaaccgacgcaatgagagtcgacaacgcttccttctctgacatcgttggagccggagacaatctggccctcaacagcgatcagcgtcgcggagctagccgcaatactgaagctgaagaccagcactcggattcatctggcccagttggcatcatgactcctgagtcttccggaaccggaagcagcgacttgccgtcgcgtcaagacgtcccctcgctccccagtgggctcccctacgcttccgtcctttcccgcgaattcccgtctctgtccaacaaccctcagatgtcgagtggcaactcatcatccatgtggaatgctggtggtcgatcgatgggtggttcgatacctcgtaatcagcctacaccccattctcagcagggccagcaggacgacttctttacttcttcttcccgaatgaacacgaatcagagcgccttccgcttcggcaaccagagcacaatgggccagtcatcccagccccaacccagtagtatcgatgactttcctcctctgaacaacagcttacgcaacggtgagggtgagattggtcaggagcgaggctccaacctgatgtcaactctcggttttggtgctcagggaagcacagctggcggttccatgcagggagctcgtgcaggcaacggtctgctgaacgcccttacggccaactcgcgaagctcagatgtgcgctcacctgatgctcttggctctttagatcttccccgaactcaaggcatgcgaggtggtagcgaggaggttcgacagagacctcctggattcatggatgatgacgctgccgacttctctaaactccaatctctctcctcgcagtcgcctcataacgctggccagcaatcggacagtcgcaatcctctcggtgccatcggtagcagtgatccctcgtcgagtaaagacaagggtgacaaggagaaggagcctcagggtcccgctgttcatgaccccctagctggcatggcagagatcgacaaatggggcatcaaaggcctccgtactctaatgaacaactatcctgacttcaacgctgctatcatcggcattgatccttcgaccttcaacctcgatctcgctagcccctccagccagaaaatctcgacgcagatctggtcgctctacgatgatgctccacctcggcctgccatccccaactttcgtcttccagagtgctacaaggtcacaaacgtgcagcctctgcgaaacaagatgcccaatttcaacgaggagacgttgatgtggatcttctacagctgtcccggtgacgagcagcagcacatggctgctgaacagcttttccaacgccagtggcgctggcacaagaagctaaagctctggctgactaaggacgagcagatgcagccccgcccgctgagccagaaccacgaggagggctactacattgtctggagcaccaccgagtggcgcaaggagcgacgccagctcacgcttcactacgccgacttggagcaagcccccaactcaacgttgtag

SEQ ID NO: 37043 - protein, 544 aa, Muscodor strobelii
  misc_feature: SGI Peptide ID NO. 572850
  misc_feature (397)..(537): Pfam Id: PF04153 Pfam Desc: NOT2 / NOT3 / NOT5 family
  misc_feature (431)..(537): Pfam Id: PF04153 Pfam Desc: NOT2 / NOT3 / NOT5 family
  misc_feature (128)..(537): NCBI GI: 256726899 Blast Desc: NECHADRAFT_90950 [Nectria haematococca mpVI 77-13-4]
  misc_feature (114)..(541): NCBI GI: 46121443 Blast Desc: FG05100.1 [Gibberella zeae PH-1]
  misc_feature (128)..(540): NCBI GI: 145607325 Blast Desc: MGG_12164 [Magnaporthe grisea 70-15] gi|145014904|gb|EDJ99472.1| MGG_12164 [Magnaporthe grisea 70-15]
  misc_feature (128)..(526): NCBI GI: 116196194 Blast Desc: CHGG_04695 [Chaetomium globosum CBS 148.51] gi|88180608|gb|EAQ88076.1| CHGG_04695 [Chaetomium globosum CBS 148.51]
  misc_feature (128)..(537): NCBI GI: 171690422 Blast Desc: protein product [Podospora anserina] gi|170945159|emb|CAP71270.1| protein product [Podospora anserina]
  misc_feature (267)..(537): NCBI GI: 164423846 Blast Desc: NCU11372 [Neurospora crassa OR74A] gi|157070256|gb|EDO64999.1| conserved [Neurospora crassa OR74A]
  misc_feature (128)..(539): NCBI GI: 156045119 Blast Desc: SS1G_09748 [Sclerotinia sclerotiorum 1980] gi|154694143|gb|EDN93881.1| SS1G_09748 [Sclerotinia sclerotiorum 1980]
  misc_feature (128)..(544): NCBI GI: 154298420 Blast Desc: BC1G_11665 [Botryotinia fuckeliana B05.10] gi|150858118|gb|EDN33310.1| BC1G_11665 [Botryotinia fuckeliana B05.10]
  misc_feature (361)..(537): NCBI GI: 261352504 Blast Desc: transcriptional regulator involved in cell cycle regulation [Verticillium albo-atrum VaMs.102]
  misc_feature (124)..(537): NCBI GI: 159129516 Blast Desc: NOT2 family protein [Aspergillus fumigatus A1163]
MDQDTPTPSPPQPLGPPSTKAVKKSVSRPLLKKVLLQSCGPVTTDAMRVDNASFSDIVGAGDNLALNSDQRRGASRNTEAEDQHSDSSGPVGIMTPESSGTGSSDLPSRQDVPSLPSGLPYASVLSREFPSLSNNPQMSSGNSSSMWNAGGRSMGGSIPRNQPTPHSQQGQQDDFFTSSSRMNTNQSAFRFGNQSTMGQSSQPQPSSIDDFPPLNNSLRNGEGEIGQERGSNLMSTLGFGAQGSTAGGSMQGARAGNGLLNALTANSRSSDVRSPDALGSLDLPRTQGMRGGSEEVRQRPPGFMDDDAADFSKLQSLSSQSPHNAGQQSDSRNPLGAIGSSDPSSSKDKGDKEKEPQGPAVHDPLAGMAEIDKWGIKGLRTLMNNYPDFNAAIIGIDPSTFNLDLASPSSQKISTQIWSLYDDAPPRPAIPNFRLPECYKVTNVQPLRNKMPNFNEETLMWIFYSCPGDEQQHMAAEQLFQRQWRWHKKLKLWLTKDEQMQPRPLSQNHEEGYYIVWSTTEWRKERRQLTLHYADLEQAPNSTL

SEQ ID NO: 37044 - DNA, 6709 bp, Muscodor strobelii
  misc_feature: SGI EST ID NO. CUFF.88537.3
  misc_feature: Variant of the nucleotide sequence at SEQ ID NO 37042
cggcacctgcacgatagcaaacaatggtggcggatgggcttttggcaacgtccctatgggtggtgcggcggcgagctctcttcaaaactcctccaggtcgctagggggcaacaaccttagcttcgcacagagcctcggcgcctcacaatctacatcactagacccctccgaattcccgtctctgtccaacaaccctcagatgtcgagtggcaactcatcatccatgtggaatgctggtggtcgatcgatgggtggttcgatacctcgtaatcagcctacaccccattctcagcagggccagcaggacgacttctttacttcttcttcccgaatgaacacgaatcagagcgccttccgcttcggcaaccagagcacaatgggccagtcatcccagccccaacccagtagtatcgatgactttcctcctctgaacaacagcttacgcaacggtgagggtgagattggtcaggagcgaggctccaacctgatgtcaactctcggttttggtgctcagggaagcacagctggcggttccatgcagggagctcgtgcaggcaacggtctgctgaacgcccttacggccaactcgcgaagctcagatgtgcgctcacctgatgctcttggctctttaggcatgcgaggtggtagcgaggaggttcgacagagacctcctggattcatggatgatgacgctgccgacttctctaaactccaatctctctcctcgcagtcgcctcataacgctggccagcaatcggacagtcgcaatcctctcggtgccatcggtagcagtgatccctcgtcgagtaaagacaagggtgacaaggagaaggagcctcagggtcccgctgttcatgaccccctagctggcatggcagagatcgacaaatggggcatcaaaggcctccgtactctaatgaacaactatcctgacttcaacgctgctatcatcggcattgatccttcgaccttcaacctcgatctcgctagcccctccagccagaaaatctcgacgcagatctggtcgctctacgatgatgctccacctcggcctgccatccccaactttcgtcttccagagtgctacaaggtcacaaacgtgcagcctctgcgaaacaagatgcccaatttcaacgaggagacgttgatgtggatcttctacagctgtcccggtgacgagcagcagcacatggctgctgaacagcttttccaacgccagtggcgctggcacaagaagctaaagctctggctgactaaggacgagcagatgcagccccgcccgctgagccagaaccacgaggagggctactacattgtctggagcaccaccgagtggcgcaaggagcgacgccagctcacgcttcactacgccgacttggagcaagcccccaactcaacgttgtagacagaggtaatgcgttttcgtactcggtgatgagaggagatgaatgatcacgagtcggttgatcgtttggcgtttgtttttgtaggagtatcagcaagggaaccacggacatgtgatctggcatgatcggtcaggcttggtcatggcccggcgcggccttacacgaaacggatcctggatggccgggacaaaaatacggcgattgccacgcttgctacgagaacgttggtgttcccacgcctgtgggaccccaggagtagctcaagtagatatccatggtccattgaaaggggctacggataatgccttgctcggaccagtaaatgataatgagctttgctcacaacatgcctttgctctatacggtgtgactgtggttctgatgatttgactcccagtatgatgaagactatctgggcttatgttatgaagacaattttccacgatcttcctacaaagtgtgtatcattcacttcattgacgacctgattgtttagctacatctctgaaggatattggctccgcgcgttacctagtcacaaatttgacgttactgggaaacaaaggcgatgagatcgcgcagttgcagaccacgggtcgcgttccacagtggtggtttagtggcctgcgtcacctatttgtggtgggtggggcgtcttgtaggggctcacagctggttggccaaagctctatgtttacaacgtcaaaagaggagccaatcatattcctgaattgccccttcagtcatgccccagcagctagcccaccttaccacaaccgaacccgcacccgccaatatcacgtcccatcccattcccaccatcgtcatatcaccaaacaatagactcaacttttcatttcgcatactgctttggcgtcttgatttttatctgcaaaagcaatgattcattgacgtattcccgtcccatacgcgccttgtacatagtgcttgtgcaatcagccacgcgacccaaaacaacccgacgcgtccaagactttcaacttcagcaaattcgttacgatggctggccggacgcgactgcaggtggcctcagggccatggatggaagaggagcgatcgtctgccatacagatcgcacaatccgagatcgaagagtttacgttcgcagcacgcaacgactgcgactggttgaatgagcatatgaacgacatcttcagcgagaaccagataaacgttgccgagatcttcaagactcccggcaaactacgaggcaaaacacctcgaaccactcgaaaagcaaacctgggcgagaagcgcgtccctctctccaacatattctcctctacacccaaaggaggcccaaatcctctctctctatcaaaccttgccaggtctaacactccccgcgtcaaaattgctgtcgaccctcaaccctctcctcctaaagctgccgcacccgccagcccccagaaaccaccttctccactcaaacctgcagcagcaaaggcgcctgtacctgtcgtcgactctggctactatggaagccaatcccaagagggcgccatggaccttgatgatcccacctccgaacatactcagcctttcagctctcctggcaacacacagccggctcacgtcgctttccatctctctcccacggttgatgaaggattcaagagcccaactatagatgccggagcagatgatgtctccactcagtttttcactgctcatatcccagctccaacttcgtcagctaataaggctaaacacaatgaaagcacgacaccgtcaggctccccatctcaacctcacgcctcagatgccgcccaggactcgacgacacctgccaacgtgccacaagacagccacactccctctgtggagccgccggccaccacggaagtgaacatggaagacgaagtcttggaggatcccccgagatcgccctctgacggctcaagtcccattcgtccccctatccggaagagcagccttaatttcgcttcactacctgctcgtgaacccataacgcataaaagcattggaacccgggtttccagaaccagtcacttggaccagaaccgcgcgagttattaccgtcacactggtggcaaaagcttgggacatgccaagcaggacatagctgatgacgatgatgatgacgaaattgacgaggacaacgatgatatggatgtggaagagtttcccgcgcctccaaaagttcaaccacgggttgaaaccgagactgcagctaatcataacaagacatacacacaacggctccaggatcaaatcagtaagcttggaaaatctcaggctattgtgccccaagtcacaaagactgtacctgagtctacgacatctaaagcctctgccatagctgcgcctgtgcagcaagcttcagctccagtggcgcaaccagcttcgccgcccataaaatcaccacccaagaaggttaccactactcccggtgcattcccaacagacgacgaagatgatgactggactcaggcacttggcactcctgatgctgcgtccaactttgtgagcccgcgccctggcctacccaaaagctactcgacggatgttatggaaggcgtctcgggcaaagatactgtcggtggacaggacttcggattgccaaagacgcggccccaatcaagtcattacggatcgcctcagcgcgcttatacgagtggcccggagagaaccgccggcgcatttgggcatcacaagtctatgtccgttcctgttcttcctatcattggccagtatgaggacgatgagaacaacctccacaagaccgtttccgcctcaaaccccatgcttgctactgtgatggaggatgcagatgctcgacccaccacaccgaagtcaccgtcacgtggctttaacaacagccctctcaagcaggtgaaaaacaagctttcctctattcttaagagttctagaggtctcttagcaagtagtgccgccattagtgctgaaggcaaatcttccctcttgtctccttcaaccacgagactgggcttgcacttaggtgcatcgacggagactttgggatcgccaaggatccaacaatctcaacctctatatcctggcctctcacggcagaccagtgaaacccaaactctagcgagcacggctagtccaacgagaaatgaaagcaggagaacccgggcctctatcgagaaagagaaagcagaggaaaagaggaagaaagatgaagctaaagaggcacgccgcttggcccaggagaccgagaagctggagaaagctcgacagaaagagcgagagaaggcccgcgtcttcagcaaggaacaggaacgcatcgccgagctggagaagcaggttgcctcacagaaggagaaggagaagagagctgccgctgctacaccaggcaatattccaaagcccaccagatctagccccaggaaggctaaagcgcagaacgataccgatgaactgatgtctgatgctccggtatccgacgacaaaattggcgatgatgtggaaatgacagatgctacgatcgcaatgcctccaccatctatcccccgtcaagcaccttcttcggctatgaaagctagggaaatcaagcgacctgtgaagccagccaaggagccagctggcaaggccaagcaagcccccacggtcattagagtcaatatgggatcacagcataaccagtatcagccttcgaacagcacattggcatccaatctccaggataccttatcgcagccccagttgaagagcaaagcgagccagccttctcttcaaaccaaacagtccatgcaaagcctcaagagctccacgtcctcatctggtagacccaaggcacttgaagcggcagcacgaagaaaagagcaggaagagcgtgaagcccagcgcaagcgtgatgcaaaggctgaaattgaacgcaaacgcgcagctatgcaggaagaagagaagcgacaggaacagcagcgaaagctcgaggctgagcgccaaagagatgaagaacggaagcaagcagaggctaagaagacggcccagcgacaagctatgctggaaaaggcgaagcagacccgcgcccctcctccagctgcccgtagccaacccaatggtcctccagactatacccgtccgccctcgcgcatgaactcattagcccctgaacctagccggcctgtcaacactacactctccaatgcgtctaaagctcaagggaaacggcctctgcagcaggaacagaatgacgacagctctcgtccaaaccaagtccgtaatggcaatgctattcagacgaaggaaaccaaacggatgcgtctgaccgatgaactcaatgagcctggtgatagagagaagcagcctagcctgaagggtgcaccagtacgcccctcaggcggcgttcggaaggaattgcccacgaaggcaatgttcccggctggatacaccaatgtaccacctagtgccagcaaaacccaggatctcttcaaggctactgtcacaagccagcataacagccacgtcaaggctgccgctcatcctatggatgtggcacagctatcgaagggcgccattccattcgcatcttctagcaagactccggcgcggcccatgggaatggcaggtgccaagtccgccgccaagtcagctacacggtcatcaccccgcttccagaatggcgagtcaatcgagcttccagaaatcaataccgatgatgaatctgacgaagatgatgacgatgatgctgggaagggcatgatcgcggattgggctgattcaccaaatcttcgacaggcacttgtgagacaagagagccagaaccccttcgaggtgttcgggcctccggctcctatcaacatggaagaggtgtttgccaagaacagagaccgcttcgctaagttccgaaagcgtacttcgagcgcaaattgggatggacctgatggcttgacggagcaggatattcgcaaagatttggcggctagggacaagatgagacgggagggtaaatggacttatgacatgggtattgatatggcgtaatgctgttgttttgttgttatgcgaaagcattcttaggggttatatacgcacagggagggaagaaaagagtgcttgcttgccggttggttgattggttggagtaataaggctgtacttgcatcagatcggtgttggatggttggctatggttattgtctcttttgtctcgccttcttggcttgagactgatgtttttatgctgtttttactgtcgtcgctgtattgttagctgatgcttcgtgctgaaatgcagatagatacatggacagacagggagatgaatgaatagcattggactatgtgtgtgg

SEQ ID NO: 37045 - DNA, 3975 bp, Muscodor strobelii
  misc_feature: SGI cDNA ID NO. 572851
  misc_feature: Encodes the peptide sequence at SEQ ID NO 37046
atggctggccggacgcgactgcaggtggcctcagggccatggatggaagaggagcgatcgtctgccatacagatcgcacaatccgagatcgaagagtttacgttcgcagcacgcaacgactgcgactggttgaatgagcatatgaacgacatcttcagcgagaaccagataaacgttgccgagatcttcaagactcccggcaaactacgaggcaaaacacctcgaaccactcgaaaagcaaacctgggcgagaagcgcgtccctctctccaacatattctcctctacacccaaaggaggcccaaatcctctctctctatcaaaccttgccaggtctaacactccccgcgtcaaaattgctgtcgaccctcaaccctctcctcctaaagctgccgcacccgccagcccccagaaaccaccttctccactcaaacctgcagcagcaaaggcgcctgtacctgtcgtcgactctggctactatggaagccaatcccaagagggcgccatggaccttgatgatcccacctccgaacatactcagcctttcagctctcctggcaacacacagccggctcacgtcgctttccatctctctcccacggttgatgaaggattcaagagcccaactatagatgccggagcagatgatgtctccactcagtttttcactgctcatatcccagctccaacttcgtcagctaataaggctaaacacaatgaaagcacgacaccgtcaggctccccatctcaacctcacgcctcagatgccgcccaggactcgacgacacctgccaacgtgccacaagacagccacactccctctgtggagccgccggccaccacggaagtgaacatggaagacgaagtcttggaggatcccccgagatcgccctctgacggctcaagtcccattcgtccccctatccggaagagcagccttaatttcgcttcactacctgctcgtgaacccataacgcataaaagcattggaacccgggtttccagaaccagtcacttggaccagaaccgcgcgagttattaccgtcacactggtggcaaaagcttgggacatgccaagcaggacatagctgatgacgatgatgatgacgaaattgacgaggacaacgatgatatggatgtggaagagtttcccgcgcctccaaaagttcaaccacgggttgaaaccgagactgcagctaatcataacaagacatacacacaacggctccaggatcaaatcagtaagcttggaaaatctcaggctattgtgccccaagtcacaaagactgtacctgagtctacgacatctaaagcctctgccatagctgcgcctgtgcagcaagcttcagctccagtggcgcaaccagcttcgccgcccataaaatcaccacccaagaaggttaccactactcccggtgcattcccaacagacgacgaagatgatgactggactcaggcacttggcactcctgatgctgcgtccaactttgtgagcccgcgccctggcctacccaaaagctactcgacggatgttatggaaggcgtctcgggcaaagatactgtcggtggacaggacttcggattgccaaagacgcggccccaatcaagtcattacggatcgcctcagcgcgcttatacgagtggcccggagagaaccgccggcgcatttgggcatcacaagtctatgtccgttcctgttcttcctatcattggccagtatgaggacgatgagaacaacctccacaagaccgtttccgcctcaaaccccatgcttgctactgtgatggaggatgcagatgctcgacccaccacaccgaagtcaccgtcacgtggctttaacaacagccctctcaagcaggtgaaaaacaagctttcctctattcttaagagttctagaggtctcttagcaagtagtgccgccattagtgctgaaggcaaatcttccctcttgtctccttcaaccacgagactgggcttgcacttaggtgcatcgacggagactttgggatcgccaaggatccaacaatctcaacctctatatcctggcctctcacggcagaccagtgaaacccaaactctagcgagcacggctagtccaacgagaaatgaaagcaggagaacccgggcctctatcgagaaagagaaagcagaggaaaagaggaagaaagatgaagctaaagaggcacgccgcttggcccaggagaccgagaagctggagaaagctcgacagaaagagcgagagaaggcccgcgtcttcagcaaggaacaggaacgcatcgccgagctggagaagcaggttgcctcacagaaggagaaggagaagagagctgccgctgctacaccaggcaatattccaaagcccaccagatctagccccaggaaggctaaagcgcagaacgataccgatgaactgatgtctgatgctccggtatccgacgacaaaattggcgatgatgtggaaatgacagatgctacgatcgcaatgcctccaccatctatcccccgtcaagcaccttcttcggctatgaaagctagggaaatcaagcgacctgtgaagccagccaaggagccagctggcaaggccaagcaagcccccacggtcattagagtcaatatgggatcacagcataaccagtatcagccttcgaacagcacattggcatccaatctccaggataccttatcgcagccccagttgaagagcaaagcgagccagccttctcttcaaaccaaacagtccatgcaaagcctcaagagctccacgtcctcatctggtagacccaaggcacttgaagcggcagcacgaagaaaagagcaggaagagcgtgaagcccagcgcaagcgtgatgcaaaggctgaaattgaacgcaaacgcgcagctatgcaggaagaagagaagcgacaggaacagcagcgaaagctcgaggctgagcgccaaagagatgaagaacggaagcaagcagaggctaagaagacggcccagcgacaagctatgctggaaaaggcgaagcagacccgcgcccctcctccagctgcccgtagccaacccaatggtcctccagactatacccgtccgccctcgcgcatgaactcattagcccctgaacctagccggcctgtcaacactacactctccaatgcgtctaaagctcaagggaaacggcctctgcagcaggaacagaatgacgacagctctcgtccaaaccaagtccgtaatggcaatgctattcagacgaaggaaaccaaacggatgcgtctgaccgatgaactcaatgagcctggtgatagagagaagcagcctagcctgaagggtgcaccagtacgcccctcaggcggcgttcggaaggaattgcccacgaaggcaatgttcccggctggatacaccaatgtaccacctagtgccagcaaaacccaggatctcttcaaggctactgtcacaagccagcataacagccacgtcaaggctgccgctcatcctatggatgtggcacagctatcgaagggcgccattccattcgcatcttctagcaagactccggcgcggcccatgggaatggcaggtgccaagtccgccgccaagtcagctacacggtcatcaccccgcttccagaatggcgagtcaatcgagcttccagaaatcaataccgatgatgaatctgacgaagatgatgacgatgatgctgggaagggcatgatcgcggattgggctgattcaccaaatcttcgacaggcacttgtgagacaagagagccagaaccccttcgaggtgttcgggcctccggctcctatcaacatggaagaggtgtttgccaagaacagagaccgcttcgctaagttccgaaagcgtacttcgagcgcaaattgggatggacctgatggcttgacggagcaggatattcgcaaagatttggcggctagggacaagatgagacgggagggtaaatggacttatgacatgggtattgatatggcgtaa

SEQ ID NO: 37046 - protein, 1324 aa, Muscodor strobelii
  misc_feature: SGI Peptide ID NO. 572851
  misc_feature (1212)..(1271): Pfam Id: PF03941 Pfam Desc: Inner centromere protein, ARK binding region
  misc_feature (1)..(1322): NCBI GI: 145613163 Blast Desc: MGG_01835 [Magnaporthe grisea 70-15] gi|145020301|gb|EDK04430.1| MGG_01835 [Magnaporthe grisea 70-15]
  misc_feature (296)..(1324): NCBI GI: 116194424 Blast Desc: CHGG_03810 [Chaetomium globosum CBS 148.51] gi|88179723|gb|EAQ87191.1| CHGG_03810 [Chaetomium globosum CBS 148.51]
  misc_feature (6)..(1318): NCBI GI: 154318530 Blast Desc: BC1G_02654 [Botryotinia fuckeliana B05.10] gi|150857784|gb|EDN32976.1| BC1G_02654 [Botryotinia fuckeliana B05.10]
  misc_feature (278)..(1323): NCBI GI: 46121455 Blast Desc: FG05106.1 [Gibberella zeae PH-1]
  misc_feature (262)..(1321): NCBI GI: 156063666 Blast Desc: SS1G_01951 [Sclerotinia sclerotiorum 1980] gi|154697285|gb|EDN97023.1| SS1G_01951 [Sclerotinia sclerotiorum 1980]
  misc_feature (299)..(1320): NCBI GI: 164429189 Blast Desc: NCU05211 [Neurospora crassa OR74A] gi|157072975|gb|EAA32974.2| [Neurospora crassa OR74A]
  misc_feature (6)..(749): NCBI GI: 261352498 Blast Desc: inner centromere protein [Verticillium albo-atrum VaMs.102]
  misc_feature (9)..(1317): NCBI GI: 154270947 Blast Desc: [Ajellomyces capsulatus NAm1] gi|150409550|gb|EDN04994.1| [Ajellomyces capsulatus NAm1]
  misc_feature (2)..(1317): NCBI GI: 115390182 Blast Desc: conserved [Aspergillus terreus NIH2624] gi|114194992|gb|EAU36692.1| conserved [Aspergillus terreus NIH2624]
  misc_feature (830)..(1324): NCBI GI: 261352498 Blast Desc: inner centromere protein [Verticillium albo-atrum VaMs.102]
MAGRTRLQVASGPWMEEERSSAIQIAQSEIEEFTFAARNDCDWLNEHMNDIFSENQINVAEIFKTPGKLRGKTPRTTRKANLGEKRVPLSNIFSSTPKGGPNPLSLSNLARSNTPRVKIAVDPQPSPPKAAAPASPQKPPSPLKPAAAKAPVPVVDSGYYGSQSQEGAMDLDDPTSEHTQPFSSPGNTQPAHVAFHLSPTVDEGFKSPTIDAGADDVSTQFFTAHIPAPTSSANKAKHNESTTPSGSPSQPHASDAAQDSTTPANVPQDSHTPSVEPPATTEVNMEDEVLEDPPRSPSDGSSPIRPPIRKSSLNFASLPAREPITHKSIGTRVSRTSHLDQNRASYYRHTGGKSLGHAKQDIADDDDDDEIDEDNDDMDVEEFPAPPKVQPRVETETAANHNKTYTQRLQDQISKLGKSQAIVPQVTKTVPESTTSKASAIAAPVQQASAPVAQPASPPIKSPPKKVTTTPGAFPTDDEDDDWTQALGTPDAASNFVSPRPGLPKSYSTDVMEGVSGKDTVGGQDFGLPKTRPQSSHYGSPQRAYTSGPERTAGAFGHHKSMSVPVLPIIGQYEDDENNLHKTVSASNPMLATVMEDADARPTTPKSPSRGFNNSPLKQVKNKLSSILKSSRGLLASSAAISAEGKSSLLSPSTTRLGLHLGASTETLGSPRIQQSQPLYPGLSRQTSETQTLASTASPTRNESRRTRASIEKEKAEEKRKKDEAKEARRLAQETEKLEKARQKEREKARVFSKEQERIAELEKQVASQKEKEKRAAAATPGNIPKPTRSSPRKAKAQNDTDELMSDAPVSDDKIGDDVEMTDATIAMPPPSIPRQAPSSAMKAREIKRPVKPAKEPAGKAKQAPTVIRVNMGSQHNQYQPSNSTLASNLQDTLSQPQLKSKASQPSLQTKQSMQSLKSSTSSSGRPKALEAAARRKEQEEREAQRKRDAKAEIERKRAAMQEEEKRQEQQRKLEAERQRDEERKQAEAKKTAQRQAMLEKAKQTRAPPPAARSQPNGPPDYTRPPSRMNSLAPEPSRPVNTTLSNASKAQGKRPLQQEQNDDSSRPNQVRNGNAIQTKETKRMRLTDELNEPGDREKQPSLKGAPVRPSGGVRKELPTKAMFPAGYTNVPPSASKTQDLFKATVTSQHNSHVKAAAHPMDVAQLSKGAIPFASSSKTPARPMGMAGAKSAAKSATRSSPRFQNGESIELPEINTDDESDEDDDDDAGKGMIADWADSPNLRQALVRQESQNPFEVFGPPAPINMEEVFAKNRDRFAKFRKRTSSANWDGPDGLTEQDIRKDLAARDKMRREGKWTYDMGIDMA

SEQ ID NO: 37047 - DNA, 6709 bp, Muscodor strobelii; identical to SEQ ID NO: 37044
  misc_feature: SGI EST ID NO. CUFF.88537.3
  misc_feature: Variant of the nucleotide sequence at SEQ ID NO 37045

SEQ ID NO: 37048 - DNA, 2217 bp, Muscodor strobelii
  misc_feature: SGI cDNA ID NO. 572852
  misc_feature: Reduced expression when VOC is produced
  misc_feature: Encodes the peptide sequence at SEQ ID NO 37049
atgaggcgcctgtcacgaacaagaattacaccactcagcggacccatcccttatatgttcacggcggagccagaggaggaagtagaagaaaagataggcccgaaagaacaagtcccgaaaccttcaaccagcaaaaatggcgctccgtatgccgatccttttgccatgttcagggacaaagtcagcactccatatcacactcctggaggcgagaagacaaacttgtttgacgattggccgggcataagtcgtgcttccagcactcgaacgccaaccagaaagtatgaaatgcccggtgggtctccacgcccacgaccccgaagcacgagtactcctcggagttccagcaacgatggaggctccgaagactctacgaaagtcaacacgggtggtagtggtcgagatttccagtcatccaaagccagtgaccggtatcgacccaagcctcaacctgccacagctgccgatatgccgccgccagcttctaatgcaacgactcacaggaatactgtacctggcgccaatgctgctaagagcaatggtggtccttccgtgtatgtaggacagagagctactggacttattagacccctgcctcccagacctaaaaccccgtccaaattgtcagctttgagagcagagttctctgcagccaatgccagtgcatttcagagggatgatgatccagcgccccatgggcgaaagacacccccctccacgttgccatcgttgccagcgtttgttgctaggttgccacgtgaccagtcacgagagacaccaagtcccttcaaaaactggctctcggctacgactggccgacatttccccaatacttcaagcgaagcgcagaaaccccgcggatatagtactttgttgcctctagagctccaacaaagagtcgagctagatcgtttagttggcagacaacctataagcgaggtcaaacggaagccctcaaacctgcccacgtcgccagccaaattgagcaaggtagatgctgacagcaagcgatcctttagcttctcgtacaccgacccaagagatcctcagatgaaaacatttgtcagaaatagtacagagaatatcaacactaggtttgttgacgacgaagtgagtgactggcaatttacagcaggtgcggcctcagccaacgaggcctcgaccccaacgaaatcacgcccacagccccgtgctcggcctaatcgccgccaaactccacttacgaaaactgggagcccagagcgcatggcttcatttagggaagaacctttcaccactaatcctacacagcaacctttctcagccggagtcaagcgctctgagccgcaagcgactgctggtggttctactaacccggtcaagaagactgccggtaccgcaggattggtagatgatgacgaaagcgaaggttggcgcgaggttccgcagcaagcgtctaacggcgtaccgattacaccggatgctatggacatcgacacaccgccgccggcagagacgttcagcgaaccatcgaagggtaacgatgcacggaagattcctgtcgagccccatcgacccgagtggagagctggtaatctaaacggtgtgtccctgaaggcacaggattcgaaaccaaatgatgctggaatgaatggtacaaatcccgctcccgccactttctcagcggatcataagggttcagaggataccgaagaattcaagaccacgttttccgagttcaataatgtggcgcctttcaacaaccaaaacccaagcggactgaaatcattcacggaccttcagtcttctctgccttttaagagtcaaccgtctgagcagatccccctttctcaaggacctcctccaaaacctatcctacttccccctctacctgtggcacctcgactgccgccaactatgggcgtagagggactcaagccgaatctctcctccttccaaaaatacgccaaagagttctacacatacatggaaatgtggaagatgtttgagaagagggtccaagaagacattcaggcccagaaagccaagttcgagcagcgccgcttacgtcgcggcaataattatctaggttttaccgagttcgacgaagacggagcgagtgactatctcgaggaaatcaatcaaatgcaggcagtacaacatagaatgtcagaggctctcacagagcatcgaaaaagagttgtcgagttcatggagtttagagatcgggtcaagtag

SEQ ID NO: 37049 - protein, 738 aa, Muscodor strobelii
  misc_feature: SGI Peptide ID NO. 572852
  misc_feature (290)..(738): NCBI GI: 261352497 Blast Desc: conserved [Verticillium albo-atrum VaMs.102]
  misc_feature (291)..(738): NCBI GI: 46121439 Blast Desc: FG05098.1 [Gibberella zeae PH-1]
  misc_feature (291)..(738): NCBI GI: 256726901 Blast Desc: NECHADRAFT_90952 [Nectria haematococca mpVI 77-13-4]
  misc_feature (350)..(734): NCBI GI: 171683595 Blast Desc: protein product [Podospora anserina] gi|170941757|emb|CAP67411.1| protein product [Podospora anserina]
  misc_feature (338)..(737): NCBI GI: 116194426 Blast Desc: CHGG_03811 [Chaetomium globosum CBS 148.51] gi|88179724|gb|EAQ87192.1| CHGG_03811 [Chaetomium globosum CBS 148.51]
  misc_feature (457)..(738): NCBI GI: 39952430 Blast Desc: MGG_01834 [Magnaporthe grisea 70-15] gi|145020302|gb|EDK04431.1| MGG_01834 [Magnaporthe grisea 70-15]
  misc_feature (63)..(736): NCBI GI: 85106519 Blast Desc: NCU05199 [Neurospora crassa OR74A] gi|28923797|gb|EAA32962.1| [Neurospora crassa OR74A]
  misc_feature (570)..(678): NCBI GI: 145231050 Blast Desc: An01g13900 [Aspergillus niger] gi|134055917|emb|CAK37394.1| protein product [Aspergillus niger]
  misc_feature: Useful for introducing or modulating the production of volatile compounds
MRRLSRTRITPLSGPIPYMFTAEPEEEVEEKIGPKEQVPKPSTSKNGAPYADPFAMFRDKVSTPYHTPGGEKTNLFDDWPGISRASSTRTPTRKYEMPGGSPRPRPRSTSTPRSSSNDGGSEDSTKVNTGGSGRDFQSSKASDRYRPKPQPATAADMPPPASNATTHRNTVPGANAAKSNGGPSVYVGQRATGLIRPLPPRPKTPSKLSALRAEFSAANASAFQRDDDPAPHGRKTPPSTLPSLPAFVARLPRDQSRETPSPFKNWLSATTGRHFPNTSSEAQKPRGYSTLLPLELQQRVELDRLVGRQPISEVKRKPSNLPTSPAKLSKVDADSKRSFSFSYTDPRDPQMKTFVRNSTENINTRFVDDEVSDWQFTAGAASANEASTPTKSRPQPRARPNRRQTPLTKTGSPERMASFREEPFTTNPTQQPFSAGVKRSEPQATAGGSTNPVKKTAGTAGLVDDDESEGWREVPQQASNGVPITPDAMDIDTPPPAETFSEPSKGNDARKIPVEPHRPEWRAGNLNGVSLKAQDSKPNDAGMNGTNPAPATFSADHKGSEDTEEFKTTFSEFNNVAPFNNQNPSGLKSFTDLQSSLPFKSQPSEQIPLSQGPPPKPILLPPLPVAPRLPPTMGVEGLKPNLSSFQKYAKEFYTYMEMWKMFEKRVQEDIQAQKAKFEQRRLRRGNNYLGFTEFDEDGASDYLEEINQMQAVQHRMSEALTEHRKRVVEFMEFRDRVK

SEQ ID NO: 37050 - DNA, 3998 bp, Muscodor strobelii
  misc_feature: SGI EST ID NO. CUFF.88534.1
  misc_feature: Variant of the nucleotide sequence at SEQ ID NO 37048
gtcgtttcccagaaactggtcgcgtacactgcctgggcatttgacatcatcgccgtcaactgtccctctgcctggtcatcacttccatgtctcaattgttgctcacctagccaaaacatattgcgtcttttcactgcgcgtgaccagcgagatctcttaggcatatgaagggtcacatattctcagcaaatactcaaggtcgtcaggtacgagtacaatttcttgagacatcgcgacatatctaaacaagcaagcgtctgccccaccatcgcatgctatcggcgtctggaaagtgcaactccatcgtcggcagcaccttcacccctggaccctggctttgtcgacttcttttcgttgccgagccttgataaacagaccgccactacctacaacaccaccttcctctgggtgactccaccaacatcgccgtcgcttttgcaaagttacattgacagaatcaatatttgcttatcattgcatcaacttgctattgctaatccatgtccgaccctccattcatcacgacacttgtttctctgtggaaccaggattgaattgcagcattagctgtagcagcattggaaattccatagcctacacatttcctgacttccttcgactccctgcaactctctccttcccgtgccaccctcgacacttgcacctcgcgtcaatgacagaccaacaactggcacatctctgctgcgctcacttccgcgctcacttcaacctcgcccacatcgcctggtgaccatcgttcaactatcctcaccatgcctaagtgggacaaacaccacgactacttcgccgacctcgagctgaaacctagtgcaacgccagccgatatccggacaagctacaggaagctagctctcaaatggcacccagatcgcaatcctggcaaggaggccgaggtcggccccaagttccaagccatccagtccgcccatgagattctcatagacgacacccagcgagaactgtacctcaatgcccgccgaaccgtcgaaaccgtccttcgcggtccgactgcctcgggagtcagaggcaacccatggtcgaaggccggcgaaggcttcgcacccccaccacggcgccagcctgccaatcccccagccccgtccaacctcgggcgctcagagatacgagagcttcgccagcaatgcgccgcgtaacaagccaggccccaaagacgatgccaacttccgcaagaacaacgcctatgcttgggataatatccgccccaactcgcggcgatccggccagcctcaacctccgccgcggaaccagcaagcaccacctgccacccccgccagacctccgccgggacgagctcccacgtctgcaacccgtgacacgaagccggcccaaaaatccgaagccgcatccacagacagcataccagagacaaaagcaagaggcggctttcggcaacagcagcagaaaggggggattcactccacgcccgtccagtgtcgcagatgaggcgcctgtcacgaacaagaattacaccactcagcggacccatcccttatatgttcacggcggagccagaggaggaagtagaagaaaagataggcccgaaagaacaagtcccgaaaccttcaaccagcaaaaatggcgctccgtatgccgatccttttgccatgttcagggacaaagtcagcactccatatcacactcctggaggcgagaagacaaacttgtttgacgattggccgggcataagtcgtgcttccagcactcgaacgccaaccagaaagtatgaaatgcccggtgggtctccacgcccacgaccccgaagcacgagtactcctcggagttccagcaacgatggaggctccgaagactctacgaaagtcaacacgggtggtagtggtcgagatttccagtcatccaaagccagtgaccggtatcgacccaagcctcaacctgccacagctgccgatatgccgccgccagcttctaatgcaacgactcacaggaatactgtacctggcgccaatgctgctaagagcaatggtggtccttccgtcttctcgtacaccgacccaagagatcctcagatgaaaacatttgtcagaaatagtacagagaatatcaacactaggtttgttgacgacgaagtgagtgactggcaatttacagcaggtgcggcctcagccaacgaggcctcgaccccaacgaaatcacgcccacagccccgtgctcggcctaatcgccgccaaactccacttacgaaaactgggagcccagagcgcatggcttcatttagggaagaacctttcaccactaatcctacacagcaacctttctcagccggagtcaagcgctctgagccgcaagcgactgctggtggttctactaacccggtcaagaagactgccggtaccgcaggattggtagatgatgacgaaagcgaaggttggcgcgaggttccgcagcaagcgtctaacggcgtaccgattacaccggatgctatggacatcgacacaccgccgccggcagagacgttcagcgaaccatcgaagggtaacgatgcacggaagattcctgtcgagccccatcgacccgagtggagagctggtaatctaaacggtgtgtccctgaaggcacaggattcgaaaccaaatgatgctggaatgaatggtacaaatcccgctcccgccactttctcagcggatcataagggttcagaggataccgaagaattcaagaccacgttttccgagttcaataatgtggcgcctttcaacaaccaaaacccaagcggactgaaatcattcacggaccttcagtcttctctgccttttaagagtcaaccgtctgagcagatccccctttctcaaggacctcctccaaaacctatcctacttccccctctacctgtggcacctcgactgccgccaactatgggcgtagagggactcaagccgaatctctcctccttccaaaaatacgccaaagagttctacacatacatggaaatgtggaagatgtttgagaagagggtccaagaagacattcaggcccagaaagccaagttcgagcagcgccgcttacgtcgcggcaataattatctaggttttaccgagttcgacgaagacggagcgagtgactatctcgaggaaatcaatcaaatgcaggcagtacaacatagaatgtcagaggctctcacagagcatcgaaaaagagttgtcgagttcatggagtttagagatcgggtcaagtaggacgacgtccgagctaaatttccatcatcaggccgaggaccattccatcgatttcgattttgaatgagtttggaatactgtcgtctaagtcgtcgtgcttcgcggacgacttgatacggtgatagacgcacgtctcgcgtttactaggtatcttattcacggcttgctctcattacgcaagcaagtcaacatcagagagtctaaaacctggacatacgagttatttccttttccaggcatataaataagctaaccatcgactgtccactatggagatatacaggggcgttaggaataccctagaggaacacaagacctggaatctggcgatattttgttccttctttcgtttgttaccccgacgtatgcggcccagtccatgatccgctgtcgatcattgcgatggacttgattggacgcaaagggagaaacaggaccaatgaatataacagaaatggtggatagaccaggataggcgaacaggcgtgagagaactggtctgctttttgctcgtcttgcctttaagcgagtttcctcccactgacgtagcatggcttggcgaggcgtggcggagctgctgtattatatcttagttcccaagcttttttttctgctcttttgctcatagcgaaaataggggttgggtggatgtagtgaatcacagaaaaggaatggagagatgatgaggagaacgatgatatgagaagagatgtacaggttacacgagattacgagtcacgttacttatacattcagttgttatct

SEQ ID NO: 37051 - DNA, 1914 bp, Muscodor strobelii
  misc_feature: SGI cDNA ID NO. 572853
  misc_feature: Elevated expression when VOC is produced
  misc_feature: Encodes the peptide sequence at SEQ ID NO 37052
atgcatcttatcgaggttgatactcttcgcctgaagaagtttatcagcgacagcgaagtggtcgacaaatacgccatactctctcatcgatggcttcaaaccgaggaagaagtcaccttccaggacatagagtcacaagacactcagatcgcgatgcagaagaaaggttacttcaagatagtcgaaacgagcaaactggcgaaggaacatggtctgtcctatttttggattgatacctgctgcattgataagtcatctagcgcggagcttcaagaagcaatcaatagcatgtaccgctggtaccggaatgctgcgatatgtttggtgtatctcacgcacaatcacataagcaatgatattgacgaacatcaaattgacagcgatgatagcgacgatttcggaaatcttgtcggccattactcggatatgaactcattcttcttgtcctcatataaagatgacgagtggtttactagaggctggacgttacaggagcttatcgcccctcgaaatctgtcattctatgactacaagtggagctatataggaagaaaatacgatctctcattttctcttactaaaattacgggaattaaccttcatctactccaagggaggactaaattaatcgactatcccgttgcgcaacgcatgtcgtgggctgctcgtcgagcgacggcgaggccagaagatcgagtatatagtctattcgggatatttggtgtttacatgacaatgctttacggcgagggtcttgagcatgctttcctccgtctccaggaagaaatcatgaaaacccttgatgatcactcaatatttgcctggactggtgtcaaagaaccctgcggcatgctggctaaaaatccagaagccttcgcggcgtctggcaacgttcgatttcacgttgaatttccgcttcgaccaaacaaatatcctagaaagccatattccatgaccaaccacggtctttacatgtctcttgaactcctacctctcttaccaggtatttactgcggtcgcctggactgtaagatggttgagaacgatcgggacaaatggtttccaaactcttgttggatattcctgcaaacaacagatatgcaaaaccactacgtcagaacgtcagtgcaagaacaggacttttggtatccagattctgacgtcgaatctattgcacatattgtgcagagagaggtctcgttgcactgcttgcaaaacccccagtcttccaaccgaatgtcgagtatggagggaattcgtatcaagataaaaggcgacaaagaagatagcgatcaatttttcccattcacatgtatactagatcaggcattcaagatatatattcccgccaatcgagcaggcattcaagcagttaggttgagttgggattttgattttaatcctgcagtcttcgttggagaagcatcgttagaatcggaaacaatgacgtggatcaaagaaggtggactgtacgtggagaaccgatccgatggccagttcagaacttctcagcatgtcaagaattggaacaggctggataccactcacgccactcacgatcttgtgtatgccaagaaccagtgccgcgggctctgggcaatcgcaggtagtcggaatactggtctctacggtcaattaggatcgaccggattatacgtttatgtacaacgacccatgtacgacgagtcaattttgaggttcgaaatggacttgagacaggtcttcccttgcgaggaacgagtgaagcagtacgacgaagatgaggagtcttcaccaaagacgactagtcgaaaagaaggcacaaagcatgttcccgagaacgctctatcaagaagaagaagaaaatggagaagaaattcgagaccgtatagatggaagtactataatagggacttcaaggcacgaaaggaatag

SEQ ID NO: 37052 - protein, 637 aa, Muscodor strobelii
  misc_feature: SGI Peptide ID NO. 572853
  misc_feature (24)..(165): Pfam Id: PF06985 Pfam Desc: Heterokaryon incompatibility protein (HET)
  misc_feature (1)..(473): NCBI GI: 256720502 Blast Desc: NECHADRAFT_55867 [Nectria haematococca mpVI 77-13-4]
  misc_feature (1)..(390): NCBI GI: 121715886 Blast Desc: HET domain protein [Aspergillus clavatus NRRL 1] gi|119403709|gb|EAW14126.1| HET domain protein [Aspergillus clavatus NRRL 1]
  misc_feature (1)..(378): NCBI GI: 256720984 Blast Desc: NECHADRAFT_82249 [Nectria haematococca mpVI 77-13-4]
  misc_feature (1)..(329): NCBI GI: 256723740 Blast Desc: NECHADRAFT_52245 [Nectria haematococca mpVI 77-13-4]
  misc_feature (1)..(390): NCBI GI: 261201308 Blast Desc: HET domain-containing protein [Ajellomyces dermatitidis SLH14081] gi|239592113|gb|EEQ74694.1| HET domain-containing protein [Ajellomyces dermatitidis SLH14081]
  misc_feature (1)..(334): NCBI GI: 145608538 Blast Desc: MGG_06555 [Magnaporthe grisea 70-15] gi|145016004|gb|EDK00494.1| MGG_06555 [Magnaporthe grisea 70-15]
  misc_feature (1)..(329): NCBI GI: 171683732 Blast Desc: protein product [Podospora anserina] gi|170941826|emb|CAP67479.1| protein product [Podospora anserina]
  misc_feature (30)..(381): NCBI GI: 238841528 Blast Desc: HET domain-containing protein [Microsporum canis CBS 113480]
  misc_feature (23)..(344): NCBI GI: 261359026 Blast Desc: HET domain-containing protein [Verticillium albo-atrum VaMs.102]
  misc_feature (1)..(390): NCBI GI: 239611724 Blast Desc: HET domain-containing protein [Ajellomyces dermatitidis ER-3]
  misc_feature: Useful for introducing or modulating the production of volatile compounds
MHLIEVDTLRLKKFISDSEVVDKYAILSHRWLQTEEEVTFQDIESQDTQIAMQKKGYFKIVETSKLAKEHGLSYFWIDTCCIDKSSSAELQEAINSMYRWYRNAAICLVYLTHNHISNDIDEHQIDSDDSDDFGNLVGHYSDMNSFFLSSYKDDEWFTRGWTLQELIAPRNLSFYDYKWSYIGRKYDLSFSLTKITGINLHLLQGRTKLIDYPVAQRMSWAARRATARPEDRVYSLFGIFGVYMTMLYGEGLEHAFLRLQEEIMKTLDDHSIFAWTGVKEPCGMLAKNPEAFAASGNVRFHVEFPLRPNKYPRKPYSMTNHGLYMSLELLPLLPGIYCGRLDCKMVENDRDKWFPNSCWIFLQTTDMQNHYVRTSVQEQDFWYPDSDVESIAHIVQREVSLHCLQNPQSSNRMSSMEGIRIKIKGDKEDSDQFFPFTCILDQAFKIYIPANRAGIQAVRLSWDFDFNPAVFVGEASLESETMTWIKEGGLYVENRSDGQFRTSQHVKNWNRLDTTHATHDLVYAKNQCRGLWAIAGSRNTGLYGQLGSTGLYVYVQRPMYDESILRFEMDLRQVFPCEERVKQYDEDEESSPKTTSRKEGTKHVPENALSRRRRKWRRNSRPYRWKYYNRDFKARKE

SEQ ID NO: 37053 - DNA, 2171 bp, Muscodor strobelii
  misc_feature: SGI EST ID NO. CUFF.88485.1
  misc_feature: Variant of the nucleotide sequence at SEQ ID NO 37051
cgcaagcatctccattgcaaatatcatactctcgaagccgtgtttgctctgccgggaaatttcacagttttatcgtgctgacgatagatagtttagactgcgacccgctcgacatctgtcaccaatgcatcttatcgaggttgatactcttcgcctgaagaagtttatcagcgacagcgaagtggtcgacaaatacgccatactctctcatcgatggcttcaaaccgaggaagaagtcaccttccaggacatagagtcacaagacactcagatcgcgatgcagaagaaaggttacttcaagatagtcgaaacgagcaaactggcgaaggaacatggtctgtcctatttttggattgatacctgctgcattgataagtcatctagcgcggagcttcaagaagcaatcaatagcatgtaccgctggtaccggaatgctgcgatatgtttggtgtatctcacgcacaatcacataagcaatgatattgacgaacatcaaattgacagcgatgatagcgacgatttcggaaatcttgtcggccattactcggatatgaactcattcttcttgtcctcatataaagatgacgagtggtttactagaggctggacgttacaggagcttatcgcccctcgaaatctgtcattctatgactacaagtggagctatataggaagaaaatacgatctctcattttctcttactaaaattacgggaattaaccttcatctactccaagggaggactaaattaatcgactatcccgttgcgcaacgcatgtcgtgggctgctcgtcgagcgacggcgaggccagaagatcgagtatatctattcgggatatttggtgtttacatgacaatgctttacggcgagggtcttgagcatgctttcctccgtctccaggaagaaatcatgaaaacccttgatgatcactcaatatttgcctggactggtgtcaaagaaccctgcggcatgctggctaaaaatccagaagccttcgcggcgtctggcaacgttcgatttcacgttgaatttccgcttcgaccaaacaaatatcctagaaagccatattccatgaccaaccacggtctttacatgtctcttgaactcctacctctcttaccaggtatttactgcggtcgcctggactgtaagatggttgagaacgatcgggacaaatggtttccaaactcttgttggatattcctgcaaacaacagatatgcaaaaccactacgtcagaacgtcagtgcaagaacaggacttttggtatccagattctgacgtcgaatctattgcacatattgtgcagagagaggtctcgttgcactgcttgcaaaacccccagtcttccaaccgaatgtcgagtatggagggaattcgtatcaagataaaaggcgacaaagaagatagcgatcaatttttcccattcacatgtatactagatcaggcattcaagatatatattcccgccaatcgagcaggcattcaagcagttaggttgagttgggattttgattttaatcctgcagtcttcgttggagaagcatcgttagaatcggaaacaatgacgtggatcaaagaaggtggactgtacgtggagaaccgatccgatggccagttcagaacttctcagcatgtcaagaattggaacaggctggataccactcacgccactcacgatcttgtgtatgccaagaaccagtgccgcgggctctgggcaatcgcaggtagtcggaatactggtctctacggtcaattaggatcgaccggattatacgtttatgtacaacgacccatgtacgacgagtcaattttgaggttcgaaatggacttgagacaggtcttcccttgcgaggaacgagtgaagcagtacgacgaagatgaggagtcttcaccaaagacgactagtcgaaaagaaggcacaaagcatgttcccgagaacgctctatcaagaagaagaagaaaatggagaagaaattcgagaccgtatagatggaagtactataatagggacttcaaggcacgaaaggaatagacattgatctgtcacattcttgctttaccatgcaaaccggtatgggctctacaattaaccgtacgcgtttatatgtcaattatatatagtatgtacgatttgatgaaaaccgttgaacgtgttaggcggtgtcttc

SEQ ID NO: 37054 - DNA, 1842 bp, Muscodor strobelii
  misc_feature: SGI cDNA ID NO. 572854
  misc_feature: Encodes the peptide sequence at SEQ ID NO 37055
atgcatcttatcgaggttgatactcttcgcctgaagaagtttatcagcgacagcgaagtggtcgacaaatacgccatactctctcatcgatggcttcaaaccgaggaagaagtcaccttccaggacatagagtcacaagacactcagatcgcgatgcagaagaaaggttacttcaagatagtcgaaacgagcaaactggcgaaggaacatggtctgtcctatttttggattgatacctgctgcattgataagtcatctagcgcggagcttcaagaagcaatcaatagcatgtaccgctggtaccggaatgctgcgatatgtttggtgtatctcacgcacaatcacataagcaatgatattgacgaacatcaaattgacagcgatgatagcgacgatttcggaaatcttgtcggccattactcggatatgaactcattcttcttgtcctcatataaagatgacgagtggtttactagaggctggacgttacaggagcttatcgcccctcgaaatctgtcattctatgactacaagtggagctatataggaagaaaatacgatctctcattttctcttactaaaattacgggaattaaccttcatctactccaagggaggactaaattaatcgactatcccgttgcgcaacgcatgtcgtgggctgctcgtcgagcgacggcgaggccagaagatcgagtatatctattcgggatatttggtgtttacatgacaatgctttacggcgagggtcttgagcatgctttcctccgtctccaggaagaaatcatgaaaacccttgatgatcactcaatatttgcctggactggtgtcaaagaaccctgcggcatgctggctaaaaatccagaagccttcgcggcgtctggcaacgttcgatttcacgttgaatttccgcttcgaccaaacaaatatcctagaaagccatattccatgaccaaccacggtctttacatgtctcttgaactcctacctctcttaccaggtatttactgcggtcgcctggactatatgcaaaaccactacgtcagaacgtcagtgcaagaacaggacttttggtatccagattctgacgtcgaatctattgcacatattgtgcagagagaggtctcgttgcactgcttgcaaaacccccagtcttccaaccgaatgtcgagtatggagggaattcgtatcaagataaaaggcgacaaagaagatagcgatcaatttttcccattcacatgtatactagatcaggcattcaagatatatattcccgccaatcgagcaggcattcaagcagttaggttgagttgggattttgattttaatcctgcagtcttcgttggagaagcatcgttagaatcggaaacaatgacgtggatcaaagaaggtggactgtacgtggagaaccgatccgatggccagttcagaacttctcagcatgtcaagaattggaacaggctggataccactcacgccactcacgatcttgtgtatgccaagaaccagtgccgcgggctctgggcaatcgcaggtagtcggaatactggtctctacggtcaattaggatcgaccggattatacgtttatgtacaacgacccatgtacgacgagtcaattttgaggttcgaaatggacttgagacaggtcttcccttgcgaggaacgagtgaagcagtacgacgaagatgaggagtcttcaccaaagacgactagtcgaaaagaaggcacaaagcatgttcccgagaacgctctatcaagaagaagaagaaaatggagaagaaattcgagaccgtatagatggaagtactataatagggacttcaaggcacgaaaggaatag

SEQ ID NO: 37055 - protein, 613 aa, Muscodor strobelii
  misc_feature: SGI Peptide ID NO. 572854
  misc_feature (24)..(165): Pfam Id: PF06985 Pfam Desc: Heterokaryon incompatibility protein (HET)
  misc_feature (1)..(449): NCBI GI: 256720502 Blast Desc: NECHADRAFT_55867 [Nectria haematococca mpVI 77-13-4]
  misc_feature (1)..(341): NCBI GI: 121715886 Blast Desc: HET domain protein [Aspergillus clavatus NRRL 1] gi|119403709|gb|EAW14126.1| HET domain protein [Aspergillus clavatus NRRL 1]
  misc_feature (1)..(324): NCBI GI: 256720984 Blast Desc: NECHADRAFT_82249 [Nectria haematococca mpVI 77-13-4]
  misc_feature (1)..(328): NCBI GI: 256723740 Blast Desc: NECHADRAFT_52245 [Nectria haematococca mpVI 77-13-4]
  misc_feature (1)..(333): NCBI GI: 145608538 Blast Desc: MGG_06555 [Magnaporthe grisea 70-15] gi|145016004|gb|EDK00494.1| MGG_06555 [Magnaporthe grisea 70-15]
  misc_feature (1)..(328): NCBI GI: 171683732 Blast Desc: protein product [Podospora anserina] gi|170941826|emb|CAP67479.1| protein product [Podospora anserina]
  misc_feature (23)..(331): NCBI GI: 261359026 Blast Desc: HET domain-containing protein [Verticillium albo-atrum VaMs.102]
  misc_feature (1)..(341): NCBI GI: 261201308 Blast Desc: HET domain-containing protein [Ajellomyces dermatitidis SLH14081] gi|239592113|gb|EEQ74694.1| HET domain-containing protein [Ajellomyces dermatitidis SLH14081]
  misc_feature (1)..(357): NCBI GI: 171688186 Blast Desc: protein product [Podospora anserina] gi|170944055|emb|CAP70165.1| protein product [Podospora anserina]
  misc_feature (1)..(332): NCBI GI: 85092369 Blast Desc: NCU04912 [Neurospora crassa OR74A] gi|28920765|gb|EAA30124.1| [Neurospora crassa OR74A]
MHLIEVDTLRLKKFISDSEVVDKYAILSHRWLQTEEEVTFQDIESQDTQIAMQKKGYFKIVETSKLAKEHGLSYFWIDTCCIDKSSSAELQEAINSMYRWYRNAAICLVYLTHNHISNDIDEHQIDSDDSDDFGNLVGHYSDMNSFFLSSYKDDEWFTRGWTLQELIAPRNLSFYDYKWSYIGRKYDLSFSLTKITGINLHLLQGRTKLIDYPVAQRMSWAARRATARPEDRVYLFGIFGVYMTMLYGEGLEHAFLRLQEEIMKTLDDHSIFAWTGVKEPCGMLAKNPEAFAASGNVRFHVEFPLRPNKYPRKPYSMTNHGLYMSLELLPLLPGIYCGRLDYMQNHYVRTSVQEQDFWYPDSDVESIAHIVQREVSLHCLQNPQSSNRMSSMEGIRIKIKGDKEDSDQFFPFTCILDQAFKIYIPANRAGIQAVRLSWDFDFNPAVFVGEASLESETMTWIKEGGLYVENRSDGQFRTSQHVKNWNRLDTTHATHDLVYAKNQCRGLWAIAGSRNTGLYGQLGSTGLYVYVQRPMYDESILRFEMDLRQVFPCEERVKQYDEDEESSPKTTSRKEGTKHVPENALSRRRRKWRRNSRPYRWKYYNRDFKARKE

SEQ ID NO: 37056 - DNA, 2171 bp, Muscodor strobelii; identical to SEQ ID NO: 37053
  misc_feature: SGI EST ID NO. CUFF.88485.1
  misc_feature: Variant of the nucleotide sequence at SEQ ID NO 37054

SEQ ID NO: 37057 - DNA, 1323 bp, Muscodor strobelii
  misc_feature: SGI cDNA ID NO. 572855
  misc_feature: Elevated expression when VOC is produced
  misc_feature: Encodes the peptide sequence at SEQ ID NO 37058
atgctatactttctcatcgatggcttgcagcagaagatgagggagacaagcaaacttgcaaaagcattgaatctacgctacatatggatcgatacatgttgtattgataaatcctctagttccgaactccaagaggcgatcaatagcatgtaccgttggtaccagaatgctgccatatgttgtgtgtatctgaattccggtcatgataatcacgaatcgcttaatagtcgagtcgccaactctaacgacgacgaagatactgaatggtttgaagacaaatggttctatggattatatcgacatcacgaatggtttacgcgcggctggacgttacaggaactcatcgctcctaaaactgtactcttttataattacaactgggagctcatcggcaataagtggtcttttgcgtcaactctttcaaagattacccgaattgacgttagaatccttctaggcctgaaggacttgaaagattattcagtcgcacagcgcatgtcgtgggccgcgggtcagacaacggcaagaccagaagacagatcatactgtctatttggaatattcggcgtttacatgtctatgctttacggtgagggtggcgagcatgcttttcaacgtcttcaagaggagattatcaagacttcaaatgaccagtctatttttgcttggaaaggcgtgacagaaccctgtgggatgttggccaccaaattagaagcttttacaaattgcggaaatgttaatgccttcactccgagagcttcaacgcccgcgaaggcattctcgatcaccaacattggtctccagatttcccttgaacttctacctctgaccccaggcatctactgcgggagactgaactgctcggcaccagagtcccatgatctttggagaacccaatcgagctggatctttctccaagaaatagacgcgaatgataactttctcaggatctcggtagatcaacaggattttgcgtatcctgatgatacgaatgctgattttgcttttggttttcgaatcaacaagagacaagtgccacctaactccgccggtatcaaagcaatcagactgagctgggactttaatttcaagcctgtcgtctttttaggaggatcttcacttgagccaacaattttggcgtggatccgggctggaggcctgtatttcgatgaattacccgatgatcaattcgctgcttctcaaaactggaataagggttgcaatggtcttagtggagtctacgtgggacgcaccgataacgtggtttgggctaccaaggtgggaggtcagaatagatctgtcagggctagcgcatcggcctga

SEQ ID NO: 37058 - protein, 440 aa, Muscodor strobelii
  misc_feature: SGI Peptide ID NO. 572855
  misc_feature (3)..(113): Pfam Id: PF06985 Pfam Desc: Heterokaryon incompatibility protein (HET)
  misc_feature (11)..(64): Pfam Id: PF06985 Pfam Desc: Heterokaryon incompatibility protein (HET)
  misc_feature (12)..(273): NCBI GI: 171683732 Blast Desc: protein product [Podospora anserina] gi|170941826|emb|CAP67479.1| protein product [Podospora anserina]
  misc_feature (20)..(280): NCBI GI: 238493477 Blast Desc: conserved [Aspergillus flavus NRRL3357] gi|220696469|gb|EED52811.1| conserved [Aspergillus flavus NRRL3357]
  misc_feature (11)..(323): NCBI GI: 256720502 Blast Desc: NECHADRAFT_55867 [Nectria haematococca mpVI 77-13-4]
  misc_feature (11)..(319): NCBI GI: 85092369 Blast Desc: NCU04912 [Neurospora crassa OR74A] gi|28920765|gb|EAA30124.1| [Neurospora crassa OR74A]
  misc_feature (20)..(287): NCBI GI: 145246214 Blast Desc: An12g02770 [Aspergillus niger] gi|134080070|emb|CAK41116.1| protein product [Aspergillus niger]
  misc_feature (12)..(269): NCBI GI: 171689682 Blast Desc: protein product [Podospora anserina] gi|170944803|emb|CAP70915.1| protein product [Podospora anserina]
  misc_feature (12)..(287): NCBI GI: 238492441 Blast Desc: ankyrin repeat-containing protein, [Aspergillus flavus NRRL3357] gi|220695951|gb|EED52293.1| ankyrin repeat-containing protein, [Aspergillus flavus NRRL3357]
  misc_feature (12)..(320): NCBI GI: 46107392 Blast Desc: FG00579.1 [Gibberella zeae PH-1]
  misc_feature (12)..(276): NCBI GI: 115491647 Blast Desc: [Aspergillus terreus NIH2624] gi|114197311|gb|EAU39011.1| [Aspergillus terreus NIH2624]
  misc_feature (11)..(294): NCBI GI: 238485594 Blast Desc: ankyrin repeat-containing protein, [Aspergillus flavus NRRL3357] gi|220698914|gb|EED55253.1| ankyrin repeat-containing protein, [Aspergillus flavus NRRL3357]
  misc_feature: Useful for introducing or modulating the production of volatile compounds
MLYFLIDGLQQKMRETSKLAKALNLRYIWIDTCCIDKSSSSELQEAINSMYRWYQNAAICCVYLNSGHDNHESLNSRVANSNDDEDTEWFEDKWFYGLYRHHEWFTRGWTLQELIAPKTVLFYNYNWELIGNKWSFASTLSKITRIDVRILLGLKDLKDYSVAQRMSWAAGQTTARPEDRSYCLFGIFGVYMSMLYGEGGEHAFQRLQEEIIKTSNDQSIFAWKGVTEPCGMLATKLEAFTNCGNVNAFTPRASTPAKAFSITNIGLQISLELLPLTPGIYCGRLNCSAPESHDLWRTQSSWIFLQEIDANDNFLRISVDQQDFAYPDDTNADFAFGFRINKRQVPPNSAGIKAIRLSWDFNFKPVVFLGGSSLEPTILAWIRAGGLYFDELPDDQFAASQNWNKGCNGLSGVYVGRTDNVVWATKVGGQNRSVRASASA

SEQ ID NO: 37059 - DNA, 2483 bp, Muscodor strobelii
  misc_feature: SGI EST ID NO. CUFF.88482.0
  misc_feature: Variant of the nucleotide sequence at SEQ ID NO 37057
ataatctcagaggcaagctgaatgtgttgaattcacttcgagctacctcttatctcttcacgtcgattcttttcgcgcttagtgcgtcacaagctcacagtagctcttgaagcatagttcttggtcgtctagacgtgtgcttcctcaaaaaaaaaaaatgcaggatgcatttaatagacgttgaaactctccgtttacgcaaggatattcttgaggccgatacattaaaccaatatgaatatgctatactttctcatcgatggcttgcagcagaagatgaggtaacatttcaagacattgagtctccagattccactattgcaagtcagaagaaaggctacctcaaaattagggagacaagcaaacttgcaaaagcattgaatctacgctacatatggatcgatacatgttgtattgataaatcctctagttccgaactccaagaggcgatcaatagcatgtaccgttggtaccagaatgctgccatatgttgtgtgtatctgaattccggtcatgataatcacgaatcgcttaatagtcgagtcgccaactctaacgacgacgaagatactgaatggtttgaagacaaatggttctatggattatatcgacatcacgaatggtttacgcgcggctggacgttacaggaactcatcgctcctaaaactgtactcttttataattacaactgggagctcatcggcaataagtggtcttttgcgtcaactctttcaaagattacccgaattgacgttagaatccttctaggcctgaaggacttgaaagattattcagtcgcacagcgcatgtcgtgggccgcgggtcagacaacggcaagaccagaagacagatcatactgtctatttggaatattcggcgtttacatgattttgacatatcgtatcacaatatgacagtctatgctttacggtgagggtggcgagcatgcttttcaacgtcttcaagaggagattatcaagacttcaaatgaccagtctatttttgcttggaaaggcgtgacagaaccctgtgggatgttggccaccaaattagaagcttttacaaattgcggaaatgttaatgccttcactccgagagcttcaacgcccgcgaaggcattctcgatcaccaacattggtctccagatttcccttgaacttctacctctgaccccaggcatctactgcgggagactgaactgctcggcaccagagtcccatgatctttggagaacccaatcgagctggatctttctccaagaaatagacgcgaatgataactttctcaggatctcggtagatcaacaggattttgcgtatcctgatgatacgaatgctgattttgcttttggttttcgaatcaacaagagacaagtttctattcggcaagttaacttttatgttcctcaaaaacctagatcaattgtttcgataagagttgcgggatttcgcacatgtataagtggagataaggagatatgggaacaattcggacatttcatatgcatcccacttcaatcacatgaaataaaggtgccacctaactccgccggtatcaaagcaatcagactgagctgggactttaatttcaagcctgtcgtctttttaggaggatcttcacttgagccaacaattttggcgtggatccgggctggaggcctgtatttcgatgaattacccgatgatcaattcgctgcttctcaaaactggtcaccccgccatcatatgaggtggaacacatataataagcacctcggggtttattccgacaacacttgccccgggctttgggccattagatatcgtaatgaacatctaacggcccaattgggctcaacaggaataagggttgcaatggtcttagtggagtctacgtgggacgcaccgataacgtggtttgggctaccaaggtgggaggtcagaatagatctgtcagggctagcgcatcggcctgaagttacgggctactctggagaacacacgagattttcagatgtgagttcagggaacaagaaccaggagccggtccctttgcggtcaaaaggaagagaggttaatggtctcaaggtttctaaagtggacagaaggcaacttttcccttagatgtataaggcaagccaacatagactaagctctggctactggcatagtgttttgagattactgcagaggctaagttccgacatttagctgtcgacccttttgagccttcagatattgggtatcttttatcctcaaaagaacgtcttgtaatgaaaatacggttcttttctatcttattttaccttagttccctttattgtaaaccaaggttcatctatacgaagaacagaaaataggcatcgatccttacaagtttcgcaattagcacgccgaggttatgagacttaagagtatggaaggagatcaaaaggcgcaggaagagaagcgtagagttctggatgggagtttgaagcgtccatacgtatatacgaatcactgtcg

SEQ ID NO: 37060 - DNA, 468 bp, Muscodor strobelii
  misc_feature: SGI cDNA ID NO. 572856
  misc_feature: Reduced expression when VOC is produced
  misc_feature: Encodes the peptide sequence at SEQ ID NO 37061
atgatttccttaggcttcgataagaacatatcgtactatacggttccaatcgcattggttctcgctctccttccgcggcattactcgggactttcagggccaggagccaagttatttgatcggcaacgaccaagagattttgtcgcaactctgaaggaagctgatatagacgaggaccttcgaggtcgcttattgagagccgaagcatgttccgctaatggcttcgaggctttcccggtctatgccgcagcggtaacagctggcaactctgcaggggtctctccagcaacaatgaatctgctttctatcggttggatagcgagtcgcttgctatacacatatgtttacatatggtatcaagggagcgaaaagcttgcgttcggacaaacaccaatgcgattcaaagtatggtcaataggcgctacgatatgcttgtccatgttcgtactagcggggaggaatatgtga

SEQ ID NO: 37061 - protein, 155 aa, Muscodor strobelii
  misc_feature: SGI Peptide ID NO. 572856
  misc_feature (4)..(155): NCBI GI: 46125023 Blast Desc: FG06889.1 [Gibberella zeae PH-1]
  misc_feature (8)..(117): NCBI GI: 154317162 Blast Desc: BC1G_03483 [Botryotinia fuckeliana B05.10] gi|150844900|gb|EDN20093.1| BC1G_03483 [Botryotinia fuckeliana B05.10]
  misc_feature (4)..(152): NCBI GI: 171686036 Blast Desc: protein product [Podospora anserina] gi|170942979|emb|CAP68632.1| protein product [Podospora anserina]
  misc_feature (4)..(153): NCBI GI: 164429117 Blast Desc: NCU00456 [Neurospora crassa OR74A] gi|157072416|gb|EAA27539.2| [Neurospora crassa OR74A]
  misc_feature (8)..(153): NCBI GI: 169607643 Blast Desc: SNOG_06880 [Phaeosphaeria nodorum SN15] gi|111064411|gb|EAT85531.1| SNOG_06880 [Phaeosphaeria nodorum SN15]
  misc_feature (9)..(152): NCBI GI: 71003774 Blast Desc: UM00406.1 [Ustilago maydis 521] gi|46095555|gb|EAK80788.1| UM00406.1 [Ustilago maydis 521]
  misc_feature (9)..(152): NCBI GI: 156048995 Blast Desc: [Sclerotinia sclerotiorum 1980] gi|154692603|gb|EDN92341.1| [Sclerotinia sclerotiorum 1980]
  misc_feature (8)..(153): NCBI GI: 154279588 Blast Desc: conserved [Ajellomyces capsulatus NAm1] gi|150412550|gb|EDN07937.1| conserved [Ajellomyces capsulatus NAm1]
  misc_feature (8)..(153): NCBI GI: 225562630 Blast Desc: conserved [Ajellomyces capsulatus G186AR]
  misc_feature (8)..(155): NCBI GI: 121709752 Blast Desc: conserved [Aspergillus clavatus NRRL 1] gi|119400659|gb|EAW11084.1| conserved [Aspergillus clavatus NRRL 1]
  misc_feature: Useful for introducing or modulating the production of volatile compounds
MISLGFDKNISYYTVPIALVLALLPRHYSGLSGPGAKLFDRQRPRDFVATLKEADIDEDLRGRLLRAEACSANGFEAFPVYAAAVTAGNSAGVSPATMNLLSIGWIASRLLYTYVYIWYQGSEKLAFGQTPMRFKVWSIGATICLSMFVLAGRNM

SEQ ID NO: 37062 - DNA, 631 bp, Muscodor strobelii
  misc_feature: SGI EST ID NO. CUFF.88555.0
  misc_feature: Variant of the nucleotide sequence at SEQ ID NO 37060
cagagatctactgcacatataccttatgttcgcaatgatttccttaggcttcgataagaacatatcgtactatacggttccaatcgcattggttctcgctctccttccgcggcattactcgggactttcagggccaggagccaagttatttgatcggcaacgaccaagagattttgtcgcaactctgaaggaagctgatatagacgaggaccttcgaggtcgcttattgagagccgaagcatgttccgctaatggcttcgaggctttcccggtctatgccgcagcggtaacagctggcaactctgcaggggtctctccagcaacaatgaatctgctttctatcggttggatagcgagtcgcttgctatacacatatgtttacatatggtatcaagggagcgaaaagcttgcgttcggacaaacaccaatgcgattcaaagtatggtcaataggcgctacgatatgcttgtccatgttcgtactagcggggaggaatatgtgacgggcgcatcttaggagacgaaatacctgctggcatacgtcgggttatttttgctatgaaatatctgagatatcatgtactgctttgttttatagtatatattctaagactctttgatttcatttgtcg

SEQ ID NO: 37063 - DNA, 1836 bp, Muscodor strobelii
  misc_feature: SGI cDNA ID NO. 572857
  misc_feature: Encodes the peptide sequence at SEQ ID NO 37064
atgactcgaatttgcgagactcgatgtgaaaatggcgacattatattccgggagctcgatgatatccgggaggactggagattaaagagatacacgaaaccacttccgaagccttcacttcacgggatcatttgtctcttgctccctgatattggtattcgtaaagcagtgcgccttcgtctggtgagcagagctttcaatgaggtgatacagattgctatcagttacgaacaagtcatccgacttgaccatgaagcggctgatgtctcggacttgatcaccggatatataccagcaaaaaagctgttgtgcgagtcctttgctctctcacatactagctcgatcaaagctagagctgttgccgacacgattgctacaatggaacggctgtaccgtgtctctcatcagcgcttcacatggcaatataagattgctgaggccgttgcaactgcaaacacttacaatatgaaagcatggattcgacgagagcaggtcagaagccttcgcgaaatcagaggccaaaatgtactttgtggagcctgtgttattggtgatttgagcctcgtaaggttccttgttgaaccacagcctcaatatggaggaatacctctatacctatgcaacgtcaacacattcagcccctttttcgggcagcctctccatattgcagctacatggggtcacgaatccatcgtgaggtatctgttggatcacggagccgattcgaagaaatgcgagctcgcaatcgatgttcggcaccaacatgacgggccatgggagcagggagttgttttacatctaaaacacaaagacctgtaccgtcgaaacaccatgggcagtgctctgcgctgtgcaattctcgggggtaactgccggataatcgagcttctgatggctcctcgattccgcattgatcctagacgacgagaacatctatacaccatcatcgctgcagcttctcgcggtcgccgcgatctcttcgcgaggctcgctagtccaaagcacaccaacaactgtttatcgcctatcatagacgaagtagtgatgggaatgatgcgcgctgccattgaccactcaagactagaaacagtggaatatatcatagatgagttctatagccgccaacactgtgtggccaatccttgtgcggctcaaccttgcgttgcccaaccgatccctcttgatgtgatgctgcaggcattccgtcgaggacgagaacaaatcgcgctcagacttttaagataccaaacgacatgcccagggtggaacgcatgcgaattccgcagcctggtgcaggagtcggcgtatcacggtcacggcagccttctccgacacttgctctctttgccacatgcgctgcagaaggagatcttagttcgcgcgcttctatccgcaatcgagggtggccaggatcttcttgttaaatacctattacgatgcacgcctgtttttgatcatacaacggggtctcccaaaacatttttagctattcaacacgatgaaaatgcctactggttcgaggaggagtacgtaatcaatgtcggagaggccgccttgatcaaagcggcggaaatcaagaatcctcgaatgatttgcctactgcgaaaagaaggggctgatatcaagcgattctttaaaatcgctcgacagaatagcacgaaatggtctcagccttggcttcttgatatcatcagatcggtggagggagtgaacctagattgggatgattggtggtgggagctgaatggttggtccgagaacgacgtcaaacgtcagcctcaacagggcggcgtttatctcaccgaagagacatggggttggcacggtagatactaa

SEQ ID NO: 37064 - protein, 611 aa, Muscodor strobelii
  misc_feature: SGI Peptide ID NO. 572857
  misc_feature (219)..(241): Pfam Id: PF00023 Pfam Desc: Ankyrin repeat
  misc_feature (35)..(479): NCBI GI: 121709712 Blast Desc: Ankyrin repeat protein [Aspergillus clavatus NRRL 1] gi|119400646|gb|EAW11071.1| Ankyrin repeat protein [Aspergillus clavatus NRRL 1]
  misc_feature (166)..(503): NCBI GI: 123389586 Blast Desc: ankyrin repeat protein [Trichomonas vaginalis G3] gi|121880660|gb|EAX86816.1| ankyrin repeat protein, [Trichomonas vaginalis G3]
  misc_feature (175)..(333): NCBI GI: 242816359 Blast Desc: multiple ankyrin repeats single kh domain protein, [Talaromyces stipitatus ATCC 10500] gi|218715100|gb|EED14523.1| multiple ankyrin repeats single kh domain protein, [Talaromyces
  misc_feature (52)..(478): NCBI GI: 240111906 Blast Desc: ankyrin repeat containing protein [Coccidioides posadasii C735 delta SOWgp]
  misc_feature (68)..(368): NCBI GI: 123403495 Blast Desc: [Trichomonas vaginalis G3] gi|121883518|gb|EAX89317.1| TVAG_017650 [Trichomonas vaginalis G3]
  misc_feature (174)..(369): NCBI GI: 238842242 Blast Desc: ankyrin domain-containing protein [Microsporum canis CBS 113480]
  misc_feature (165)..(330): NCBI GI: 255957133 Blast Desc: Pc21g23520 [Penicillium chrysogenum Wisconsin 54-1255] gi|211591030|emb|CAP97249.1| Pc21g23520 [Penicillium chrysogenum Wisconsin 54-1255]
  misc_feature (52)..(478): NCBI GI: 119173730 Blast Desc: CIMG_10286 [Coccidioides immitis RS]
  misc_feature (171)..(369): NCBI GI: 193704664 Blast Desc: : similar to fem-1 homolog b [Acyrthosiphon pisum]
  misc_feature (219)..(489): NCBI GI: 154310176 Blast Desc: BC1G_07008 [Botryotinia fuckeliana B05.10] gi|150851569|gb|EDN26762.1| BC1G_07008 [Botryotinia fuckeliana B05.10]
MTRICETRCENGDIIFRELDDIREDWRLKRYTKPLPKPSLHGIICLLLPDIGIRKAVRLRLVSRAFNEVIQIAISYEQVIRLDHEAADVSDLITGYIPAKKLLCESFALSHTSSIKARAVADTIATMERLYRVSHQRFTWQYKIAEAVATANTYNMKAWIRREQVRSLREIRGQNVLCGACVIGDLSLVRFLVEPQPQYGGIPLYLCNVNTFSPFFGQPLHIAATWGHESIVRYLLDHGADSKKCELAIDVRHQHDGPWEQGVVLHLKHKDLYRRNTMGSALRCAILGGNCRIIELLMAPRFRIDPRRREHLYTIIAAASRGRRDLFARLASPKHTNNCLSPIIDEVVMGMMRAAIDHSRLETVEYIIDEFYSRQHCVANPCAAQPCVAQPIPLDVMLQAFRRGREQIALRLLRYQTTCPGWNACEFRSLVQESAYHGHGSLLRHLLSLPHALQKEILVRALLSAIEGGQDLLVKYLLRCTPVFDHTTGSPKTFLAIQHDENAYWFEEEYVINVGEAALIKAAEIKNPRMICLLRKEGADIKRFFKIARQNSTKWSQPWLLDIIRSVEGVNLDWDDWWWELNGWSENDVKRQPQQGGVYLTEETWGWHGRY

SEQ ID NO: 37065 - DNA, 1086 bp, Muscodor strobelii
  misc_feature: SGI cDNA ID NO. 572858
  misc_feature: Encodes the peptide sequence at SEQ ID NO 37066
atgcaagcgccctccatccccaatctcctgagtcttcggggctccaggggcggcgccgggccacggggccggacacgagggcggggtggcgcctctccagcttcggcatcaccccttagtcacgatgccgtcattcaaggcactgacaccgatgccgcggtatctcgtatgagcgccgttgatctcggctacatccaagatcgctatgctcagtatttcgtctctacgtctagcacaggcgaccatgtgcgaaggctgcccatcattaatcgagggacgtacactcgcacgacggcaatcgatagactggtagatgtctttctagatgccacggaaggccagaaacgccagatcatctcacttggcgctggtaccgacactcgtgttttcagattgctctccgaagcaggtcggagcaaactcatctatcatgagttggattttccagcgatcaccagcaagaaatttagactcatcagttcagtacctattctgagacagattatattatcaaatgatgtcgtagcagagagtcgttattggcggggcgatagtcttccaaacgagaaccagtattggggtcactatcaggacttgagagacttactcaagaccgattttacagatcttgaaggtatccagacagacattccaacgctcctgatatcagaatgctgtctatgttatctcgaaacctcagaagcaacaagcatcatcaagtacttcgcagatcggattgccagtctctccctcgtgctgtacgagccaatacatcccgatgatccctttggccagcagatggtctccaacttggctgcacgacatatcagaatgccaaccttacacgactatagggatacaaagcaacaggagtcgcggcttcgaatttctggctttgattctgcttcctgctccacgattgaaggcatttggaagaattggatctcgacagaagagaaagaaagagtggatgctctcgagggcctcgatgaggttgaagaatgggatcttctggcccgtcattactgtgtctcttggggttggagaggcatggctatagacggttggcgggttgggagctcatga

SEQ ID NO: 37066 - protein, 361 aa, Muscodor strobelii
  misc_feature: SGI Peptide ID NO. 572858
  misc_feature (43)..(349): Pfam Id: PF04072 Pfam Desc: Leucine carboxyl methyltransferase
  misc_feature (215)..(349): Pfam Id: PF04072 Pfam Desc: Leucine carboxyl methyltransferase
  misc_feature (43)..(170): Pfam Id: PF04072 Pfam Desc: Leucine carboxyl methyltransferase
  misc_feature (4)..(356): NCBI GI: 39952231 Blast Desc: MGG_01758 [Magnaporthe grisea 70-15] gi|145020390|gb|EDK04519.1| MGG_01758 [Magnaporthe grisea 70-15]
  misc_feature (1)..(356): NCBI GI: 46121423 Blast Desc: FG05090.1 [Gibberella zeae PH-1] gi|90185133|sp|Q4ICG8.1|LCMT1_GIBZE RecName: Full=Leucine carboxyl methyltransferase 1; AltName: Full=Protein phosphatase 1
  misc_feature (3)..(354): NCBI GI: 164423643 Blast Desc: NCU07993 [Neurospora crassa OR74A] gi|110825775|sp|Q7SAP7.2|LCMT1_NEUCR RecName: Full=Leucine carboxyl methyltransferase 1; AltName: Full=Protein phosphatase 1
  misc_feature (1)..(356): NCBI GI: 256727473 Blast Desc: NECHADRAFT_34349 [Nectria haematococca mpVI 77-13-4]
  misc_feature (1)..(348): NCBI GI: 156062394 Blast Desc: SS1G_01313 [Sclerotinia sclerotiorum 1980] gi|154696649|gb|EDN96387.1| SS1G_01313 [Sclerotinia sclerotiorum 1980]
  misc_feature (1)..(348): NCBI GI: 154290213 Blast Desc: BC1G_15783 [Botryotinia fuckeliana B05.10] gi|150847839|gb|EDN23032.1| BC1G_15783 [Botryotinia fuckeliana B05.10]
  misc_feature (1)..(348): NCBI GI: 171690858 Blast Desc: protein product [Podospora anserina] gi|170945377|emb|CAP71489.1| protein product [Podospora anserina]
  misc_feature (1)..(350): NCBI GI: 116195866 Blast Desc: CHGG_04531 [Chaetomium globosum CBS 148.51] gi|88180444|gb|EAQ87912.1| CHGG_04531 [Chaetomium globosum CBS 148.51]
  misc_feature (1)..(357): NCBI GI: 238489065 Blast Desc: Leucine carboxyl methyltransferase superfamily [Aspergillus flavus NRRL3357] gi|220698158|gb|EED54498.1| Leucine carboxyl methyltransferase superfamily [Aspergillus flavus
  misc_feature (1)..(349): NCBI GI: 238837810 Blast Desc: leucine carboxyl methyltransferase 1 [Microsporum canis CBS 113480]
MQAPSIPNLLSLRGSRGGAGPRGRTRGRGGASPASASPLSHDAVIQGTDTDAAVSRMSAVDLGYIQDRYAQYFVSTSSTGDHVRRLPIINRGTYTRTTAIDRLVDVFLDATEGQKRQIISLGAGTDTRVFRLLSEAGRSKLIYHELDFPAITSKKFRLISSVPILRQIILSNDVVAESRYWRGDSLPNENQYWGHYQDLRDLLKTDFTDLEGIQTDIPTLLISECCLCYLETSEATSIIKYFADRIASLSLVLYEPIHPDDPFGQQMVSNLAARHIRMPTLHDYRDTKQQESRLRISGFDSASCSTIEGIWKNWISTEEKERVDALEGLDEVEEWDLLARHYCVSWGWRGMAIDGWRVGSS

SEQ ID NO: 37067 - DNA, 2908 bp, Muscodor strobelii
  misc_feature: SGI EST ID NO. CUFF.88821.1
  misc_feature: Variant of the nucleotide sequence at SEQ ID NO 37065
caacagcacagccacagtcggcgtttgtttgatcaactcgagcaacaacatcccagatccattgaacaaagccagttccgactcgtccgttacagttcgatagtggggtctcctggtggccaaaaacgccttgaaaccgttgacaagccggaagaagacgaagaaagacgtagagctttacttgcatacccgactgacaatagccacggagggttttcatgtgtctcacacatatgcaagtacttgcactgctgccgacattgtcgtaagatcgagccctacccaccaatgtcggggatgcaagcgccctccatccccaatctcctgagtcttcggggctccaggggcggcgccgggccacggggccggacacgagggcggggtggcgcctctccagcttcggcatcaccccttagtcacgatgccgtcattcaaggcactgacaccgatgccgcggtatctcgtatgagcgccgttgatctcggctacatccaagatcgctatgctcagtatttcgtctctacgtctagcacaggcgaccatgtgcgaaggctgcccatcattaatcgagggacgtacactcgcacgacggcaatcgatagactggtagatgtctttctagatgccacggaaggccagaaacgccagatcatctcacttggcgctggtaccgacactcgtgttttcagattgctctccgaagcaggtcggagcaaactcatctatcatgagttggattttccagcgatcaccagcaagaaatttagactcatcagttcagtacctattctgagacagattatattatcaaatgatgtcgtagcagagagtcgttattggcggggcgatagtcttccaaacgagaaccagtattggggtcactatcaggacttgagagacttactcaagaccgattttacagatcttgaaggtatccagacagacattccaacgctcctgatatcagaatgctgtctatgttatctcgaaacctcagaagcaacaagcatcatcaagtacttcgcagatcggattgccagtctctccctcgtgctgtacgagccaatacatcccgatgatccctttggccagcagatggtctccaacttggctgcacgacatatcagaatgccaaccttacacgactatagggatacaaagcaacaggagtcgcggcttcgaatttctggctttgattctgcttcctgctccacgattgaaggcatttggaagaattggatctcgacagaagagaaagaaagagtggatgctctcgagggcctcgatgaggttgaagaatgggatcttctggcccgtcattactgtgtctcttggggttggagaggcatggctatagacggttggcgggttgggagctcatgatccatcatcttctacgatcccgtgccgtagcgaatattttcgcgtcacatgcagtcatgatagcaacgcactgtgtgttcgacgcggaaacgacaagcgttgaggacatgtgtgcgcgtggtcgtctacctcaatgtgctaattttctttgcctgcgattcggacccttccagacactgcccaggtcgcaccatgttgatactgtgatcaatatcggccagcgctttgctgcattccaattacagttgcgtcatagatagggatcggtatagagggagtcgagttatactgacttgtgacggccgtccattatgaggttaatattccgtgcttactagatatcctggtgagccagccccccctctgcgtctcgctgcctgtcacgatctcatcagcccgtaggctgctctacccaagtatggcatccattttcaccgacaaagacaatgacttctgcacatactcgcgctgtcttcacttcgagtagcgacctcggtccgggaccaaaaaaggataagaattggcaatgcaatactgatcaatgttgtggtgaggggaccacgcggatcatgttcagcacgtatcatttcttctcgatcttcattcagcactgttgatgttggatcgaggactttagtatctaccgtgccaaccccatgtctcttcggtgagataaacgccgccctgttgaggctgacgtttgacgtcgttctcggaccaaccattcagctcccaccaccaatcatcccaatctaggttcactccctccaccgatctgatgatatcaagaagccaaggctgagaccatttcgtgctattctgtcgagcgattttaaagaatcgcttgatatcagccccttcttttcgcagtaggcaaactattgagctcaatggtcagcatatgttatctcatagtagagatgatgtatgggggcggtactcattcgaggattcttgatttccgccgctttgatcaaggcggcctctccgacattgattacgtactcctcctcgaaccagtaggcattttcatcgtgttgaatagctaaaaatgttttgggagaccccgttgtatgatcaaaaacaggcgtgcatcgtaataggtatttaacaagaagatcctggccaccctcgattgcggatagaagcgcgcgaactaagatctccttctgcagcgcatgtggcaaagagagcaagtgtcggagaaggctgccgtgaccgtgatacgccgactcctgcaccaggctgcggaattcgcatgcgttccaccctgggcatgtcgtttggtatcttaaaagtctgagcgcgatttgttctcgtcctcgacggaatgcctgcagcatcacatcaagagggatcggttgggcaacgcaaggttgagccgcacaaggattggccacacagtgttggcggctatagaactcatctatgatatattccactgtttctagtcttgagtggtcaatggcagcgctatgattttattagtcatcaagtatgttgtatgaacaaaattaagcataaa

SEQ ID NO: 37068 - DNA, 1062 bp, Muscodor strobelii
  misc_feature: SGI cDNA ID NO. 572859
  misc_feature: Encodes the peptide sequence at SEQ ID NO 37069
atgtatcgtgagcttgcgaccgcgctctacaagcggggtgacaccggcatgtctgagggtcaccagatgccctcttggggcggccctgttgtcttcttgaccatcctgctgttcatccctctcctcttgatctacagctacaccgtccagcagatctacccgaccctcgccatcgtcgaggaccctgctcctcccgcctacgaacccgtctctctcaacgacgccctcaacgatgacagccaagccttcgccgacgagaccggccgcgcatctcctcccccgatcacctcgtcgctccgtggcacccacagggccctttacgctcgtggaggattcagcgccatgttccgtggctactggtgcaacgtcttcctgaacgtcgctaccgctttcatcgccaccatcttcctcggcatcggcattcctgccttcatcgccgtccccatcatcggcgttaccctcgtccagcccttcgctgcctggactcatatcgttatttccactcccagctccaaatggttctggcagcgcttcccgccgttcacccgcactttcaaggccactgctctgccgatggctctctacctcgtcgctgctgagctggccactactctacccaggggacttgcccgactgctgaatatcagcacctggaactatcagaaccctaacaccatccccgaccataatggccatgacctctggaaaggacttgtcatcttcagtgttggtcttgctctgcaggtgttcttggtcatccccgcccaggccactttgacccgagtccaggcttccttcctacctgaggatcacgataccattgttcccttcgaccgttccttcggcggtaaggtcgagcccgccgtagttggtggtaaaggctatatttccatggctgaggcttggaagagcttctcccatgaatcttggatccggcttgtgaagctttatgtcaagatcttcttcctcggcatcggtctgtttttggccctggccgctgtcttgatcccggagtacctactcatcatggcacactctactaagaacggagacgagttgtaa

SEQ ID NO: 37069 - protein, 353 aa, Muscodor strobelii
  misc_feature: SGI Peptide ID NO. 572859
  misc_feature (1)..(352): NCBI GI: 46121421 Blast Desc: FG05089.1 [Gibberella zeae PH-1]
  misc_feature (1)..(352): NCBI GI: 256726907 Blast Desc: NECHADRAFT_58109 [Nectria haematococca mpVI 77-13-4]
  misc_feature (1)..(342): NCBI GI: 116195864 Blast Desc: CHGG_04530 [Chaetomium globosum CBS 148.51] gi|88180443|gb|EAQ87911.1| CHGG_04530 [Chaetomium globosum CBS 148.51]
  misc_feature (26)..(342): NCBI GI: 171690856 Blast Desc: protein product [Podospora anserina] gi|170945376|emb|CAP71488.1| protein product [Podospora anserina]
  misc_feature (30)..(343): NCBI GI: 85108930 Blast Desc: NCU07994 [Neurospora crassa OR74A] gi|28924275|gb|EAA33428.1| [Neurospora crassa OR74A]
  misc_feature (8)..(343): NCBI GI: 169606478 Blast Desc: SNOG_06282 [Phaeosphaeria nodorum SN15] gi|111064993|gb|EAT86113.1| SNOG_06282 [Phaeosphaeria nodorum SN15]
  misc_feature (8)..(343): NCBI GI: 189192769 Blast Desc: conserved [Pyrenophora tritici-repentis Pt-1C-BFP] gi|187978287|gb|EDU44913.1| conserved [Pyrenophora tritici-repentis Pt-1C-BFP]
  misc_feature (13)..(341): NCBI GI: 226285601 Blast Desc: conserved [Paracoccidioides brasiliensis Pb01]
  misc_feature (24)..(345): NCBI GI: 212526094 Blast Desc: conserved [Penicillium marneffei ATCC 18224] gi|210072602|gb|EEA26689.1| conserved [Penicillium marneffei ATCC 18224]
  misc_feature (18)..(342): NCBI GI: 239610363 Blast Desc: conserved [Ajellomyces dermatitidis ER-3]
MYRELATALYKRGDTGMSEGHQMPSWGGPVVFLTILLFIPLLLIYSYTVQQIYPTLAIVEDPAPPAYEPVSLNDALNDDSQAFADETGRASPPPITSSLRGTHRALYARGGFSAMFRGYWCNVFLNVATAFIATIFLGIGIPAFIAVPIIGVTLVQPFAAWTHIVISTPSSKWFWQRFPPFTRTFKATALPMALYLVAAELATTLPRGLARLLNISTWNYQNPNTIPDHNGHDLWKGLVIFSVGLALQVFLVIPAQATLTRVQASFLPEDHDTIVPFDRSFGGKVEPAVVGGKGYISMAEAWKSFSHESWIRLVKLYVKIFFLGIGLFLALAAVLIPEYLLIMAHSTKNGDEL

SEQ ID NO: 37070 - DNA, 963 bp, Muscodor strobelii
  misc_feature: SGI cDNA ID NO. 572860
  misc_feature: Reduced expression when VOC is produced
  misc_feature: Encodes the peptide sequence at SEQ ID NO 37071
atggcagacaaatcacagaaatacaggcaggagatccagcaaatgatgtacgtctcaggcgagacagcagagccctcgccagaaaccacagcaataatcgaggaaatcgtgcgacaacaagtcatagagatgctgcgcaactgcaccgagctagcagcccgccgcggcgcccgcacaataacaatcaacgacctaatcttccagatccgcgacgatgcgcccaaagtctcgcgcctgaggaccttcctctcatggaaggacgtgcggaaaagcgccaaagactccgatgagaaaggcggtgacgcagatctaggagtcgccgacgacgccggaggtggcgtcatgccgggcggtggcccgtcagtcgaagaagctgcaaagaagaacaagcgtgcaaaggtcaagttaccctgggagccatcctcattctatagccaagaggtaccggagcgtgaagacgaagacgacgaggaagaagaggagatgaaccacataacacttcaacgtctccaaaaagccgacgatcggacgcgcgccatgacgcgcgaggagtacgtcacatggtccgagtatagacaagcatccttcacctaccgcaagggcaagcgcttccgcgaatgggccggcttcggcatcgtgactgattccaagccctccgatgacattgtcgatatcctcggtttcttaaccttcgagatggttcaaactcttactgaggaagcgctgcgtatcaaagagcacgaggatctatggaaagagcgcagcggcggagagaacaacgcaggcaacaaaaagaggaagctagcccaaggactatttgatcccccgagcgagggacggacacccgtcgaagcgcgacacattcaagaagcgttccgaagactccaggtccgaccgaagaagagccgcgctatgctcaatgggacgaggttgcagcagcatactaatttgaaactcatctaa

SEQ ID NO: 37071 - protein, 320 aa, Muscodor strobelii
  misc_feature: SGI Peptide ID NO. 572860
  misc_feature (6)..(97): Pfam Id: PF02269 Pfam Desc: Transcription initiation factor IID, 18kD subunit
  misc_feature (1)..(320): NCBI GI: 39952247 Blast Desc: MGG_01766 [Magnaporthe grisea 70-15] gi|145020380|gb|EDK04509.1| MGG_01766 [Magnaporthe grisea 70-15]
  misc_feature (15)..(320): NCBI GI: 116195868 Blast Desc: CHGG_04532 [Chaetomium globosum CBS 148.51] gi|88180445|gb|EAQ87913.1| CHGG_04532 [Chaetomium globosum CBS 148.51]
  misc_feature (12)..(320): NCBI GI: 171690868 Blast Desc: protein product [Podospora anserina] gi|170945382|emb|CAP71494.1| protein product [Podospora anserina]
  misc_feature (7)..(320): NCBI GI: 164423641 Blast Desc: NCU07992 [Neurospora crassa OR74A] gi|157070178|gb|EAA33426.2| NCU07992 [Neurospora crassa OR74A]
  misc_feature (3)..(320): NCBI GI: 46121425 Blast Desc: FG05091.1 [Gibberella zeae PH-1]
  misc_feature (1)..(320): NCBI GI: 156049957 Blast Desc: SS1G_07564 [Sclerotinia sclerotiorum 1980] gi|154691966|gb|EDN91704.1| SS1G_07564 [Sclerotinia sclerotiorum 1980]
  misc_feature (1)..(320): NCBI GI: 256727472 Blast Desc: [Nectria haematococca mpVI 77-13-4]
  misc_feature (1)..(320): NCBI GI: 154276556 Blast Desc: spt3 [Ajellomyces capsulatus NAm1] gi|150414196|gb|EDN09561.1| spt3 [Ajellomyces capsulatus NAm1]
  misc_feature (3)..(320): NCBI GI: 238489045 Blast Desc: SAGA-like transcriptional regulatory complex subunit Spt3, [Aspergillus flavus NRRL3357] gi|220698148|gb|EED54488.1| SAGA-like transcriptional regulatory complex subunit Spt3, flavus
  misc_feature (3)..(320): NCBI GI: 238837823 Blast Desc: spt3 [Microsporum canis CBS 113480]
  misc_feature: Useful for introducing or modulating the production of volatile compounds
MADKSQKYRQEIQQMMYVSGETAEPSPETTAIIEEIVRQQVIEMLRNCTELAARRGARTITINDLIFQIRDDAPKVSRLRTFLSWKDVRKSAKDSDEKGGDADLGVADDAGGGVMPGGGPSVEEAAKKNKRAKVKLPWEPSSFYSQEVPEREDEDDEEEEEMNHITLQRLQKADDRTRAMTREEYVTWSEYRQASFTYRKGKRFREWAGFGIVTDSKPSDDIVDILGFLTFEMVQTLTEEALRIKEHEDLWKERSGGENNAGNKKRKLAQGLFDPPSEGRTPVEARHIQEAFRRLQVRPKKSRAMLNGTRLQQHTNLKLI

SEQ ID NO: 37072 - DNA, 1167 bp, Muscodor strobelii
  misc_feature: SGI cDNA ID NO. 572861
  misc_feature: Elevated expression when VOC is produced
  misc_feature: Encodes the peptide sequence at SEQ ID NO 37073
atgcagttccttctcaaagccgcgactgctgcggccgtgatcggctccgccgttgcagctccgggcgctgggaaaagcggcggtcgtgtcatcaaggcgtcgacgactcttcagcatggccaaatcgtcgattgggtaacaccagagtcgatgactccagatggcaaggctcccgccacaccacctcaaccccctaagaatttgcgaaagagagatccaagcaagccctcctttcgcgaactcctcgccagaaaccctgccaataaggggcccgcaggcacagtacctgtgcttcgatccaacaacaccgcagctccaattgtgaaagcccgtcccaccgctaacacccagaagaccaagcgtgatggtgaccaaggtattcattggtatgccagttcggctcaatatgttaataacaacggtggtcttgctaccgttagtctgtttgcgccctatgtagagagcagctcggatttctctctgctacagacggccattatccataccgacgcccaagctgcctctgggactgtaacccagacagccgaggctggttggattgtttatcccgaccaagtctcacagcctcacctcttctcttactacaccaccaccgggtacgctagcgagggcgacaatattggatgttggaacacaggctgtgcagggtatgtgcagactgactcgacgatctaccccggcattgcctactcgcccctttcaaccgatggtggcgatcaatacgaacttcagatcggctactacttgtcggacggcaattggtggctttgggtcgacgacggctatgttggttactaccctgcgtctttgtattcgaacggcgcgtccaaccctggagagacgctaggtgcgtacgccaacgagatcaactggtatggcgagatatacaacagtgaagtgactactactaccaccgatatgggtagcggagagttcccatctgctgggtttggaaagtctgcttacatgcataacatccagtatgttgaccagtccaacaactaccagaactatgacggctctgccgggtcagtggtcagcgatactagtcgctacgactacaccccgtcttggaactctggtacttcttggggaagctacttctatatcggcggccctggagctggcggacagattggcgcttaa

SEQ ID NO: 37073 - protein, 388 aa, Muscodor strobelii
  misc_feature: SGI Peptide ID NO. 572861
  misc_feature (139)..(344): Pfam Id: PF03080 Pfam Desc: Arabidopsis proteins of function
  misc_feature (89)..(381): NCBI GI: 15238835 Blast Desc: [Arabidopsis thaliana] gi|21537066|gb|AAM61407.1| [Arabidopsis thaliana] gi|109946601|gb|ABG48479.1| At5g18460 [Arabidopsis thaliana] gi|110736745|dbj|BAF00335.1| [Arabidopsis
  misc_feature (89)..(381): NCBI GI: 225430627 Blast Desc: isoform 1 [Vitis vinifera]
  misc_feature (55)..(381): NCBI GI: 225456955 Blast Desc: [Vitis vinifera]
  misc_feature (51)..(386): NCBI GI: 255562015 Blast Desc: conserved [Ricinus communis] gi|223538820|gb|EEF40420.1| conserved [Ricinus communis]
  misc_feature (89)..(381): NCBI GI: 225430629 Blast Desc: isoform 2 [Vitis vinifera]
  misc_feature (89)..(381): NCBI GI: 270241428 Blast Desc: protein product [Vitis vinifera]
  misc_feature (40)..(381): NCBI GI: 224145866 Blast Desc: [Populus trichocarpa] gi|222862667|gb|EEF00174.1| [Populus trichocarpa]
  misc_feature (89)..(381): NCBI GI: 226500042 Blast Desc: carboxyl-terminal peptidase [Zea mays] gi|195652603|gb|ACG45769.1| carboxyl-terminal peptidase [Zea mays]
  misc_feature (88)..(381): NCBI GI: 242051929 Blast Desc: SORBIDRAFT_03g004510 [Sorghum bicolor] gi|241927085|gb|EES00230.1| SORBIDRAFT_03g004510 [Sorghum bicolor]
  misc_feature (141)..(381): NCBI GI: 115472937 Blast Desc: Os07g0573400 [Oryza sativa (japonica cultivar-group)] gi|34393554|dbj|BAC83152.1| carboxyl-terminal proteinase [Oryza sativa Japonica Group] gi|113611603|dbj|BAF21981.1| Os07g0573400
  misc_feature: Useful for introducing or modulating the production of volatile compounds
MQFLLKAATAAAVIGSAVAAPGAGKSGGRVIKASTTLQHGQIVDWVTPESMTPDGKAPATPPQPPKNLRKRDPSKPSFRELLARNPANKGPAGTVPVLRSNNTAAPIVKARPTANTQKTKRDGDQGIHWYASSAQYVNNNGGLATVSLFAPYVESSSDFSLLQTAIIHTDAQAASGTVTQTAEAGWIVYPDQVSQPHLFSYYTTTGYASEGDNIGCWNTGCAGYVQTDSTIYPGIAYSPLSTDGGDQYELQIGYYLSDGNWWLWVDDGYVGYYPASLYSNGASNPGETLGAYANEINWYGEIYNSEVTTTTTDMGSGEFPSAGFGKSAYMHNIQYVDQSNNYQNYDGSAGSVVSDTSRYDYTPSWNSGTSWGSYFYIGGPGAGGQIGA

SEQ ID NO: 37074 - DNA, 1076 bp, Muscodor strobelii
  misc_feature: SGI EST ID NO. CUFF.88877.0
  misc_feature: Variant of the nucleotide sequence at SEQ ID NO 37072
gctcccgccacaccacctcaaccccctaagaatttgcgaaagagagatccaagcaagccctcctttcgcgaactcctcgccagaaaccctgccaataaggggcccgcaggcacagtacctgtgcttcgatccaacaacaccgcagctccaattgtgaaagcccgtcccaccgctaacacccagaagaccaagcgtgatggtgaccaaggtattcattggtatgccagttcggctcaatatgttaataacaacggtggtcttgctaccgttagtctgtttgcgccctatgtagagagcagctcggatttctctctgctacagacggccattatccataccgacgcccaagctgcctctgggactgtaacccagacagccgaggctggttggattgtttatcccgaccaagtctcacagcctcacctcttctcttactacaccaccaccgggtacgctagcgagggcgacaatattggatgttggaacacaggctgtgcagggtatgtgcagactgactcgacgatctaccccggcattgcctactcgcccctttcaaccgatggtggcgatcaatacgaacttcagatcggctactacttgtcggacggcaattggtggctttgggtcgacgacggctatgttggttactaccctgcgtctttgtattcgaacggcgcgtccaaccctggagagacgctaggtgcgtacgccaacgagatcaactggtatggcgagatatacaacagtgaagtgactactactaccaccgatatgggtagcggagagttcccatctgctgggtttggaaagtctgcttacatgcataacatccagtatgttgaccagtccaacaactaccagaactatgacggctctgccgggtcagtggtcagcgatactagtcgctacgactacaccccgtcttggaactctggtacttcttggggaagctacttctatatcggcggccctggagctggcggacagattggcgcttaaagctaccattagtagcaacttgacgatcatttcatgatattagcttttcgaaatactgtatatagtagcgataccac

SEQ ID NO: 37075 - DNA, 1593 bp, Muscodor strobelii
  misc_feature: SGI cDNA ID NO. 572862
  misc_feature: Encodes the peptide sequence at SEQ ID NO 37076
atgacagatttcatcgagcagactcgggcgctgcccttgccgctccacgtactagctggtctaggctttgcgttgattgctgtcttggcaacttcgattactgtgaggcgatttgttgttagatccaacttacggcgacagggttatcttcaggatatcaacaagaagtccattcctgaacttggtgtggactcaagatttgagcgctttagccatggttacaatgtgtccaagttgggcggtggtctctccgagaaagacccgtttcttgtgtggaatggcacgacccccgagattgtactgacacaagcagagcacgttaaggaattctacagccgtcgatctggagaccattgcaagccccaaaatgctaacatgggtcactattggggtcgtgtaatgggcgtttgtgctggcgcacagaatggcgcagtctggaaagctatccgcaaggtcttcgacccctatttcagtcacgaagctgctatgaagttcgccgataccttcgagtccgagctcgttcgctggagagaggagcttgcacccaatgccggaaagaccgctaccaacttcactgtcgaggccaccactgcttgccgtatcttgcccttcaagcttatcgcccaagcttgttacggtgaagtcctcacagacgctatgttcgccgagctccttgaattgaacgaactccacgagaaggttatgatgacatcttggtttggaagcaacaccagaagcaagctgtactgcatgctacctactcaacacaagagggatatggacgagttcgtgtcacgatgggctgactacaacctgagagctgctcgcgagtgcactgccaagggaattcgatgccccgtcggagagatgcacgctgaggtcgtcaagggtacgattagcgaggacaactggctgcaaactatcgatgagatcttgttcacaaatctggatgttacgtccgctatcttggctttcttgctcatcaaccttgctatcaaccagtccgcccagaaggaactacgagaggaggtcctcgcaaatggtggaagccagaccaagatggataccgaactccttggcaaatacatcaaaaagtccgacacactcctggaatacacctgcatggaatctactcgcctatcacccgccacctggttcacccttccagagtatgttactgaggatcttgagatcggtggttatcgcatcaaggctggcacatgctgcatcattgactggactcgcctgaacatcgaaagtggaatctggaccccatctaaggagaagggtctcatccctggtactaacgaacagatcactggtcagacattctggccgcagcgcttccgtcagctcacaccattgcaataccgatggagcatgcttagatttggtcttggtggaagacactgcattggaaagaacttcgccagtctgatcatgaagcaattcttggttcaagttcttactcattactcccttgagctcgccggtgacaccagcaagaagagcttcggtgccatcaacgtcaacttgcgcgaggacagattcacgatcatgcctaaccaggacgtcaagttcactgctatctaa

SEQ ID NO: 37076 - protein, 530 aa, Muscodor strobelii
  misc_feature: SGI Peptide ID NO. 572862
  misc_feature (61)..(521): Pfam Id: PF00067 Pfam Desc: Cytochrome P450
  misc_feature (464)..(503): Pfam Id: PF00067 Pfam Desc: Cytochrome P450
  misc_feature (2)..(410): NCBI GI: 116181422 Blast Desc: CHGG_01339 [Chaetomium globosum CBS 148.51] gi|88185636|gb|EAQ93104.1| CHGG_01339 [Chaetomium globosum CBS 148.51]
  misc_feature (76)..(530): NCBI GI: 115396358 Blast Desc: [Aspergillus terreus NIH2624] gi|114193387|gb|EAU35087.1| [Aspergillus terreus NIH2624]
  misc_feature (56)..(496): NCBI GI: 238498026 Blast Desc: cytochrome P450, [Aspergillus flavus NRRL3357] gi|220693522|gb|EED49867.1| cytochrome P450, [Aspergillus flavus NRRL3357]
  misc_feature (15)..(527): NCBI GI: 240109647 Blast Desc: Cytochrome P450 family protein [Coccidioides posadasii C735 delta SOWgp]
  misc_feature (75)..(495): NCBI GI: 258565567 Blast Desc: [Uncinocarpus reesii 1704] gi|237907229|gb|EEP81630.1| [Uncinocarpus reesii 1704]
  misc_feature (56)..(499): NCBI GI: 67902842 Blast Desc: AN8408.2 [Aspergillus nidulans FGSC A4] gi|40747874|gb|EAA67030.1| AN8408.2 [Aspergillus nidulans FGSC A4] gi|259484343|tpe|CBF80479.1| TPA: Cytochrome P450 (Eurofung)
  misc_feature (16)..(452): NCBI GI: 119473659 Blast Desc: NFIA_001570 [Neosartorya fischeri NRRL 181] gi|119406858|gb|EAW16808.1| conserved [Neosartorya fischeri NRRL 181]
  misc_feature (166)..(530): NCBI GI: 115385226 Blast Desc: [Aspergillus terreus NIH2624] gi|114196852|gb|EAU38552.1| [Aspergillus terreus NIH2624]
  misc_feature (87)..(530): NCBI GI: 50306191 Blast Desc: protein product [Kluyveromyces lactis] gi|49642190|emb|CAH01908.1| KLLA0C19206p [Kluyveromyces lactis]
  misc_feature (89)..(496): NCBI GI: 238485152 Blast Desc: cytochrome P450 oxidoreductase GliC-like, [Aspergillus flavus NRRL3357] gi|220698693|gb|EED55032.1| cytochrome P450 oxidoreductase GliC-like, [Aspergillus flavus NRRL3357]
  misc_feature (90)..(511): SWISSPROT Homolog: EC 1.3.3.9 Secologanin synthase
MTDFIEQTRALPLPLHVLAGLGFALIAVLATSITVRRFVVRSNLRRQGYLQDINKKSIPELGVDSRFERFSHGYNVSKLGGGLSEKDPFLVWNGTTPEIVLTQAEHVKEFYSRRSGDHCKPQNANMGHYWGRVMGVCAGAQNGAVWKAIRKVFDPYFSHEAAMKFADTFESELVRWREELAPNAGKTATNFTVEATTACRILPFKLIAQACYGEVLTDAMFAELLELNELHEKVMMTSWFGSNTRSKLYCMLPTQHKRDMDEFVSRWADYNLRAARECTAKGIRCPVGEMHAEVVKGTISEDNWLQTIDEILFTNLDVTSAILAFLLINLAINQSAQKELREEVLANGGSQTKMDTELLGKYIKKSDTLLEYTCMESTRLSPATWFTLPEYVTEDLEIGGYRIKAGTCCIIDWTRLNIESGIWTPSKEKGLIPGTNEQITGQTFWPQRFRQLTPLQYRWSMLRFGLGGRHCIGKNFASLIMKQFLVQVLTHYSLELAGDTSKKSFGAINVNLREDRFTIMPNQDVKFTAI

SEQ ID NO: 37077 - DNA, 2048 bp, Muscodor strobelii
  misc_feature: SGI EST ID NO. CUFF.88881.0
  misc_feature: Variant of the nucleotide sequence at SEQ ID NO 37075
ggtgcgtttaccgatgtacggaggatgcgatttatgcggcgtcattaggccttagtcaggtattattggtagcgctggagtttcgttaaaagggccagagttgcactcagatttgatgaagcatccaacaagacaaccgctcaactgcgacttacacatcagcaatatcaactatatttgcattcttttcatttttcacaatgacagatttcatcgagcagactcgggcgctgcccttgccgctccacgtactagctggtctaggctttgcgttgattgctgtcttggcaacttcgattactgtgaggcgatttgttgttagatccaacttacggcgacagggttatcttcaggatatcaacaagaagtccattcctgaacttggtgtggactcaagatttgagcgctttagccatggttacaatgtgtccaagttgggcggtggtctctccgagaaagacccgtttcttgtgtggaatggcacgacccccgagattgtactgacacaagcagagcacgttaaggaattctacagccgtcgatctggagaccattgcaagccccaaaatgctaacatgggtcactattggggtcgtgtaatgggcgtttgtgctggcgcacagaatggcgcagtctggaaagctatccgcaaggtcttcgacccctatttcagtcacgaagctgctatgaagttcgccgataccttcgagtccgagctcgttcgctggagagaggagcttgcacccaatgccggaaagaccgctaccaacttcactgtcgaggccaccactgcttgccgtatcttgcccttcaagcttatcgcccaagcttgttacggtgaagtcctcacagacgctatgttcgccgagctccttgaattgaacgaactccacgagaaggttatgatgacatcttggtttggaagcaacaccagaagcaagctgtactgcatgctacctactcaacacaagagggatatggacgagttcgtgtcacgatgggctgactacaacctgagagctgctcgcgagtgcactgccaagggaattcgatgccccgtcggagagatgcacgctgaggtcgtcaagggtacgattagcgaggacaactggctgcaaactatcgatgagatcttgttcacaaatctggatgttacgtccgctatcttggctttcttgctcatcaaccttgctatcaaccagtccgcccagaaggaactacgagaggaggtcctcgcaaatggtggaagccagaccaagatggataccgaactccttggcaaatacatcaaaaagtccgacacactcctggaatacacctgcatggaatctactcgcctatcacccgccacctggttcacccttccagagtatgttactgaggatcttgagatcggtggttatcgcatcaaggctggcacatgctgcatcattgactggactcgcctgaacatcgaaagtggaatctggaccccatctaaggagaagggtctcatccctggtactaacgaacagatcactggtcagacattctggccgcagcgcttccgtcagctcacaccattgcaataccgatggagcatgcttagatttggtcttggtggaagacactgcattggaaagaacttcgccagtctgatcatgaagcaattcttggttcaagttcttactcattactcccttgagctcgccggtgacaccagcaagaagagcttcggtgccatcaacgtcaacttgcgcgaggacagattcacgatcatgcctaaccaggacgtcaagttcactgctatctaagtacaaaatgggggagcaaaggattttcatcatcaaggatacgatatgcattgggggtttggggatctacaacaatgggtttcgaggaggctgagtttacacatcctcatctaggtcacaacatctagaggttacaacggcgacaaattgtattgtacaaatttgcaattgaatagcagtatactaaaaaaaagtagaggcaattcaggacagttcatttgagttattcagaggaccccttacgtacagtgtgcg

SEQ ID NO: 37078 - DNA, 1689 bp, Muscodor strobelii
  misc_feature: SGI cDNA ID NO. 572863
  misc_feature: Encodes the peptide sequence at SEQ ID NO 37079
atggctcactttctcttcccttcaagtgacagcgttcacaaacccaagcgcaaagatgactaccccacggtcttgggcgatatcgttcgtggcggcgccgatgccatggatgctctcattctcttccgcaaattggtaaccgaagacgacagcgaacctggtagcggtggatatctatcgttcgattctcacgtaggcgacactggctgccaattacgggcaggaatgttcatcgaagtcttcgggactttcagatttctctcgactaagatgcccgaagcgtgggaagaaatcgacactgctttagaagccgccataacgaacctcaaacccgtcatctccaaagcacaagcaatgtgcaacgctctcacaaagaagaagaccaagccaaaggacctcggcctaggtccaaaggtcgaaaagccctccgccatattgcagaagctgggatgggacgaatcaagcctcatgcgacctaatacgatcttcaatgcctcaagaaaagatgcagctggtaacaaggtcgaggatgataacatgccaagcgactgggacattttccatatcccacagcttttccgtctcgtcgtctattcctatgtcctgtcgaaatataagaccttctcatactataacggtactcctaatggcgccctggacgctaaagcagcggatgcatacacaatgcgtttgatggagccgtactgggtgaccgcctctgccagtgtgaagaaggcaggaatgagacgaatcgagacagagttccgagatcttcagatatggtcgtcgaacctcacgatagcatggttggaggcattagctttacggtcaacttgcgtgtctggtgcttcaagtttaatcggcgagacgacacagacatcgattttgggaattaaagccgctgcgacatttcccggatatcttcttgagcgcgagttcctagccaggcaacctcagcccctaattctagtagataggcacttctgccatgacggttatcatgtaaatgttttcgaagcgaagatgacctatgcggtcgatgagtctaaagtcgtgtcagacttggcgaatgcaacactcgcaagcgagaaacatcagcctcagacacctaaccgatctccatttggcccatcactagtatggaaggtctcgcgcagttccattgaggagcttatgatgtcaaaagataccccggttcccaatatggtggtagttggtaatagccgagagggggactacaaggcctatggcgagcttgtggagacctctacgcttgaagacgagacattgcggaggccggattccttaccgcacgacagctgctgtgaacacaacgaggcccacatatcagagttgatgaaggctgatcacgaccggctggcactgtcattttttgcgattcacccatcttacgccttcgacttgatgacaggggaagacgaaacggacttcgtgaagcacaagatggacgcattggcgcggccgtgtaacaatacagagtccaatgagctgtcatcccagtggctagccagccgcgcggaggcagacgagatggggacagggccggaggatatgcacatcttccgctggcagcacgtatgtatcgagtctaaagcccggcttgggcgtgtattacaagaagctcttgaccgagctgacttgatgccgcctaagggaacggcggtgtga

SEQ ID NO: 37079 - protein, 562 aa, Muscodor strobelii
  misc_feature: SGI Peptide ID NO. 572863
  misc_feature (1)..(292): NCBI GI: 169619692 Blast Desc: SNOG_13044 [Phaeosphaeria nodorum SN15] gi|160703878|gb|EAT79371.2| SNOG_13044 [Phaeosphaeria nodorum SN15]
  misc_feature (1)..(186): NCBI GI: 115396356 Blast Desc: [Aspergillus terreus NIH2624] gi|114193386|gb|EAU35086.1| [Aspergillus terreus NIH2624]
  misc_feature (22)..(157): NCBI GI: 240109646 Blast Desc: CPC735_031510 [Coccidioides posadasii C735 delta SOWgp]
  misc_feature (184)..(332): NCBI GI: 115396356 Blast Desc: [Aspergillus terreus NIH2624] gi|114193386|gb|EAU35086.1| [Aspergillus terreus NIH2624]
  misc_feature (378)..(553): NCBI GI: 169619692 Blast Desc: SNOG_13044 [Phaeosphaeria nodorum SN15] gi|160703878|gb|EAT79371.2| SNOG_13044 [Phaeosphaeria nodorum SN15]
  misc_feature (181)..(276): NCBI GI: 240109646 Blast Desc: CPC735_031510 [Coccidioides posadasii C735 delta SOWgp]
  misc_feature (183)..(290): NCBI GI: 115385224 Blast Desc: [Aspergillus terreus NIH2624] gi|114196851|gb|EAU38551.1| [Aspergillus terreus NIH2624]
  misc_feature (57)..(343): NCBI GI: 50306189 Blast Desc: protein product [Kluyveromyces lactis] gi|49642189|emb|CAH01907.1| KLLA0C19184p [Kluyveromyces lactis]
MAHFLFPSSDSVHKPKRKDDYPTVLGDIVRGGADAMDALILFRKLVTEDDSEPGSGGYLSFDSHVGDTGCQLRAGMFIEVFGTFRFLSTKMPEAWEEIDTALEAAITNLKPVISKAQAMCNALTKKKTKPKDLGLGPKVEKPSAILQKLGWDESSLMRPNTIFNASRKDAAGNKVEDDNMPSDWDIFHIPQLFRLVVYSYVLSKYKTFSYYNGTPNGALDAKAADAYTMRLMEPYWVTASASVKKAGMRRIETEFRDLQIWSSNLTIAWLEALALRSTCVSGASSLIGETTQTSILGIKAAATFPGYLLEREFLARQPQPLILVDRHFCHDGYHVNVFEAKMTYAVDESKVVSDLANATLASEKHQPQTPNRSPFGPSLVWKVSRSSIEELMMSKDTPVPNMVVVGNSREGDYKAYGELVETSTLEDETLRRPDSLPHDSCCEHNEAHISELMKADHDRLALSFFAIHPSYAFDLMTGEDETDFVKHKMDALARPCNNTESNELSSQWLASRAEADEMGTGPEDMHIFRWQHVCIESKARLGRVLQEALDRADLMPPKGTAV

SEQ ID NO: 37080 - DNA, 2193 bp, Muscodor strobelii
  misc_feature: SGI EST ID NO. CUFF.88725.0
  misc_feature: Variant of the nucleotide sequence at SEQ ID NO 37078
cggggaggtaaatatcaacttgttttcgatagtggagcttacaagttatcgctgatgcagttaaccggcttatactttgctttattcaggagcctccttggagtttcctttgaagttgtacacaagtaagaaagatgatatattataaatgacccattgccattctcgagatgttcgttcattattcagagtaaacattaaccaagtccatcatcattcaacacgagtcactcattcaactggagcgtcacgttttcgaaatggctcactttctcttcccttcaagtgacagcgttcacaaacccaagcgcaaagatgactaccccacggtcttgggcgatatcgttcgtggcggcgccgatgccatggatgctctcattctcttccgcaaattggtaaccgaagacgacagcgaacctggtagcggtggatatctatcgttcgattctcacgtaggcgacactggctgccaattacgggcaggaatgttcatcgaagtcttcgggactttcagatttctctcgactaagatgcccgaagcgtgggaagaaatcgacactgctttagaagccgccataacgaacctcaaacccgtcatctccaaagcacaagcaatgtgcaacgctctcacaaagaagaagaccaagccaaaggacctcggcctaggtccaaaggtcgaaaagccctccgccatattgcagaagctgggatgggacgaatcaagcctcatgcgacctaatacgatcttcaatgcctcaagaaaagatgcagctggtaacaaggtcgaggatgataacatgccaagcgactgggacattttccatatcccacagcttttccgtctcgtcgtctattcctatgtcctgtcgaaatataagaccttctcatactataacggtactcctaatggcgccctggacgctaaagcagcggatgcatacacaatgcgtttgatggagccgtactgggtgaccgcctctgccagtgtgaagaaggcaggaatgagacgaatcgagacagagttccgagatcttcagatatggtcgtcgaacctcacgatagcatggttggaggcattagctttacggtcaacttgcgtgtctggtgcttcaagtttaatcggcgagacgacacagacatcgattttgggaattaaagccgctgcgacatttcccggatatcttcttgagcgcgagttcctagccaggcaacctcagcccctaattctagtagataggcacttctgccatgacggttatcatgtaaatgttttcgaagcgaagatgacctatgcggtcgatgagtctaaagtcgtgtcagacttggcgaatgcaacactcgcaagcgagaaacatcagcctcagacacctaaccgatctccatttggcccatcactagtatggaaggtctcgcgcagttccattgaggagcttatgatgtcaaaagataccccggttcccaatatggtggtagttggtaatagccgagagggggactacaaggcctatggcgagcttgtggagacctctacgcttgaagacgagacattgcggaggccggattccttaccgcacgacagctgctgtgaacacaacgaggcccacatatcagagttgatgaaggctgatcacgaccggctggcactgtcattttttgcgattcacccatcttacgccttcgacttgatgacaggggaagacgaaacggacttcgtgaagcacaagatggacgcattggcgcggccgtgtaacaatacagagtccaatgagctgtcatcccagtggctagccagccgcgcggaggcagacgagatggggacagggccggaggatatgcacatcttccgctggcagcacgtatgtatcgagtctaaagcccggcttgggcgtgtattacaagaagctcttgaccgagctgacttgatgccgcctaagggaacggcggtgtgagacctgaatggagcgaagtcaacttagagcctagacgcaacgcctcgatgaaacgtggctagtgctgtgccacgtggtggggaatcatatgacataacatgggaaattacaaattgcatgcaatataacagtggggtttatagagttgcatattgaataataggcttgagatcaacatcttgcatgtgtacattatagaatatcagccaccgatagagtcctgtcctcaatgaacactctaacg

SEQ ID NO: 37081 - DNA, 825 bp, Muscodor strobelii
  misc_feature: SGI cDNA ID NO. 572864
  misc_feature: Encodes the peptide sequence at SEQ ID NO 37082
atgagcgaattttggatccatctagacgcggcgaaggacctggtagagcatcttaggagacgggatgtgctcagtcctctagctcagcacctgatcaacattgcgtcatttctctgtgtcttaagtgattctacgagcccctgctatgagcctaagccgtggccaccaagtcgatatgaggataatatcttcctgggtgatggtcacactctcgagtttacctatggcgtgaccgtcacattagctgactttatacaccgtgtgtgcttgatggcgcaacatgtggcatggtacagatttaatgatttccaacaatctggagagttccaactggcatgcggtgagcttttgcaagccatctgcgagtggcatatcagcgatgagcctttatcttcattctcagacagcgatgatgtcactatgcttttgatgtcgaagcacctgcatgcatttgctgcaagtatccgcatcttttttcatacacgagtgttgccgtgcgataacgtgacgatgcaggccctagtgcaggtcgtagcattgcatttgacagagattgaagagatcaaagagcggaccggcaacaactctgttcaagctgctagcatcgcctggccaggattcattgcttcatgccaatcagatagcacaaaccgcgttatatggactaaatggtggaactcgatgctaaaatacaatattggcaatatcgacaacctatggtctattgtcaaagacacatgggccgtccgagatgaggggttgggcgacgagcctgtatgggcagctgtcctgaaacgtgatcacaaaagaattctggctatctaa

SEQ ID NO: 37082 - protein, 274 aa, Muscodor strobelii
  misc_feature: SGI Peptide ID NO. 572864
  misc_feature (1)..(273): NCBI GI: 121709736 Blast Desc: C6 zinc finger domain protein [Aspergillus clavatus NRRL 1] gi|119400654|gb|EAW11079.1| C6 zinc finger domain protein [Aspergillus clavatus NRRL 1]
  misc_feature (2)..(273): NCBI GI: 115386918 Blast Desc: [Aspergillus terreus NIH2624] gi|114190998|gb|EAU32698.1| [Aspergillus terreus NIH2624]
  misc_feature (3)..(251): NCBI GI: 256723203 Blast Desc: NECHADRAFT_86448 [Nectria haematococca mpVI 77-13-4]
  misc_feature (1)..(274): NCBI GI: 255935489 Blast Desc: Pc13g03330 [Penicillium chrysogenum Wisconsin 54-1255] gi|211583391|emb|CAP91402.1| Pc13g03330 [Penicillium chrysogenum Wisconsin 54-1255]
  misc_feature (2)..(274): NCBI GI: 255953897 Blast Desc: Pc21g06560 [Penicillium chrysogenum Wisconsin 54-1255] gi|211589412|emb|CAP95553.1| Pc21g06560 [Penicillium chrysogenum Wisconsin 54-1255]
  misc_feature (1)..(274): NCBI GI: 259486915 Blast Desc: TPA: Zn(II)2Cys6 transcription factor (Eurofung) [Aspergillus nidulans FGSC A4]
  misc_feature (3)..(273): NCBI GI: 238499169 Blast Desc: conserved [Aspergillus flavus NRRL3357] gi|220692572|gb|EED48918.1| conserved [Aspergillus flavus NRRL3357]
  misc_feature (1)..(274): NCBI GI: 67522254 Blast Desc: AN1584.2 [Aspergillus nidulans FGSC A4] gi|40745135|gb|EAA64291.1| AN1584.2 [Aspergillus nidulans FGSC A4]
  misc_feature (3)..(273): NCBI GI: 169778448 Blast Desc: [Aspergillus oryzae RIB40] gi|83772427|dbj|BAE62556.1| protein product [Aspergillus oryzae]
  misc_feature (75)..(213): NCBI GI: 256724061 Blast Desc: NECHADRAFT_101978 [Nectria haematococca mpVI 77-13-4]
MSEFWIHLDAAKDLVEHLRRRDVLSPLAQHLINIASFLCVLSDSTSPCYEPKPWPPSRYEDNIFLGDGHTLEFTYGVTVTLADFIHRVCLMAQHVAWYRFNDFQQSGEFQLACGELLQAICEWHISDEPLSSFSDSDDVTMLLMSKHLHAFAASIRIFFHTRVLPCDNVTMQALVQVVALHLTEIEEIKERTGNNSVQAASIAWPGFIASCQSDSTNRVIWTKWWNSMLKYNIGNIDNLWSIVKDTWAVRDEGLGDEPVWAAVLKRDHKRILAI

SEQ ID NO: 37083 - DNA, 2643 bp, Muscodor strobelii
  misc_feature: SGI EST ID NO. CUFF.88643.1
  misc_feature: Variant of the nucleotide sequence at SEQ ID NO 37081
ttatcccgaataggtgggccaccttgtgacacaagcctagtacgatcattcgcaatggatgctatttcgacttcgtgctcgatgcatccccctctttccccgagcatgacggcaacaccaccgcagggcctcctaaataagaaaacaaagagaaagacttttacaggatgctggacctgcagaaaaagaaagataaaatgcgatcttggccgtccaagttgtagtcgttgcagcaaggcgcgtctcgaatgtgagggatacaacatactactatactggatctctgagcaagatgatgtctctccctcatttattaagcgacaggctcgatctctcagttgaaacccgcattggccgccaggcacattgaaagatattgaccagcatattcaagatgctgacgattttgtgcccagcgcaggaattagagcgcgcatttctggtcccttttgcgtgtttcagggccagcttgaaactagcgcagatgcatgtgcttcttcctcagtgactatatcgacgccgacgggcgacgcagaagtcgagggcaatactcttcgaagtagagcgacccttatatcgaccgattctgaaacgcttgatggtcgacatggtagctgggatacattttcacgaaagaatgtttctccccagcttatgcatgtctaatgacacaagaagtctaacaaaaatatcgggatctctcaatagaagcacttctcagacccaactagttagtaacttcatggaccattatcggcacaacgtcgcaaatattttacaacctgttcggcattgtcacaatgcatataggtctttctatgccacaaaagctatggagtcgtcggagatcgggcttcgagagaacaacttgcaattgacaatctcgtctactagtcaacgggcactgctgtattctctcttagcctcggcgggtttccatttgcgcagtctgcatagatcacaagatttggacgttctggcacgacattttcgcgcaagggcatattcctatctcaaagaggcgctggcgtcattatcatcggtcaatcctcaagaactatgctatttccaaagtccattggtggtgtgggaaggcgtactgtctgtcacattgaccctagttaccgcagatattctagacggctcaatgagcgaattttggatccatctagacgcggcgaaggacctggtagagcatcttaggagacgggatgtgctcagtcctctagctcagcacctgatcaacattgcgtcatttctctgtgtcttaagtgattctacgagcccctgctatgagcctaagccgtggccaccaagtcgatatgaggataatatcttcctgggtgatggtcacactctcgagtttacctatggcgtgaccgtcacattagctgactttatacaccgtgtgtgcttgatggcgcaacatgtggcatggtacagatttaatgatttccaacaatctggagagttccaactggcatgcggtgagcttttgcaagccatctgcgagtggcatatcagcgatgagcctttatcttcattctcagacagcgatgatgtcactatgcttttgatgtcgaagcacctgcatgcatttgctgcaagtatccgcatcttttttcatacacgagtgttgccgtgcgataacgtgacgatgcaggccctagtgcaggtcgtagcattgcatttgacagagattgaagagatcaaagagcggaccggcaacaactctgttcaagctgctagcatcgcctggccaggattcattgcttcatgccaatcagatagcacaaaccgcgttatatggactaaatggtggaactcgatgctaaaatacaatattggcaatatcgacaacctatggtctattgtcaaagacacatgggccgtccgagatgaggggttgggcgacgagcctgtatgggcagctgtcctgaaacgtgatcacaaaagaattctggctatctaacagattggtcgccccatatcattagattttgttgttgacactatgggtatcaatccctgggtatcgcggcaatcatcagtacctttggatttccctttgcgagttgttgtttggttgattatgtgttgagcaggtcgaggaaatcaccatcttcaatgtcttccatataatcgttatcgtcagggtcagttgttctggtggatcctgagtcttgttttctgacaagtttgtttaacatggagttgtcggcgaattcgaaagagtgtcgaatgcacccgacagtggtcaccagtggtagtatggtacatatggggtggctagccaactctccccctcacccacgtagtgggtggaaagctagacactccccctgactctcggctctggactctcgccgaccctatctcccatcatgggtggtctatatggctctggtcatctacggcctctggtctaaaaggatctacatgtctgctgagtgtgggaactgaacggtggtgacgggaggctgcatagctagctcgaaagatccgggctcataaccactggaacataccactgagccacgctacaaaagagtgctgtaggtcaatggttgctttgctgtaagagaaaagagctcataaccagaagaactatctgaagtgaggtgcaaaggtgatcaattcagt

SEQ ID NO: 37084 - DNA, 1140 bp, Muscodor strobelii
  misc_feature: SGI cDNA ID NO. 572865
  misc_feature: Encodes the peptide sequence at SEQ ID NO 37085
atggagtcgtcggagatcgggcttcgagagaacaacttgcaattgacaatctcgtctactagtcaacgggcactgctgtattctctcttagcctcggcgggtttccatttgcgcagtctgcatagatcacaagatttggacgttctggcacgacattttcgcgcaagggcatattcctatctcaaagaggcgctggcgtcattatcatcggtcaatcctcaagaactatgctatttccaaagtccattggtggtgtgggaaggcgtactgtctgtcacattgaccctagttaccgcagatattctagacggctcaatgagcgaattttggatccatctagacgcggcgaaggacctggtagagcatcttaggagacgggatgtgctcagtcctctagctcagcacctgatcaacattgcgtcatttctctgtgtcttaagtgattctacgagcccctgctatgagcctaagccgtggccaccaagtcgatatgaggataatatcttcctgggtgatggtcacactctcgagtttacctatggcgtgaccgtcacattagctgactttatacaccgtgtgtgcttgatggcgcaacatgtggcatggtacagatttaatgatttccaacaatctggagagttccaactggcatgcggtgagcttttgcaagccatctgcgagtggcatatcagcgatgagcctttatcttcattctcagacagcgatgatgtcactatgcttttgatgtcgaagcacctgcatgcatttgctgcaagtatccgcatcttttttcatacacgagtgttgccgtgcgataacgtgacgatgcaggccctagtgcaggtcgtagcattgcatttgacagagattgaagagatcaaagagcggaccggcaacaactctgttcaagctgctagcatcgcctggccaggattcattgcttcatgccaatcagatagcacaaaccgcgttatatggactaaatggtggaactcgatgctaaaatacaatattggcaatatcgacaacctatggtctattgtcaaagacacatgggccgtccgagatgaggggttgggcgacgagcctgtatgggcagctgtcctgaaacgtgatcacaaaagaattctggctatctaa

SEQ ID NO: 37085 - protein, 379 aa, Muscodor strobelii
  misc_feature: SGI Peptide ID NO. 572865
  misc_feature (18)..(378): NCBI GI: 121709736 Blast Desc: C6 zinc finger domain protein [Aspergillus clavatus NRRL 1] gi|119400654|gb|EAW11079.1| C6 zinc finger domain protein [Aspergillus clavatus NRRL 1]
  misc_feature (3)..(379): NCBI GI: 255935489 Blast Desc: Pc13g03330 [Penicillium chrysogenum Wisconsin 54-1255] gi|211583391|emb|CAP91402.1| Pc13g03330 [Penicillium chrysogenum Wisconsin 54-1255]
  misc_feature (24)..(356): NCBI GI: 256723203 Blast Desc: NECHADRAFT_86448 [Nectria haematococca mpVI 77-13-4]
  misc_feature (24)..(379): NCBI GI: 259486915 Blast Desc: TPA: Zn(II)2Cys6 transcription factor (Eurofung) [Aspergillus nidulans FGSC A4]
  misc_feature (24)..(379): NCBI GI: 67522254 Blast Desc: AN1584.2 [Aspergillus nidulans FGSC A4] gi|40745135|gb|EAA64291.1| AN1584.2 [Aspergillus nidulans FGSC A4]
  misc_feature (24)..(379): NCBI GI: 255953897 Blast Desc: Pc21g06560 [Penicillium chrysogenum Wisconsin 54-1255] gi|211589412|emb|CAP95553.1| Pc21g06560 [Penicillium chrysogenum Wisconsin 54-1255]
  misc_feature (101)..(378): NCBI GI: 238499169 Blast Desc: conserved [Aspergillus flavus NRRL3357] gi|220692572|gb|EED48918.1| conserved [Aspergillus flavus NRRL3357]
  misc_feature (101)..(378): NCBI GI: 169778448 Blast Desc: [Aspergillus oryzae RIB40] gi|83772427|dbj|BAE62556.1| protein product [Aspergillus oryzae]
  misc_feature (14)..(354): NCBI GI: 159128537 Blast Desc: C6 transcription factor, [Aspergillus fumigatus A1163]
  misc_feature (24)..(318): NCBI GI: 256724061 Blast Desc: NECHADRAFT_101978 [Nectria haematococca mpVI 77-13-4]
MESSEIGLRENNLQLTISSTSQRALLYSLLASAGFHLRSLHRSQDLDVLARHFRARAYSYLKEALASLSSVNPQELCYFQSPLVVWEGVLSVTLTLVTADILDGSMSEFWIHLDAAKDLVEHLRRRDVLSPLAQHLINIASFLCVLSDSTSPCYEPKPWPPSRYEDNIFLGDGHTLEFTYGVTVTLADFIHRVCLMAQHVAWYRFNDFQQSGEFQLACGELLQAICEWHISDEPLSSFSDSDDVTMLLMSKHLHAFAASIRIFFHTRVLPCDNVTMQALVQVVALHLTEIEEIKERTGNNSVQAASIAWPGFIASCQSDSTNRVIWTKWWNSMLKYNIGNIDNLWSIVKDTWAVRDEGLGDEPVWAAVLKRDHKRILAI

SEQ ID NO: 37086 - DNA, 2643 bp, Muscodor strobelii; identical to SEQ ID NO: 37083
  misc_feature: SGI EST ID NO. CUFF.88643.1
  misc_feature: Variant of the nucleotide sequence at SEQ ID NO 37084

SEQ ID NO: 37087 - DNA, 3207 bp, Muscodor strobelii
  misc_feature: SGI cDNA ID NO. 572866
  misc_feature: Encodes the peptide sequence at SEQ ID NO 37088
atgtcgaaaaataccgcggaagcgccatttggtcgccgtcttctacctcatgtcgttgacgaccttgcttcaaaaaagcctaatcaagaatgcttctcgattccgcgctcctcagatccaaaggatggctggaggccaattactttcagggcctatgctaaagctatcgatcacttatcacacagcatcattgaacaatgcggcactcctgaaaatgacacttttccgacactagcatacattggtccgaatgatgctcgctatgtcgttctcttcatcgctgccatgaaaaccgggtataaggctctgtttatatcgccgcgaaactctcatgaagcacagatgaaccttttcaaagcgacagattgtcaactgatctgttatcctgaatcgcacaacagtgtagttcatccctggctacaagagcgggaaatgcggacagtgaagatcgactcattggaatcatgctttgcacacgatgatgtgacacattttccatacgacagaagttttgaggagacagaatggatgccagctgttgtattacatactagcggcagtactggtctgccaaaaccattcgtagctatgcacgtagatactcccgatttcttagctcccaaatctttccgtacgcagggcctgttagcagcatttgacgcgtatcacgacttccccgaatgggatggacatcggacatttactcaagtatggtcagagattccggacggactctttgcgcctgtgcccttcttccatgcaggtggcatatatcttttcatgtcacgagccatctactggggaaaccctatgagtttcggcatggccgatcgtcctttgtcgccggacttggtggttgattgccttaagaatcttaaagtaacggccgccttaataccgcctgtgattcttgaatacatgagtttgaatcctgctgcagttcagactctgttatctctcaggatggtggctttcggcggaggcgaactggcaactcatgcgggaaatgcactggcgaagcatggcgtaaaactagtcaatgctattgcagctactgaattcagccctttcactaattatgtgattaagaacccggaattgtggcagtattttctcatcgaatcagacatcattggaattgattggcgtccagtcgagggatatgataatgtctatgagctggttttcgcccgcgagagtaccagtactcatccgggttaccaaacctgcttttacacattccgcgatgattgcgaactgaacacgaaagatcttttcactccacacccggtcttcaaagattattggatgtattgtggccgttccgataatattattgttctctcgaatggagagaagctgaatccagtcgccatcgaggacttagttgggcgccatcccctgattaagggggcgctggtagttggctctggacggttccagactgcgctaatcctcgagcctaccaaaccagtagggagcaagacggaggttgaacaactgatagaggccgtgtggccaacagttgaccaggccaacaaggaaacagttgcacacggtcgggtttcgaaagagtatatcatggtcacaagccccgagaaggctctccctcggggcggaaaaatgacgattcaacgagcaaatgcaaataagctatacaaggatgagattgatcagctgtatgcgacggcaagcgagactgataccagagccgagagctttcaactcgatctgagcacagagcagacgtttgtaaattctatcaaagaactgttcaatgcgcaaattagatcagacacaaagctcgacatcgatactgacatttatattgctggcatcgattcactacaagtgatcagtgtgtgccgccggctcaagactggtcttatcgccgcggggcatcctgaacttgcagcaacagtctcaattggcgagatatacaaacaccagacactacgccgacttggaagccacatattttcgcaagtcaccgggaatgagaagtcgccgaatacaatggacacaggacttgatatccagaagatggagctaatgtggaagaagtatactcaggacctgccaaagccaaagtctgatcgatcttctctatctgccgaaggccaaactgtcattctaacaggttcaactggaatgctgggctcttacatgcttgcgcatttactatccgatccccaggtggcacatgtacattgcttgaatcgggcagaagatggtggtgcaaggcaggagcagaccatgcaatcccgcggcctgtcgaccgacttttcgaagtgtatcttccactacgcgaatatgagcgaagaggacttcggattgggcacggatacgtacgaaaggcttcttagccaagccgaccgcatctaccttgtggcgtggccggtcaacttcaatctgccgtttgaaagcttcgagcctcatatccggggcgtccataatgttgctaactttgcgtcggcagcctctaagcggatcaatgtcactttcatttctaccgttgacacttgcgacggttggaaagcatccgatgagccggttcctgagtctagattgcaggatttcagtttgcctagcaccggatacggacgcagcaagttggtcgcaagcctcttgctggaggatgcggcgaaggcaggcgacttctcagcaactatcattcgcgttgggcaagttgcaggctctgagcttgaaacccatgcaggcgtttggaatagacacgaatggattccgtccattatcgcaagtagtgtttatctcggcgctttaccggcagatctcgcagggaagaatagaattgactggttacccgtagagaagatgataagcctcatctttgatgtagcggggtcatctggatactttcatggcgtcaacccgagcacaacaacatgggcagagttggcaccagctattcaggagttttacggcaaggatcggattgccgagatcgtcggcttcaaggagtgggttgcgcgtcttgaaaatagccaagacgatgacctgcgtactctagacaagaaccctagcttgaagctgctagatttgagtcgcacgattgctgcttcgccaagcgggaatgatgtcgttttctcgacatcaaatacatcgaagttgtcgcctgcaattcagaatgcgatggcagtcacccctcaattaatgctgcaatggtgtaagcaatggaaattctag

SEQ ID NO: 37088 - protein, 1068 aa, Muscodor strobelii
  misc_feature: SGI Peptide ID NO. 572866
  misc_feature (48)..(474): Pfam Id: PF00501 Pfam Desc: AMP-binding enzyme
  misc_feature (710)..(954): Pfam Id: PF01370 Pfam Desc: NAD dependent epimerase/dehydratase family
  misc_feature (712)..(950): Pfam Id: PF07993 Pfam Desc: Male sterility protein
  misc_feature (79)..(192): Pfam Id: PF00501 Pfam Desc: AMP-binding enzyme
  misc_feature (435)..(474): Pfam Id: PF00501 Pfam Desc: AMP-binding enzyme
  misc_feature (275)..(358): Pfam Id: PF00501 Pfam Desc: AMP-binding enzyme
  misc_feature (710)..(899): Pfam Id: PF01370 Pfam Desc: NAD dependent epimerase/dehydratase family
  misc_feature (10)..(1068): NCBI GI: 116178826 Blast Desc: CHGG_00041 [Chaetomium globosum CBS 148.51] gi|88184338|gb|EAQ91806.1| CHGG_00041 [Chaetomium globosum CBS 148.51]
  misc_feature (9)..(1068): NCBI GI: 85075756 Blast Desc: NCU05000 [Neurospora crassa OR74A] gi|28916838|gb|EAA26584.1| [Neurospora crassa OR74A]
  misc_feature (10)..(1068): NCBI GI: 171679130 Blast Desc: protein product [Podospora anserina] gi|170937636|emb|CAP62295.1| protein product [Podospora anserina]
  misc_feature (14)..(1068): NCBI GI: 46138205 Blast Desc: FG10617.1 [Gibberella zeae PH-1]
  misc_feature (9)..(1068): NCBI GI: 145611438 Blast Desc: MGG_00385 [Magnaporthe grisea 70-15] gi|145018724|gb|EDK03003.1| MGG_00385 [Magnaporthe grisea 70-15]
  misc_feature (11)..(1068): NCBI GI: 169783030 Blast Desc: [Aspergillus oryzae RIB40] gi|83774721|dbj|BAE64844.1| protein product [Aspergillus oryzae]
  misc_feature (10)..(1068): NCBI GI: 39941158 Blast Desc: MGG_05491 [Magnaporthe grisea 70-15] gi|145022151|gb|EDK06171.1| MGG_05491 [Magnaporthe grisea 70-15]
  misc_feature (11)..(968): NCBI GI: 238492773 Blast Desc: NRPS-like enzyme, [Aspergillus flavus NRRL3357] gi|220696117|gb|EED52459.1| NRPS-like enzyme, [Aspergillus flavus NRRL3357]
  misc_feature (10)..(1066): NCBI GI: 154318668 Blast Desc: BC1G_02723 [Botryotinia fuckeliana B05.10] gi|150857853|gb|EDN33045.1| BC1G_02723 [Botryotinia fuckeliana B05.10]
  misc_feature (1)..(1066): NCBI GI: 156063804 Blast Desc: SS1G_02020 [Sclerotinia sclerotiorum 1980] gi|154697354|gb|EDN97092.1| SS1G_02020 [Sclerotinia sclerotiorum 1980]
MSKNTAEAPFGRRLLPHVVDDLASKKPNQECFSIPRSSDPKDGWRPITFRAYAKAIDHLSHSIIEQCGTPENDTFPTLAYIGPNDARYVVLFIAAMKTGYKALFISPRNSHEAQMNLFKATDCQLICYPESHNSVVHPWLQEREMRTVKIDSLESCFAHDDVTHFPYDRSFEETEWMPAVVLHTSGSTGLPKPFVAMHVDTPDFLAPKSFRTQGLLAAFDAYHDFPEWDGHRTFTQVWSEIPDGLFAPVPFFHAGGIYLFMSRAIYWGNPMSFGMADRPLSPDLVVDCLKNLKVTAALIPPVILEYMSLNPAAVQTLLSLRMVAFGGGELATHAGNALAKHGVKLVNAIAATEFSPFTNYVIKNPELWQYFLIESDIIGIDWRPVEGYDNVYELVFARESTSTHPGYQTCFYTFRDDCELNTKDLFTPHPVFKDYWMYCGRSDNIIVLSNGEKLNPVAIEDLVGRHPLIKGALVVGSGRFQTALILEPTKPVGSKTEVEQLIEAVWPTVDQANKETVAHGRVSKEYIMVTSPEKALPRGGKMTIQRANANKLYKDEIDQLYATASETDTRAESFQLDLSTEQTFVNSIKELFNAQIRSDTKLDIDTDIYIAGIDSLQVISVCRRLKTGLIAAGHPELAATVSIGEIYKHQTLRRLGSHIFSQVTGNEKSPNTMDTGLDIQKMELMWKKYTQDLPKPKSDRSSLSAEGQTVILTGSTGMLGSYMLAHLLSDPQVAHVHCLNRAEDGGARQEQTMQSRGLSTDFSKCIFHYANMSEEDFGLGTDTYERLLSQADRIYLVAWPVNFNLPFESFEPHIRGVHNVANFASAASKRINVTFISTVDTCDGWKASDEPVPESRLQDFSLPSTGYGRSKLVASLLLEDAAKAGDFSATIIRVGQVAGSELETHAGVWNRHEWIPSIIASSVYLGALPADLAGKNRIDWLPVEKMISLIFDVAGSSGYFHGVNPSTTTWAELAPAIQEFYGKDRIAEIVGFKEWVARLENSQDDDLRTLDKNPSLKLLDLSRTIAASPSGNDVVFSTSNTSKLSPAIQNAMAVTPQLMLQWCKQWKF

SEQ ID NO: 37089 - DNA, 248 bp, Muscodor strobelii
  misc_feature: SGI EST ID NO. CUFF.88595.0
  misc_feature: Variant of the nucleotide sequence at SEQ ID NO 37087
gtaccagtactcatccgggttaccaaacctgcttttacacattccgcgatgattgcgaactgaacacgaaagatcttttcactccacacccggtcttcaaagttagtcctgtcgctgctcgccgtcgacatgacattagctgaagtatgagtaggattattggatgtattgtggccgttccgataatattattgttctctcgaatggagagaagctgaatccagtcgccatcgaggacttagttgggc

SEQ ID NO: 37090 - DNA, 1167 bp, Muscodor strobelii
  misc_feature: SGI cDNA ID NO. 572867
  misc_feature: Encodes the peptide sequence at SEQ ID NO 37091
atgaaggtcgagttcgacaaacgattgatcgtgtcagatccaaatgctacagcattgccagtcatcaccacagatgtcgttccattagtagatgggggaaaccaaattgttatcttggttgttttcctggtagtcatcactacgctatggacagtgatgcggatatggtcgcggcgcttaatgcgtgtctcgttagcagctgatgactactgtcacgttgtctctttggtgtttttttacggcctttctgtagcgagcattctttccgccgttgtcggtggcgctggacatcacgttcatcaattgcaaatatggcatatcgttcggtactctgcaattatcttctcaattgagtttctatacgcgctatcggttggcttcgtcaaaatcagcgtcgctctcatgataatgcgcatatttccagctcggcatgttaaaataggcgggatcactctcatagtgctttcagctctgtggatgcttcatccattattcactggtcttctactttgcacgccaattcaagcaaactgggacccgacaactcccggcgcagaatgcggtaaccagtacatcggctacggagttgtcgccgggatcgatatcgtcaatgagcttgctctattgattcttcccattccatcactcctcggtatccacttgaataccagatacaaggtggcactattgggcgttttcggaacaggtcttattaccctaatcgttacgattattcgtatccccgtccttttgagcaccaacttcctagacctcacgtacgatacgaggaatcagttaattgtcctcggcgaacctgcagctgcccttgttgtctcttgttctcctgtcctgcgacccgtgttcgataaggctttcagccgtattacaggcaagacccgaacggtcactggtaacacgtcgggtagtagcggctttcgcagtactggaagtcggtcaaacatgaagaagtcacacggttataccagtttcggcgattcccaggagactcttgagcttggaaatgttgcatctccatataatggagatcaccagacgaaagtaatagctgccacacgtccattcgagaatggtttagcaaggtctcctactgacagcaacaatgcagggatcctcgtaatgaaggagactaccatcgtgagcaggtaa

SEQ ID NO: 37091 - protein, 388 aa, Muscodor strobelii
  misc_feature: SGI Peptide ID NO. 572867
  misc_feature (28)..(386): NCBI GI: 256724244 Blast Desc: NECHADRAFT_87531 [Nectria haematococca mpVI 77-13-4]
  misc_feature (43)..(382): NCBI GI: 154272387 Blast Desc: [Ajellomyces capsulatus NAm1] gi|150409033|gb|EDN04489.1| [Ajellomyces capsulatus NAm1]
  misc_feature (16)..(339): NCBI GI: 261355422 Blast Desc: integral membrane protein [Verticillium albo-atrum VaMs.102]
  misc_feature (43)..(382): NCBI GI: 240276793 Blast Desc: integral membrane protein [Ajellomyces capsulatus H143]
  misc_feature (43)..(382): NCBI GI: 225554829 Blast Desc: conserved [Ajellomyces capsulatus G186AR]
  misc_feature (30)..(335): NCBI GI: 145607037 Blast Desc: [Magnaporthe grisea 70-15] gi|145014644|gb|EDJ99212.1| [Magnaporthe grisea 70-15]
  misc_feature (24)..(349): NCBI GI: 115387012 Blast Desc: conserved [Aspergillus terreus NIH2624] gi|114191045|gb|EAU32745.1| conserved [Aspergillus terreus NIH2624]
  misc_feature (53)..(339): NCBI GI: 119495696 Blast Desc: integral membrane protein, [Neosartorya fischeri NRRL 181] gi|119412789|gb|EAW22730.1| integral membrane protein, [Neosartorya fischeri NRRL 181]
  misc_feature (37)..(387): NCBI GI: 121719522 Blast Desc: integral membrane protein, [Aspergillus clavatus NRRL 1] gi|119404658|gb|EAW15034.1| integral membrane protein, [Aspergillus clavatus NRRL 1]
  misc_feature (28)..(347): NCBI GI: 242779387 Blast Desc: integral membrane protein, [Talaromyces stipitatus ATCC 10500] gi|218723051|gb|EED22469.1| integral membrane protein, [Talaromyces stipitatus ATCC 10500]
MKVEFDKRLIVSDPNATALPVITTDVVPLVDGGNQIVILVVFLVVITTLWTVMRIWSRRLMRVSLAADDYCHVVSLVFFYGLSVASILSAVVGGAGHHVHQLQIWHIVRYSAIIFSIEFLYALSVGFVKISVALMIMRIFPARHVKIGGITLIVLSALWMLHPLFTGLLLCTPIQANWDPTTPGAECGNQYIGYGVVAGIDIVNELALLILPIPSLLGIHLNTRYKVALLGVFGTGLITLIVTIIRIPVLLSTNFLDLTYDTRNQLIVLGEPAAALVVSCSPVLRPVFDKAFSRITGKTRTVTGNTSGSSGFRSTGSRSNMKKSHGYTSFGDSQETLELGNVASPYNGDHQTKVIAATRPFENGLARSPTDSNNAGILVMKETTIVSR

SEQ ID NO: 37092 - DNA, 1631 bp, Muscodor strobelii
  misc_feature: SGI EST ID NO. CUFF.88612.0
  misc_feature: Variant of the nucleotide sequence at SEQ ID NO 37090
gagttttgttccgcccttccacgttgcggagaggtaatgatcaatgcaactctgacttgggagcttacacgagaaagatcgaagtgccgataatcgagttattgggtcttcagccccctattcctagtgaaaagtcgcaagttgtcatagaaagtgacggatcgacgatagtactcattcgctcttttagcttctgcactttcttctagttgctgtctagcatcgggtttcatattcccatgtgtatagaaccttaaagcattcttttcctccttcaacactctgcgacgacgctgccaccgccttgtatattattattgtgccatactatttggacttctttgcctgaaccatgaaggtcgagttcgacaaacgattgatcgtgtcagatccaaatgctacagcattgccagtcatcaccacagatgtcgttccattagtagatgggggaaaccaaattgttatcttggttgttttcctggtagtcatcactacgctatggacagtgatgcggatatggtcgcggcgcttaatgcgtgtctcgttagcagctgatgactactgtcacgttgtctctttggtgtttttttacggcctttctgtagcgagcattctttccgccgttgtcggtggcgctggacatcacgttcatcaattgcaaatatggcatatcgttcggtactctgcaattatcttctcaattgagtttctatacgcgctatcggttggcttcgtcaaaatcagcgtcgctctcatgataatgcgcatatttccagctcggcatgttaaaataggcgggatcactctcatagtgctttcagctctgtggatgcttcatccattattcactggtcttctactttgcacgccaattcaagcaaactgggacccgacaactcccggcgcagaatgcggtaaccagtacatcggctacggagttgtcgccgggatcgatatcgtcaatgagcttgctctattgattcttcccattccatcactcctcggtatccacttgaataccagatacaaggtggcactattgggcgttttcggaacaggtcttattaccctaatcgttacgattattcgtatccccgtccttttgagcaccaacttcctagacctcacgtacgatacgaggaatcagttaattgtcctcggcgaacctgcagctgcccttgttgtctcttgttctcctgtcctgcgacccgtgttcgataaggctttcagccgtattacaggcaagacccgaacggtcactggtaacacgtcgggtagtagcggctttcgcagtactggaagtcggtcaaacatgaagaagtcacacggttataccagtttcggcgattcccaggagactcttgagcttggaaatgttgcatctccatataatggagatcaccagacgaaaggatcctcgtaatgaaggagactaccatcgtgagcaggtaacagtacacacagttttggagggaaactttgacccaaggcatgtattcataagctgtattagttcttatcatggtcgccatttggtagctacgtgatctatactgcaaactacagttgtacacttaatagcagggtaatttcaattgcaatgtggtataacccagagagcctaattgccg

SEQ ID NO: 37093 - DNA, 1134 bp, Muscodor strobelii
  misc_feature: SGI cDNA ID NO. 572868
  misc_feature: Encodes the peptide sequence at SEQ ID NO 37094
atggctacagctatattggatactatgccccatggcaccaacatgggagtaatgccactcgaagtaaacccgcgtatggacttgctccaacgtcttcgaggagctcgggttgtaattcctgacttgcaaaaaatgatttctcactggccaagtacgcagcatccagaacttgcaaggcttgatgacgaagtagacaaggccctccgaggaatattcactcttcctaaagatgaagttcgcttccggaagtataaatcatcaaagatcgccgagttcgcatgcgtatggtggccatatgcgaagttcgatgcgctgcttgctgcaacttacatgtcaatctttcttttcatatgggacgacgaaattgacgcgaaggaattttctaccatcgcggctgattatgatgcggcagcaagcttcagagccacgaccatggactacatgaaagcatcgctttcaggagcctcgtcagaggagctttctatgatatccaccaaccgaataattgggtctttcgagacagtaggcaaagcggtcctgaaggcttacgatgaggatcatgtccaggggttcctagacgaacttctattctttattcgatcgtgtgaggaggagcaaaagatcttcgatcgcccttatcttccatcagttgatgaatacatggaacgacgcatgggctcgagtgctgtcagggtgttttttgccatcaccgaatatgcatgtgacattactctgccaagagaagtgcagcttgacgagacaatgcagcgaatctggcacgaggcaaatatcatcatttcgataactaatgacgttctatcaatgaaaaaagaaatcgcacactcgcaagttgtggatagtgtgattcctttattgatggtcaccgttggatctgcgcaagctgcaatcgaacgggccgaggccatcgtacagtcttcagttcatgctttggaccgtgcagcggagcagatcttggcacgcgaattctcgtctcccgggcttcatgacgacatcagcaagtttattgatgggatcaagtatgcttgtactgcgaacctgaattggagtctgacttccgggcggtatgagctaaattgcgcatcgatggaagggggtatgcctttgacactctag

SEQ ID NO: 37094 - protein, 377 aa, Muscodor strobelii
  misc_feature: SGI Peptide ID NO. 572868
  misc_feature (168)..(236): Pfam Id: PF03936 Pfam Desc: Terpene synthase family, metal binding domain
  misc_feature (18)..(364): NCBI GI: 145247728 Blast Desc: An12g10670 [Aspergillus niger] gi|134080856|emb|CAK41414.1| protein product [Aspergillus niger]
  misc_feature (22)..(356): NCBI GI: 121712513 Blast Desc: conserved [Aspergillus clavatus NRRL 1] gi|119402020|gb|EAW12442.1| conserved [Aspergillus clavatus NRRL 1]
  misc_feature (133)..(355): NCBI GI: 242779369 Blast Desc: conserved [Talaromyces stipitatus ATCC 10500] gi|218723048|gb|EED22466.1| conserved [Talaromyces stipitatus ATCC 10500]
  misc_feature (32)..(373): NCBI GI: 110629309 Blast Desc: cyclase [Hypocrea virens]
  misc_feature (28)..(356): NCBI GI: 46107136 Blast Desc: FG00451.1 [Gibberella zeae PH-1]
  misc_feature (18)..(268): NCBI GI: 169775815 Blast Desc: [Aspergillus oryzae RIB40] gi|238502467|ref|XP_002382467.1| conserved [Aspergillus flavus NRRL3357] gi|83771109|dbj|BAE61241.1| protein product oryzae]
  misc_feature (30)..(364): NCBI GI: 261357544 Blast Desc: conserved [Verticillium albo-atrum VaMs.102]
  misc_feature (28)..(356): NCBI GI: 145601642 Blast Desc: MGG_10516 [Magnaporthe grisea 70-15] gi|145010135|gb|EDJ94791.1| [Magnaporthe grisea 70-15]
  misc_feature (32)..(364): NCBI GI: 145613455 Blast Desc: MGG_01628 [Magnaporthe grisea 70-15] gi|145020524|gb|EDK04653.1| MGG_01628 [Magnaporthe grisea 70-15]
  misc_feature (32)..(325): NCBI GI: 256735271 Blast Desc: NECHADRAFT_74943 [Nectria haematococca mpVI 77-13-4]
MATAILDTMPHGTNMGVMPLEVNPRMDLLQRLRGARVVIPDLQKMISHWPSTQHPELARLDDEVDKALRGIFTLPKDEVRFRKYKSSKIAEFACVWWPYAKFDALLAATYMSIFLFIWDDEIDAKEFSTIAADYDAAASFRATTMDYMKASLSGASSEELSMISTNRIIGSFETVGKAVLKAYDEDHVQGFLDELLFFIRSCEEEQKIFDRPYLPSVDEYMERRMGSSAVRVFFAITEYACDITLPREVQLDETMQRIWHEANIIISITNDVLSMKKEIAHSQVVDSVIPLLMVTVGSAQAAIERAEAIVQSSVHALDRAAEQILAREFSSPGLHDDISKFIDGIKYACTANLNWSLTSGRYELNCASMEGGMPLTL

SEQ ID NO: 37095 - DNA, 1515 bp, Muscodor strobelii
  misc_feature: SGI cDNA ID NO. 572869
  misc_feature: Encodes the peptide sequence at SEQ ID NO 37096
atgttagtttcagatattcagttggtgcccttgctgggcgcgggtatcgttctatacccactataccttgtaatttaccgtctatactttcacccactatctcactttcctgggccaaagctggctgctgctaccggatggtatgaaactctaatcgacttattatcaaaccctcaaggacaattcatgctcgagatcccacgcatgcacgacatctatggtccgatagttcgtatcaatccgcatgaaattcatgttcaagacccaacatggctggatactctatattctgggaaaagagacaagtacccaccgacagcaatcatgacaggcgtcccaaagagcatcttcggaactgtctcacatgaactgcatcgattgaggcgctctgcctatcaatcattgttctctaaggcaaatatatctgccgcaacatctctaatctatgacaatatcgatcttttgatcaaacgtatggatgctcaagtcacaagagatggctcagctgaaatgcgattgaatttcctgtcgttcgcgactgataccgttgcatattactgcactgggaaaactcgggggcttctggaagatgaagattatgccttgaagtggcacaaaactattgtgacgttgactgagtcgactttgcccggccgtcatttcccttggatggtacctcttatgttgaagctcccattgtcaatcgcgaggaccttcatggagaagtctgctcgattcatcgccctgcaccgagaaatggagattgtagcgcaggaacaaatcgccacttatcagtctgatgatcatcgaaaagggaagaacacgaatgtcttcgaactgtgtcttgcgaatgagaatctccccttgtcagaaaagacatttgatagaatatcgcaagaggcggttctttgcattgccgcgggtggagagactacggcacggtcactaaccaccgcaacatactatttgttaactcatccaaaagctctatcacgagtgcagaaagagcttatcacagtcatgccaaatgaggattcccggccatctctcacaaaattagagcatctcgaatggctgacagcagtcattaaagagagtttgcgaatattgggactctctacaacaaggtttccccttatttcgaaagagccccttcgctacaaagattgggttattcctgcagatacgcccgtgagcatgaccgttcgcgaaattcttctagatccggaggtgtttgaggatcctttagaattccgaccggaaagatggctgtcaacgaaccctgacatcgaccgcctgaaccgtagctacgtgccgttcggtcgcgggaacaggatgtgcattggccaaaatctcggttatgcggagttatatatggtacttgcttctttatttaggaggaggtcaatggctttgcatgacaccataaaggagagagatgtagatatagtacgagactgcttcattggagaggtctcactccagaccaaaggggtaaaggtcacatatgtataa

SEQ ID NO: 37096 - protein, 504 aa, Muscodor strobelii
  misc_feature: SGI Peptide ID NO. 572869
  misc_feature (41)..(503): Pfam Id: PF00067 Pfam Desc: Cytochrome P450
  misc_feature (224)..(467): Pfam Id: PF00067 Pfam Desc: Cytochrome P450
  misc_feature (15)..(504): NCBI GI: 242779375 Blast Desc: flavonoid 3-hydroxylase, [Talaromyces stipitatus ATCC 10500] gi|218723049|gb|EED22467.1| flavonoid 3-hydroxylase, [Talaromyces stipitatus ATCC 10500]
  misc_feature (2)..(501): NCBI GI: 110629307 Blast Desc: cytochrome P450 [Hypocrea virens]
  misc_feature (11)..(504): NCBI GI: 169783180 Blast Desc: [Aspergillus oryzae RIB40] gi|83774796|dbj|BAE64919.1| protein product [Aspergillus oryzae]
  misc_feature (6)..(504): NCBI GI: 121712523 Blast Desc: benzoate 4-monooxygenase cytochrome P450 [Aspergillus clavatus NRRL 1] gi|119402025|gb|EAW12447.1| benzoate 4-monooxygenase cytochrome P450 [Aspergillus clavatus NRRL 1]
  misc_feature (8)..(501): NCBI GI: 242795016 Blast Desc: cytochrome P450, [Talaromyces stipitatus ATCC 10500] gi|218719081|gb|EED18501.1| cytochrome P450, [Talaromyces stipitatus ATCC 10500]
  misc_feature (8)..(501): NCBI GI: 212539279 Blast Desc: benzoate 4-monooxygenase cytochrome P450, [Penicillium marneffei ATCC 18224] gi|210069537|gb|EEA23628.1| benzoate 4-monooxygenase cytochrome P450, [Penicillium marneffei ATCC
  misc_feature (10)..(502): NCBI GI: 171688250 Blast Desc: protein product [Podospora anserina] gi|170944087|emb|CAP70197.1| protein product [Podospora anserina]
  misc_feature (11)..(501): NCBI GI: 212527464 Blast Desc: cytochrome P450, [Penicillium marneffei ATCC 18224] gi|210073287|gb|EEA27374.1| cytochrome P450, [Penicillium marneffei ATCC 18224]
  misc_feature (1)..(490): NCBI GI: 119472265 Blast Desc: benzoate 4-monooxygenase cytochrome P450 [Neosartorya fischeri NRRL 181] gi|119406456|gb|EAW16407.1| benzoate 4-monooxygenase cytochrome P450 [Neosartorya fischeri NRRL 181]
  misc_feature (4)..(501): NCBI GI: 238838499 Blast Desc: benzoate 4-monooxygenase cytochrome P450 [Microsporum canis CBS 113480]
  misc_feature (33)..(467): SWISSPROT Homolog: EC 1.14.14.1 Unspecific monooxygenase
MLVSDIQLVPLLGAGIVLYPLYLVIYRLYFHPLSHFPGPKLAAATGWYETLIDLLSNPQGQFMLEIPRMHDIYGPIVRINPHEIHVQDPTWLDTLYSGKRDKYPPTAIMTGVPKSIFGTVSHELHRLRRSAYQSLFSKANISAATSLIYDNIDLLIKRMDAQVTRDGSAEMRLNFLSFATDTVAYYCTGKTRGLLEDEDYALKWHKTIVTLTESTLPGRHFPWMVPLMLKLPLSIARTFMEKSARFIALHREMEIVAQEQIATYQSDDHRKGKNTNVFELCLANENLPLSEKTFDRISQEAVLCIAAGGETTARSLTTATYYLLTHPKALSRVQKELITVMPNEDSRPSLTKLEHLEWLTAVIKESLRILGLSTTRFPLISKEPLRYKDWVIPADTPVSMTVREILLDPEVFEDPLEFRPERWLSTNPDIDRLNRSYVPFGRGNRMCIGQNLGYAELYMVLASLFRRRSMALHDTIKERDVDIVRDCFIGEVSLQTKGVKVTYV

SEQ ID NO: 37097 - DNA, 575 bp, Muscodor strobelii
  misc_feature: SGI EST ID NO. CUFF.88625.0
  misc_feature: Variant of the nucleotide sequence at SEQ ID NO 37095
ccggccatctctcacaaaattagagcatctcgaatggctgacagcagtcattaaagagagtttgcgaatattgggactctctacaacaaggtttccccttatttcgaaagagccccttcgctacaaagattgggttattcctgcagatacgcccgtgagcatgaccgttcgcgaaattcttctagatccggaggtgtttgaggatcctttagaattccgaccggaaagatggctgtcaacgaaccctgacatcgaccgcctgaaccgtagctacgtgccgttcggtcgcgggaacaggatgtgcattggccaaaatctcggttatgcggagttatatatggtacttgcttctttatttaggaggaggtcaatggctttgcatgacaccataaaggagagagatgtagatatagtacgagactgcttcattggagaggtctcactccagaccaaaggggtaaaggtcacatatgtataaactatcaaattgaaagagcccggctacgtaatttcatgatcaaacagggtcttgcacacgtattttgaaacggagtccaagtgggaaatgtttttcc

SEQ ID NO: 37098 - DNA, 1599 bp, Muscodor strobelii
  misc_feature: SGI cDNA ID NO. 572870
  misc_feature: Encodes the peptide sequence at SEQ ID NO 37099
atgttagtttcagatattcagttggtgcccttgctgggcgcgggtatcgttctatacccactataccttgtaatttaccgtctatactttcacccactatctcactttcctgggccaaagctggctgctgctaccggatggtatgaaactctaatcgacttattatcaaaccctcaaggacaattcatgctcgagatcccacgcatgcacgacatctatggtccgatagttcgtatcaatccgcatgaaattcatgttcaagacccaacatggctggatactctatattctgggaaaagagacaagtacccaccgacagcaatcatgacaggcgtcccaaagagcatcttcggaactgtctcacatgaactgcatcgattgaggcgctctgcctatcaatcattgttctctaaggcaaatatatctgccgcaacatctctaatctatgacaatatcgatcttttgatcaaacgtatggatgctcaagtcacaagagatggctcagctgaaatgcgattgaatttcctgtcgttcgcgactgataccgttgcatattactgcactgggaaaactcgggggcttctggaagatgaagattatgccttgaagtggcacaaaactattgtgacgttgactgagtcgactttgcccggccgtcatttcccttggatggtacctcttatgttgaagctcccattgtcaatcgcgaggaccttcatggagaagtctgctcgattcatcgccctgcaccgagaaatggagattgtagcgcaggaacaaatcgccacttatcagtctgatgatcatcgaaaagggaagaacacgaatgtcttcgaactgtgtcttgcgaatgagaatctccccttgtcagaaaagacatttgatagaatatcgcaagaggcggttctttgcattgccgcgggtggagagactacggcacggtcactaaccaccgcaacatactatttgttaactcatccaaaagctctatcacgagtgcagaaagagcttatcacagtcatgccaaatgaggattcccggccatctctcacaaaattagagcatctcgaatggctgacagcagtcattaaagagagtttgcgaatattgggactctctacaacaaggtttccccttatttcgaaagagccccttcgctacaaagattgggttattcctgcagatacgcccgtgagcatgaccgttcgcgaaattcttctagatccggaggtgtttgaggatcctttagaattccgaccggaaagatggctgtcaacgaaccctgacatcgaccgcctgaaccgtagctacgtgccgttcggtcgcgggaacaggatgtgcattggccaaaagtacgtcacctatgatttctatttatggtttcgaaaacgaaaaacgagaaattatcagaatgcactgaccaatgaatcacttagtctcggttatgcggagttatatatggtacttgcttctttatttaggaggaggtcaatggctttgcatgacaccataaaggagagagatgtagatatagtacgagactgcttcattggagaggtctcactccagaccaaaggggtaaaggtcacatatgtataa

SEQ ID NO: 37099 - protein, 532 aa, Muscodor strobelii
  misc_feature: SGI Peptide ID NO. 572870
  misc_feature (41)..(489): Pfam Id: PF00067 Pfam Desc: Cytochrome P450
  misc_feature (224)..(450): Pfam Id: PF00067 Pfam Desc: Cytochrome P450
  misc_feature (15)..(532): NCBI GI: 242779375 Blast Desc: flavonoid 3-hydroxylase, [Talaromyces stipitatus ATCC 10500] gi|218723049|gb|EED22467.1| flavonoid 3-hydroxylase, [Talaromyces stipitatus ATCC 10500]
  misc_feature (2)..(529): NCBI GI: 110629307 Blast Desc: cytochrome P450 [Hypocrea virens]
  misc_feature (11)..(532): NCBI GI: 169783180 Blast Desc: [Aspergillus oryzae RIB40] gi|83774796|dbj|BAE64919.1| protein product [Aspergillus oryzae]
  misc_feature (6)..(532): NCBI GI: 121712523 Blast Desc: benzoate 4-monooxygenase cytochrome P450 [Aspergillus clavatus NRRL 1] gi|119402025|gb|EAW12447.1| benzoate 4-monooxygenase cytochrome P450 [Aspergillus clavatus NRRL 1]
  misc_feature (8)..(529): NCBI GI: 242795016 Blast Desc: cytochrome P450, [Talaromyces stipitatus ATCC 10500] gi|218719081|gb|EED18501.1| cytochrome P450, [Talaromyces stipitatus ATCC 10500]
  misc_feature (8)..(529): NCBI GI: 212539279 Blast Desc: benzoate 4-monooxygenase cytochrome P450, [Penicillium marneffei ATCC 18224] gi|210069537|gb|EEA23628.1| benzoate 4-monooxygenase cytochrome P450, [Penicillium marneffei ATCC
  misc_feature (10)..(530): NCBI GI: 171688250 Blast Desc: protein product [Podospora anserina] gi|170944087|emb|CAP70197.1| protein product [Podospora anserina]
  misc_feature (11)..(529): NCBI GI: 212527464 Blast Desc: cytochrome P450, [Penicillium marneffei ATCC 18224] gi|210073287|gb|EEA27374.1| cytochrome P450, [Penicillium marneffei ATCC 18224]
  misc_feature (1)..(518): NCBI GI: 119472265 Blast Desc: benzoate 4-monooxygenase cytochrome P450 [Neosartorya fischeri NRRL 181] gi|119406456|gb|EAW16407.1| benzoate 4-monooxygenase cytochrome P450 [Neosartorya fischeri NRRL 181]
  misc_feature (8)..(529): NCBI GI: 145233399 Blast Desc: An02g09420 [Aspergillus niger] gi|134057002|emb|CAK44343.1| protein product [Aspergillus niger]
  misc_feature (33)..(461): SWISSPROT Homolog: EC 1.14.14.1 Unspecific monooxygenase
MLVSDIQLVPLLGAGIVLYPLYLVIYRLYFHPLSHFPGPKLAAATGWYETLIDLLSNPQGQFMLEIPRMHDIYGPIVRINPHEIHVQDPTWLDTLYSGKRDKYPPTAIMTGVPKSIFGTVSHELHRLRRSAYQSLFSKANISAATSLIYDNIDLLIKRMDAQVTRDGSAEMRLNFLSFATDTVAYYCTGKTRGLLEDEDYALKWHKTIVTLTESTLPGRHFPWMVPLMLKLPLSIARTFMEKSARFIALHREMEIVAQEQIATYQSDDHRKGKNTNVFELCLANENLPLSEKTFDRISQEAVLCIAAGGETTARSLTTATYYLLTHPKALSRVQKELITVMPNEDSRPSLTKLEHLEWLTAVIKESLRILGLSTTRFPLISKEPLRYKDWVIPADTPVSMTVREILLDPEVFEDPLEFRPERWLSTNPDIDRLNRSYVPFGRGNRMCIGQKYVTYDFYLWFRKRKTRNYQNALTNESLSLGYAELYMVLASLFRRRSMALHDTIKERDVDIVRDCFIGEVSLQTKGVKVTYV

SEQ ID NO: 37100 - DNA, 575 bp, Muscodor strobelii; identical to SEQ ID NO: 37097
  misc_feature: SGI EST ID NO. CUFF.88625.0
  misc_feature: Variant of the nucleotide sequence at SEQ ID NO 37098

SEQ ID NO: 37101 - DNA, 2100 bp, Muscodor strobelii
  misc_feature: SGI cDNA ID NO. 572871
  misc_feature: Encodes the peptide sequence at SEQ ID NO 37102
atgcgcctcctccagcggcaagatgacggaaacttgacgctgacccaatatccggacgacaacatccctccctacgctatcctttcgcacacatggggagaagaagacgaagaggttacctttcgagaggtcacagaaggcgtcaccctccagaagtacgattataaaaagaagaatggctacaagaagatcgatttctgcgcgaacgcggcggccgatgataagctacaatacttttgggtcgattcttgctgcatcggcaagtccagcagtgccgagcttcaagaggccatcacttccatgttccgatggtaccagaacgcgacaaaatcctacgtatacttgtcggatgtgccccgcgataaggaacaacagcagcgagctttgtcacgaccagcctgggaattcgcccttcgcaaaagcagatggttcaccagaggatggacactgcaggagcttatcgccccgcgatgtgtcgaattcttctcggcagacggctacaagctaggcagtaggccagaactagatcaactcttgcaagaggcgcgtggcagggaaacgaagcgtaaaaaaaacaaggcatactcgctcttaggcattttcgacgtttctatccctgtcatttatagcgaaggcgaaaaaaaggcgatggatcgacttcttgcagagattgaccggcgctggggctctctacgcacccgaaaacctggttttatagtgccatttggacagaacaagaacttcgttggacgcgacgccaatgtaaagcagcttctcgacaagatcccgccgcatgctaatgcaaacgactgccaacgcaccgcaatcgacggcctaggcggcattggtaagacccagattgccctcgaggctgcctaccgggtccgtgacacatatccatactgttctgttttctgggtccccgccaccgactcgatcagctttgacaacgcgtatcgtaagatcggggagtggcttcaactacccagtatcaaagacgacaacgccgacgtaaaatcgctggtaaaaacaggcctagagcaggaacatgccggcagctggcttttgatcgttgataatgccgataatacaggaatttttagtgcgaatccagccgcctacctccctttcagcctacaaggatcaattctgtttacgacacgagaccgtaaaacagcaacattggaattcgatatcgtactagaacatatctttactgtgtctgaaatgaatgatgcagaagctaccgaacttctacaaaaagggttgcgaaaggaacagatgggcagtaaagaaagtatacagcagctgctcagcttcttaacccatctgcccctggccatcaaacaggcctcggcctttatggcttcgaacacgaatgtcaccgtgtcggaatatctagagtcatgcgaatcaagcgataccgacctgattgaaatgctaagtgaagaattcgaagaccgcttccgatataaaggtcacgcgaagaatcaaaatccggtagcaacgacctggcttatctcatttgaaaacatctctcaacacgaccctcaagcggctgattttctcaagttcatgtgctttctagccggaaaagacgttccactatccctccttcccgtcacatcaaagatcaaaatgaagaaagcaattggtacgctcaaggcatacgcgtttgttacagagcgtgatacgcttgatgcgtttgatatacaccggctcgtccgactagtcatgcggaattggctgaaaaagaaaggagagtgggaaacacagtacaccaacgtggtcttgcgacttacaaaggaatatccataccctgagcacgaaaataggcagacgtggaccaaatatttaccacatggacaagcagtactggatgctaacggaaccaccactagaaaagataacgttgatctactttccaacattgctgagagctattcgatgcttggaaaatataatcaagcagaacgtttataccggcagatattggggctaagggagaaggtgctgggccgagagcatccggacacactcggcagcatgaacaacctcgccaacgtcctctatagccaagggaagtacgaggaggcggag

SEQ ID NO: 37102 - protein, 700 aa, Muscodor strobelii
  misc_feature: SGI Peptide ID NO. 572871
  misc_feature (25)..(152): Pfam Id: PF06985 Pfam Desc: Heterokaryon incompatibility protein (HET)
  misc_feature (1)..(700): NCBI GI: 156034877 Blast Desc: SS1G_13374 [Sclerotinia sclerotiorum 1980] gi|154698777|gb|EDN98515.1| SS1G_13374 [Sclerotinia sclerotiorum 1980]
  misc_feature (232)..(699): NCBI GI: 171693841 Blast Desc: protein product [Podospora anserina] gi|170946869|emb|CAP73673.1| protein product [Podospora anserina]
  misc_feature (1)..(700): NCBI GI: 189197887 Blast Desc: kinesin light chain 1 [Pyrenophora tritici-repentis Pt-1C-BFP] gi|187981229|gb|EDU47855.1| kinesin light chain 1 [Pyrenophora tritici-repentis Pt-1C-BFP]
  misc_feature (1)..(700): NCBI GI: 39971019 Blast Desc: MGG_02976 [Magnaporthe grisea 70-15] gi|149210559|ref|XP_001522654.1| MGCH7_ch7g754 [Magnaporthe grisea 70-15] gi|86196709|gb|EAQ71347.1| MGCH7_ch7g754 grisea
  misc_feature (1)..(621): NCBI GI: 156053556 Blast Desc: SS1G_05625 [Sclerotinia sclerotiorum 1980] gi|154703406|gb|EDO03145.1| SS1G_05625 [Sclerotinia sclerotiorum 1980]
  misc_feature (1)..(621): NCBI GI: 156041064 Blast Desc: SS1G_11511 [Sclerotinia sclerotiorum 1980] gi|154695894|gb|EDN95632.1| SS1G_11511 [Sclerotinia sclerotiorum 1980]
  misc_feature (1)..(627): NCBI GI: 154310212 Blast Desc: BC1G_07026 [Botryotinia fuckeliana B05.10] gi|150851587|gb|EDN26780.1| BC1G_07026 [Botryotinia fuckeliana B05.10]
  misc_feature (259)..(700): NCBI GI: 171691590 Blast Desc: protein product [Podospora anserina] gi|170945743|emb|CAP71856.1| protein product [Podospora anserina]
  misc_feature (56)..(627): NCBI GI: 156050931 Blast Desc: SS1G_08054 [Sclerotinia sclerotiorum 1980] gi|154692453|gb|EDN92191.1| SS1G_08054 [Sclerotinia sclerotiorum 1980]
  misc_feature (1)..(700): NCBI GI: 189204674 Blast Desc: kinesin light chain [Pyrenophora tritici-repentis Pt-1C-BFP] gi|187985771|gb|EDU51259.1| kinesin light chain [Pyrenophora tritici-repentis Pt-1C-BFP]
MRLLQRQDDGNLTLTQYPDDNIPPYAILSHTWGEEDEEVTFREVTEGVTLQKYDYKKKNGYKKIDFCANAAADDKLQYFWVDSCCIGKSSSAELQEAITSMFRWYQNATKSYVYLSDVPRDKEQQQRALSRPAWEFALRKSRWFTRGWTLQELIAPRCVEFFSADGYKLGSRPELDQLLQEARGRETKRKKNKAYSLLGIFDVSIPVIYSEGEKKAMDRLLAEIDRRWGSLRTRKPGFIVPFGQNKNFVGRDANVKQLLDKIPPHANANDCQRTAIDGLGGIGKTQIALEAAYRVRDTYPYCSVFWVPATDSISFDNAYRKIGEWLQLPSIKDDNADVKSLVKTGLEQEHAGSWLLIVDNADNTGIFSANPAAYLPFSLQGSILFTTRDRKTATLEFDIVLEHIFTVSEMNDAEATELLQKGLRKEQMGSKESIQQLLSFLTHLPLAIKQASAFMASNTNVTVSEYLESCESSDTDLIEMLSEEFEDRFRYKGHAKNQNPVATTWLISFENISQHDPQAADFLKFMCFLAGKDVPLSLLPVTSKIKMKKAIGTLKAYAFVTERDTLDAFDIHRLVRLVMRNWLKKKGEWETQYTNVVLRLTKEYPYPEHENRQTWTKYLPHGQAVLDANGTTTRKDNVDLLSNIAESYSMLGKYNQAERLYRQILGLREKVLGREHPDTLGSMNNLANVLYSQGKYEEAE

SEQ ID NO: 37103 - DNA, 2893 bp, Muscodor strobelii
  misc_feature: SGI EST ID NO. CUFF.88796.1
  misc_feature: Variant of the nucleotide sequence at SEQ ID NO 37101
gcgagggcagaccataagagatacaatgttctatatgtagttgctggagccgtgggagtctggttgtggcgtgtcgttgggaccgggcttatgtaccgctagcggagttcgttcagagaaggcatcagtttgtgtactccttctcgggcgatggtaatgatctggctctacgactaaattaaggaagcagaccgtaactccggctctcgcttgtacaggatgtacactgtatatgaagacggtagatagatactcgtgtgattccacgctttacttgggctacttgattacaacggtagatcttcgtaagtgctatcctaggcgtacaacacgaacagggcacgttcaggcgcgtctgctagtcacgtacagcatacgcgcttgggtccatatgtagaaacggcaaagtggggaacatgagatcatcaaccctgggcttgacctacggacaaccctacgaatctgcgaaccagcatgacatacccaaaaacatgtcgcgctgtcaagaaagtcacgcaatcggtcgactgattcgaaatagtatgcatctacgtccagaagcaggatgagcacaactggtcacgtggctatgcaccctcaacttagcccccaaacgacatgcccaacccctcattctatatagcctcgtcccgttctacaatggcgaccctttacactgcagacatctggtctcggctttccaagcaagtcacctactatgcgcctcctccagcggcaagatgacggaaacttgacgctgacccaatatccggacgacaacatccctccctacgctatcctttcgcacacatggggagaagaagacgaagaggttacctttcgagaggtcacagaaggcgtcaccctccagaagtacgattataaaaagaagaatggctacaagaagatcgatttctgcgcgaacgcggcggccgatgataagctacaatacttttgggtcgattcttgctgcatcggcaagtccagcagtgccgagcttcaagaggccatcacttccatgttccgatggtaccagaacgcgacaaaatcctacgtatacttgtcggatgtgccccgcgataaggaacaacagcagcgagctttgtcacgaccagcctgggaattcgcccttcgcaaaagcagatggttcaccagaggatggacactgcaggagcttatcgccccgcgatgtgtcgaattcttctcggcagacggctacaagctaggcagtaggccagaactagatcaactcttgcaagaggtgactgggatcgctattgatgctctccaaggaaagccgctgtctaaattcagccgtagcgaacgcatgtcttaggcgcgtggcagggaaacgaagcgtaaaaaaaacaaggcatactcgctcttaggcattttcgacgtttctatccctgtcatttatagcgaaggcgaaaaaaaggcgatggatcgacttcttgcagagattgaccggcgctggggctctctacgcacccgaaaacctggttttatagtgccatttggacagaacaagaacttcgttggacgcgacgccaatgtaaagcagcttctcgacaagatcccgccgcatgctaatgcaaacgactgccaacgcaccgcaatcgacggcctaggcggcattggtaagacccagattgccctcgaggctgcctaccgggtccgtgacacatatccatactgttctgttttctgggtccccgccaccgactcgatcagctttgacaacgcgtatcgtaagatcggggagtggcttcaactacccagtatcaaagacgacaacgccgacgtaaaatcgctggtaaaaacaggcctagagcaggaacatgccggcagctggcttttgatcgttgataatgccgataatacaggaatttttagtgcgaatccagccgcctacctccctttcagcctacaaggatcaattctgtttacgacacgagaccgtaaaacagcaacattggaattcgatatcgtactagaacatatctttactgtgtctgaaatgaatgatgcagaagctaccgaacttctacaaaaagggttgcgaaaggaacagatgggcagtaaagaaagtatacagcagctgctcagcttcttaacccatctgcccctggccatcaaacaggcctcggcctttatggcttcgaacacgaatgtcaccgtgtcggaatatctagagtcatgcgaatcaagcgataccgacctgattgaaatgctaagtgaagaattcgaagaccgcttccgatataaaggtcacgcgaagaatcaaaatccggtagcaacgacctggcttatctcatttgaaaacatctctcaacacgaccctcaagcggctgattttctcaagttcatgtgctttctagccggaaaagacgttccactatccctccttcccgtcacatcaaagatcaaaatgaagaaagcaattggtacgctcaaggcatacgcgtttgttacagagcgtgatacgcttgatgcgtttgatatacaccggctcgtccgactagtcatgcggaattggctgaaaaagaaaggagagtgggaaacacagtacaccaacgtggtcttgcgacttacaaaggaatatccataccctgagcacgaaaataggcagacgtggaccaaatatttaccacatggacaagcagtactggatgctaacggaaccaccactagaaaagataacgttgatctactttccaacattgctgagagctattcgatgcttggaaaatataatcaagcagaacgtttataccggcagatattggggctaagggagaaggtgctgggccgagagcatccggacacactcggcagcatgaacaacctcgccaacgtcctctatagccaagggaagtacgaggaggcggag

SEQ ID NO: 37104 - DNA, 459 bp, Muscodor strobelii
  misc_feature: SGI cDNA ID NO. 572872
  misc_feature: Reduced expression when VOC is produced
  misc_feature: Encodes the peptide sequence at SEQ ID NO 37105
atatttgctctctcgcccgttactgccttcctcattgccttcatactacggcgcgagctgcctcgtatacgccaaaaactggttctcgccaggaaccccccatcaaagcgtggtgtgctttatggcccattctgtcgttcaaccgacgaggaggtcccagaagaccgagacccgaatgaccccattatcttggtaacaaccactggcgttgctggagagggcttcaatctgacgcgagccaactatgtgatcctggccgaacccgcgttttcgaagcaagttgaggaccaggcgtttcatcggatccatcgatacggccagcaggcaacgactcacctctttagcctgtatagctcgtggaatcccgccgagaggatcgtgcgaagccgtcaggacgtacgctccagcctatttctagacgagagtgtttggatgcttcctggcgcagagggcgaatga

SEQ ID NO: 37105 - protein, 152 aa, Muscodor strobelii
  misc_feature: SGI Peptide ID NO. 572872
  misc_feature (61)..(144): NCBI GI: 116200880 Blast Desc: CHGG_10985 [Chaetomium globosum CBS 148.51] gi|88175699|gb|EAQ83167.1| CHGG_10985 [Chaetomium globosum CBS 148.51]
  misc_feature (61)..(127): NCBI GI: 171680072 Blast Desc: protein product [Podospora anserina] gi|170939662|emb|CAP64889.1| protein product [Podospora anserina]
  misc_feature (39)..(132): NCBI GI: 96979867 Blast Desc: global transactivator [Antheraea pernyi nucleopolyhedrovirus] gi|94983400|gb|ABF50340.1| global transactivator [Antheraea pernyi nucleopolyhedrovirus]
  misc_feature (39)..(132): NCBI GI: 146229770 Blast Desc: global transactivator-like protein [Antheraea pernyi nucleopolyhedrovirus]
  misc_feature (63)..(131): NCBI GI: 145610480 Blast Desc: [Magnaporthe grisea 70-15] gi|145017755|gb|EDK02118.1| [Magnaporthe grisea 70-15]
  misc_feature (63)..(131): NCBI GI: 149209377 Blast Desc: MGCH7_ch7g180 [Magnaporthe grisea 70-15] gi|86196135|gb|EAQ70773.1| MGCH7_ch7g180 [Magnaporthe grisea 70-15]
  misc_feature (63)..(138): NCBI GI: 145532411 Blast Desc: [Paramecium tetraurelia strain d4-2] gi|124419638|emb|CAK84564.1| protein product [Paramecium tetraurelia]
  misc_feature (61)..(144): NCBI GI: 116208586 Blast Desc: [Chaetomium globosum CBS 148.51] gi|88184183|gb|EAQ91651.1| [Chaetomium globosum CBS 148.51]
  misc_feature (61)..(144): NCBI GI: 116208578 Blast Desc: [Chaetomium globosum CBS 148.51] gi|88184179|gb|EAQ91647.1| [Chaetomium globosum CBS 148.51]
  misc_feature (60)..(142): NCBI GI: 19115158 Blast Desc: ATP-dependent DNA helicase [Schizosaccharomyces pombe] gi|74675924|sp|O13762.1|YF2C_SCHPO RecName: Full=Uncharacterized ATP-dependent helicase C17A2.12 gi|2414584|emb|CAB16565.1| DNA ()
  misc_feature: Useful for introducing or modulating the production of volatile compounds
IFALSPVTAFLIAFILRRELPRIRQKLVLARNPPSKRGVLYGPFCRSTDEEVPEDRDPNDPIILVTTTGVAGEGFNLTRANYVILAEPAFSKQVEDQAFHRIHRYGQQATTHLFSLYSSWNPAERIVRSRQDVRSSLFLDESVWMLPGAEGE

SEQ ID NO: 37106 - DNA, 822 bp, Muscodor strobelii
  misc_feature: SGI cDNA ID NO. 572873
  misc_feature: Elevated expression when VOC is produced
  misc_feature: Encodes the peptide sequence at SEQ ID NO 37107
atgatcaaagaagatacaacatacacaagaagctatctcaataagaaagaagatatagaaatcctcgattggctcacaccgactgactacggaccacaacaaaccgactatctacggagacgacaaccagggacaggagagtggctacttgactcagaagagtaccagagctgggtcaaagagccaggcaagacattgttctgtcctggcatccccggagctggcaagaccatcttgacatcaattgtcgtgaatgacctcgagactaggttctgcagcgagacaaccattgcaatagcttatgtttactgtaattacaaacgtcaaagcgagcagaccgtcgaaaaattattgtctagtctgctcaaacaactagcccagagccagccaactttactgcctagtcttatagaactctacgatcggcataaaagcaaacggactcgaccgtccttagatgagatttcaaaagcactagaatcagtcattctgctaagttctgaagttttcatcctcgttgatgctcttgacgaatgtcaagctttcgatagctgccgtacgaagtttttatcggcaatctcaaatcttcagaagaaaaacggagtgaatattttcgcgacctcaaggaatgtaccggaaatcatagagcgatttaaaaaaaccccatcgatcgagattcgcgctactgagggcgatgtgcgcagatatttacagggacgaaaagaagagcttcccgatcttgtgatcgagcagcctagccttcaggatgagattataaacagcataacggaggctgttgatggaatgtatgtatttttctag

SEQ ID NO: 37107 - protein, 273 aa, Muscodor strobelii
  misc_feature: SGI Peptide ID NO. 572873
  misc_feature (2)..(270): NCBI GI: 46139821 Blast Desc: FG11425.1 [Gibberella zeae PH-1]
  misc_feature (3)..(272): NCBI GI: 171693393 Blast Desc: protein product [Podospora anserina] gi|170946645|emb|CAP73448.1| protein product [Podospora anserina]
  misc_feature (10)..(272): NCBI GI: 115390338 Blast Desc: conserved [Aspergillus terreus NIH2624] gi|114195070|gb|EAU36770.1| conserved [Aspergillus terreus NIH2624]
  misc_feature (19)..(272): NCBI GI: 256720834 Blast Desc: NECHADRAFT_85540 [Nectria haematococca mpVI 77-13-4]
  misc_feature (5)..(272): NCBI GI: 238491078 Blast Desc: ankyrin repeat-containing protein, [Aspergillus flavus NRRL3357] gi|220697189|gb|EED53530.1| ankyrin repeat-containing protein, [Aspergillus flavus NRRL3357]
  misc_feature (21)..(272): NCBI GI: 255957133 Blast Desc: Pc21g23520 [Penicillium chrysogenum Wisconsin 54-1255] gi|211591030|emb|CAP97249.1| Pc21g23520 [Penicillium chrysogenum Wisconsin 54-1255]
  misc_feature (5)..(272): NCBI GI: 169773129 Blast Desc: [Aspergillus oryzae RIB40] gi|83768894|dbj|BAE59031.1| protein product [Aspergillus oryzae]
  misc_feature (10)..(272): NCBI GI: 238508580 Blast Desc: Pfs, NACHT and Ankyrin domain protein [Aspergillus flavus NRRL3357] gi|220688371|gb|EED44724.1| Pfs, NACHT and Ankyrin domain protein [Aspergillus flavus NRRL3357]
  misc_feature (10)..(272): NCBI GI: 225557065 Blast Desc: ankyrin repeat protein [Ajellomyces capsulatus G186AR]
  misc_feature (21)..(254): NCBI GI: 116203791 Blast Desc: CHGG_09779 [Chaetomium globosum CBS 148.51] gi|88175907|gb|EAQ83375.1| CHGG_09779 [Chaetomium globosum CBS 148.51]
  misc_feature: Useful for introducing or modulating the production of volatile compounds
MIKEDTTYTRSYLNKKEDIEILDWLTPTDYGPQQTDYLRRRQPGTGEWLLDSEEYQSWVKEPGKTLFCPGIPGAGKTILTSIVVNDLETRFCSETTIAIAYVYCNYKRQSEQTVEKLLSSLLKQLAQSQPTLLPSLIELYDRHKSKRTRPSLDEISKALESVILLSSEVFILVDALDECQAFDSCRTKFLSAISNLQKKNGVNIFATSRNVPEIIERFKKTPSIEIRATEGDVRRYLQGRKEELPDLVIEQPSLQDEIINSITEAVDGMYVFF

SEQ ID NO: 37108 - DNA, 2832 bp, Muscodor strobelii
  misc_feature: SGI EST ID NO. CUFF.89339.1
  misc_feature: Variant of the nucleotide sequence at SEQ ID NO 37106
attttctagcgtttctttttaacatccgaatgagcagaccagcctttcgccgactgaaaggccctttgtcgaatccgccataactcaagtagcaagtccagatggccacccagcctcacacccatagcgactatacggtaggatgggtttgcgcactggcaaaagaacagacggcggctatcgctatgctagatgagaggcatcccaagctgcctaaatcacccaatgacgacaatacctacattctaggatctatcggtcatcacaacatcgttataacctgccttcctgcaggcaagattggcctcgtctcggctgccacagtagccacccacatgattcacgcctttccctctatcaaattcgccttgatggtcggcatcggcggtggcatcccccctcaagtcaggctcggcgatgtcgtcgtcggcatcccgacgggtcaatatcccggagtggtgcagtgggatctaggcaaagaacaaaaggagggcgaattcgctcggacgggctcgctgaataacccccctcgctcacttttaggtgccgtatcggagcttcgggcggaacatgacttgcaagattcaaagataccgtcctatctgggcgacatggcgtcaaaatatcccaagctagcatcgaaatatctacgatctgactcgcttcaagatgtgctcttcaaggccgcctacgaccataacgaagccaaaccagaaccgaccgatgcacatgtctcaaacgaggaagacaaggaggaggaagaagaagaagacagttgtcgatactgcgacaaggctcggattgttcagagagacccccgagatatgcgtatacactacggctcaatcgcatctggcaacaaagtcatcaagaacgccgctttccgaaacaaccttcgccgagatcttgggaaagatgtgctctgcatcgaaatggaagcggctggactaatagaaaactttccatgtcttgttatacgggggatctgtgattatgcagactcgcacaagaacaaggcctggcaggagcatgcagctgccgtggccgcagcatatgctaaggaactgctgggatacgtccagcccagtgatgtcgataaagaaagggcagtcaaggatatacttcatagcagttagtcgttctcaaatctccaattttctcaatacagagcctaataaatcttgcagtacaaagtgatacatctatgatcaaagaagatacaacatacacaagaagctatctcaataagaaagaagatatagaaatcctcgattggctcacaccgactgactacggaccacaacaaaccgactatctacggagacgacaaccagggacaggagagtggctacttgactcagaagagtaccagagctgggtcaaagagccaggcaagacattgttctgtcctggcatccccggagctggcaagaccatcttgacatcaattgtcgtgaatgacctcgagactaggttctgcagcgagacaaccattgcaatagcttatgtttactgtaattacaaacgtcaaagcgagcagaccgtcgaaaaattattgtctagtctgctcaaacaactagcccagagccagccaactttactgcctagtcttatagaactctacgatcggcataaaagcaaacggactcgaccgtccttagatgagatttcaaaagcactagaatcagtcattctgctaagttctgaagttttcatcctcgttgatgctcttgacgaatgtcaagctttcgatagctgccgtacgaagtttttatcggcaatctcaaatcttcagaagaaaaacggagtgaatattttcgcgacctcaaggaatgtaccggaaatcatagagcgatttaaaaaaaccccatcgatcgagattcgcgctactgagggcgatgtgcgcagatatttacagggacgaaaagaagagcttcccgatcttgtgatcgagcagcctagccttcaggatgagattataaacagcataacggaggctgttgatggaatgtttttgcttgcccagcttcatctggcttcagttcagtacaaagacacactaaaggacatccgaaaagccttacgagagctggcgaccggagtagatgcttatagtgaagcctatgggtccgccatagatcgaatccaaggacagccccaggagcgggccgagcgtgccaaacaagttttgtcatggatagtatgtgcgagacggccgcttacaacaatggaactcttgcatgcactcgctgtagaaatcgatacgccggcgctcgaccaagataatattccgcgtattaaagacgtagtgtccgtatgcgctgggttggttacagttgatgaagaaagcaacgtcgttcgattgattcattacacgacacaagattactttgcacgaacccagagcaaatggtttccaacagcagagcgttctatcacggaaatctgtaccacgtacctttcttatcaagactttgcgaatggctactctgagacagacgaaaaatttgaggagcggctaatattgcacccgttttaccattacgccgctcgcaattggggtcatcacagtcgtaaggtatcggcctgtcagactactctttcctttctccggagggcagctcaagttgaggcatcgagtcaagccctcatggttcacgatgaatataaatataaagattacagccaacggaccccaaagcaaatggcagggttacacctagctgcatatttcggcctagatgatatcattacagccataatcacagagtatgacgcagatggacgggatgactccggccggacaccgctgtcgtgggcggcagaggaggg

SEQ ID NO: 37109 - DNA, 1035 bp, Muscodor strobelii
  misc_feature: SGI cDNA ID NO. 572874
  misc_feature: Elevated expression when VOC is produced
  misc_feature: Encodes the peptide sequence at SEQ ID NO 37110
atggccacccagcctcacacccatagcgactatacggtaggatgggtttgcgcactggcaaaagaacagacggcggctatcgctatgctagatgagaggcatcccaagctgcctaaatcacccaatgacgacaatacctacattctaggatctatcggtcatcacaacatcgttataacctgccttcctgcaggcaagattggcctcgtctcggctgccacagtagccacccacatgattcacgcctttccctctatcaaattcgccttgatggtcggcatcggcggtggcatcccccctcaagtcaggctcggcgatgtcgtcgtcggcatcccgacgggtcaatatcccggagtggtgcagtgggatctaggcaaagaacaaaaggagggcgaattcgctcggacgggctcgctgaataacccccctcgctcacttttaggtgccgtatcggagcttcgggcggaacatgacttgcaagattcaaagataccgtcctatctgggcgacatggcgtcaaaatatcccaagctagcatcgaaatatctacgatctgactcgcttcaagatgtgctcttcaaggccgcctacgaccataacgaagccaaaccagaaccgaccgatgcacatgtctcaaacgaggaagacaaggaggaggaagaagaagaagacagttgtcgatactgcgacaaggctcggattgttcagagagacccccgagatatgcgtatacactacggctcaatcgcatctggcaacaaagtcatcaagaacgccgctttccgaaacaaccttcgccgagatcttgggaaagatgtgctctgcatcgaaatggaagcggctggactaatagaaaactttccatgtcttgttatacgggggatctgtgattatgcagactcgcacaagaacaaggcctggcaggagcatgcagctgccgtggccgcagcatatgctaaggaactgctgggatacgtccagcccagtgatgtcgataaagaaagggcagtcaaggatatacttcatagcagttag

SEQ ID NO: 37110 - protein, 344 aa, Muscodor strobelii
  misc_feature: SGI Peptide ID NO. 572874
  misc_feature (2)..(341): NCBI GI: 46139821 Blast Desc: FG11425.1 [Gibberella zeae PH-1]
  misc_feature (3)..(341): NCBI GI: 116197170 Blast Desc: CHGG_05183 [Chaetomium globosum CBS 148.51] gi|88181096|gb|EAQ88564.1| CHGG_05183 [Chaetomium globosum CBS 148.51]
  misc_feature (1)..(340): NCBI GI: 212541358 Blast Desc: serine/threonine-protein kinase ripk4, [Penicillium marneffei ATCC 18224] gi|210068133|gb|EEA22225.1| serine/threonine-protein kinase ripk4, [Penicillium marneffei
  misc_feature (1)..(341): NCBI GI: 225557065 Blast Desc: ankyrin repeat protein [Ajellomyces capsulatus G186AR]
  misc_feature (1)..(324): NCBI GI: 154285314 Blast Desc: conserved [Ajellomyces capsulatus NAm1] gi|150407093|gb|EDN02634.1| conserved [Ajellomyces capsulatus NAm1]
  misc_feature (2)..(331): NCBI GI: 171693393 Blast Desc: protein product [Podospora anserina] gi|170946645|emb|CAP73448.1| protein product [Podospora anserina]
  misc_feature (10)..(344): NCBI GI: 212537779 Blast Desc: ankyrin repeat-containing protein, [Penicillium marneffei ATCC 18224] gi|210068787|gb|EEA22878.1| ankyrin repeat-containing protein, [Penicillium marneffei ATCC 18224]
  misc_feature (4)..(338): NCBI GI: 145236789 Blast Desc: An06g02210 [Aspergillus niger] gi|134075503|emb|CAK48064.1| protein product [Aspergillus niger]
  misc_feature (7)..(326): NCBI GI: 212544940 Blast Desc: ankyrin repeat-containing protein, [Penicillium marneffei ATCC 18224] gi|210065593|gb|EEA19687.1| ankyrin repeat-containing protein, [Penicillium marneffei ATCC 18224]
  misc_feature (7)..(341): NCBI GI: 119483782 Blast Desc: tetratricopeptide repeat domain protein [Neosartorya fischeri NRRL 181] gi|119409950|gb|EAW19897.1| tetratricopeptide repeat domain protein [Neosartorya fischeri NRRL 181]
  misc_feature: Useful for introducing or modulating the production of volatile compounds
MATQPHTHSDYTVGWVCALAKEQTAAIAMLDERHPKLPKSPNDDNTYILGSIGHHNIVITCLPAGKIGLVSAATVATHMIHAFPSIKFALMVGIGGGIPPQVRLGDVVVGIPTGQYPGVVQWDLGKEQKEGEFARTGSLNNPPRSLLGAVSELRAEHDLQDSKIPSYLGDMASKYPKLASKYLRSDSLQDVLFKAAYDHNEAKPEPTDAHVSNEEDKEEEEEEDSCRYCDKARIVQRDPRDMRIHYGSIASGNKVIKNAAFRNNLRRDLGKDVLCIEMEAAGLIENFPCLVIRGICDYADSHKNKAWQEHAAAVAAAYAKELLGYVQPSDVDKERAVKDILHSS

SEQ ID NO: 37111 - DNA, 2832 bp, Muscodor strobelii; identical to SEQ ID NO: 37108
  misc_feature: SGI EST ID NO. CUFF.89339.1
  misc_feature: Variant of the nucleotide sequence at SEQ ID NO 37109

SEQ ID NO: 37112 - DNA, 678 bp, Muscodor strobelii
  misc_feature: SGI cDNA ID NO. 572875
  misc_feature: Encodes the peptide sequence at SEQ ID NO 37113
atgagcgccaccgagaaccaggttcctttctggagccctgccacctacaaagtcagcatcgtcgccacctgtccaacatgcggcaaggagcatgagagcatcctcgacgaggctacttgggtccaagcatgggatatacgtgacgcatttgccgccttggaacgcgaccagcccttgaacatctccaccaccatgacagaagtcggcttccctgccattaagctggaagatatcgagcgatgggccaatgcggatggcaccttcggcccccctacccaagcccacgacgccttcgatctgtccgccactgagaccttacgccaactcgagcgatgtgccgacaaagccatgaccctgtccaaccccggccgtcttgctcaagttctactcgccaccgaggcccagcagaaagtcctcgctgcttcgtggcccgaataccgcaagatcaacaaggagcagggccgctgggtctctccagtccatctcgatgctggaaactcgggtcgcatgcaatggtggatgagagcgtgcagcaaggatactagaggtgctgatcaagaactatcggccgcccgcaagaccaggattgccaaggtcctcgtgcctttcattatggcctggcgtgctggcagtcgtgcccatcctatgaacagcgccgtctgcaagagttgtatgtga

SEQ ID NO: 37113 - protein, 225 aa, Muscodor strobelii
  misc_feature: SGI Peptide ID NO. 572875
MSATENQVPFWSPATYKVSIVATCPTCGKEHESILDEATWVQAWDIRDAFAALERDQPLNISTTMTEVGFPAIKLEDIERWANADGTFGPPTQAHDAFDLSATETLRQLERCADKAMTLSNPGRLAQVLLATEAQQKVLAASWPEYRKINKEQGRWVSPVHLDAGNSGRMQWWMRACSKDTRGADQELSAARKTRIAKVLVPFIMAWRAGSRAHPMNSAVCKSCM

SEQ ID NO: 37114 - DNA, 4866 bp, Muscodor strobelii
  misc_feature: SGI EST ID NO. CUFF.89338.0
  misc_feature: Variant of the nucleotide sequence at SEQ ID NO 37112
ccctcctctgccgcccacgacagcggtgtccggccggagtcatcccgtccatctgcgtcatactctgtgattatggctgtaatgatatcatctaggccgaaatatgcagctaggtgtaaccctgccatttgctttggggtccgttggctgtaatctttatatttatattcatcgtgaaccatgagggcttgactcgatgcctcaacttgagctgccctccggagaaaggaaagagtagtctgacaggccgataccttacgactgtgatgaccccaattgcgagcggcgtaatggtaaaacgggtgcaatattagccgctcctcaaatttttcgtctgtctcagagtagccattcgcaaagtcttgataagaaaggtacgtggtacagatttccgtgatagaacgctctgctgttggaaaccatttgctctgggttcgtgcaaagtaatcttgtgtcgtgtaatgaatcaatcgaacgacgttgctttcttcatcaactgtaaccaacccagcgcatacggacactacgtctttaatacgcggaatattatcttggtcgagcgccggcgtatcgatttctacagcgagtgcatgcaagagttccattgttgtaagcggccgtctcgcacatactatccatgacaaaacttgtttggcacgctcggcccgctcctggggctgtccttggattcgatctatggcggacccataggcttcactataagcatctactccggtcgccagctctcgtaaggcttttcggatgtcctttagtgtgtctttgtactgaactgaagccagatgaagctgggcaagcaaaaacctaaacgaataagtatagcctctgtcatcctagaaaaatacatacattccatcaacagcctccgttatgctgtttataatctcatcctgaaggctaggctgctcgatcacaagatcgggaagctcttcttttcgtccctgtaaatatctgcgcacatcgccctcagtagcgcgaatctcgatcgatggggtttttttaaatcgctctatgatttccggtacattccttgaggtcgcgaaaatattcactccgtttttcttctgaagatttgagattgccgataaaaacttcgtacggcagctatcgaaagcttgacattcgtcaagagcatcaacgaggatgaaaacttcagaacttagcagaatgactgattctagtgcttttgaaatctcatctaaggacggtcgagtccgtttgcttttatgccgatcgtagagttctataagactaggcagtaaagttggctggctctgggctagttgtttgagcagactagacaataatttttcgacggtctgctcgctttgacgtttgtaattacagtaaacataagctattgcaatggttgtctcgctgcagaacctagtctcgaggtcattcacgacaattgatgtcaagatggtcttgccagctccggggatgccaggacagaacaatgtcttgcctggctctttgacccagctctggtactcttctgagtcaagtagccactctcctgtccctggttgtcgtctccgtagatagtcggtttgttgtggtccgtagtcagtcggtgtgagccaatcgaggatttctatatcttctttcttattgagatagcttcttgtgtatgttgtatcttctttgatcatagatgtatcactttgtactgcaagatttattaggctctgtattgagaaaattggagatttgagaacgactaactgctatgaagtatatccttgactgccctttctttatcgacatcactgggctggacgtatcccagcagttccttagcatatgctgcggccacggcagctgcatgctcctgccaggccttgttcttgtgcgagtctgcataatcacagatcccccgtataacaagacatggaaagttttctattagtccagccgcttccatttcgatgcagagcacatctttcccaagatctcggcgaaggttgtttcggaaagcggcgttcttgatgactttgttgccagatgcgattgagccgtagtgtatacgcatatctcgggggtctctctgaacaatccgagccttgtcgcagtatcgacaactgtcttcttcttcttcctcctccttgtcttcctcgtttgagacatgtgcatcggtcggttctggtttggcttcgttatggtcgtaggcggccttgaagagcacatcttgaagcgagtcagatcgtagatatttcgatgctagcttgggatattttgacgccatgtcgcccagataggacggtatctttgaatcttgcaagtcatgttccgcccgaagctccgatacggcacctaaaagtgagcgaggggggttattcagcgagcccgtccgagcgaattcgccctccttttgttctttgcctagatcccactgcaccactccgggatattgacccgtcgggatgccgacgacgacatcgccgagcctgacttgaggggggatgccaccgccgatgccgaccatcaaggcgaatttgatagagggaaaggcgtgaatcatgtgggtggctactgtggcagccgagacgaggccaatcttgcctgcaggaaggcaggttataacgatgttgtgatgaccgatagatcctagaatgtaggtattgtcgtcattgggtgatttaggcagcttgggatgcctctcatctagcatagcgatagccgccgtctgttcttttgccagtgcgcaaacccatcctaccgtatagtcgctatgggtgtgaggctgggtggccatctggacttgctacttgagttatggcggattcgacaaagggcctttcagtcggcgaaaggctggtctgctcattcggatgttaaaaagaaacgctagaaaatataatgttagacgacgatagagaaagtatgtaggaaaggaaaagggggacgaaatcaacgcacactagattcttaccactctgcctcgcgggctgaactgcatagaaactgaggcatggcagccggcacatctgcaaggagactgctgtttctcaagtcgattggctataggactcttgctatacatgcatgaaaagacatcgagctgctttgcaaccactaggcaagcggtgcgggacaccatgctgccgcgacgtagctgcaggcctagttggggaacattatgcgattggcgggaggcaaagtgatgaagcggcacactaggaagtagaagcaggctgtgcggggcgaggcgttttcatggttgttatggtggacatcacgagtagtcgttggtcggcccagagttatacaaatatagaggttggatgtgaaatgggactactccgacttggtctatgcttagaagctaccgcatatgttgtcaagataaccgactgtcctagttgacttgaaagtagcgaggctggacggagacatgtccaagatacatgtgctcacatccaggtcttaaacgtctgtgcggacaatagagagtgtgaacacgatcgagaccatctcgaattcatccctatcctcacacagtatcgtagagacgcgatctcctatcggtggctgatggcgatgctgtcgcgacacgtcttccccgggcctgcgtcgtccatgcctgttggtaaggaggaacgcgtgtgtgggctgacagggaataccacaatgggaccatcgcgaccgccgcgatcgcagtagcctcgcaccgtacatgtgctagaccattattccattctacaatttctaagtatgctaggaaggagttgattttgttctcgttgatgtcaggtaggagcgcattgtaaagttacgatttctacgcagagagatgatttatggcagccaccccgcactacggcaattagttactgcctttccctcccaccccaccagccttctttccctttacctctcccacatccacatccacatccacgctcttcactgtcgtcgactacctcacactcagcaaccacatccaatcctgcacaactacagaggaaacagtctcggccgccacatcatgagcgccaccgagaaccaggttcctttctggagccctgccacctacaaagtcagcatcgtcgccacctgtccaacatgcggcaaggagcatgtgccgcccggtagacaagcgaccatccaagtcgtctgccccagtccgaaggagctttaggagagcatcctcgacgaggctacttgggtccaagcatgggatatacgtgacgcatttgccgccttggaacgcgaccagcccttgaacatctccaccaccatgacagaagtcggcttccctgccattaagctggaagatatcgagcgatgggccaatgcggatggcaccttcggcccccctacccaagcccacgacgccttcgatctgtccgccactgagaccttacgccaactcgagcgatgtgccgacaaagccatgaccctgtccaaccccggccgtcttgctcaagttctactcgccaccgaggcccagcagaaagtcctcgctgcttcgtggcccgaataccgcaagatcaacaaggagcagggccgctgggtctctccagtccatctcgatgctggaaactcgggtcgcatgcaatggtggatgagagcgtgcagcaaggatactagaggtgctgatcaagaactatcggccgcccgcaagaccaggattgccaaggtcctcgtgcctttcattatggcctggcgtgctggcagtcgtgcccatcctatgaacagcgccgtctgcaagagttgtatgtgagcaggatggaacagatggttacgtgatactgataaaagagctggtgagcggtatacgagaagcattctagaggaaatgaaagagagattacgttttagctatgcagctcgctagctagg

SEQ ID NO: 37115 - DNA, 2100 bp, Muscodor strobelii
  misc_feature: SGI cDNA ID NO. 572876
  misc_feature: Encodes the peptide sequence at SEQ ID NO 37116
atggtgccgactatggcagcatcacaggcttacgagtgtctaaaatcagttccactacataagcagccagcaattcggttgttagatgaactcaaacccttcctcgagtggcaatcagatcagacatacctgaaggatcccccgccaaactacccttacccacctgtcgacatctttggcgagttggaaacaattcgatctaacatcgaaggggataagtacaacggagagctggaatggcaagaggagctatacagggctatcgcaggaaagccgcataatggacatctcgcctatcatcccgatttgttgaccgtacctttcgaatgggttcgtccttggacgttggtgtcagtgagtgaggacggcagtgcactaccggtgatcaaggtacttgaagacgttgtgtctccaagcgataagtcgtcgcatgtagtagagatcaacggactggatgcagcaacattcatcgagagccgtgtggctgaatcttccaactcccaagatccggatgctgggtacaatgcgatgtttttcagccaagccaataaggttgaacttaaagccaatggttattttgagggcggtggacgtgaaagatttttttatcctggcaacacaaccactttaacctttgcaaatgggacgacggttgagagacccaatatcgccagatttcactacgggccctacgactggcacaatgtcgaggatgctgagaccatgcataaggagttctgtcgcggagcatatgatgctggctcgtctcgtagaaccgcgcgtgctttgggatctactcgacggacggctacacctcgcagcaacatcgagaactttcctgagccccctgccccgtttgtctctcgccaggaagagaccaacagaattgaaggctacccggagcctgttctcatctcagacgatcaagtagtgtcaggctacttcattgacgaacccggctttgaagatgttgccgtactcgtcatgctttcctttgattcctactttttatcatttcaagaagcagtgcaagagttcttcgctcaagccgttcaagcgggcaagacaaagcttgtcatcgacctccaggccaacggaggtggcacgatccttcagggctacgataccttccgtcaaatctttcctgatattgtccaagatggacctacaaggtggcgttcgtcatctacttttaatgcattatcggaggtaatatctcccgtgtgtgccaactacactcctaaggttgacttccaggaactcgacaacgcttgtaccacagtgaacaattggcgtaatgatctcaatgacacaaacggccgctttacttcttttgctgacaagttcggtccgatcaatgcaaatggcgataattataccaactacatgcaatgggaccctgcaaataaggtcttgactcgtcaggcattcgagacagacatcactgggtatgggcgacgaaccaacttcacaagaccgtttggaagtagcgaaaatattgttctcctgtatgatggatattgtgcttcgacatgcaccatcttctcacaattcatgaagcacaatgcaggcgtcaaaagtattgccatgggcggtcgacctcaacaagggttgatccaaggcgttggcggtgtcaaaggggcacaggtgtaccccttacggcagatggccaacctcgcggaactcgcacgccaatatacccagaacccgctcatactagaagagttgaaaaagctggacgatacgtacgtctctagcagaagtccctatcaggtaccggtcgtcaacgttcgggatgctgttctccccgatgagatcgaagacggagtgcccgctcagttcattacagagctcgcagactgtcggctgtattggactgagccaatgatccaaaatacggaggagatatggaaagctgcggccaacgcggctttcaaaggcggcaactgtgctgctggcgggattacgcaaccgatgaagaaaattgcttcaactacgtcacacacttacaggcggcagccgaagccagtgcgtactggggagacacttgactacgattcgacaatcatgcagcatttgcgcgtgaaggtatctgactaa

SEQ ID NO: 37116 - protein, 699 aa, Muscodor strobelii
  misc_feature: SGI Peptide ID NO. 572876
  misc_feature (323)..(383): Pfam Id: PF03572 Pfam Desc: Peptidase family S41
  misc_feature (3)..(638): NCBI GI: 154309609 Blast Desc: BC1G_07275 [Botryotinia fuckeliana B05.10] gi|150852298|gb|EDN27490.1| BC1G_07275 [Botryotinia fuckeliana B05.10]
  misc_feature (6)..(655): NCBI GI: 85107757 Blast Desc: NCU07923 [Neurospora crassa OR74A] gi|28924045|gb|EAA33203.1| [Neurospora crassa OR74A]
  misc_feature (3)..(660): NCBI GI: 171676888 Blast Desc: protein product [Podospora anserina] gi|170936511|emb|CAP61171.1| protein product [Podospora anserina]
  misc_feature (16)..(674): NCBI GI: 156045575 Blast Desc: SS1G_09978 [Sclerotinia sclerotiorum 1980] gi|154694371|gb|EDN94109.1| SS1G_09978 [Sclerotinia sclerotiorum 1980]
  misc_feature (3)..(655): NCBI GI: 169777881 Blast Desc: [Aspergillus oryzae RIB40] gi|83772143|dbj|BAE62273.1| protein product [Aspergillus oryzae]
  misc_feature (52)..(655): NCBI GI: 238495114 Blast Desc: pyridine nucleotide-disulphide oxidoreductase family protein [Aspergillus flavus NRRL3357] gi|220695443|gb|EED51786.1| pyridine nucleotide-disulphide oxidoreductase family protein
  misc_feature (2)..(655): NCBI GI: 261359152 Blast Desc: conserved [Verticillium albo-atrum VaMs.102]
  misc_feature (7)..(673): NCBI GI: 169597355 Blast Desc: SNOG_01463 [Phaeosphaeria nodorum SN15] gi|111069992|gb|EAT91112.1| SNOG_01463 [Phaeosphaeria nodorum SN15]
  misc_feature (7)..(643): NCBI GI: 189196070 Blast Desc: peptidase S41 family protein [Pyrenophora tritici-repentis Pt-1C-BFP] gi|187980252|gb|EDU46878.1| peptidase S41 family protein [Pyrenophora tritici-repentis Pt-1C-BFP]
  misc_feature (3)..(655): NCBI GI: 169594984 Blast Desc: SNOG_00225 [Phaeosphaeria nodorum SN15] gi|160700989|gb|EAT91720.2| SNOG_00225 [Phaeosphaeria nodorum SN15]
MVPTMAASQAYECLKSVPLHKQPAIRLLDELKPFLEWQSDQTYLKDPPPNYPYPPVDIFGELETIRSNIEGDKYNGELEWQEELYRAIAGKPHNGHLAYHPDLLTVPFEWVRPWTLVSVSEDGSALPVIKVLEDVVSPSDKSSHVVEINGLDAATFIESRVAESSNSQDPDAGYNAMFFSQANKVELKANGYFEGGGRERFFYPGNTTTLTFANGTTVERPNIARFHYGPYDWHNVEDAETMHKEFCRGAYDAGSSRRTARALGSTRRTATPRSNIENFPEPPAPFVSRQEETNRIEGYPEPVLISDDQVVSGYFIDEPGFEDVAVLVMLSFDSYFLSFQEAVQEFFAQAVQAGKTKLVIDLQANGGGTILQGYDTFRQIFPDIVQDGPTRWRSSSTFNALSEVISPVCANYTPKVDFQELDNACTTVNNWRNDLNDTNGRFTSFADKFGPINANGDNYTNYMQWDPANKVLTRQAFETDITGYGRRTNFTRPFGSSENIVLLYDGYCASTCTIFSQFMKHNAGVKSIAMGGRPQQGLIQGVGGVKGAQVYPLRQMANLAELARQYTQNPLILEELKKLDDTYVSSRSPYQVPVVNVRDAVLPDEIEDGVPAQFITELADCRLYWTEPMIQNTEEIWKAAANAAFKGGNCAAGGITQPMKKIASTTSHTYRRQPKPVRTGETLDYDSTIMQHLRVKVSD

SEQ ID NO: 37117 - DNA, 2400 bp, Muscodor strobelii
  misc_feature: SGI cDNA ID NO. 572877
  misc_feature: Reduced expression when VOC is produced
  misc_feature: Encodes the peptide sequence at SEQ ID NO 37118
atgttccgccaaaggaccagttcacaaaagcctggggacgaactgctagccaactttcgccagcaattccctgaaattagcaccacgggcaccacatcgtcggtagcgccgcactcaacattaatagcagccgacaattctgggctcgtaccccctggggctgaacgacatcaaaatgccggtcaagacgtgtttcgagaccaggacccgactccaagggcgtccggtgctgaatggaggtttaccccatcaatgctagacccaaactccttctcgttcagcaatttcgcaaatcaaccaccgggctactacactcctacgcccggaggaactaatactttgtaccatccacaggccggcgacctgcacacgccgtccctcgcgcttggaatgggtctgggaactccgctatcccttccaacgagcgagggaccaagtcacattggcccgacgatgatggatctctcacaatttcaacacaccatggcaccgcaccagtttcatccgcactacaatccatttatacagccaacccctcaacaagcatcatttgctccgtcgtcattcgtccatcaggataccgggtacgaaaccatggatcatgacggatcgccaatcagctctgacgggcctggtgaccgcatcggttccatggacgcggctttccactcacagtcgccacccatgatgggttttcaaccgcgacagcagtttggtgtggccatggctcatgcgctaccagcctctgccgacaaattccgtttccattcaacattaaatgctcctacggcgatgattaagcatgctgacgaaatcccggtgacttaccttaacaaagggcaagcctattctctctccattgttgacacgcgcagtacaatgccgctcgctcctgggacgagataccgaacgttcattcgcatttccttcgaagatgaccagcagagacaaaaacccggaatttgctggagtctgtggaaggaaggtcgggggacaaacgaagcgcatcagcgtggtggtaagctccaagctgtggagtacgtcgaggcaggccagccggtggaaggggacgataagcggacccggatcgaacttgaaagtagctcatttgacggtttctgtgtcacctgggtaccgggtgccaatggggcggctgagtgcaacattgccgtccgctttaactttttgtcaacagacttcagtcactcaaaaggtgtaaaggggatacctgtccgactttgcgccaagacaagtatcgagactgcgaaccccgaatcttcgccccctccagacacgatttcggacttatgctattgcaaagtcaagctttttagggatcatggagctgagaggaaactgtctaacgacgtagcccatgttaagaagaccatcgataaactcaaacagcaaatcgcacaggcagaaagcgggggcaaagactttgggaaacggaagcggggcggtgtaacgaaagggcaagacaactcgcgacctggcaaggcacctaagcataaaagaacgtggtctatgtcctcggcgagctcggcaggcggaggtggagcaacaaagccatcactcgaagatgatctgcatttcaaactgcaaaccttgcaggacatgttcaccagcacacgtcctgtgagtatactctatctacaaggtgaagaccttgacgacccggatctccatcccgtcagtctccccggcgagtccgccgaattagcgaaggtagaatccaaagacagtacaggatggcagatacgaagcgagcgaagctctattgctgagtcgtcacttgtttcaccctcgcccagtgcgcagtctctaccatctcagcaaactggtgcgcagtggccagagagacaactcggtggcgaatcgactgttccacaagcgtcagatcagcccacgaaggttccaaagacagatgacgatggaaatttgagcgggtggatcgaagcactaggcgtagatccttcctacaagccaccagtagaaaagcccgtcaaaccaagggtcgcgtgtttttacatcgcccgaaaacgaccgattgatacctccaaacgcgagcttcaccgcgcggtttacttgacagaacgaagtctgtctaacttcacatcccatgtttccaccaaattcaacattgaccccacgagagtcagcagagcggttcatgttttagacagcggcctggaggtcgaaatcgacgacgacgtcatccgcgagctatcggaaggccaggatatgctactggaggtagccgaaactgaacaaactatagctcagccgaagagagaatgggagatgatggcgattgaccgacccgaaacgggcgacaggacatcaacgcacagcgcgtttcgaacggttatcggctacgaactacgatttacattctag

SEQ ID NO: 37118 - protein, 799 aa, Muscodor strobelii
  misc_feature: SGI Peptide ID NO. 572877
  misc_feature (224)..(468): Pfam Id: PF04516 Pfam Desc: CP2 transcription factor
  misc_feature (1)..(799): NCBI GI: 46123957 Blast Desc: FG06356.1 [Gibberella zeae PH-1]
  misc_feature (1)..(799): NCBI GI: 256732448 Blast Desc: [Nectria haematococca mpVI 77-13-4]
  misc_feature (50)..(799): NCBI GI: 39973995 Blast Desc: MGG_00856 [Magnaporthe grisea 70-15] gi|145018203|gb|EDK02482.1| MGG_00856 [Magnaporthe grisea 70-15]
  misc_feature (1)..(797): NCBI GI: 116203687 Blast Desc: CHGG_09727 [Chaetomium globosum CBS 148.51] gi|88175855|gb|EAQ83323.1| CHGG_09727 [Chaetomium globosum CBS 148.51]
  misc_feature (1)..(799): NCBI GI: 171679465 Blast Desc: protein product [Podospora anserina] gi|170939358|emb|CAP64586.1| protein product [Podospora anserina]
  misc_feature (1)..(799): NCBI GI: 85094839 Blast Desc: NCU06095 [Neurospora crassa OR74A] gi|28921415|gb|EAA30721.1| conserved [Neurospora crassa OR74A]
  misc_feature (1)..(799): NCBI GI: 154291986 Blast Desc: BC1G_14920 [Botryotinia fuckeliana B05.10] gi|150846339|gb|EDN21532.1| BC1G_14920 [Botryotinia fuckeliana B05.10]
  misc_feature (1)..(799): NCBI GI: 189194349 Blast Desc: conserved [Pyrenophora tritici-repentis Pt-1C-BFP] gi|187979077|gb|EDU45703.1| conserved [Pyrenophora tritici-repentis Pt-1C-BFP]
  misc_feature (1)..(758): NCBI GI: 242784268 Blast Desc: CP2 transcription factor, [Talaromyces stipitatus ATCC 10500] gi|218720500|gb|EED19919.1| CP2 transcription factor, [Talaromyces stipitatus ATCC 10500]
  misc_feature (1)..(758): NCBI GI: 212527630 Blast Desc: CP2 transcription factor, [Penicillium marneffei ATCC 18224] gi|210073370|gb|EEA27457.1| CP2 transcription factor, [Penicillium marneffei ATCC 18224]
  misc_feature: Useful for introducing or modulating the production of volatile compounds
MFRQRTSSQKPGDELLANFRQQFPEISTTGTTSSVAPHSTLIAADNSGLVPPGAERHQNAGQDVFRDQDPTPRASGAEWRFTPSMLDPNSFSFSNFANQPPGYYTPTPGGTNTLYHPQAGDLHTPSLALGMGLGTPLSLPTSEGPSHIGPTMMDLSQFQHTMAPHQFHPHYNPFIQPTPQQASFAPSSFVHQDTGYETMDHDGSPISSDGPGDRIGSMDAAFHSQSPPMMGFQPRQQFGVAMAHALPASADKFRFHSTLNAPTAMIKHADEIPVTYLNKGQAYSLSIVDTRSTMPLAPGTRYRTFIRISFEDDQQRQKPGICWSLWKEGRGTNEAHQRGGKLQAVEYVEAGQPVEGDDKRTRIELESSSFDGFCVTWVPGANGAAECNIAVRFNFLSTDFSHSKGVKGIPVRLCAKTSIETANPESSPPPDTISDLCYCKVKLFRDHGAERKLSNDVAHVKKTIDKLKQQIAQAESGGKDFGKRKRGGVTKGQDNSRPGKAPKHKRTWSMSSASSAGGGGATKPSLEDDLHFKLQTLQDMFTSTRPVSILYLQGEDLDDPDLHPVSLPGESAELAKVESKDSTGWQIRSERSSIAESSLVSPSPSAQSLPSQQTGAQWPERQLGGESTVPQASDQPTKVPKTDDDGNLSGWIEALGVDPSYKPPVEKPVKPRVACFYIARKRPIDTSKRELHRAVYLTERSLSNFTSHVSTKFNIDPTRVSRAVHVLDSGLEVEIDDDVIRELSEGQDMLLEVAETEQTIAQPKREWEMMAIDRPETGDRTSTHSAFRTVIGYELRFTF

SEQ ID NO: 37119 - DNA, 4721 bp, Muscodor strobelii
  misc_feature: SGI EST ID NO. CUFF.89479.5
  misc_feature: Variant of the nucleotide sequence at SEQ ID NO 37117
ctcgaacaagactcgagtctgtcctctcattgctgttcgatgctctgtctctgctctgtcacccctcgcacgcctgatgctataccaatgaccacacccgacaacacttacctccatccagttgactgctccgtacctcattgttataattatcgcccgttaagatagcatgatcctgcactaatattacttcattctgtggtcttaccctttggagatatttgtccataagcatctcatctttctggccttcatttccgctctagcactctaccttttgtcttgaagaaatagatgcccagtctcattgcgcaacccccaatttggcgaagacgttgctgttcagcccagcctagcccagcctgactgccctgttcgttttgctctgatactttgctcgtctcttgcgcattacattacattgcattgtactatcacaccgtcctgggttacatggctggccttacatacatatacctacacacattcgtcttaccctgccgcttagtcttttccctcgccgaccgactgacgtcgttcctcctgctcccttgtcttttgtttctacaacgatgaagatcaactgccacaaactgccctcagtatcgcctcccacgcaatcgtattgagcatcctggcaaatatcccagaacaaaggtacgttggttccggtctccaccaacttcgtcgatgcccacatcgcctcgtacttcgtctctagtgagcgggctacctactataatataacggcgcgcactcttcagctagtcggtagcacctctcttcattcgcaatcgttcgctccattttgtcaactcgtcggtcgttttttctgtctattttagtgtggtctcatacaggccattccgctcgcttctttgcctaatagctctattgatcgcttttgcaattggcatcctcctcgtcctaataatcccgccctggctgcaacatcccctcacgtatcatttgatattgtttgcaccatcgctttagttgagctgcacgcccaatcccgccgagtcacagcggttggcgcataattcccccataatctcacgcgcggaaaaagacgttgggttttccgccgagctatctacctttaatctacccgccgtttcacctcttcaaccctcatcgcctcgtcttttccgggccagcagcacccatatacaccccgagactcatacctaagacagccacacaacgcacttcacgctctacaccgaccaattcctaccggacgttggctgcaaccgttgactcttctatcgcttactcgacagtactcttagcaggccggaatcgtgtgcgccagaccgctgctcttgatttcctcttcaggaaagccttcgggtctgacttcattttgcaccctttcacggcattgctgtcttttggacagccacctccatccagatgttccgccaaaggaccagttcacaaaagcctggggacgaactgctagccaactttcgccagcaattccctgaaattagcaccacgggcaccacatcgtcggtagcgccgcactcaacattaatagcagccgacaattctgggctcgtaccccctggggctgaacgacatcaaaatgccggtcaagacgtgtttcgagaccaggacccgactccaagggcgtccggtgctgaatggaggtttaccccatcaatgctagacccaaactccttctcgttcagcaatttcgcaaatcaaccaccgggctactacactcctacgcccggaggaactaatactttgtaccatccacaggccggcgacctgcacacgccgtccctcgcgcttggaatgggtctgggaactccgctatcccttccaacgagcgagggaccaagtcacattggcccgacgatgatggatctctcacaatttcaacacaccatggcaccgcaccagtttcatccgcactacaatccatttatacagccaacccctcaacaagcatcatttgctccgtcgtcattcgtccatcaggataccgggtacgaaaccatggatcatgacggatcgccaatcagctctgacgggcctggtgaccgcatcggttccatggacgcggctttccactcacagtcgccacccatgatgggttttcaaccgcgacagcagtttggtgtggccatggctcatgcgctaccagcctctgccgacaaattccgtttccattcaacattaaatgctcctacggcgatgattaagcatgctgacgaaatcccggtgacttaccttaacaaagggcaagcctattctctctccattgttgacacgcgcagtacaatgccgctcgctcctgggacgagataccgaacgttcattcgcatttccttcgaagatgaccagcagagacaaaaacccggaatttgctggagtctgtggaaggaaggtcgggggacaaacgaagcgcatcagcgtggtggtaagctccaagctgtggagtacgtcgaggcaggccagccggtggaaggggacgataagcggacccggatcgaacttgaaagtagctcatttgacggtttctgtgtcacctgggtaccgggtgccaatggggcggctgagtgcaacattgccgtccgctttaactttttgtcaacagacttcagtcactcaaaaggtgtaaaggggatacctgtccgactttgcgccaagacaagtatcgagactgcgaaccccgaatcttcgccccctccagacacgatttcggacttatgctattgcaaagtcaagctttttagggatcatggagctgagaggaaactgtctaacgacgtagcccatgttaagaagaccatcgataaactcaaacagcaaatcgcacaggcagaaagcgggggcaaagactttgggaaacggaagcggggcggtgtaacgaaagggcaagacaactcgcgacctggcaaggcacctaagcataaaagaacgtggtctatgtcctcggcgagctcggcaggcggaggtggagcaacaaagccatcactcgaagatgatctgcatttcaaactgcaaaccttgcaggacatgttcaccagcacacgtcctgtgagtatactctatctacaaggtgaagaccttgacgacccggatctccatcccgtcagtctccccggcgagtccgccgaattagcgaaggtagaatccaaagacagtacaggatggcagatacgaagcgagcgaagctctattgctgagtcgtcacttgtttcaccctcgcccagtgcgcagtctctaccatctcagcaaactggtgcgcagtggccagagagacaactcggtggcgaatcgactgttccacaagcgtcagatcagcccacgaaggttccaaagacagatgacgatggaaatttgagcgggtggatcgaagcactaggcgtagatccttcctacaagccaccagtagaaaagcccgtcaaaccaagggtcgcgtgtttttacatcgcccgaaaacgaccgattgatacctccaaacgcgagcttcaccgcgcggtttacttgacagaacgaagtctgtctaacttcacatcccatgtttccaccaaattcaacattgaccccacgagagtcagcagagcggttcatgttttagacagcggcctggaggtcgaaatcgacgacgacgtcatccgcgagctatcggaaggccaggatatgctactggaggtagccgaaactgaacaaactatagctcagccgaagagagaatgggagatgatggcgattgaccgacccgaaacgggcgacaggacatcaacgcacagcgcgtttcgaacggttatcggctacgaactacgatttacattctagaagtacatattggacgcacactttattggatgagcctgtgagctgcatcattctggccacggttaggccagcgaacatagaaaggggaggaacacaggggatacgcgccttcgaaatgtctaacaacggagatggttacacgactgtcgggcttgcttaaacccttacgatgaatacacgactgtggcggactgtaatttcttcaaagtctcttattgattttctaggaggcgttgcgatgggtacaacacacaaagataccaattcccttttgcgggatgcttttcttcattttcgtcaattttggcgactacttctgccttattctcacagccgctgccatggcttagatgcgggggcacgtggcaccgcgaattgacgctttgcttggctcatttggacgcgcacaggaccacagtagctaccttatattgtgtcgcacattatacacgtttgattacaacattccacgcggaaatgacagacacgatccctccaactcggcgcagtgctggacattgaaggccctatctacctacacagcgcgaacatacgcatacgtacacgcacaatacgatagtccctgcattttattggcgatgcagccgcattcatttgatgcgtgccgaaccgccgggatatgtaaatgttgatgagatgcatgtatctaatgtcaatggagctgaacacggacaaagcatgttgtcccgcacccttgggcagcctatctgccaagcgactgtatagtatacagatctatacagatagggtcgcaatgaaatgccaatgtaataaagaattaactaattaatatgcatactttgagcattgctgcgcgcccttgtattgtcttcctcccgtttcctcttcgcattgctagtgctcattcgctactgcctgca

SEQ ID NO: 37120 - DNA, 939 bp, Muscodor strobelii
  misc_feature: SGI cDNA ID NO. 572878
  misc_feature: Elevated expression when VOC is produced
  misc_feature: Encodes the peptide sequence at SEQ ID NO 37121
atggcttccggcagcttcttcggagatatcaacaaccctcaacccatgcttaaggtcggcgccaactccggtgactccggccaagttgagctgatcgacttcgttgtcggtaaccaaggtcctgcccctggtgccatcctcattgagtggaaccttgcctcgtctgctaccagccccagtggcatgtgggatgtccatgccagagtcggtggtttcgctggctcgaacatgcaagtcgctcagtgtttgaagaatcctggcagcgccgctattaacaccaactgcatcggcgcgaacatgctcatgcacgtcacgccaaaagccaccggtttatatatggagaacgtctggctatggactgctgaccacgacatcgaggactccaccaacacgcaagttactatctactcgggacgcggtctatacattgagtccaccgtaggcaccttttggctgtcgggcaccgcagtcgagcacaaccacttctacaactaccaattcgccaacaccaagaatatcttcgcaagcatgttccaaacggagacgccttactatcagcctcttcctgacgccacgactgtgttccctgttacgtcgtcgagaaatgaccccaacttctccacttcatgtaacggtgtttcaggaaattgcaaggacgcctggggcttaagaatcatcaagtctaccgacatgtttatctatggcgctggtcactattctttcttcaacaactactctacaacttgctccacagtttccgctggtgaaaactgtcagtcacgcatcgtatcattggagagcgtcagtaacatcaacatttacggcttgaatactatcggatccttgagtatgttggacagggatagcacaagcgtggcgtcttggagagataatgtcaatgtcttccctgccagtgttatcatatatagatcaggttga

SEQ ID NO: 37121 - protein, 312 aa, Muscodor strobelii
  misc_feature: SGI Peptide ID NO. 572878
  misc_feature (1)..(311): NCBI GI: 39974389 Blast Desc: MGG_00659 [Magnaporthe grisea 70-15] gi|145018426|gb|EDK02705.1| MGG_00659 [Magnaporthe grisea 70-15]
  misc_feature (1)..(311): NCBI GI: 116202035 Blast Desc: CHGG_08902 [Chaetomium globosum CBS 148.51] gi|88177420|gb|EAQ84888.1| CHGG_08902 [Chaetomium globosum CBS 148.51]
  misc_feature (1)..(312): NCBI GI: 154314548 Blast Desc: BC1G_03983 [Botryotinia fuckeliana B05.10] gi|150848605|gb|EDN23798.1| BC1G_03983 [Botryotinia fuckeliana B05.10]
  misc_feature (1)..(281): NCBI GI: 85097220 Blast Desc: NCU04850 [Neurospora crassa OR74A] gi|28921899|gb|EAA31173.1| NCU04850 [Neurospora crassa OR74A]
  misc_feature (1)..(312): NCBI GI: 156062226 Blast Desc: SS1G_01229 [Sclerotinia sclerotiorum 1980] gi|154696565|gb|EDN96303.1| SS1G_01229 [Sclerotinia sclerotiorum 1980]
  misc_feature (1)..(310): NCBI GI: 30575680 Blast Desc: beta-1,3-exoglucanase [Trichoderma hamatum]
  misc_feature (1)..(310): NCBI GI: 2924313 Blast Desc: beta-1,3 exoglucanase [Hypocrea lixii]
  misc_feature (1)..(310): NCBI GI: 162707730 Blast Desc: beta 1,3 exoglucanase [Trichoderma asperellum]
  misc_feature (1)..(311): NCBI GI: 154318684 Blast Desc: BC1G_02731 [Botryotinia fuckeliana B05.10] gi|150857861|gb|EDN33053.1| BC1G_02731 [Botryotinia fuckeliana B05.10]
  misc_feature (1)..(311): NCBI GI: 171681846 Blast Desc: protein product [Podospora anserina] gi|170940882|emb|CAP66532.1| protein product [Podospora anserina]
  misc_feature (1)..(306): SWISSPROT Homolog: EC 3.2.1.58 Glucan 1,3-beta-glucosidase
  misc_feature: Useful for introducing or modulating the production of volatile compounds
MASGSFFGDINNPQPMLKVGANSGDSGQVELIDFVVGNQGPAPGAILIEWNLASSATSPSGMWDVHARVGGFAGSNMQVAQCLKNPGSAAINTNCIGANMLMHVTPKATGLYMENVWLWTADHDIEDSTNTQVTIYSGRGLYIESTVGTFWLSGTAVEHNHFYNYQFANTKNIFASMFQTETPYYQPLPDATTVFPVTSSRNDPNFSTSCNGVSGNCKDAWGLRIIKSTDMFIYGAGHYSFFNNYSTTCSTVSAGENCQSRIVSLESVSNINIYGLNTIGSLSMLDRDSTSVASWRDNVNVFPASVIIYRSG

SEQ ID NO: 37122 - DNA, 1220 bp, Muscodor strobelii
  misc_feature: SGI EST ID NO. CUFF.88720.0
  misc_feature: Variant of the nucleotide sequence at SEQ ID NO 37120
tatggcttgtacaaggtcaccggcaccattaccattcccgctggcgccaagatcatcggtgagggctacccaatcatcatggcttccggcagcttcttcggagatatcaacaaccctcaacccatgcttaaggtcggcgccaactccggtgactccggccaagttgagctgatcgacttcgttgtcggtaaccaaggtcctgcccctggtgccatcctcattgagtggaaccttgcctcgtctgctaccagccccagtggcatgtgggatgtccatgccagagtcggtggtttcgctggctcgaacatgcaagtcgctcagtgtttgaagaatcctggcagcgccgctattaacaccaactgcatcggcgcgaacatgctcatgcacgtcacgccaaaagccaccggtttatatatggagaacgtctggctatggactgctgaccacgacatcgaggactccaccaacacgcaagttactatctactcgggacgcggtctatacattgagtccaccgtaggcaccttttggctgtcgggcaccgcagtcgagcacaaccacttctacaactaccaattcgccaacaccaagaatatcttcgcaagcatgttccaaacggagacgccttactatcagcctcttcctgacgccacgactgtgttccctgttacgtcgtcgagaaatgaccccaacttctccacttcatgtaacggtgtttcaggaaattgcaaggacgcctggggcttaagaatcatcaagtctaccgacatgtttatctatggcgctggtcactattctttcttcaacaactactctacaacttgctccacagtttccgctggtgaaaactgtcagtcacgcatcgtatcattggagagcgtcagtaacatcaacatttacggcttgaatactatcggatccttgagtatgttggacagggatagcacaagcgtggcgtcttggagagataatgtcaatgtcttccctgccagtgttatcatatatagatcaggttgagaaggatcaccaattcaggaattttacttaggagctatgagttatgaaaaccaacgtgggcacgcaatagagcaacgggtatcaatcattccgtatgggtaaagtcacagaccaaatacctgtgagaatctatcatgtatatagccacgtagatagtaccacctatcaactgattaagaagcaatggtgttgtcttacatccg

SEQ ID NO: 37123 - DNA, 1788 bp, Muscodor strobelii
  misc_feature: SGI cDNA ID NO. 572879
  misc_feature: Encodes the peptide sequence at SEQ ID NO 37124
atgattactctgacctttgtgcaggcgttgcgatgcttggggtttttagcacctctcctgggcttcgcctactctcaagcaaccgagaaagggccacggacagaatatgcagctgttcagcaacacatgagacgcagagcagatctcattgccgaggagaaacgacaacgtcaagatcatgacttccgctccacgctgtctcctgtggcgcaacaggctgagacaattgttggcgctatccgtcaatatgagatcgacaatttctggagaaaaccagccgaaataggtctggaggataacgaaagatatgctggggagatgtttgccgacgcaaagccccttattccaactacaaaactatgggccatcgtttctcggatgcccaagggttcgcttctacacgttcattcaagcgctgtcctccaattcgaaacgatctttaacatactccttgacactagcggcattgtcattacagcttcgcaagacgtctcgacagagctttccgcggagaacgcaacgttggctttctcccacgttagtgatttcgcagctgatccaaaggtagcgaacgtttccatcgagtcgccatactatgtatctgggaccaaggttcccgttgcatatgcagcagatagcttctcgggggggaggccaggatttatcgacttccttatgacaaaagtagctgttactaaagaagaagttctccgtcatgatcttggcgtagatgaaatctggagaaagttccagtcgtgcttcgacccagctggatcagcgatgacatatgagcctgtaattcggaaaacgtaccaaagtgttttcaacgcatgggtagacgacggtatcatgtgggttgagcttcgatcaggcggatcatctgcgaagctggttcccgatggtaaggatactcctgatcctgatcttgacttctggatccgtgttctgctggatgaactccagaaatttcaagcaactgagaaggggaaagcattctggggtattcggattatatgggcagattggcgtggcgccgatagcacgcgacttatgagtaatatggaaaaggccattgaacggaagaagaatttcccaaatctcttcagtggatacgatgtcgtggctcaagaagatctagggcgaacacttctcgacctgactcccgagctcctatggtttcgaaacaaaacccaagctttgaatatgacatacccctttttcttccatgcgggagagacgcttggggacgggaattcgacagatgacaatcttttcgatgctttactatttgatagtcgacgcataggtcatgggttctcactatacaaacacccgctcctacttcaacagtatgcaaagcagaatattatggtagaggtctgcccaatttcaaatgaggtgcttagactggctactgatattctacaccatccaatacctgcaatgattgcacatggtgtggcaacggcaataagcaacgacgatcctgccatcctaggagaggatgcagcaggtttgagttacgacttctatcaagtcatccaaggcttcgacaacatcggattaggtggactgggcgctctagctcagaactcaatccgttggtctaactttatagaccagagtcaagatgaatggatccatgatattgagctcggaatggatggggttggaattaaggcaaagcgcttgaaactctggcaggagaagtgggaggcatactgtcaatggatcgtggaggaatacgcaaattggaacgcaacagtttctaccaaggacaaagcctga

SEQ ID NO: 37124 - protein, 595 aa, Muscodor strobelii
  misc_feature: SGI Peptide ID NO. 572879
  misc_feature (127)..(549): Pfam Id: PF00962 Pfam Desc: Adenosine/AMP deaminase
  misc_feature (368)..(549): Pfam Id: PF00962 Pfam Desc: Adenosine/AMP deaminase
  misc_feature (29)..(583): NCBI GI: 146323525 Blast Desc: adenosine deaminase family protein [Aspergillus fumigatus Af293] gi|129558247|gb|EAL92077.2| adenosine deaminase family protein [Aspergillus fumigatus Af293] adenosine deaminase
  misc_feature (10)..(584): NCBI GI: 121706358 Blast Desc: adenosine deaminase family protein [Aspergillus clavatus NRRL 1] gi|119399588|gb|EAW10016.1| adenosine deaminase family protein [Aspergillus clavatus NRRL 1]
  misc_feature (32)..(584): NCBI GI: 119489956 Blast Desc: adenosine deaminase family protein [Neosartorya fischeri NRRL 181] gi|119411095|gb|EAW21038.1| adenosine deaminase family protein [Neosartorya fischeri NRRL 181]
  misc_feature (9)..(584): NCBI GI: 115402909 Blast Desc: [Aspergillus terreus NIH2624] gi|114189377|gb|EAU31077.1| [Aspergillus terreus NIH2624]
  misc_feature (20)..(588): NCBI GI: 169782582 Blast Desc: [Aspergillus oryzae RIB40] gi|238492211|ref|XP_002377342.1| adenosine deaminase family protein [Aspergillus flavus NRRL3357] gi|83774497|dbj|BAE64620.1|
  misc_feature (7)..(584): NCBI GI: 255930155 Blast Desc: Pc06g00210 [Penicillium chrysogenum Wisconsin 54-1255] gi|211581250|emb|CAP79014.1| Pc06g00210 [Penicillium chrysogenum Wisconsin 54-1255]
  misc_feature (38)..(584): NCBI GI: 226279693 Blast Desc: conserved [Paracoccidioides brasiliensis Pb01]
  misc_feature (38)..(584): NCBI GI: 226289572 Blast Desc: conserved [Paracoccidioides brasiliensis Pb18]
  misc_feature (38)..(584): NCBI GI: 225680329 Blast Desc: cat eye syndrome critical region protein [Paracoccidioides brasiliensis Pb03]
  misc_feature (37)..(584): NCBI GI: 261192398 Blast Desc: adenosine deaminase [Ajellomyces dermatitidis SLH14081] gi|239589481|gb|EEQ72124.1| adenosine deaminase [Ajellomyces dermatitidis SLH14081]
  misc_feature (81)..(547): SWISSPROT Homolog: EC 3.5.4.4 Adenosine deaminase
MITLTFVQALRCLGFLAPLLGFAYSQATEKGPRTEYAAVQQHMRRRADLIAEEKRQRQDHDFRSTLSPVAQQAETIVGAIRQYEIDNFWRKPAEIGLEDNERYAGEMFADAKPLIPTTKLWAIVSRMPKGSLLHVHSSAVLQFETIFNILLDTSGIVITASQDVSTELSAENATLAFSHVSDFAADPKVANVSIESPYYVSGTKVPVAYAADSFSGGRPGFIDFLMTKVAVTKEEVLRHDLGVDEIWRKFQSCFDPAGSAMTYEPVIRKTYQSVFNAWVDDGIMWVELRSGGSSAKLVPDGKDTPDPDLDFWIRVLLDELQKFQATEKGKAFWGIRIIWADWRGADSTRLMSNMEKAIERKKNFPNLFSGYDVVAQEDLGRTLLDLTPELLWFRNKTQALNMTYPFFFHAGETLGDGNSTDDNLFDALLFDSRRIGHGFSLYKHPLLLQQYAKQNIMVEVCPISNEVLRLATDILHHPIPAMIAHGVATAISNDDPAILGEDAAGLSYDFYQVIQGFDNIGLGGLGALAQNSIRWSNFIDQSQDEWIHDIELGMDGVGIKAKRLKLWQEKWEAYCQWIVEEYANWNATVSTKDKA

SEQ ID NO: 37125 - DNA, 1245 bp, Muscodor strobelii
  misc_feature: SGI cDNA ID NO. 572880
  misc_feature: Encodes the peptide sequence at SEQ ID NO 37126
atgactcaaactttcatagcagtggccccgcgggcacgtgagcgtgtaaatatctggagcatgccgaacagggcgaagctgctcgatgagaaccttgcccgttcactagtctatctcttggccgttcccgtgaggccccaatcgactggactcgccaatccgccgcaggtcgcttcatctaatcccaaagccgacacttacattacccaggcggtgcataactccgccaacgccgctgtcgcaactgcatgccgtggagaaacatcatcatgtcacgacgtcgggcctcatgcctcaaaagacaaagaccgcctcaagctagccagtgtcaagggcaaggtagcgctatgcgacctgcccatggagcttcatctgctcataatctctttcctcaagatggaagaagccgtagccttactgatcactaatacgtatttcttctcactggcgtctaagcttctcgacgaccacttcttgtcgtgtcacggccaatgggcagggcagaatcttgtatgtgtgggccaagattcccaacctagcgattttcccgctggaccattctctgcaaaagagattgatactttggtcgaagcgagtcgaaatccgtgtctcagtcgtacatcatctatggacacgcgcatcactgaagacgtcgcgccgtggagcattatatatgagatggcgtgcttcgagatggcgtgcttctcttttttcgaggactgcaaaatgctctatcaggaagaccccgcctttgctcacatcaagcccctcctaaagcgcagatggtctgatcaccgaaaggctttcttccctctagatcagccgtggatccttcgcaacttgacgacaaagcagttcgtccgtgctgaggcgattgcactcgatccgagctacatcagaggaccagtcattgacgtgttgggatttggactagtgcttttactacgtacctgctggtcaaagtcttcatctagtgatatagagaacagtccgactcatgtttgccgcggagtgtgggcgggacatcgctttgacataacaactgttgagaggcacgagtccaagactcttggagcaggatgggacgatgccagtgacgaggtatctcaggagctcgctgagattatggagaatgaatggggagatgactggcgccaaacacttatacgcaagaaggaaaaagatatgttatggagcagggcgccctttgatggtcttgatggtcttgatgacgatgattattga

SEQ ID NO: 37126 - protein, 414 aa, Muscodor strobelii
  misc_feature: SGI Peptide ID NO. 572880
  misc_feature (1)..(394): NCBI GI: 261196163 Blast Desc: conserved [Ajellomyces dermatitidis SLH14081] gi|239587618|gb|EEQ70261.1| conserved [Ajellomyces dermatitidis SLH14081]
  misc_feature (1)..(394): NCBI GI: 239614574 Blast Desc: conserved [Ajellomyces dermatitidis ER-3]
  misc_feature (27)..(341): NCBI GI: 171693581 Blast Desc: protein product [Podospora anserina] gi|170946739|emb|CAP73543.1| protein product [Podospora anserina]
  misc_feature (1)..(394): NCBI GI: 225554923 Blast Desc: conserved [Ajellomyces capsulatus G186AR]
  misc_feature (1)..(394): NCBI GI: 240280946 Blast Desc: conserved [Ajellomyces capsulatus H143]
  misc_feature (119)..(392): NCBI GI: 119177310 Blast Desc: [Coccidioides immitis RS]
  misc_feature (1)..(394): NCBI GI: 225557266 Blast Desc: conserved [Ajellomyces capsulatus G186AR]
  misc_feature (108)..(394): NCBI GI: 238843779 Blast Desc: conserved [Microsporum canis CBS 113480]
  misc_feature (1)..(400): NCBI GI: 240106955 Blast Desc: F-box domain containing protein [Coccidioides posadasii C735 delta SOWgp]
  misc_feature (116)..(400): NCBI GI: 119174833 Blast Desc: [Coccidioides immitis RS]
MTQTFIAVAPRARERVNIWSMPNRAKLLDENLARSLVYLLAVPVRPQSTGLANPPQVASSNPKADTYITQAVHNSANAAVATACRGETSSCHDVGPHASKDKDRLKLASVKGKVALCDLPMELHLLIISFLKMEEAVALLITNTYFFSLASKLLDDHFLSCHGQWAGQNLVCVGQDSQPSDFPAGPFSAKEIDTLVEASRNPCLSRTSSMDTRITEDVAPWSIIYEMACFEMACFSFFEDCKMLYQEDPAFAHIKPLLKRRWSDHRKAFFPLDQPWILRNLTTKQFVRAEAIALDPSYIRGPVIDVLGFGLVLLLRTCWSKSSSSDIENSPTHVCRGVWAGHRFDITTVERHESKTLGAGWDDASDEVSQELAEIMENEWGDDWRQTLIRKKEKDMLWSRAPFDGLDGLDDDDY

SEQ ID NO: 37127 - DNA, 954 bp, Muscodor strobelii
  misc_feature: SGI cDNA ID NO. 572881
  misc_feature: Encodes the peptide sequence at SEQ ID NO 37128
atggccatgtccgctcttggcgcgcatgatgccttccagagcaccatacatcaactccgagacccaagtatgccctgcaagcgacaagctacgcgcggcaaatcaacaactcttcgagacctcaaccgtctcttcacatcagttatcaaatacgggcgtcgtaaccgtctaccctccccaaggacgccccaagaaaatagcaaaaacccggtgcctgtttcaaccaaacccaggcgcgccttccagccaacgctttccgccatacaagaggacaacagagaagaatctcgcgcacaagacgtcgctccagaagtctcaaagccaaagaagaggaagtcagtaaggtgggcaatacaacccgacggtatcaaaatttcgcctgctgcaccatctcagtcaacatcatggcagacagagcagactttcgacggcgcaaaatcgcaaaaggaaaaagggaagcagcacatcaccttcgtagacgatcaatctcgaccagccgccactcgcccaaactcagacgagggggactcagactgcgcaatcgaagaaggagacgcacccccaatccacaagctcttcatccgccgagaccgtgagcgctcgcagcgcaaacagcaacgcgagcaaaaacgagacgcattcatgaagcagcaaatgactagctactacgacatagagctcaactccgccttctatcaacgcgatcgcaccggacttaattggacattagagtatgccggtgactctgacggtgggttttacatgtctaccgactatccaaggagcgtgtcgctgcctgatgttgtgcggcctttgcgcagttatgagaaagattgtgatcagtattatgatgggattcgcgggtctagcgtggctagagggccgtcggatttcacgagaggattcagcggaaatgatgttctgggtaggaggtttggacatttacggtgttag

SEQ ID NO: 37128 - protein, 317 aa, Muscodor strobelii
  misc_feature: SGI Peptide ID NO. 572881
MAMSALGAHDAFQSTIHQLRDPSMPCKRQATRGKSTTLRDLNRLFTSVIKYGRRNRLPSPRTPQENSKNPVPVSTKPRRAFQPTLSAIQEDNREESRAQDVAPEVSKPKKRKSVRWAIQPDGIKISPAAPSQSTSWQTEQTFDGAKSQKEKGKQHITFVDDQSRPAATRPNSDEGDSDCAIEEGDAPPIHKLFIRRDRERSQRKQQREQKRDAFMKQQMTSYYDIELNSAFYQRDRTGLNWTLEYAGDSDGGFYMSTDYPRSVSLPDVVRPLRSYEKDCDQYYDGIRGSSVARGPSDFTRGFSGNDVLGRRFGHLRC

SEQ ID NO: 37129 - DNA, 514 bp, Muscodor strobelii
  misc_feature: SGI EST ID NO. CUFF.88767.0
  misc_feature: Variant of the nucleotide sequence at SEQ ID NO 37127
cctttgcgcagttatgagaaagattgtgatcagtattatgatgggattcgcgggtctagcgtggctagagggccgtcggatttcacgagaggattcagcggaaatgatgttctgggtaggaggtttggacatttacggtgttagcgtttcatgacttagattgggattggtttacgagttatgatttaggtgcatttgcatatgcgctgaagcggaagttgaagaagcgagggtattgcttatttttaggtgttctagggcatttccagttggtttgaagtcgcatttgaagatacccaatactggcgacataaaattagcgggagggaggttttggctgcattgcctggaatttgtgtttgggccaagaccgaacattgagcacgtgatggcacgactttgatttttagcgttgaaattgatgtaagagcgagaacaattaagccaaacacagtaaaattattttgacgattctcaagctcattggaggagaatgcgaattgctggacaagag

SEQ ID NO: 37130 - DNA, 528 bp, Muscodor strobelii
  misc_feature: SGI cDNA ID NO. 572882
  misc_feature: Encodes the peptide sequence at SEQ ID NO 37131
atgcgcgtctcaatactcaccgtcgtggcggcctacgtaaccgcagtttcagcggctattagctggacactccagaaatccagtaaccctacctctgacgaagccgacgcttacccacgaatcgagtccgctatgcggctcgccgtagagcgatacgcaaaatactcggatgcgtccaagacagtccgcgtgtactatagccctggtgtgcccacggcggaggctaactataacggcgacctgcgattcggatccgaccgcgcgtacatgacgcagcgcacggctatgcacgagatctcgcacacgctcggcgtcggacagacggccgcgttcgatcggatgtgcgcctcggggaactggccgactgcgctgccgctgctgcggtcctgggatggttctagtgctgttattaactgtggtggcggtcatttctggccgtacggcttgaattatgagactgagtggagcgagacgaatgcgaaccggcatgttcagcttgttgacgctatgcttgccgatgggctatga

SEQ ID NO: 37131 - protein, 175 aa, Muscodor strobelii
  misc_feature: SGI Peptide ID NO. 572882
  misc_feature (1)..(175): NCBI GI: 256721809 Blast Desc: NECHADRAFT_106516 [Nectria haematococca mpVI 77-13-4]
  misc_feature (1)..(175): NCBI GI: 115437150 Blast Desc: conserved [Aspergillus terreus NIH2624] gi|114188553|gb|EAU30253.1| conserved [Aspergillus terreus NIH2624]
  misc_feature (1)..(175): NCBI GI: 261357811 Blast Desc: conserved [Verticillium albo-atrum VaMs.102]
  misc_feature (1)..(175): NCBI GI: 189190354 Blast Desc: conserved [Pyrenophora tritici-repentis Pt-1C-BFP] gi|187973122|gb|EDU40621.1| conserved [Pyrenophora tritici-repentis Pt-1C-BFP]
  misc_feature (3)..(175): NCBI GI: 39969247 Blast Desc: MGG_10234 [Magnaporthe grisea 70-15] gi|145012034|gb|EDJ96690.1| MGG_10234 [Magnaporthe grisea 70-15]
  misc_feature (1)..(175): NCBI GI: 169612373 Blast Desc: SNOG_09309 [Phaeosphaeria nodorum SN15] gi|160702497|gb|EAT83501.2| SNOG_09309 [Phaeosphaeria nodorum SN15]
  misc_feature (1)..(175): NCBI GI: 46115484 Blast Desc: FG03584.1 [Gibberella zeae PH-1]
  misc_feature (1)..(164): NCBI GI: 67900812 Blast Desc: AN7393.2 [Aspergillus nidulans FGSC A4] gi|40742574|gb|EAA61764.1| AN7393.2 [Aspergillus nidulans FGSC A4] gi|259483246|tpe|CBF78472.1| TPA: conserved [Aspergillus FGSC
  misc_feature (1)..(175): NCBI GI: 171680984 Blast Desc: protein product [Podospora anserina] gi|170940450|emb|CAP65677.1| protein product [Podospora anserina]
  misc_feature (1)..(175): NCBI GI: 116197567 Blast Desc: CHGG_06939 [Chaetomium globosum CBS 148.51] gi|88178218|gb|EAQ85686.1| CHGG_06939 [Chaetomium globosum CBS 148.51]
MRVSILTVVAAYVTAVSAAISWTLQKSSNPTSDEADAYPRIESAMRLAVERYAKYSDASKTVRVYYSPGVPTAEANYNGDLRFGSDRAYMTQRTAMHEISHTLGVGQTAAFDRMCASGNWPTALPLLRSWDGSSAVINCGGGHFWPYGLNYETEWSETNANRHVQLVDAMLADGL

SEQ ID NO: 37132 - DNA, 407 bp, Muscodor strobelii
  misc_feature: SGI EST ID NO. CUFF.88770.0
  misc_feature: Variant of the nucleotide sequence at SEQ ID NO 37130
ttgtcgtcaaagtaggtgtatttcccgacggcagatctgcatcaatgtaacctcaattgagcagggcgagatccggggaaagccatctggttatatattagctggtgtgaagatgtcgcattagttgaaggatgctcttatctttggacacggaagcaccggtttattctcaaagacctagagaaaatccgcacaaacctatcattgaccaagaatcatgcgcgtctcaatactcaccgtcgtggcggcctacgtaaccgcagtttcagcggctattagctggacactccagaaatccagtaaccctacctctgacgaagccgacgcttacccacgaatcgagtccgctatgcggctcgccgtagagcgatacgcaaaatactcggatgcgtccaagacagtccgcg

SEQ ID NO: 37133 - DNA, 993 bp, Muscodor strobelii
  misc_feature: SGI cDNA ID NO. 572883
  misc_feature: Elevated expression when VOC is produced
  misc_feature: Encodes the peptide sequence at SEQ ID NO 37134
atgccgggcactattttgctcactggcgccaacagctccgctggctttcatgccgccgagcacctgttgaagacgtatcctgagtttactgctatgttcaccgtcagaaatgcttccgacggcaacacggctaggctacgcaacatggtgtcacgatacccatcagcccgcgccacaattcgtcaattggacctcgcggatctctcctcggtccacgccttcgctgacaaggtcgtgaccgaaatccaggccaaggaatgcccccctctaaatgccatcgtctgcaacgctttctactgggacctcgtcgggggccctgagcagaccatcaacaagctcgacaagacaatccagatcggccatgtctcacatgtggccttggttctccgtcttcttgacagtttcgagcccgacagccgcggtcgcattgttattctctccagtataagccacttccgcaagaagaataacatgtcgtccttcatccctgaattgccggcggacctcgacgacttggttcacccccctcctgtccccgagaaagaacgttcggaacgcggataccagcgctacgccaacgcaaagcttttagccaccacatggatgtacccactcaatgatcggttgtctaagaaccctaagtacgagcacatctccgccgtcgccatgaacccgggcggacttggcgactcacgatgcttccagaccaacacaccgacctcgacgcggatgatggctcgatttatcctgaagcccatgattcctgttatcaactatctcgacccgactttccgctcctcattcgccgccggcgttgatatgattgagctcgcagtgaacaaggctcatccggactaccggggttacctcacgatgctgaataaagataagagtgacccaattacgtatgacgaggatgcgcagcagatggtatggaagaaaagtgcagagtgggctggtatcatagccgagatgactggcctacagatttga

SEQ ID NO: 37134 - protein, 330 aa, Muscodor strobelii
  misc_feature: SGI Peptide ID NO. 572883
  misc_feature (1)..(330): NCBI GI: 145238726 Blast Desc: An07g09350 [Aspergillus niger] gi|134076505|emb|CAK39701.1| protein product [Aspergillus niger]
  misc_feature (9)..(329): NCBI GI: 154320850 Blast Desc: BC1G_01897 [Botryotinia fuckeliana B05.10] gi|150853586|gb|EDN28778.1| BC1G_01897 [Botryotinia fuckeliana B05.10]
  misc_feature (1)..(321): NCBI GI: 242821302 Blast Desc: short-chain dehydrogenase, [Talaromyces stipitatus ATCC 10500] gi|218712573|gb|EED11998.1| short-chain dehydrogenase, [Talaromyces stipitatus ATCC 10500]
  misc_feature (1)..(315): NCBI GI: 242797990 Blast Desc: short-chain dehydrogenase, [Talaromyces stipitatus ATCC 10500] gi|218716421|gb|EED15842.1| short-chain dehydrogenase, [Talaromyces stipitatus ATCC 10500]
  misc_feature (1)..(328): NCBI GI: 67901878 Blast Desc: AN7926.2 [Aspergillus nidulans FGSC A4] gi|40740390|gb|EAA59580.1| AN7926.2 [Aspergillus nidulans FGSC A4] gi|259480675|tpe|CBF73535.1| TPA: conserved [Aspergillus FGSC
  misc_feature (1)..(329): NCBI GI: 145246160 Blast Desc: An12g02470 [Aspergillus niger] gi|134080042|emb|CAK41089.1| protein product [Aspergillus niger]
  misc_feature (1)..(330): NCBI GI: 115402565 Blast Desc: conserved [Aspergillus terreus NIH2624] gi|114189205|gb|EAU30905.1| conserved [Aspergillus terreus NIH2624]
  misc_feature (1)..(330): NCBI GI: 116179284 Blast Desc: CHGG_00270 [Chaetomium globosum CBS 148.51] gi|88184567|gb|EAQ92035.1| CHGG_00270 [Chaetomium globosum CBS 148.51]
  misc_feature (1)..(313): NCBI GI: 189207194 Blast Desc: short chain dehydrogenase/reductase SDR [Pyrenophora tritici-repentis Pt-1C-BFP] gi|187976024|gb|EDU42650.1| short chain dehydrogenase/reductase SDR [Pyrenophora tritici-repentis
  misc_feature (1)..(321): NCBI GI: 256724497 Blast Desc: NECHADRAFT_54716 [Nectria haematococca mpVI 77-13-4]
  misc_feature: Useful for introducing or modulating the production of volatile compounds
MPGTILLTGANSSAGFHAAEHLLKTYPEFTAMFTVRNASDGNTARLRNMVSRYPSARATIRQLDLADLSSVHAFADKVVTEIQAKECPPLNAIVCNAFYWDLVGGPEQTINKLDKTIQIGHVSHVALVLRLLDSFEPDSRGRIVILSSISHFRKKNNMSSFIPELPADLDDLVHPPPVPEKERSERGYQRYANAKLLATTWMYPLNDRLSKNPKYEHISAVAMNPGGLGDSRCFQTNTPTSTRMMARFILKPMIPVINYLDPTFRSSFAAGVDMIELAVNKAHPDYRGYLTMLNKDKSDPITYDEDAQQMVWKKSAEWAGIIAEMTGLQI

SEQ ID NO: 37135 - DNA, 1403 bp, Muscodor strobelii
  misc_feature: SGI EST ID NO. CUFF.88774.0
  misc_feature: Variant of the nucleotide sequence at SEQ ID NO 37133
aacgataggttgacgtgcgctggatatagatatgacgcatcccttgcctctgagtgcttggaacctcatgtgttacgcgggtatgggcggcgacaagccagaccggccccgaaattgctattttctacgtctaatcttctatctctcatctcttcatattcaggaacgtagctgcacatatcatagaatgccgggcactattttgctcactggcgccaacagctccgctggctttcatgccgccgagcacctgttgaagacgtatcctgagtttactgctatgttcaccgtcagaaatgcttccgacggcaacacggctaggctacgcaacatggtgtcacgatacccatcagcccgcgccacaattcgtcaattggacctcgcggatctctcctcggtccacgccttcgctgacaaggtcgtgaccgaaatccaggccaaggaatgcccccctctaaatgccatcgtctgcaacgctttctactgggacctcgtcgggggccctgagcagaccatcaacaagctcgacaagacaatccagatcggccatgtctcacatgtggccttggttctccgtcttcttgacagtttcgagcccgacagccgcggtcgcattgttattctctccagtataagccacttccgcaagaagaataacatgtcgtccttcatccctgaattgccggcggacctcgacgacttggttcacccccctcctgtccccgagaaagaacgttcggaacgcggataccagcgctacgccaacgcaaagcttttagccaccacatggatgtacccactcaatgatcggttgtctaagaaccctaagtacgagcacatctccgccgtcgccatgaacccgggcggacttggcgactcacgatgcttccagaccaacacaccgacctcgacgcggatgatggctcgatttatcctgaagcccatgattcctgttatcaactatctcgacccgactttccgctcctcattcgccgccggcgttgatatgattgagctcgcagtgaacaaggctcatccggactaccggggttacctcacgatgctgaataaagataagagtgacccaattacgtatgacgaggatgcgcagcagatggtatggaagaaaagtgcagagtgggctggtatcatagccgagatgactggcctacagatttgaggcgtgagatatgtgcttctatgcctataatgtaagactagtaagactaggtgcaaagggaatccgtccatgccaacgaacactataggaatatctttcgaatacaacgatgttgctaatgttcctagcgtcgaggcactatcatgctaattttgagcaatttatagctgtgggttcatttcaaacccaatgagaattggaacgctgcacgagttgtccatct

SEQ ID NO: 37136 - DNA, 843 bp, Muscodor strobelii
  misc_feature: SGI cDNA ID NO. 572884
  misc_feature: Elevated expression when VOC is produced
  misc_feature: Encodes the peptide sequence at SEQ ID NO 37137
atggagaacggaaacggtcatggcatcgaggcgaaacacgatgaattcggtggacatgacctcctccgaaaaatacaaactgggggaagtattatgatgccaccggatgtgttcgagaaactgtatctatcgccacagaatcgagtcaaaggggagctgaggaagacgcttggaaacccgacaccaatcgggattgtaggatttgtgatttccctggggcctcttgcgtgcgacttgatgggttggcgaggcgctggtggaagtggcgcggctagcatacccttcttcatcttcttcggcggcgtcttaatgtttgttggcggactcttcgagctcatccttggcaacacatttcccagcgtcgtgttcttcacattcgcctcattctggattgcttatggctgcgaattgcttccgcagttcaatgcatatgctctgtatgcaccgtcaggcgaagatgctgctgcgggattggagacgagggggtttaatgccagttttggcttcgtcacactatctatgggtatcatatgtctcatcttcctcgtctgcgcaatccgaacgaacatcgtcttcgtcatcatattcctcacgcttgtgctcactttctctttcatcacgggtgcgtactgggcgttggccaatgactatgttgggaatgtgggctttgccgctagacttctcactgctgctggtgcagcgagtttcgtcacgacggctgctggatggtggatcttggtcgcgctcttgttgtcgtctgttgacttcccctttgctcttcctgttggagacttgagtacgaagatccggggtaagagtgatcgtatgcaagccgaggcttga

SEQ ID NO: 37137 - protein, 280 aa, Muscodor strobelii
  misc_feature: SGI Peptide ID NO. 572884
  misc_feature (2)..(277): NCBI GI: 224775817 Blast Desc: TPA: TPA_inf: GPR1/FUN34/YaaH-class plasma membrane protein [Hypocrea virens]
  misc_feature (5)..(277): NCBI GI: 224775791 Blast Desc: TPA: TPA_inf: GPR1/FUN34/YaaH-class plasma membrane protein [Fusarium oxysporum f. sp. lycopersici 4286]
  misc_feature (2)..(277): NCBI GI: 224775811 Blast Desc: TPA: TPA_inf: GPR1/FUN34/YaaH-class plasma membrane protein [Trichoderma atroviride]
  misc_feature (2)..(277): NCBI GI: 224775813 Blast Desc: TPA: TPA_inf: GPR1/FUN34/YaaH-class plasma membrane protein [Hypocrea jecorina]
  misc_feature (5)..(277): NCBI GI: 224775795 Blast Desc: TPA: TPA_inf: GPR1/FUN34/YaaH-class plasma membrane protein [Gibberella moniliformis]
  misc_feature (5)..(277): NCBI GI: 46109396 Blast Desc: FG01580.1 [Gibberella zeae PH-1] gi|224775787|tpg|DAA06465.1| TPA_inf: GPR1/FUN34/YaaH-class plasma membrane protein [Gibberella zeae]
  misc_feature (2)..(279): NCBI GI: 156032403 Blast Desc: SS1G_13899 [Sclerotinia sclerotiorum 1980] gi|154699301|gb|EDN99039.1| SS1G_13899 [Sclerotinia sclerotiorum 1980]
  misc_feature (17)..(279): NCBI GI: 224775809 Blast Desc: TPA: TPA_inf: GPR1/FUN34/YaaH-class plasma membrane protein [Sclerotinia sclerotiorum]
  misc_feature (7)..(275): NCBI GI: 256730555 Blast Desc: [Nectria haematococca mpVI 77-13-4]
  misc_feature (9)..(275): NCBI GI: 224775793 Blast Desc: TPA: TPA_inf: GPR1/FUN34/YaaH-class plasma membrane protein [Gibberella moniliformis]
  misc_feature: Useful for introducing or modulating the production of volatile compounds
MENGNGHGIEAKHDEFGGHDLLRKIQTGGSIMMPPDVFEKLYLSPQNRVKGELRKTLGNPTPIGIVGFVISLGPLACDLMGWRGAGGSGAASIPFFIFFGGVLMFVGGLFELILGNTFPSVVFFTFASFWIAYGCELLPQFNAYALYAPSGEDAAAGLETRGFNASFGFVTLSMGIICLIFLVCAIRTNIVFVIIFLTLVLTFSFITGAYWALANDYVGNVGFAARLLTAAGAASFVTTAAGWWILVALLLSSVDFPFALPVGDLSTKIRGKSDRMQAEA

SEQ ID NO: 37138 - DNA, 1383 bp, Muscodor strobelii
  misc_feature: SGI EST ID NO. CUFF.88783.2
  misc_feature: Variant of the nucleotide sequence at SEQ ID NO 37136
tgaaacttgacattgttattttgtattctactcaacacgctattcatgttacaaacaaccaacacgaatttcagctaagcatacaagatggagaacggaaacggtcatggcatcgaggcgaaacacgatgaattcggtggacatgacctcctccgaaaaatacaaactgggggaagtattatgatgccaccggatgtgttcgagaaactgtatctatcgccacagaatcgagtcaaaggggagctgaggaagacgcttggaaacccgacaccaatgtgagccactccctgtaaatagaatgcgatcaattttaggagaaaatagctcgctgatctggagcaaacagcgggattgtaggatttgtgatttccctggggcctcttgcgtgcgacttgatgggttggcgaggcgctggtggaagtggcgcggctagcatgtaagtcctgatctctccttctctgtattccgaagaccccactaactgctacagacccttcttcatcttcttcggcggcgtcttaatgtttgttggcggactcttcgagctcatccttggcaacacatttcccagcgtcgtgttcttcacattcgcctcattctggattgcttatggctgcgaattgcttccgcagttcaatgcatatgctctgtatgcaccgtcaggcgaagatgctgctgcgggattggagacgagggggtttaatgccagttttggtacgtagagaccacgctcaaattttggagattaggcggtggaaacttacacttgtgatcataggcttcgtcacactatctatgggtatcatatgtctcatcttcctcgtctgcgcaatccgaacgaacatcgtcttcgtcatcatattcctcacgcttgtgctcactttctctttcatcacgggtgcgtactgggcgttggccaatgactatgttgggaatgtgggctttgccgctagacttctcactgctgctggtgcagcgagtttcgtcacgacggctgctggatggtggatcttggtcgcgctcttgttgtcgtctgttgacttcccctttgctcttcctgttggagacttgagtacgaagatccggggtaagagtgatcgtatgcaagccgaggcttgaatgagttgattttcgtgtgttgtgtggggagcaacgaaattggatccggtaatggataggagacagatggagggatgttgaaatgaagtatcactgcatcactgggttgtacgaggctcactgaaccgggatttagtcacgttgttggcaacggcgcttctgagagctactagtgacgggtggaacaggctggatgggagtcatatcgatgctgacggtggtattaggatcgatacatggagtgactgtgacgttaactatttg

SEQ ID NO: 37139 - DNA, 2745 bp, Muscodor strobelii
  misc_feature: SGI cDNA ID NO. 572885
  misc_feature: Encodes the peptide sequence at SEQ ID NO 37140
atggagcccttctccttcggaacctctgattctttggattatccagtgagcgtacgaatcatcaatctcgagggcgacgaagctccgtatctatattccaccctgctccagcgccccgatctgcgacacatcggctccaacacgagtccatactcagacctctacgtcacggtgcaagtctggtccggctccaagcccctgacagtaccggtccagacctcgtacaaggcgtttcgtaacgaaagaagatggaacgaatggcttaatctgtccataccctacaagtctctgcccctcaactccttcctggctatcacgttatgggacctgtcgccgacgggcggcaagcaagcacagggtcatgcgattcccttcggcgggaccacgctgcctctcttcgacagagacaaccagctacagaagggtcgccagaagtgcgttgtccatagacacaaacaggccgatggtttcgataacaccaccacgccttcgacagtcgcaaagtctaagaacgatgccaagcggaacggaacaaccgccgccgacaaggaggcagaggagctcgagcgcatggagaagctatttaagaagcacgagatgaatgagattcctcgtgtcgagtggctggatcaactggtgtaccggggtacagagaagcgcgggcttcaagcggccaggaactcagtcaagcccatcactcaacgtccgtcagctacacagccagagaataacacagaggcggagaaatccaatgcgccggagctggaaaatggactgccgccaagacccggtctgtccaaattcaccctcaatatcgaactgccgcgattcgacttccccgtcgttttcgcagatcatgaatatccaccaccgccagtctcgtcctttcagcacctgtcggcctcccaatctaacatcatgatgaagccgccgccagaggtctcttacggacctggaatcaacggtcctggcgacggtgagcggatcattcgcatctatgatcctgaggttggggccagagataaccctgcagagagcaagcacaggcgtcttgtgagaagccagcatcggcatggaattttagataaggatctgaagccaaacgccaaagttcgcgacgagctgaacatgatcatgtcgtactctccgactcacattctatctcccgaggaaaaggacctcgtgtggaagttccgatatcatctgacaaaagacaagcgtgccctcacgaaattcgtcaagtcggtgaactggcaggatcagagcgaatcgagacaggcgatccaagtcttgagcaagtggactgatattgacgtagacgatgcacttgagctgcttggtcccaccttcgatcaccgggccgtaagagcttatgccgttgaccgactgaggaaagcagacgataacgaactacttctctatctcttacagctagtccaagcgctcaagttcgaacatatctctaccgattcaaaccaggctactattcgtgcctcttctttggccaatttcctgatatctcgagcggtcgagaactttaccttgggaaactacttttactggtatctaggagtcgaatacgacgacaagagtaatgaccagggcgaggaagtccgcaccatgtatgccaaggtccaatacgacttcatgaaggagctagagagtcgagttggcggcaaagacgtaagagtgaccatccgtcgacaagcagaacttgtcgccgtgctgtccaaggtgtcagccgaaatacaggccgcgcgagactcttatccacgcaaactcgagaaagtcaaggcgttcttagcagatgcgaagaacgagttactgactattgagcccccgatacccatgcctttggacccatccatcatgattactggagtcgtacctgaagaaactcgagtcttcaaatcatctctgtcgcccatcatggtgaccttcaaaacgactacgggcagcaaatacccaatcattttcaagacaggcgatgatttacggcaagatcagttagtcattcagatcatcacgttgatggaccagttattgcaaaaagaaaacctcgatctaaaactctcgccgtacaagattctggcaacaagcacaacggccggcgcttcgcagttcgtgccgtcacagactttgtccgctatttcgtccaagttcaatgccaaccctgcgcttgcctacttgcgccagcataatccagacgatcgtgcctatcttggagtacggaaggaaacgctagatacctttgccaagtcatgcgcaggctattgtgtaatcacatacatccttggtgttggcgaccgccatctggaaaatctgctactggcacctgatgggcacttctttcatgctgatttcggcttcatcttaggtcgcgacccgaaacccttcgcgccagccgtcaagctgagcaaggagatggtggatgcgatgggcggctccaatccgccgagcgagatgtacaaacagttcaagcaatattgttttctagcatttgctgccttgcgcaagtcgtcaaatctcatactgaacttgttcagtctgatggtgcatgcgaatatcccagatattaaagcagagccggacaaagcggtgttcaaagtgaaggagagatttcacctagaattaagcgaggaagatgcgatcaaccacttggatggcattatggaggactcgttgaacggtattatgccggtggtaattgatagactgcatgatttcgtgcaggcgtttagataa

SEQ ID NO: 37140 - protein, 914 aa, Muscodor strobelii
  misc_feature: SGI Peptide ID NO. 572885
  misc_feature (654)..(861): Pfam Id: PF00454 Pfam Desc: Phosphatidylinositol 3- and 4-kinase
  misc_feature (50)..(214): Pfam Id: PF00792 Pfam Desc: Phosphoinositide 3-kinase C2
  misc_feature (363)..(558): Pfam Id: PF00613 Pfam Desc: Phosphoinositide 3-kinase family, accessory domain (PIK domain)
  misc_feature (50)..(145): Pfam Id: PF00792 Pfam Desc: Phosphoinositide 3-kinase C2
  misc_feature (187)..(214): Pfam Id: PF00792 Pfam Desc: Phosphoinositide 3-kinase C2
  misc_feature (363)..(539): Pfam Id: PF00613 Pfam Desc: Phosphoinositide 3-kinase family, accessory domain (PIK domain)
  misc_feature (2)..(914): NCBI GI: 145609672 Blast Desc: MGG_03069 [Magnaporthe grisea 70-15] gi|145017079|gb|EDK01442.1| MGG_03069 [Magnaporthe grisea 70-15]
  misc_feature (1)..(914): NCBI GI: 171685051 Blast Desc: protein product [Podospora anserina] gi|170942486|emb|CAP68138.1| protein product [Podospora anserina]
  misc_feature (1)..(914): NCBI GI: 46128289 Blast Desc: FG08522.1 [Gibberella zeae PH-1]
  misc_feature (1)..(914): NCBI GI: 256733991 Blast Desc: [Nectria haematococca mpVI 77-13-4]
  misc_feature (1)..(914): NCBI GI: 116193413 Blast Desc: CHGG_06424 [Chaetomium globosum CBS 148.51] gi|88182337|gb|EAQ89805.1| CHGG_06424 [Chaetomium globosum CBS 148.51]
  misc_feature (2)..(897): NCBI GI: 149210797 Blast Desc: MGCH7_ch7g871 [Magnaporthe grisea 70-15] gi|86196826|gb|EAQ71464.1| MGCH7_ch7g871 [Magnaporthe grisea 70-15]
  misc_feature (21)..(914): NCBI GI: 154303780 Blast Desc: BC1G_08774 [Botryotinia fuckeliana B05.10] gi|150854358|gb|EDN29550.1| BC1G_08774 [Botryotinia fuckeliana B05.10]
  misc_feature (1)..(914): NCBI GI: 85074857 Blast Desc: NCU00656 [Neurospora crassa OR74A] gi|28927609|gb|EAA36560.1| NCU00656 [Neurospora crassa OR74A]
  misc_feature (1)..(914): NCBI GI: 156040692 Blast Desc: SS1G_11324 [Sclerotinia sclerotiorum 1980] gi|154695708|gb|EDN95446.1| SS1G_11324 [Sclerotinia sclerotiorum 1980]
  misc_feature (1)..(914): NCBI GI: 212534654 Blast Desc: phosphoinositide 3-kinase, [Penicillium marneffei ATCC 18224] gi|210069882|gb|EEA23972.1| phosphoinositide 3-kinase, [Penicillium marneffei ATCC 18224]
  misc_feature (85)..(914): SWISSPROT Homolog: EC 2.7.1.137 Phosphatidylinositol 3-kinase
MEPFSFGTSDSLDYPVSVRIINLEGDEAPYLYSTLLQRPDLRHIGSNTSPYSDLYVTVQVWSGSKPLTVPVQTSYKAFRNERRWNEWLNLSIPYKSLPLNSFLAITLWDLSPTGGKQAQGHAIPFGGTTLPLFDRDNQLQKGRQKCVVHRHKQADGFDNTTTPSTVAKSKNDAKRNGTTAADKEAEELERMEKLFKKHEMNEIPRVEWLDQLVYRGTEKRGLQAARNSVKPITQRPSATQPENNTEAEKSNAPELENGLPPRPGLSKFTLNIELPRFDFPVVFADHEYPPPPVSSFQHLSASQSNIMMKPPPEVSYGPGINGPGDGERIIRIYDPEVGARDNPAESKHRRLVRSQHRHGILDKDLKPNAKVRDELNMIMSYSPTHILSPEEKDLVWKFRYHLTKDKRALTKFVKSVNWQDQSESRQAIQVLSKWTDIDVDDALELLGPTFDHRAVRAYAVDRLRKADDNELLLYLLQLVQALKFEHISTDSNQATIRASSLANFLISRAVENFTLGNYFYWYLGVEYDDKSNDQGEEVRTMYAKVQYDFMKELESRVGGKDVRVTIRRQAELVAVLSKVSAEIQAARDSYPRKLEKVKAFLADAKNELLTIEPPIPMPLDPSIMITGVVPEETRVFKSSLSPIMVTFKTTTGSKYPIIFKTGDDLRQDQLVIQIITLMDQLLQKENLDLKLSPYKILATSTTAGASQFVPSQTLSAISSKFNANPALAYLRQHNPDDRAYLGVRKETLDTFAKSCAGYCVITYILGVGDRHLENLLLAPDGHFFHADFGFILGRDPKPFAPAVKLSKEMVDAMGGSNPPSEMYKQFKQYCFLAFAALRKSSNLILNLFSLMVHANIPDIKAEPDKAVFKVKERFHLELSEEDAINHLDGIMEDSLNGIMPVVIDRLHDFVQAFR

SEQ ID NO: 37141 - DNA, 3699 bp, Muscodor strobelii
  misc_feature: SGI EST ID NO. CUFF.88786.0
  misc_feature: Variant of the nucleotide sequence at SEQ ID NO 37139
gttattctggccctggacccccctggagccctatggttgtctttgcgacgaaccagcagcaccttcagcaccttcagtcactcttttgtgccaagcttcgcatatcgccttcaagttgcagccaaaattcaagtgacgagaatgatttgaacacagcgtattcgagtcaaacgatcctcttaagggccaatcaagcccaacatggagcccttctccttcggaacctctgattctttggattatccagtgagcgtacgaatcatcaatctcgagggcgacgaagctccgtatctatattccaccctgctccagcgccccgatctgcgacacatcggctccaacacgagtccatactcagacctctacgtcacggtgcaagtctggtccggctccaagcccctgacagtaccggtccagacctcgtacaaggcgtttcgtaacgaaagaagatggaacgaatggcttaatctgtccataccctacaagtctctgcccctcaactccttcctggctatcacgttatgggacctgtcgccgacgggcggcaagcaagcacagggtcatgcgattcccttcggcgggaccacgctgcctctcttcgacagagacaaccagctacagaagggtcgccagaagtgcgttgtccatagacacaaacaggccgatggtttcgataacaccaccacgccttcgacagtcgcaaagtctaagaacgatgccaagcggaacggaacaaccgccgccgacaaggaggcagaggagctcgagcgcatggagaagctatttaagaagcacgagatgaatgagattcctcgtgtcgagtggctggatcaactggtgtaccggggtacagagaagcgcgggcttcaagcggccaggaactcagtcaagcccatcactcaacgtccgtcagctacacagccagagaataacacagaggcggagaaatccaatgcgccggagctggaaaatggactgccgccaagacccggtctgtccaaattcaccctcaatatcgaactgccgcgattcgacttccccgtcgttttcgcagatcatgaatatccaccaccgccagtctcgtcctttcagcacctgtcggcctcccaatctaacatcatgatgaagccgccgccagaggtctcttacggacctggaatcaacggtcctggcgacggtgagcggatcattcgcatctatgatcctgaggttggggccagagataaccctgcagagagcaagcacaggcgtcttgtgagaagccagcatcggcatggaattttagataaggatctgaagccaaacgccaaagttcgcgacgagctgaacatgatcatgtcgtactctccgactcacattctatctcccgaggaaaaggacctcgtgtggaagttccgatatcatctgacaaaagacaagcgtgccctcacgaaattcgtcaagtcggtgaactggcaggatcagagcgaatcgagacaggcgatccaagtcttgagcaagtggactgatattgacgtagacgatgcacttgagctgcttggtcccaccttcgatcaccgggccgtaagagcttatgccgttgaccgactgaggaaagcagacgataacgaactacttctctatctcttacagctagtccaagcgctcaagttcgaacatatctctaccgattcaaaccaggctactattcgtgcctcttctttggccaatttcctgatatctcgagcggtcgagaactttaccttgggaaactacttttactggtatctaggagtcgaatacgacgacaagagtaatgaccagggcgaggaagtccgcaccatgtatgccaaggtccaatacgacttcatgaaggagctagagagtcgagttggcggcaaagacgtaagagtgaccatccgtcgacaagcagaacttgtcgccgtgctgtccaaggtgtcagccgaaatacaggccgcgcgagactcttatccacgcaaactcgagaaagtcaaggcgttcttagcagatgcgaagaacgagttactgactattgagcccccgatacccatgcctttggacccatccatcatgattactggagtcgtacctgaagaaactcgagtcttcaaatcatctctgtcgcccatcatggtgaccttcaaaacgactacgggcagcaaatacccaatcattttcaagacaggcgatgatttacggcaagatcagttagtcattcagatcatcacgttgatggaccagttattgcaaaaagaaaacctcgatctaaaactctcgccgtacaagattctggcaacaagcacaacggccggcgcttcgcagttcgtgccgtcacagactttgtccgctatttcgtccaagttcaatgccaaccctgcgcttgcctacttgcgccagcataatccagacgatcgtgcctatcttggagtacggaaggaaacgctagatacctttgccaagtcatgcgcaggctattgtgtaatcacatacatccttggtgttggcgaccgccatctggaaaatctgctactggcacctgatgggcacttctttcatgctgatttcggcttcatcttaggtcgcgacccgaaacccttcgcgccagccgtcaagctgagcaaggagatggtggatgcgatgggcggctccaatccgccgagcgagatgtacaaacagttcaagcaatattgttttctagcatttgctgccttgcgcaagtcgtcaaatctcatactgaacttgttcagtctgatggtgcatgcgaatatcccagatattaaagcagagccggacaaagcggtgttcaaagtgaaggagagatttcacctagaattaagcgaggaagatgcgatcaaccacttggatggcattatggaggactcgttgaacggtattatgccggtggtaattgatagactgcatgatttcgtgcaggcgtttagataagcgtagtcaagcggcgttgatgcatacagggtggcgttcttaggaggcgttctgcgggtgatcttcgaaacttgtttcatattagaaacccgggctgaagatttgaatgagatcctaccgttccgatcttgggccctcttggccttttgatacctgacgtgttgcggttacaccacatctacaaacttccgtccctacagttaggacgcaaggcaagcatggcttgtgtaatactaggtcgttgtgaaaaccagacgattggaaactgcaaggcgctacgagaaagtgtcccatggtaacggcgacccggctgtttccatcttgacgtgtctccgcagatctatgctttccttttcgagatttacttgactcttgctgttgtgtaacttccgttaaccgatttgcaaacatgaagcaatgcgagctgtagatacttggcacagtcaggcttcgttggacctccaagtcgactggagcttggtcattccaaatgattattgaaataatatgtatcgatctattccatgctcgcttgctttctaagtgttgattttacgaacggagggaacgttgtttgtcacgtttatcctgatactctctcgaccgtttgtttgcctacatcatccgagcttgtccggactctagccggcagaaggctattcggcttgtctgccaaactgcagaacatcagcggcaaccattgtagtgcgagctgtaccttacaaggggccccctagactctgtccgaattga

SEQ ID NO: 37142 - DNA, 870 bp, Muscodor strobelii
  misc_feature: SGI cDNA ID NO. 572886
  misc_feature: Encodes the peptide sequence at SEQ ID NO 37143
atgacgcctcacgacaagttgctcaatctcaagcgacgccgcgtggaagtttactctctggcctatcccccttttactgactcgcatcacgcagctttcgatcgcgtcggctacacgatccgttccgttccccaggaacgacccaccgagagctcgcactcactgcttttgcgcgcaaagcttgtcatacgcatatacgccatggctccaaacaccaaatccactagcaatggcacgagtggctttacgctgccagccctcgagctcaactttggctcgttgaccgaaggaaccgacatcccaccaccacccccgtcaccaaagctggagcccacgccgctgcccaagatagacgagaacgaggaggctggaaaggagcccaagaagaaggaaccccttggagaggtccagactaacggtactgcccccatcaagcccggcccgacgctcagaaccggcgggattaagcgcccggccgatgacgtccccctctcgccagcagagtcgtcgcagacgacccggagccaccgtggtctccgtcgcctgctgagccggtccttgctgaacaatgcttacgatgaacaaggatcctcctccacacccgcacacactgtctccaggccgcccagccgcaccgccagcatcatggccgaggagaagaaggcacggcgcagcagcggatggttccgtcggttacgttctaacgacaccgcgagcgacgccaaggccactgcgaacaccgcagccggtccccgagaccaagaagccctctggcccaccgccccccatgatacccgaactgagcaatctcgaggccaagatcaatacgaatttggacgccgagaacctgttcaagtccatcggtcgtga

SEQ ID NO: 37143 - protein, 289 aa, Muscodor strobelii
  misc_feature: SGI Peptide ID NO. 572886
  misc_feature (76)..(252): NCBI GI: 256733990 Blast Desc: NECHADRAFT_58992 [Nectria haematococca mpVI 77-13-4]
  misc_feature (76)..(237): NCBI GI: 171685055 Blast Desc: protein product [Podospora anserina] gi|170942488|emb|CAP68140.1| protein product [Podospora anserina]
  misc_feature (76)..(244): NCBI GI: 46128285 Blast Desc: FG08520.1 [Gibberella zeae PH-1]
  misc_feature (74)..(256): NCBI GI: 261353139 Blast Desc: conserved [Verticillium albo-atrum VaMs.102]
  misc_feature (74)..(250): NCBI GI: 145610332 Blast Desc: MGG_02567 [Magnaporthe grisea 70-15] gi|145017653|gb|EDK02016.1| MGG_02567 [Magnaporthe grisea 70-15]
  misc_feature (74)..(250): NCBI GI: 149209595 Blast Desc: MGCH7_ch7g280 [Magnaporthe grisea 70-15] gi|86196235|gb|EAQ70873.1| MGCH7_ch7g280 [Magnaporthe grisea 70-15]
  misc_feature (82)..(238): NCBI GI: 116193411 Blast Desc: CHGG_06423 [Chaetomium globosum CBS 148.51] gi|88182336|gb|EAQ89804.1| CHGG_06423 [Chaetomium globosum CBS 148.51]
  misc_feature (82)..(232): NCBI GI: 85074853 Blast Desc: NCU00654 [Neurospora crassa OR74A] gi|28927607|gb|EAA36558.1| [Neurospora crassa OR74A]
MTPHDKLLNLKRRRVEVYSLAYPPFTDSHHAAFDRVGYTIRSVPQERPTESSHSLLLRAKLVIRIYAMAPNTKSTSNGTSGFTLPALELNFGSLTEGTDIPPPPPSPKLEPTPLPKIDENEEAGKEPKKKEPLGEVQTNGTAPIKPGPTLRTGGIKRPADDVPLSPAESSQTTRSHRGLRRLLSRSLLNNAYDEQGSSSTPAHTVSRPPSRTASIMAEEKKARRSSGWFRRLRSNDTASDAKATANTAAGPRDQEALWPTAPHDTRTEQSRGQDQYEFGRREPVQVHRS

SEQ ID NO: 37144 - DNA, 1729 bp, Muscodor strobelii
  misc_feature: SGI EST ID NO. CUFF.88895.0
  misc_feature: Variant of the nucleotide sequence at SEQ ID NO 37142
cttttattcaggctcgctatctattctggcccagtcctcctgcgctggccatccgcagcccaaaacagaaggtttcaactgaagattgaatacgatagtgagaagacaagaccctgaccttgaccctgacttaggcattctgggcgttttgtttctgcaggactccgcagcagcacggtctccgcactccagcagtttgtttccccagggcgccacattctcatcccccatctcagcactggcattccttgtcactcacagattttgttataataaacacacacaacacaattcgcatcacaccacgcacaggtagtgctcatatcatactgtcgctcatcacgctcgttgcatgattgtcttgcccttccagctctagctcatacgtgtagccactcaacggggtgttttgctcctagtgctgtcacttgctgagctactcccaatccgacacatagcaccgtcgactttgctgcttctagctcggccgtctccacgccactttggtaatctcacatctcacatactgcacggtacatcaaagcgtcagtactacggattaccgaatcagccaattgcatccaggggttctcctctcgtcttcaacgttcacactattgcccacggtaagtgcacaatgcctcatgacgcctcacgacaagttgctcaatctcaagcgacgccgcgtggaagtttactctctggcctatcccccttttactgactcgcatcacgcagctttcgatcgcgtcggctacacgatccgttccgttccccaggaacgacccaccgagagctcgcactcactgcttttgcgcgcaaagcttgtcatacgcatatacgccatggctccaaacaccaaatccactagcaatggcacgagtggctttacgctgccagccctcgagctcaactttggctcgttgaccgaaggaaccgacatcccaccaccacccccgtcaccaaagctggagcccacgccgctgcccaagatagacgagaacgaggaggctggaaaggagcccaagaagaaggaaccccttggagaggtccagactaacggatcctcctccacacccgcacacactgtctccaggccgcccagccgcaccgccagcatcatggccgaggagaagaaggcacggcgcagcagcggatggttccgtcggttacgttctaacgacaccgcgagcgacgccaaggccactgcgaacaccgcagccggtccccgagaccaagaagccctctggcccaccgccccccatgatacccgaactgagcaatctcgaggccaagatcaatacgaatttggacgccgagaacctgttcaagtccatcggtcgtgactcgtgatgcctcggccatgcgacgatttaatactttctttgcacatagcccgggttctgatctgatctgatttgatctgcgctggtcgatcataccaactccaatagtaatacccccaatagcgagctgttatagtacctgtacccaataattcttcttgaggaggcggcatcccatctgaaatacaccaaagttgattgggggcagatggcccaaaaaaacaagatacccggctcatttcaggagctcatccttagatataccgtgtccgatatttcactacaaaccccggattttttcttcgtctgccaaacaaaattcatttgtcataatcatcaccgtcgtcattttcccgccatcgtaatttcgaacgacgcagatc

SEQ ID NO: 37145 - DNA, 804 bp, Muscodor strobelii
  misc_feature: SGI cDNA ID NO. 572887
  misc_feature: Encodes the peptide sequence at SEQ ID NO 37146
atgacgacgccagatctgtcactatttgcgctacgattgcctggcatagtcattgacagtattgtggctgttgggagcttagtccccccgttgattttggaggtggaagcggccttcccccaacagagcgtccagactatgaacagctggctatcggccccgagcgtgatctggagagccaataagcagaaagagaagaaagacgcaatgttaagcgagctcaaaaagcgcgcgtacacatacggggagaccatcaaggttctgtgggagtggcatgagttggcggttgatactgattacaatgacgatgaggtccagggttctgcaccctattcgccggaattgtcaccgccaccttcgcaacccgtccagtcaccaagacaaagaaggttccagggattgcttaatacgatgtcacgcggcaataacgcagaaatgccgtctgagaaagattggaatgtggtattgagcgctcgacacagcgttggagatcgtatatggttgtttttgagtcgtgtatacttcaaatatttcgtacctgagatgggagatgacgatgagaacgtgcatctagggaagcagatgattccgctgatccttaggcaccttcacaagttttcgagactcttacaagtattccagcatgcatttgatttcaagcttgcaagaacacaacaagggcacctcgctcttgtaccggagctcaccgccgcgggagatgacctcgtcctactggccacagccggatccccgtatatacccgcattaatatgtaataattgtaaagacttcacgggctgctga

SEQ ID NO: 37146 - protein, 267 aa, Muscodor strobelii
  misc_feature: SGI Peptide ID NO. 572887
MTTPDLSLFALRLPGIVIDSIVAVGSLVPPLILEVEAAFPQQSVQTMNSWLSAPSVIWRANKQKEKKDAMLSELKKRAYTYGETIKVLWEWHELAVDTDYNDDEVQGSAPYSPELSPPPSQPVQSPRQRRFQGLLNTMSRGNNAEMPSEKDWNVVLSARHSVGDRIWLFLSRVYFKYFVPEMGDDDENVHLGKQMIPLILRHLHKFSRLLQVFQHAFDFKLARTQQGHLALVPELTAAGDDLVLLATAGSPYIPALICNNCKDFTGC

SEQ ID NO: 37147 - DNA, 1209 bp, Muscodor strobelii
  misc_feature: SGI cDNA ID NO. 572888
  misc_feature: Reduced expression when VOC is produced
  misc_feature: Encodes the peptide sequence at SEQ ID NO 37148
atggcgacgtcgagagtcgcggactcgctcttccgcactagtctccgaccggcacgacgcgtcgcaaacaccagatatacgactctgatgcccgtacgccggaaatcaggcccatatggatacacgcaagcaaaagcgctcgttttcagcaattatggcgagcctaaggacgtcttgaaactacacacccactctatctccccatcccaaccctcatccaccgtcctcctgcgcaccctcgcatcatccatcaacccagcagacgtgaacacgatccaaggcacctacggtgcgaaacccgtcttcagctccctaatcggtacctccgagccctccgtaataccgggcaacgagggcgtattcgaaatcctctcctcacccccgtcatccagcggtctatcgaaaggcgactgggtgatcccggcaaagacccaattcggtacctaccgtacacacgcgctcgcggatgtcgaccaaattatccctataaataaggagggacttacacctacacaagccggaactgtgtccgttaatccatgttcagcgtatagaatgttgagagactacgcgaaccctgtgttaagagagggagactggtttatccagaatggtgcgaactcgggtgtcggcagagcagcggtgcagtttggacggctgtggggttatagaagtatcaatatcataagagccagggagaccgaggaagaaacacagaagttgaaggatgagctggtggagctgggcgctacgcatgtcctcaccgaggaggagtttcaagatagaagtttcaaggaaaacttgaagagttggacgaaagggtcgggcgggataagattggggttgaattgtgtggggggaaagagtgcgaatgctatcgccaagaggctccgtcagggcgggacaatggtcacgtatgggggcatggcgagacaacctgtcaatctgcctactgggctcctgatctttaacgatatcatatttcggggtttctggttgagcaggtgggcggataaggataaggctgcaaagaaggggactgtagatgagattctcgatctggtgagggagggcaagttcaaggatacgcctactgttgacgtgccgtgggactggaacacggaagagcaaactctaaaggatgcggtgcagggcacactgggtgggtttagaaaggggaagggagtcttcgtctttggggagacttga

SEQ ID NO: 37148 - protein, 402 aa, Muscodor strobelii
  misc_feature: SGI Peptide ID NO. 572888
  misc_feature (197)..(353): Pfam Id: PF00107 Pfam Desc: Zinc-binding dehydrogenase
  misc_feature (247)..(353): Pfam Id: PF00107 Pfam Desc: Zinc-binding dehydrogenase
  misc_feature (18)..(402): NCBI GI: 154303806 Blast Desc: BC1G_08787 [Botryotinia fuckeliana B05.10] gi|150854371|gb|EDN29563.1| BC1G_08787 [Botryotinia fuckeliana B05.10]
  misc_feature (28)..(402): NCBI GI: 156040716 Blast Desc: SS1G_11336 [Sclerotinia sclerotiorum 1980] gi|154695720|gb|EDN95458.1| SS1G_11336 [Sclerotinia sclerotiorum 1980]
  misc_feature (12)..(402): NCBI GI: 39970199 Blast Desc: MGG_02566 [Magnaporthe grisea 70-15] gi|149209593|ref|XP_001522171.1| MGCH7_ch7g279 [Magnaporthe grisea 70-15] gi|86196234|gb|EAQ70872.1| MGCH7_ch7g279 grisea
  misc_feature (9)..(402): NCBI GI: 256733494 Blast Desc: [Nectria haematococca mpVI 77-13-4]
  misc_feature (16)..(402): NCBI GI: 46128287 Blast Desc: FG08521.1 [Gibberella zeae PH-1]
  misc_feature (1)..(402): NCBI GI: 171685053 Blast Desc: protein product [Podospora anserina] gi|170942487|emb|CAP68139.1| protein product [Podospora anserina]
  misc_feature (33)..(402): NCBI GI: 85074855 Blast Desc: NCU00655 [Neurospora crassa OR74A] gi|28927608|gb|EAA36559.1| NCU00655 [Neurospora crassa OR74A]
  misc_feature (14)..(399): NCBI GI: 255938582 Blast Desc: Pc14g00670 [Penicillium chrysogenum Wisconsin 54-1255] gi|211584682|emb|CAP74208.1| Pc14g00670 [Penicillium chrysogenum Wisconsin 54-1255]
  misc_feature (5)..(399): NCBI GI: 242814787 Blast Desc: mitochondrial enoyl reductase, [Talaromyces stipitatus ATCC 10500] gi|218714780|gb|EED14203.1| mitochondrial enoyl reductase, [Talaromyces stipitatus ATCC 10500]
  misc_feature (5)..(399): NCBI GI: 212545150 Blast Desc: mitochondrial enoyl reductase, [Penicillium marneffei ATCC 18224] gi|210065698|gb|EEA19792.1| mitochondrial enoyl reductase, [Penicillium marneffei ATCC 18224]
  misc_feature (44)..(365): SWISSPROT Homolog: EC 1.3.1.38 Trans-2-enoyl-CoA reductase (NADPH)
  misc_feature: Useful for introducing or modulating the production of volatile compounds
MATSRVADSLFRTSLRPARRVANTRYTTLMPVRRKSGPYGYTQAKALVFSNYGEPKDVLKLHTHSISPSQPSSTVLLRTLASSINPADVNTIQGTYGAKPVFSSLIGTSEPSVIPGNEGVFEILSSPPSSSGLSKGDWVIPAKTQFGTYRTHALADVDQIIPINKEGLTPTQAGTVSVNPCSAYRMLRDYANPVLREGDWFIQNGANSGVGRAAVQFGRLWGYRSINIIRARETEEETQKLKDELVELGATHVLTEEEFQDRSFKENLKSWTKGSGGIRLGLNCVGGKSANAIAKRLRQGGTMVTYGGMARQPVNLPTGLLIFNDIIFRGFWLSRWADKDKAAKKGTVDEILDLVREGKFKDTPTVDVPWDWNTEEQTLKDAVQGTLGGFRKGKGVFVFGET

SEQ ID NO: 37149 - DNA, 1600 bp, Muscodor strobelii
  misc_feature: SGI EST ID NO. CUFF.88838.0
  misc_feature: Variant of the nucleotide sequence at SEQ ID NO 37147
tgccggtacagggattgagcttatcgaacacattttcggatgtgacgtttttgctacctgcaaatgacgttacaaacagcaattatagctctaacttcactactagtagctcttatgcctaacgcccgcgtcgtaaacaatcgagcaagacagacgaaaatccaattgagccttgtcagccagcttcgcaccaaccatggcgacgtcgagagtcgcggactcgctcttccgcactagtctccgaccggcacgacgcgtcgcaaacaccagatatacgactctgatgcccgtacgccggaaatcaggcccatatggatacacgcaagcaaaagcgctcgttttcagcaattatggcgagcctaaggacgtcttgaaactacacacccactctatctccccatcccaaccctcatccaccgtcctcctgcgcaccctcgcatcatccatcaacccagcagacgtgaacacgatccaaggcacctacggtgcgaaacccgtcttcagctccctaatcggtacctccgagccctccgtaataccgggcaacgagggcgtattcgaaatcctctcctcacccccgtcatccagcggtctatcgaaaggcgactgggtgatcccggcaaagacccaattcggtacctaccgtacacacgcgctcgcggatgtcgaccaaattatccctataaataaggagggacttacacctacacaagccggaactgtgtccgttaatccatgttcagcgtatagaatgttgagagactacgcgaaccctgtgttaagagagggagactggtttatccagaatggtgcgaactcgggtgtcggcagagcagcggtgcagtttggacggctgtggggttatagaagtatcaatatcataagagccagggagaccgaggaagaaacacagaagttgaaggatgagctggtggagctgggcgctacgcatgtcctcaccgaggaggagtttcaagatagaagtttcaaggaaaacttgaagagttggacgaaagggtcgggcgggataagattggggttgaattgtgtggggggaaagagtgcgaatgctatcgccaagaggctccgtcagggcgggacaatggtcacgtatgggggcatggcgagacaacctgtcaatctgcctactgggctcctgatctttaacgatatcatatttcggggtttctggttgagcaggtgggcggataaggataaggctgcaaagaaggggactgtagatgagattctcgatctggtgagggagggcaagttcaaggatacgcctactgttgacgtgccgtgggactggaacacggaagagcaaactctaaaggatgcggtgcagggcacactgggtgggtttagaaaggggaagggagtcttcgtctttggggagacttgaggttgcgtacgtggtggtgcatatgatgtatgatatttgagaccacagacctgtacatatcctgcctcgcttggagctattgaatgcacatgtaagtttatcagaatatgactggactgctccttctgtgtttgcgtttgcgttatatgtacagcaatgagtgaccaactcatatcaatcaataaccatccgaat

SEQ ID NO: 37150 - DNA, 459 bp, Muscodor strobelii
  misc_feature: SGI cDNA ID NO. 572889
  misc_feature: Elevated expression when VOC is produced
  misc_feature: Encodes the peptide sequence at SEQ ID NO 37151
atggcactgcccaagcgaattgtgaaagagacagaacgtctcatgacagagcctgttcctggcatcagtgccgttccccacgaagacaatctacgatactttgacgtagagatccacggtccttctggctcaccgtatgagggggggattttcaagctagaactattcctcacggatgattatcctatggttcccccaaagattaggtttatgactaagatttatcatccaaatgttgataagctcgggaggatctgtctcgacgtgttgaagaacaactggtcgcccgccctccagatccgcaccatccttctctccatccaagctcttctaggctcgccgaaccccgatgatcccctcgccgccgacgtggccaagagctggaaagaggatgaggccaaggccatcgccacggccaaagaatggaccaagatccacgctaccccgggctcaaagtaa

SEQ ID NO: 37151 - protein, 152 aa, Muscodor strobelii
  misc_feature: SGI Peptide ID NO. 572889
  misc_feature (6)..(143): Pfam Id: PF00179 Pfam Desc: Ubiquitin-conjugating enzyme
  misc_feature (1)..(149): NCBI GI: 171685057 Blast Desc: protein product [Podospora anserina] gi|170942489|emb|CAP68141.1| protein product [Podospora anserina]
  misc_feature (1)..(149): NCBI GI: 46128361 Blast Desc: FG08558.1 [Gibberella zeae PH-1]
  misc_feature (1)..(151): NCBI GI: 85111794 Blast Desc: ubiquitin-conjugating enzyme E2 13 [Neurospora crassa OR74A] gi|28925873|gb|EAA34871.1| ubiquitin-conjugating enzyme E2 13 [Neurospora crassa OR74A]
  misc_feature (1)..(149): NCBI GI: 39970203 Blast Desc: conserved [Magnaporthe grisea 70-15] gi|145017652|gb|EDK02015.1| conserved [Magnaporthe grisea 70-15]
  misc_feature (1)..(148): NCBI GI: 115386710 Blast Desc: ubiquitin-conjugating enzyme E2-17 kDa [Aspergillus terreus NIH2624] gi|114190894|gb|EAU32594.1| ubiquitin-conjugating enzyme E2-17 kDa [Aspergillus terreus
  misc_feature (1)..(150): NCBI GI: 258572406 Blast Desc: ubiquitin-conjugating enzyme E2 N [Uncinocarpus reesii 1704] gi|237905235|gb|EEP79636.1| ubiquitin-conjugating enzyme E2 N [Uncinocarpus reesii 1704]
  misc_feature (1)..(147): NCBI GI: 156055590 Blast Desc: ubiquitin-conjugating enzyme E2 [Sclerotinia sclerotiorum 1980] gi|154702931|gb|EDO02670.1| ubiquitin-conjugating enzyme E2 [Sclerotinia sclerotiorum 1980]
  misc_feature (1)..(150): NCBI GI: 240108979 Blast Desc: Ubiquitin-conjugating enzyme E2, [Coccidioides posadasii C735 delta SOWgp]
  misc_feature (1)..(147): NCBI GI: 70984657 Blast Desc: ubiquitin conjugating enzyme (UbcM) [Aspergillus fumigatus Af293] gi|121704050|ref|XP_001270289.1| ubiquitin conjugating enzyme (UbcM), [Aspergillus clavatus NRRL 1] enzyme
  misc_feature (1)..(150): NCBI GI: 119181535 Blast Desc: conserved [Coccidioides immitis RS]
  misc_feature (3)..(148): SWISSPROT Homolog: EC 6.3.2.19 Ubiquitin--protein ligase
  misc_feature: Useful for introducing or modulating the production of volatile compounds
MALPKRIVKETERLMTEPVPGISAVPHEDNLRYFDVEIHGPSGSPYEGGIFKLELFLTDDYPMVPPKIRFMTKIYHPNVDKLGRICLDVLKNNWSPALQIRTILLSIQALLGSPNPDDPLAADVAKSWKEDEAKAIATAKEWTKIHATPGSK

SEQ ID NO: 37152 - DNA, 1386 bp, Muscodor strobelii
  misc_feature: SGI EST ID NO. CUFF.89073.1
  misc_feature: Variant of the nucleotide sequence at SEQ ID NO 37150
ccaggaatgaatgacctactacatataataacatctgattgaagcacaactgcctgggacgtcggttactgagtggtgccaattacctcatcttgcgagactgcccgtcatttgatgtccaccttccagttagttcccgctgtcccaacacccgacccttccaacagctctccgactaactttgactcacctctcgttaagcttggttgatattctgcgtactctgcaccttctcgtcgctcctgcccgcgcttttcattgacaataagaacccacatattggctacaaatatcctccttcgagtcttcctgcacgtattgccactcagtacttctgtcgaccctcattctgagcaagatggcactgcccaagcgaattgtgaaagagacagaacgtctcatgacagagcctgttcctggcatcagtgccgttccccacgaagacaatctacgatactttgacgtagagatccacggtccttctggctcaccgtatgagggggggattttcaagctagaactattcctcacggatgattatcctatggttcccccaaagattaggtttatgactaagatttatcatccaaatgttgataagctcgggaggatctgtctcgacgtgttgaagaacaactggtcgcccgccctccagatccgcaccatccttctctccatccaagctcttctaggctcgccgaaccccgatgatcccctcgccgccgacgtggccaagagctggaaagaggatgaggccaaggccatcgccacggccaaagaatggaccaagatccacgctaccccgggctcaaagtaagaagtctggctccgatggttccagctgtaccgaaaacggtggtgggcgtatctgatctagaagaagtttctctggaagcagaccatcaaaacgatatggtgcaaatcctggtgtttgattctgtggccggaaactttcgatatgatacccaggcaacaagaacaccaacggagaatggatgctgctgccgaagaagcggaagccataacgagacataagaataacacaaatcagagaataacgggagaaagtgacgttgagcatcatctcttatccagcgggacgaagcatgttagcggtgatagcaagctggtcccggtatgaaggagagtctagtttggttctttgcctcctatgctacaacttttcatcgtttagatgacacgggcatggtgcaggcgttttgcgtatctccaagtttgtctgcagcacagtgtgcccgtggcgcaccaagcatgtattaaggcgaggcagaaacattcttcttgagcgcgggaatccatgaatacggatagatgatcaggctttatgaatagatctcatagtaaaaaaacacaatcaaaacgatt

SEQ ID NO: 37153 - DNA, 4479 bp, Muscodor strobelii
  misc_feature: SGI cDNA ID NO. 572890
  misc_feature: Encodes the peptide sequence at SEQ ID NO 37154
atgccttctgccttcgaccaccattcagacacgcccaagaaaggcaagaccatcaagtcagcatatgacagcgaaaccttcgatgccgacggcactattcacatagatggccttgtcggctcagctaccatatcgccatgtggacgtgatattgcactggcgtcgccagatggactggctatcatcgacttggattctcccttcagccctcctcgtaggttgagctctcatgggctgccttggctagttgtggatgtgcagtggtcacctttcgcagctcgagactattgggtggcttctacggcaaatcaccgttgcttggtgtggaatctgaatctgcgagaagactctgctagtggtgccatcgagcactctctgcagggccacactagagctatcaccgatatcaacttctcagcgcatcacccagacatccttgctacgtgcgcggtcgatggctatgtgcattcatgggatctgcggaaaccgaaacagccagtcttgaccttctgcgactggtttgcaggtgcgacacaggtgaagtacaatcgccaggatcctttcatcctagcatcttctcatgatcgctggcttcacatttgggacgaaagaaaaccttcggtccctctcaaatcgatcagtgcccatacttccaagatctatggcttggactggaatcgcaccgagtcaaccaagcttgccacgtgctcgctggataagtgtatcaaattttgggactacgctgcttcagaagagcccgagacggttgttcagacagattttccagtatggcgcgcacgtcacaccccatttggatggggagttctcgctatgccccaaaacgaccctgggaacttgtatttgtatgacatacgtcgcaacaaagaggattccgcgaatggcaccgtggagcccacgaccgtgtttcccggccatggtacacacaaagtcaaagagttcctgtggagaactcgaggatcgatggcggacgggattgaccagcgagagtttcaactagtgtcatggggtgaagacaatgagcttcggcttcataaggcagatccccacattctcgaatccgttggctatgtcaagggcggcgaggctcgcaaaattcccgtcacccgtaaaggagccacgtacaaaacgtatcgggcagttgacgatcactcaaatagagagagaagatcggcgactatgagtagctcgcgtcctgctagccggggaagtcattctagacgcagcaccttgaacttaggaatgcagactatcccggcccaacatgcaagatcgagtaaaggagcaaattggaaaggacagtctatgaaagcacgcccagcagcatccaagagcatcgataagcaactcgatcagctcggttggatgaaaggaatcacgatgaacaaaagaaaggcaccaattgttgcaacaccgcaacggaaagactcgagggactcaacgttatttggcttgaatttccataacgagcattggggtgaccctgagactctacaagatgagatcattagggttagccaacaactgccaaacgtaaaatgggacaacgtcgacatggataaactcagtcttcgtgcttccctgaatggtccgtggggagtcgatagcgagactgtttacatgaatgttactgtcgatgtacctacgaaatatcctaaggccaaggcgccacgatttataatcgaaaagtccgcactaattccagagcaaacatataaaaagattgatcaggaggtcaaccagctggctaatgagttctcgaagaaacgtcaaaactgtctcgatgtcgcttttggctatttacttggagaaattgacctttccaccagcgacacatttttcaaaaatgttcgagaccttgatgatgactttggcggaatcgaagacgaaagctcaagcgaggaagaggacaatgaaatcgcaacaggtggatcggcatcaatgtctcaagaactcactgctagtgtcgagctcgacgccgctctagcaccagtcaatagaccaatagttcctcctattctacgatattgtggtggccggttttccaatgatggtcgtctagtctgtttcttcccatccaaggaagagagagcccgtgctctcttcacgcccacggatgggaatcgggaacgccctaaaggggagcccacctttgccgggtttggtcgtttgcaacaggattccacaccaccaagacacagaaacttgaacgatgagacatccgccacagaagaccagtcggattcggaggcatctgacgactcatctagttcaactgactcggagactacgtatatgcataagatcaatatgtggtatctacctggtcggcgtttcaggaaggctcttagtggcacttactctatgcattcgagcggcgggggaaccggtatcgggactgggactggaacggccgcaagtagacgccggggcaagccaaagaacttcatatcaatccataatgttgctgcggatcttccttcaaaacgagaattagctcacgaatatcgcatatttggtgacggagctgaagtttgcgagcataatgctcaagtggctcagaaacacgcccggcatgatctggtggacgtctggcgatacgctgcattgctattaaggaaagacatacctctcgagcttctgaactatgagaagcagagtgactcggttctagtgatagcaaaagatgcagttgcaaaatttggcagcgatcgaccaaattcgaataactcggataatggtgcgcttacaggccgtgtaaaatggggacaccatccgctcgcgaaagcccttattaacgacctcttcaatcacttcgagaagcttgctgatgtccagatgttggctatgctttcctgtatcttcagtgactcctcagcggaagacagcattgcgtatgcaggatcacagctacctcagcctgagacgccactaccgatgaaggcacctgcattctcacttgactactttccgcaagatatatccatgtggaatatgcaccatacaaactacaagagccaggtcaactctgcaatctctacacctaagacattacacacgccgattcatattgttggttccttcggatccgaagagctctgggctggagaaccagagtctacatcttactcctgcggagagacgcctccaagtagaacgccaaaagatcctctttcagaaggtgatcccacgcatagtctatctacatcacctaataaccgactactgcatcgcgcaaatacagcattaacatccggtttggcaagctttcaacgaccttttgcaactactgtatcaacgtctcctcctaatcgcaagaggatcagtccttcggaggcattcatcaacaacctcactccatctaacatcacctggggtggttcgactgtcatgggaacggcatcggagccacccatgactgctcgcaactcgttgtctgacgatgaggcgcgaagggatgaacccctccccttggtatgctatggcatatctactgaaatggaggaccagagcattttcgacgacgatggttggctagatatcccattcttagagccatcccggaatgcaatatttgcaggctatcgctacgcgtacgccgaaatgttgcaaagatgggaacatccactggcacgtttggaagtcatgaaatttaatgttctgaaagacaagccttcggtaactcgcttctcgtctttggaacgcaatggaatggaaggcttttatagttctcatcagaatccggacactgtgagccacacatctcagacgttcgatacgaactctcccattgcgatgagcaggaaagaacaattgcagtctttggttgcatctggtcgtggtattgatattcgaggtatctgccgtgttcatgagactcatctcgatcccattcgatcaacgcaggaccatgctatggtcggtggcggcgttggtacttgcgagcgctgcaaccgtcgacaaactcagttgctctgtgtcttctgctgcgaacctattgatgccctctacccaccttgtcttgcttgtggctgtgcgatccatgacgcatgtcttgcggaatggcaccaagcaggggagactgagtgtccggccggagacgagtgcgagtgcgtagatgaagcgagcgcaggattcgtcgaaacgtgggctgccatggtcggtgccttgcgtcaaggcaaagtccgcaagccatcagaagatataaaacaagagaagaaaacgccagagaagagggggtcaatagataagcatgactgggagacagtcgccagcggtgcgaccttgcctctggctgatggccaggggaaaccaattgaacatgatcgctcgcaacagccattgtctgcggccaggataagcttaggcaatcgactgcgaaagtctgctgggacttggggcagcacgccgtctcttaggaagacgtcaagaggtgctagctcgagtttatcgagattttaa

SEQ ID NO: 37154 - protein, 1492 aa, Muscodor strobelii
  misc_feature: SGI Peptide ID NO. 572890
  misc_feature (207)..(246): Pfam Id: PF00400 Pfam Desc: WD domain, G-beta repeat
  misc_feature (120)..(159): Pfam Id: PF00400 Pfam Desc: WD domain, G-beta repeat
  misc_feature (1)..(1488): NCBI GI: 261353141 Blast Desc: WD repeat-containing protein [Verticillium albo-atrum VaMs.102]
  misc_feature (1)..(1483): NCBI GI: 256733609 Blast Desc: [Nectria haematococca mpVI 77-13-4]
  misc_feature (1)..(1483): NCBI GI: 46128359 Blast Desc: FG08557.1 [Gibberella zeae PH-1]
  misc_feature (1)..(1396): NCBI GI: 85111792 Blast Desc: NCU02112 [Neurospora crassa OR74A] gi|28925872|gb|EAA34870.1| conserved [Neurospora crassa OR74A]
  misc_feature (1)..(1396): NCBI GI: 171685059 Blast Desc: protein product [Podospora anserina] gi|170942490|emb|CAP68142.1| protein product [Podospora anserina]
  misc_feature (1)..(1396): NCBI GI: 149209599 Blast Desc: MGCH7_ch7g282 [Magnaporthe grisea 70-15] gi|86196237|gb|EAQ70875.1| MGCH7_ch7g282 [Magnaporthe grisea 70-15]
  misc_feature (10)..(1429): NCBI GI: 156055592 Blast Desc: SS1G_05148 [Sclerotinia sclerotiorum 1980] gi|154702932|gb|EDO02671.1| SS1G_05148 [Sclerotinia sclerotiorum 1980]
  misc_feature (13)..(1429): NCBI GI: 154300026 Blast Desc: BC1G_11202 [Botryotinia fuckeliana B05.10] gi|150856815|gb|EDN32007.1| BC1G_11202 [Botryotinia fuckeliana B05.10]
  misc_feature (12)..(1390): NCBI GI: 115386712 Blast Desc: conserved [Aspergillus terreus NIH2624] gi|114190895|gb|EAU32595.1| conserved [Aspergillus terreus NIH2624]
  misc_feature (16)..(1377): NCBI GI: 70984659 Blast Desc: WD repeat protein [Aspergillus fumigatus Af293] gi|66845463|gb|EAL85798.1| WD repeat protein [Aspergillus fumigatus Af293]
MPSAFDHHSDTPKKGKTIKSAYDSETFDADGTIHIDGLVGSATISPCGRDIALASPDGLAIIDLDSPFSPPRRLSSHGLPWLVVDVQWSPFAARDYWVASTANHRCLVWNLNLREDSASGAIEHSLQGHTRAITDINFSAHHPDILATCAVDGYVHSWDLRKPKQPVLTFCDWFAGATQVKYNRQDPFILASSHDRWLHIWDERKPSVPLKSISAHTSKIYGLDWNRTESTKLATCSLDKCIKFWDYAASEEPETVVQTDFPVWRARHTPFGWGVLAMPQNDPGNLYLYDIRRNKEDSANGTVEPTTVFPGHGTHKVKEFLWRTRGSMADGIDQREFQLVSWGEDNELRLHKADPHILESVGYVKGGEARKIPVTRKGATYKTYRAVDDHSNRERRSATMSSSRPASRGSHSRRSTLNLGMQTIPAQHARSSKGANWKGQSMKARPAASKSIDKQLDQLGWMKGITMNKRKAPIVATPQRKDSRDSTLFGLNFHNEHWGDPETLQDEIIRVSQQLPNVKWDNVDMDKLSLRASLNGPWGVDSETVYMNVTVDVPTKYPKAKAPRFIIEKSALIPEQTYKKIDQEVNQLANEFSKKRQNCLDVAFGYLLGEIDLSTSDTFFKNVRDLDDDFGGIEDESSSEEEDNEIATGGSASMSQELTASVELDAALAPVNRPIVPPILRYCGGRFSNDGRLVCFFPSKEERARALFTPTDGNRERPKGEPTFAGFGRLQQDSTPPRHRNLNDETSATEDQSDSEASDDSSSSTDSETTYMHKINMWYLPGRRFRKALSGTYSMHSSGGGTGIGTGTGTAASRRRGKPKNFISIHNVAADLPSKRELAHEYRIFGDGAEVCEHNAQVAQKHARHDLVDVWRYAALLLRKDIPLELLNYEKQSDSVLVIAKDAVAKFGSDRPNSNNSDNGALTGRVKWGHHPLAKALINDLFNHFEKLADVQMLAMLSCIFSDSSAEDSIAYAGSQLPQPETPLPMKAPAFSLDYFPQDISMWNMHHTNYKSQVNSAISTPKTLHTPIHIVGSFGSEELWAGEPESTSYSCGETPPSRTPKDPLSEGDPTHSLSTSPNNRLLHRANTALTSGLASFQRPFATTVSTSPPNRKRISPSEAFINNLTPSNITWGGSTVMGTASEPPMTARNSLSDDEARRDEPLPLVCYGISTEMEDQSIFDDDGWLDIPFLEPSRNAIFAGYRYAYAEMLQRWEHPLARLEVMKFNVLKDKPSVTRFSSLERNGMEGFYSSHQNPDTVSHTSQTFDTNSPIAMSRKEQLQSLVASGRGIDIRGICRVHETHLDPIRSTQDHAMVGGGVGTCERCNRRQTQLLCVFCCEPIDALYPPCLACGCAIHDACLAEWHQAGETECPAGDECECVDEASAGFVETWAAMVGALRQGKVRKPSEDIKQEKKTPEKRGSIDKHDWETVASGATLPLADGQGKPIEHDRSQQPLSAARISLGNRLRKSAGTWGSTPSLRKTSRGASSSLSRF

SEQ ID NO: 37155 - DNA, 3946 bp, Muscodor strobelii
  misc_feature: SGI EST ID NO. CUFF.88826.0
  misc_feature: Variant of the nucleotide sequence at SEQ ID NO 37153
tggaatcgcaccgagtcaaccaagcttgccacgtgctcgctggataagtgtatcaaattttgggactacgctgcttcagaagagcccgagacggttgttcagacagattttccagtatggcgcgcacgtcacaccccatttggatggggagttctcgctatgccccaaaacgaccctgggaacttgtatttgtatgacatacgtcgcaacaaagaggattccgcgaatggcaccgtggagcccacgaccgtgtttcccggccatggtacacacaaagtcaaagagttcctgtggagaactcgaggatcgatggcggacgggattgaccagcgagagtttcaactagtgtcatggggtgaagacaatgagcttcggcttcataaggcagatccccacattctcgaatccgttggctatgtcaagggcggcgaggctcgcaaaattcccgtcacccgtaaaggagccacgtacaaaacgtatcgggcagttgacgatcactcaaatagagagagaagatcggcgactatgagtagctcgcgtcctgctagccggggaagtcattctagacgcagcaccttgaacttaggaatgcagactatcccggcccaacatgcaagatcgagtaaaggagcaaattggaaaggacagtctatgaaagcacgcccagcagcatccaagagcatcgataagcaactcgatcagctcggttggatgaaaggaatcacgatgaacaaaagaaaggcaccaattgttgcaacaccgcaacggaaagactcgagggactcaacgttatttggcttgaatttccataacgagcattggggtgaccctgagactctacaagatgagatcattagggttagccaacaactgccaaacgtaaaatgggacaacgtcgacatggataaactcagtcttcgtgcttccctgaatggtccgtggggagtcgatagcgagactgtttacatgaatgttactgtcgatgtacctacgaaatatcctaaggccaaggcgccacgatttataatcgaaaagtccgcactaattccagagcaaacatataaaaagattgatcaggaggtcaaccagctggctaatgagttctcgaagaaacgtcaaaactgtctcgatgtcgcttttggctatttacttggagaaattgacctttccaccagcgacacatttttcaaaaatgttcgagaccttgatgatgactttggcggaatcgaagacgaaagctcaagcgaggaagaggacaatgaaatcgcaacaggtggatcggcatcaatgtctcaagaactcactgctagtgtcgagctcgacgccgctctagcaccagtcaatagaccaatagttcctcctattctacgatattgtggtggccggttttccaatgatggtcgtctagtctgtttcttcccatccaaggaagagagagcccgtgctctcttcacgcccacggatgggaatcgggaacgccctaaaggggagcccacctttgccgggtttggtcgtttgcaacaggattccacaccaccaagacacagaaacttgaacgatgagacatccgccacagaagaccagtcggattcggaggcatctgacgactcatctagttcaactgactcggagactacgtatatgcataagatcaatatgtggtatctacctggtcggcgtttcaggaaggctcttagtggcacttactctatgcattcgagcggcgggggaaccggtatcgggactgggactggaacggccgcaagtagacgccggggcaagccaaagaacttcatatcaatccataatgttgctgcggatcttccttcaaaacgagaattagctcacgaatatcgcatatttggtgacggagctgaagtttgcgagcataatgctcaagtggctcagaaacacgcccggcatgatctggtggacgtctggcgatacgctgcattgctattaaggaaagacatacctctcgagcttctgaactatgagaagcagagtgactcggttctagtgatagcaaaagatgcagttgcaaaatttggcagcgatcgaccaaattcgaataactcggataatggtgcgcttacaggccgtgtaaaatggggacaccatccgctcgcgaaagcccttattaacgacctcttcaatcacttcgagaagcttgctgatgtccagatgttggctatgctttcctgtatcttcagtgactcctcagcggaagacagcattgcgtatgcaggatcacagctacctcagcctgagacgccactaccgatgaaggcacctgcattctcacttgactactttccgcaagatatatccatgtggaatatgcaccatacaaactacaagagccaggtcaactctgcaatctctacacctaagacattacacacgccgattcatattgttggttccttcggatccgaagagctctgggctggagaaccagagtctacatcttactcctgcggagagacgcctccaagtagaacgccaaaagatcctctttcagaaggtgatcccacgcatagtctatctacatcacctaataaccgactactgcatcgcgcaaatacagcattaacatccggtttggcaagctttcaacgaccttttgcaactactgtatcaacgtctcctcctaatcgcaagaggatcagtccttcggaggcattcatcaacaacctcactccatctaacatcacctggggtggttcgactgtcatgggaacggcatcggagccacccatgactgctcgcaactcgttgtctgacgatgaggcgcgaagggatgaacccctccccttggtatgctatggcatatctactgaaatggaggaccagagcattttcgacgacgatggttggctagatatcccattcttagagccatcccggaatgcaatatttgcaggctatcgctacgcgtacgccgaaatgttgcaaagatgggaacatccactggcacgtttggaagtcatgaaatttaatgttctgaaagacaagccttcggtaactcgcttctcgtctttggaacgcaatggaatggaaggcttttatagttctcatcagaatccggacactgtgagccacacatctcagacgttcgatacgaactctcccattgcgatgagcaggaaagaacaattgcagtctttggttgcatctggtcgtggtattgatattcgaggtatctgccgtgttcatgagactcatctcgatcccattcgatcaacgcaggaccatgctatggtcggtggcggcgttggtacttgcgagcgctgcaaccgtcgacaaactcagttgctctgtgtcttctgctgcgaacctattgatgccctctacccaccttgtcttgcttgtggctgtgcgatccatgacgcatgtcttgcggaatggcaccaagcaggggagactgagtgtccggccggagacgagtgcgagtgcgtagatgaagcgagcgcaggattcgtcgaaacgtgggctgccatggtcggtgccttgcgtcaaggcaaagtccgcaagccatcagaagatataaaacaagagaagaaaacgccagagaagagggggtcaatagataagcatgactgggagacagtcgccagcggtgcgaccttgcctctggctgatggccaggggaaaccaattgaacatgatcgctcgcaacagccattgtctgcggccaggataagcttaggcaatcgactgcgaaagtctgctgggacttggggcagcacgccgtctcttaggaagacgtcaagaggtgctagctcgagtttatcgagattttaatgatgagggccgtgtaagattatgaacattgatgggcgtgatatttttagtcgtaatgtatatactgaaatgtaataaggcccgatgacttgtggtcatcgtgtgaaatacgaaagcgagcgtttgaaatgcatttcag

SEQ ID NO: 37156 - DNA, 1053 bp, Muscodor strobelii
  misc_feature: SGI cDNA ID NO. 572891
  misc_feature: Elevated expression when VOC is produced
  misc_feature: Encodes the peptide sequence at SEQ ID NO 37157
atgccgctgacgaccttcgtcgctgccctcgggctatttgcgcctgcaagcgctctgctgcgattcccttgctcgcagttgacggttcaacgtctagatccgcttgtgaacccggggcagaatccgtcggcgcatttgcatcaagttatcggaggcaattcattcaacgcgactatggatggcgccacgcacgatcttgcggctctctcaacttgcacaagctgtcaattttcggaggacttctcaaattattggaccgctgtgttgttctacagggcgaagaatggaacatttaagcgtgtgccgcagaaggctcaggacaactcgcagaaccagggtggcatgagaaggaagatggtgtactacatgaccgatgctctgtttgatactgcgcaaaagtctactgtgacagctttcaagcctggattccgcatgcttgtcggagactcgactttccggtctcgcaatgagtcgagagagttcagacagttgacttacacttgcatgaaagatgcgagtacgcgtgctccagagactgtgaacttccctaccacaccatgcccgttcggtatcatggcgaaccaccgcttcccaacatgctgggatggcaagaatctcgattctcctaaccatcaagaccacgtcgcgtacccggagagcggtaccttcgagtccggcggtccatgtcctgctactcatcccgtcaagattcctcagattctgctcgagacagtctgggacacaaagcaattcaacagcatcgatgcttcggatttcgcaaacggcaatcaaccattcgtgtggtcaagtggtgacgcaaccgggttctccgaccacgctgattacgttttcggctggaagggcgatgctcttcagaaggcaatggatggacatacttacgtctctgcgccgatgctcaagagccaagcagttactgcacagaaccagtgcaaggtccaggatatggtgaaggaacccattgatggctggttgaaggagctgccaggcgcaaatcccgtaatgagacgtgaagcgagagaattcacagcataa

SEQ ID NO: 37157 - protein, 350 aa, Muscodor strobelii
  misc_feature: SGI Peptide ID NO. 572891
  misc_feature (33)..(286): Pfam Id: PF09362 Pfam Desc: Domain of function (DUF1996)
  misc_feature (1)..(341): NCBI GI: 116182716 Blast Desc: CHGG_01986 [Chaetomium globosum CBS 148.51] gi|88186283|gb|EAQ93751.1| CHGG_01986 [Chaetomium globosum CBS 148.51]
  misc_feature (3)..(340): NCBI GI: 145604344 Blast Desc: MGG_08511 [Magnaporthe grisea 70-15] gi|145012353|gb|EDJ97009.1| MGG_08511 [Magnaporthe grisea 70-15]
  misc_feature (3)..(340): NCBI GI: 189206938 Blast Desc: conserved [Pyrenophora tritici-repentis Pt-1C-BFP] gi|187975896|gb|EDU42522.1| conserved [Pyrenophora tritici-repentis Pt-1C-BFP]
  misc_feature (7)..(346): NCBI GI: 18376214 Blast Desc: conserved [Neurospora crassa]
  misc_feature (6)..(337): NCBI GI: 116194852 Blast Desc: CHGG_04024 [Chaetomium globosum CBS 148.51] gi|88179937|gb|EAQ87405.1| CHGG_04024 [Chaetomium globosum CBS 148.51]
  misc_feature (16)..(337): NCBI GI: 171693085 Blast Desc: protein product [Podospora anserina] gi|170946491|emb|CAP73292.1| protein product [Podospora anserina]
  misc_feature (6)..(350): NCBI GI: 189200126 Blast Desc: conserved [Pyrenophora tritici-repentis Pt-1C-BFP] gi|187983499|gb|EDU48987.1| conserved [Pyrenophora tritici-repentis Pt-1C-BFP]
  misc_feature (18)..(337): NCBI GI: 116208360 Blast Desc: CHGG_03473 [Chaetomium globosum CBS 148.51] gi|88184070|gb|EAQ91538.1| CHGG_03473 [Chaetomium globosum CBS 148.51]
  misc_feature (21)..(329): NCBI GI: 171692657 Blast Desc: protein product [Podospora anserina] gi|170946277|emb|CAP73078.1| protein product [Podospora anserina]
  misc_feature (18)..(336): NCBI GI: 171685434 Blast Desc: protein product [Podospora anserina] gi|170942678|emb|CAP68330.1| protein product [Podospora anserina]
  misc_feature: Useful for introducing or modulating the production of volatile compounds
MPLTTFVAALGLFAPASALLRFPCSQLTVQRLDPLVNPGQNPSAHLHQVIGGNSFNATMDGATHDLAALSTCTSCQFSEDFSNYWTAVLFYRAKNGTFKRVPQKAQDNSQNQGGMRRKMVYYMTDALFDTAQKSTVTAFKPGFRMLVGDSTFRSRNESREFRQLTYTCMKDASTRAPETVNFPTTPCPFGIMANHRFPTCWDGKNLDSPNHQDHVAYPESGTFESGGPCPATHPVKIPQILLETVWDTKQFNSIDASDFANGNQPFVWSSGDATGFSDHADYVFGWKGDALQKAMDGHTYVSAPMLKSQAVTAQNQCKVQDMVKEPIDGWLKELPGANPVMRREAREFTA

SEQ ID NO: 37158 - DNA, 1304 bp, Muscodor strobelii
  misc_feature: SGI cDNA ID NO. 572892
  misc_feature: Elevated expression when VOC is produced
  misc_feature: Encodes the peptide sequence at SEQ ID NO 37159
atggcaagccaggatgccagcgcaggccatcatcatgagggcgcacccccggtaacaactgtggttgccgacggcgatatgccggatcacctcgccgagatgacggaagacgaggccgcattggcggctcttggttataagcaagagttcaagcgcgaattctcattctggacgagcttcgctgtaagctttgccgttatgggactgctccccagtatcgctactacgatgtggtacggcatagcatatgctggacctgctgccaatacatggggctggctcgtgtcggtaattttcattatttgcattgcactctcaatggcagagctggcaagcagtatgccaacatctggtggactgtactatgctgcggccgtgctcgcgggacctaaatggggccctttggccgcgtggatcacaggatggagcaactggttcgtgcaagtgacgggagcgcctagtgttaactacggaggagcgtcgatgattctcgcggcagcatctatcaccaacccaggctatgtgcctacgacatatcaaacgttccttttaaccgtgttcctcatgctcgtccacggcgtaattagtagcatgccgacgctatgggtcgctaggttcaattccgtcggcaccactatcaatctactcgctttgttcatcacgattatcattatcccagcgacaacaaacctcgagcccaaattccagcccagcagtgtggcgtggggcgttcagaacttcactgactggcccgatggagtggccgttctcatgtcgtttttggcgatctgttggacaatgagcggctacgatgccccgttccatttggcagaagaatgttcgaatgcttcggttgcttctccgcgagctattgttatgactgctctcacgggatcagttctgggcttcatactgaacacattgattgcgtatactatcactgacatcgacgcggtgatcaacacggagctcggtcaaccgtgggcagcatacctagttcaggtactgcctcagaacgctgcacttgctgtgctcgcgttgacaattatttgtgccttctatatgggtcaaggctgtatggtcgcagcatcgcgtgtctgctttgcttatgcgcgagacgattgtttcggagcactgagcaagccacttgcacgggtgaaccgtcacacgctcactcccgtcaatgccgtatggttcaataacatcgtgggtatcctactattattactgatcttcggcggtgctgccatcgatgctatcttcagtatcggagcacttgctgccttcatcgcattctccattcc

SEQ ID NO: 37159 - protein, 434 aa, Muscodor strobelii
  misc_feature: SGI Peptide ID NO. 572892
  misc_feature (3)..(434): NCBI GI: 154303938 Blast Desc: BC1G_08853 [Botryotinia fuckeliana B05.10] gi|150854437|gb|EDN29629.1| BC1G_08853 [Botryotinia fuckeliana B05.10]
  misc_feature (1)..(434): NCBI GI: 240104774 Blast Desc: amino acid permease, [Coccidioides posadasii C735 delta SOWgp]
  misc_feature (1)..(434): NCBI GI: 119178145 Blast Desc: CIMG_07938 [Coccidioides immitis RS]
  misc_feature (1)..(434): NCBI GI: 212543701 Blast Desc: amino acid permease [Penicillium marneffei ATCC 18224] gi|210066912|gb|EEA21005.1| amino acid permease [Penicillium marneffei ATCC 18224]
  misc_feature (9)..(434): NCBI GI: 67539596 Blast Desc: AN5968.2 [Aspergillus nidulans FGSC A4] gi|40738527|gb|EAA57717.1| AN5968.2 [Aspergillus nidulans FGSC A4] gi|259479851|tpe|CBF70453.1| TPA: amino acid transporter FGSC
  misc_feature (17)..(434): NCBI GI: 121715488 Blast Desc: amino acid permease [Aspergillus clavatus NRRL 1] gi|119403510|gb|EAW13927.1| amino acid permease [Aspergillus clavatus NRRL 1]
  misc_feature (3)..(434): NCBI GI: 242787498 Blast Desc: amino acid permease [Talaromyces stipitatus ATCC 10500] gi|218721167|gb|EED20586.1| amino acid permease [Talaromyces stipitatus ATCC 10500]
  misc_feature (17)..(434): NCBI GI: 71001416 Blast Desc: amino acid permease [Aspergillus fumigatus Af293] gi|66853027|gb|EAL93351.1| amino acid permease [Aspergillus fumigatus Af293]
  misc_feature (17)..(434): NCBI GI: 159129462 Blast Desc: amino acid permease [Aspergillus fumigatus A1163]
  misc_feature (17)..(434): NCBI GI: 119481013 Blast Desc: amino acid permease [Neosartorya fischeri NRRL 181] gi|119408689|gb|EAW18638.1| amino acid permease [Neosartorya fischeri NRRL 181]
  misc_feature: Useful for introducing or modulating the production of volatile compounds
MASQDASAGHHHEGAPPVTTVVADGDMPDHLAEMTEDEAALAALGYKQEFKREFSFWTSFAVSFAVMGLLPSIATTMWYGIAYAGPAANTWGWLVSVIFIICIALSMAELASSMPTSGGLYYAAAVLAGPKWGPLAAWITGWSNWFVQVTGAPSVNYGGASMILAAASITNPGYVPTTYQTFLLTVFLMLVHGVISSMPTLWVARFNSVGTTINLLALFITIIIIPATTNLEPKFQPSSVAWGVQNFTDWPDGVAVLMSFLAICWTMSGYDAPFHLAEECSNASVASPRAIVMTALTGSVLGFILNTLIAYTITDIDAVINTELGQPWAAYLVQVLPQNAALAVLALTIICAFYMGQGCMVAASRVCFAYARDDCFGALSKPLARVNRHTLTPVNAVWFNNIVGILLLLLIFGGAAIDAIFSIGALAAFIAFSI

SEQ ID NO: 37160 - DNA, 2137 bp, Muscodor strobelii
  misc_feature: SGI EST ID NO. CUFF.88856.0
  misc_feature: Variant of the nucleotide sequence at SEQ ID NO 37158
catcatatcggcaaccccactcggcatgaagatgaatatgcctctcttttgcgaaatgacgtcgataaagatctgatacagccgttaacgtacctatctctaatgacatgcgttgaatgaatggcttttctgatgagtgagtatgtctcccatgtactactaataacagagacaggcagatcgccagaaagcaagacacgcgagcaatctgtccgaagatgccttgtcgaggacgccaagtgatatgctgagtgcaatatggcggcgccccacaaccaaccagaaccggggtgataggtcgatagggatcgggacggccgttctgcatgcagtgctctgggagtgatgagcaccaaatgagtgtacccccggccgactccaagaccagctccagattcggtacagtaggatcgacgcgcagcgcatgtgggaaagctctgcatagataccgtaggattcactaatgtggaatatgtatacttatggtgtcgggggctcccgctccaactgtaatgcgacatcattctatcctcaattgaaaaatgtgaagtgaactgatagaaaatcattagtttgaactcatcgtccaccgttgggattgagtttgccgccggttcagcctccctgcgctatcttaccttgctgggtaatttaacttgtacattgcttacgattcacgtgtctgtactagccatatttctcgagcctcgacaggccgctgttcattgagagatcactggttgggcgacaacatcgacagtaggcgatggcaagccaggatgccagcgcaggccatcatcatgagggcgcacccccggtaacaactgtggttgccgacggcgatatgccggatcacctcgccgagatgacggaagacgaggccgcattggcggctcttggttataagcaagagttcaagcgcgaattctcattctggacgagcttcgctgtaagctttgccgttatgggactgctccccagtatcgctactacgatgtggtacggcatagcatatgctggacctgctgccaatacatggggctggctcgtgtcggtaattttcattatttgcattgcactctcaatggcagagctggcaagcagtatgccaacatctggtggactgtactatgctgcggccgtgctcgcgggacctaaatggggccctttggccgcgtggatcacaggatggagcaactggttcgtgcaagtgacgggagcgcctagtgttaactacggaggaggtgagtgagatgctgattagacgcatgagtgtagcgtgggatgcactgggtatgaactaatcagtctcaaagcgtcgatgattctcgcggcagcatctatcaccaacccaggctatgtgcctacgacatatcaaacgttccttttaaccgtgttcctcatgctcgtccacggcgtaattagtagcatgccgacgctatgggtcgctaggttcaattccgtcggcaccactatcaatctactcgctttgttcatcacgattatcattatcccagcgacaacaaacctcgagcccaaattccagcccagcagtgtggcgtggggcgttcagaacttcactgactggcccgatggagtggccgttctcatgtcgtttttggcgatctgttggacaatgagcggctacgatgccccgttccatttggcagaagaatgttcgaatgcttcggttgcttctccgcgagctattgttatgactgctctcacgggatcagttctgggcttcatactgaacacattgattgcgtatactatcactgacatcgacgcggtgatcaacacggagctcggtcaaccgtgggcagcatacctagttcaggtactgcctcagaacgctgcacttgctgtgctcgcgttgacaattatttgtgccttctatatgggtcaaggctgtatggtcgcagcatcgcgtgtctgctttgcttatgcgcgagacgattgtttcggagcactgagcaagccacttgcacgggtgaaccgtcacacgctcactcccgtcaatgccgtatggttcaataacatcgtgggtatcctactattattactgatcttcggcggtgctgccatcgatgctatcttcagtatcggagcacttgctgccttcatcgcattctcc

SEQ ID NO: 37161 - DNA, 1665 bp, Muscodor strobelii
  misc_feature: SGI cDNA ID NO. 572893
  misc_feature: Encodes the peptide sequence at SEQ ID NO 37162
atgttcgagagtcccacgtcgacgcttgacgaggtcgccaaaatgcaggttttcggtctcttagtgctgctagcgctagcctatgtcatcgtcgtctacctgtacagaatatccttccatcctctcgctaaagtccctggacccttcctgtcaagaatatcaggctttcctgccttctactatactttgaagaaggatcgccatatctggctttggaggcttcatcagacatatggccctgttgttcgcgtcgcaccaaattcactggttttcaacacaccggacgcatatcaggcgatatacggcagtaagacagagacccggaagggcgaatattacaagacgttccttccagaaccggcagctgcaacagcttggaactctgtcgatagagcgacacacatgcgcaaaagacaggtgcttagtaacacgttttcggatagagcattacgctctgccgagcccttcattcatgataatgtcgaccgatggtgcgatctgctagcacgggaggtcgatcgaggcaacgcttggtctaactcgttgaacatgacggattgggtcacgtatcttgtcttcgatatcctcggagacttgtgctttggtcgatgcttcaacatgaaggaacctgatagtggcttgcgatacgttcccacattgatgacatcgttcatagagataatgcatccgatcgctctctcgccgttcgtgagtacgtgggtgtatctgaagcctcggggcctcgacaaagtcttgtcgatcaccgcgccgccagcgctcaagaattgggagaccttcgtacagcgatgcttctcggaacgagcgcaagtggaagaggcatcctatcgtttaagttctaagatgcatttgtccttatctactgtccgtcaggatttcttccattacctcttcaaagcacttgatccccatactggtcgtccagcctacagtaaagcggagcttctaggcgaaacaggaaatctcatcgtagcaggtggagacacaacgtcaaccgccatctccgcagcgctattctatctcgtccataacccttcaatacagacccgcctcgccgccgagatcatttcggtttttagcagctttgacgagattagaacaaccagcagaaagctctacgcgtgccactacctccgcgcgttcacacaggaggtgctacgaatgagtcctcccgtgcccgcagatcttccccgcgaagtccaagacggtccactgttcatcaatggcttatgcattccgcccgggacaacggtcggcactgctacatattgcatgcatcacaatagcatattctacgacaacccatttaccttcaatccgacacgatggatcgttaatgagaatgacaagaccggctcctcggcggcaaaagtagcaagggctgagagctgcttttctgcatattccgccggatccaggggctgccttggcaaaaacctagcttatctagaaatgtacatcgtcattgctaagattctgtatcgatttgagatacaagcggatgatggtgcaaataatctcggcgggggcagccccgatgcaggaaatggccgtcaggtcgtcggccaataccagctctacgacattttcgtcgcggctcgcgatggacccactataaagttaaggcatagggttcgtaagctctga

SEQ ID NO: 37162 - protein, 554 aa, Muscodor strobelii
  misc_feature: SGI Peptide ID NO. 572893
  misc_feature (53)..(533): Pfam Id: PF00067 Pfam Desc: Cytochrome P450
  misc_feature (316)..(509): Pfam Id: PF00067 Pfam Desc: Cytochrome P450
  misc_feature (130)..(211): Pfam Id: PF00067 Pfam Desc: Cytochrome P450
  misc_feature (34)..(552): NCBI GI: 256727731 Blast Desc: NECHADRAFT_76848 [Nectria haematococca mpVI 77-13-4]
  misc_feature (11)..(550): NCBI GI: 189189070 Blast Desc: cytochrome P450 67 [Pyrenophora tritici-repentis Pt-1C-BFP] gi|187972480|gb|EDU39979.1| cytochrome P450 67 [Pyrenophora tritici-repentis Pt-1C-BFP]
  misc_feature (79)..(550): NCBI GI: 189204718 Blast Desc: cytochrome P450 67 [Pyrenophora tritici-repentis Pt-1C-BFP] gi|187985793|gb|EDU51281.1| cytochrome P450 67 [Pyrenophora tritici-repentis Pt-1C-BFP]
  misc_feature (1)..(552): NCBI GI: 154313085 Blast Desc: BC1G_05544 [Botryotinia fuckeliana B05.10] gi|150849629|gb|EDN24822.1| BC1G_05544 [Botryotinia fuckeliana B05.10]
  misc_feature (20)..(551): NCBI GI: 119483816 Blast Desc: benzoate 4-monooxygenase cytochrome P450 [Neosartorya fischeri NRRL 181] gi|119409967|gb|EAW19914.1| benzoate 4-monooxygenase cytochrome P450 [Neosartorya fischeri NRRL 181]
  misc_feature (12)..(550): NCBI GI: 85092131 Blast Desc: NCU06895 [Neurospora crassa OR74A] gi|28920645|gb|EAA30006.1| conserved [Neurospora crassa OR74A]
  misc_feature (17)..(550): NCBI GI: 169603764 Blast Desc: SNOG_04890 [Phaeosphaeria nodorum SN15] gi|111066161|gb|EAT87281.1| SNOG_04890 [Phaeosphaeria nodorum SN15]
  misc_feature (18)..(550): NCBI GI: 145608110 Blast Desc: MGG_03375 [Magnaporthe grisea 70-15] gi|145015610|gb|EDK00100.1| MGG_03375 [Magnaporthe grisea 70-15]
  misc_feature (28)..(550): NCBI GI: 171678814 Blast Desc: protein product [Podospora anserina] gi|170937477|emb|CAP62135.1| protein product [Podospora anserina]
  misc_feature (28)..(548): NCBI GI: 46123381 Blast Desc: FG06068.1 [Gibberella zeae PH-1]
  misc_feature (42)..(507): SWISSPROT Homolog: EC 1.14.13.12 Benzoate 4-monooxygenase
MFESPTSTLDEVAKMQVFGLLVLLALAYVIVVYLYRISFHPLAKVPGPFLSRISGFPAFYYTLKKDRHIWLWRLHQTYGPVVRVAPNSLVFNTPDAYQAIYGSKTETRKGEYYKTFLPEPAAATAWNSVDRATHMRKRQVLSNTFSDRALRSAEPFIHDNVDRWCDLLAREVDRGNAWSNSLNMTDWVTYLVFDILGDLCFGRCFNMKEPDSGLRYVPTLMTSFIEIMHPIALSPFVSTWVYLKPRGLDKVLSITAPPALKNWETFVQRCFSERAQVEEASYRLSSKMHLSLSTVRQDFFHYLFKALDPHTGRPAYSKAELLGETGNLIVAGGDTTSTAISAALFYLVHNPSIQTRLAAEIISVFSSFDEIRTTSRKLYACHYLRAFTQEVLRMSPPVPADLPREVQDGPLFINGLCIPPGTTVGTATYCMHHNSIFYDNPFTFNPTRWIVNENDKTGSSAAKVARAESCFSAYSAGSRGCLGKNLAYLEMYIVIAKILYRFEIQADDGANNLGGGSPDAGNGRQVVGQYQLYDIFVAARDGPTIKLRHRVRKL

SEQ ID NO: 37163 - DNA, 1447 bp, Muscodor strobelii
  misc_feature: SGI EST ID NO. CUFF.88847.0
  misc_feature: Variant of the nucleotide sequence at SEQ ID NO 37161
gccgggtctgttacctcacccagttcatgtgggagacggggcgagacagatcgctaaaatccgacgaagtggtactgtccagtctgatttgccgatgccatgttacgggggcaagccgggagacccttatatccggccgtcaatttgcgacctcatacattgattaccgatcttgttgactgcactccatcgaatgccaattccgagactctttgccaacattgcttgtagctacttgcacgtaaacagcatctatcaagtgtcatcgtacctgaaatccgacgttgggcccctgcattaggccgaaatcttttgttggcgctttgaccaaggcgaggagcaccctggcatcagccctggttcagcttcaatacctagacccgcgaaagatgaaggatgctgtaccctgctcgcgacaggaatgtgggatcacttttacaatcattgtcaccagcggtgtgatagttcgggactatttactattgaactaagtaatcgtcaatcgtcccttacatgaatcacagagctatgcaagccactcggatgtttgtcgttgagacaaacatggagagcgcgggttgggaatatcttcacgacatccacatcatcctagccaggggcaagattgcgcgatgcgacgctgtcaggctaggactcgaggcaaggtcatagcgaatcaatatgtggacgcagatacacgtcagagcgcacttccgcgtgggatgatacgacttcataaaccgagatgatcgcaatcgggctcgaattcgaagtcactcagatcgtcccgcccgatgttcgagagtcccacgtcgacgcttgacgaggtcgccaaaatgcaggttttcggtctcttagtgctgctagcgctagcctatgtcatcgtcgtctacctgtacagaatatccttccatcctctcgctaaagtccctggacccttcctgtcaagaatatcaggctttcctgccttctactatactttgaagaaggatcgccatatctggctttggaggcttcatcagacatatggccctgttgttcgcgtcgcaccaaattcactggttttcaacacaccggacgcatatcaggcgatatacggcagtaagacagagacccggaagggcgaatattacaagacgttccttccagaaccggcagctgcaacagcttggaactctgtcgatagagcgacacacatgcgcaaaagacaggtgcttagtaacacgttttcggatagagcattacgctctgccgagcccttcattcatgataatgtcgaccgatggtgcgatctgctagcacgggaggtcgatcgaggcaacgcttggtctaactcgttgaacatgacggattgggtcacgtatcttgtcttcgatatcctcggagacttgtgctttggtcgatgcttcaacatgaaggaacctgatagtggcttgcgatacgttcc

SEQ ID NO: 37164 - DNA, 1506 bp, Muscodor strobelii
  misc_feature: SGI cDNA ID NO. 572894
  misc_feature: Encodes the peptide sequence at SEQ ID NO 37165
atggaatggattgacctaagtcatgctcctcttggcactcgtgaaactcgcgccaaggttcgttcgcatgtgacaaaggcatatggccctgcaacgaaaaagcccgtagctcggcggagacggaatgctcggcagccacctgttttcgagaatacagatcgcaatgtgtataacatctcaaacaccgtatccaaaacgggtgtgctctctcgcacttccgatcggaggaaggtcttaacatcacccaaatcattcgcccgaaatgacgacggcttgacgagacttcgttgtagtccacctatgccgctaagcggcatcgagctattagctgctgagtcgggcatgcacatactcgacctctcagccttgaccgtgatgcagtgcggctggacagcatgcgccatcctggccagcggccctgatgtcgtccacgggctcgtcgctcttcggcagaaatcatcctatctgtactctgttgcgcagagatatggttcaagtccactacttgatacagcgctacgttgcgttgcgactagggcgaagcgcgtattgttctcccatcatcacaccatcgatagttccgaagtacgacattatgtcactgcgcttcagactttacaaatcgctgtcgataacacgcatgagagtcgacgacctgaggtgttgggtgctattaacctgttgaacttgtatgagatccttgactacgcgcattgtcaagaaacatggtctctccacacgcttggagctgcacgactgattcaagcgcgaggcccttcaagctttgtttcggatttcgacatccgactcatgctctcgtctatcaccgccatcactcacgagcatatgaagcagaacgtgacatcatttttcgaggagagctcttggcagcagatgttccaatcattcgtgatcgaagatggtgtaatttcgtcgagaagcgctctgagtatatctttaatctgtctcatggccaaagtaccgcggctgattagggacgtacgtcttgtctttgataatagcaaacttctcaatcattcgaagttggcacagttaagacagagattgaggaacttccgctgcgaacttttgcactggtacgccgaatacgcctccacgacactaatatcaaccccggtggcaacccttgacgatatccgcatggatcttcttgcgagttactactgcctcgtcattagctgttcacggttgctcagttccatatctttgagctctttggatgttctagaggacgaggcagttgctcagtcccacgagttggtcaaactcgagtccgtggtttcatcccgaaacaatcttgccgcgttttatattgatccgaagatggttatcgcaaaggccactctggcaacctccgacagctggcggcaaagctcgaatagctcggaccaggtcattgaaaatgcaaagttcgcggcctggatgtcaatggtactttgcaccgccgggatcaatcccccgattgacgctgcggcatacgcataa

SEQ ID NO: 37165 - protein, 501 aa, Muscodor strobelii
  misc_feature: SGI Peptide ID NO. 572894
  misc_feature (162)..(372): NCBI GI: 156054402 Blast Desc: SS1G_06049 [Sclerotinia sclerotiorum 1980] gi|154703829|gb|EDO03568.1| SS1G_06049 [Sclerotinia sclerotiorum 1980]
  misc_feature (88)..(462): NCBI GI: 67527863 Blast Desc: AN4181.2 [Aspergillus nidulans FGSC A4] gi|40740090|gb|EAA59280.1| [Aspergillus nidulans FGSC A4] gi|259481220|tpe|CBF74542.1| TPA: conserved [Aspergillus nidulans
  misc_feature (155)..(379): NCBI GI: 115400009 Blast Desc: [Aspergillus terreus NIH2624] gi|114191259|gb|EAU32959.1| [Aspergillus terreus NIH2624]
  misc_feature (145)..(368): NCBI GI: 119491369 Blast Desc: C6 zinc finger domain protein [Neosartorya fischeri NRRL 181] gi|119411399|gb|EAW21342.1| C6 zinc finger domain protein [Neosartorya fischeri NRRL 181]
  misc_feature (145)..(368): NCBI GI: 70999356 Blast Desc: AFUA_3G12240 [Aspergillus fumigatus Af293] gi|66852034|gb|EAL92359.1| AFUA_3G12240 [Aspergillus fumigatus Af293] gi|159127413|gb|EDP52528.1| AFUB_036940 [Aspergillus
  misc_feature (163)..(336): NCBI GI: 238487698 Blast Desc: conserved [Aspergillus flavus NRRL3357] gi|220699966|gb|EED56305.1| conserved [Aspergillus flavus NRRL3357]
  misc_feature (100)..(371): NCBI GI: 121712036 Blast Desc: C6 zinc finger domain protein [Aspergillus clavatus NRRL 1] gi|119401785|gb|EAW12207.1| C6 zinc finger domain protein [Aspergillus clavatus NRRL 1]
  misc_feature (196)..(299): NCBI GI: 238490444 Blast Desc: conserved [Aspergillus flavus NRRL3357] gi|220696872|gb|EED53213.1| conserved [Aspergillus flavus NRRL3357]
  misc_feature (153)..(371): NCBI GI: 146323207 Blast Desc: C6 finger domain protein [Aspergillus fumigatus Af293] gi|129556518|gb|EAL86552.2| C6 finger domain protein, [Aspergillus fumigatus Af293]
  misc_feature (153)..(371): NCBI GI: 159128270 Blast Desc: C6 finger domain protein, [Aspergillus fumigatus A1163]
MEWIDLSHAPLGTRETRAKVRSHVTKAYGPATKKPVARRRRNARQPPVFENTDRNVYNISNTVSKTGVLSRTSDRRKVLTSPKSFARNDDGLTRLRCSPPMPLSGIELLAAESGMHILDLSALTVMQCGWTACAILASGPDVVHGLVALRQKSSYLYSVAQRYGSSPLLDTALRCVATRAKRVLFSHHHTIDSSEVRHYVTALQTLQIAVDNTHESRRPEVLGAINLLNLYEILDYAHCQETWSLHTLGAARLIQARGPSSFVSDFDIRLMLSSITAITHEHMKQNVTSFFEESSWQQMFQSFVIEDGVISSRSALSISLICLMAKVPRLIRDVRLVFDNSKLLNHSKLAQLRQRLRNFRCELLHWYAEYASTTLISTPVATLDDIRMDLLASYYCLVISCSRLLSSISLSSLDVLEDEAVAQSHELVKLESVVSSRNNLAAFYIDPKMVIAKATLATSDSWRQSSNSSDQVIENAKFAAWMSMVLCTAGINPPIDAAAYA

SEQ ID NO: 37166 - DNA, 2732 bp, Muscodor strobelii
  misc_feature: SGI EST ID NO. CUFF.88905.0
  misc_feature: Variant of the nucleotide sequence at SEQ ID NO 37164
ttcatgaattgcgttcatttcactcaacactctctcctctcaacatcatcggaaacagaaattggaacaggccttttctccactcatgcacgcgatacaaccaagtcggaatggaatggattgacctaagtcatgctcctcttggcactcgtgaaactcgcgccaaggttcgttcgcatgtgacaaaggcatatggccctgcaacgaaaaagcccgtagctcggcggagacggaatgctcggcagccacctgttttcgagaatacagatcgcaatgtgtataacatctcaaacaccgtatccaaaacgggtgtgctctctcgcacttccgatcggaggaaggtcttaacatcacccaaatcattcgcccgaaatgacgacggcttgacgagacttcgttgtagtccacctatgccgctaagcggcatcgagctattagctgctgagtcgggcatgcacatactcgacctctcagccttgaccgtgatgcagtgcggctggacagcatgcgccatcctggccagcggccctgatgtcgtccacgggctcgtcgctcttcggcagaaatcatcctatctgtactctgttgcgcagagatatggttcaagtccactacttgatacagcgctacgttgcgttgcgactagggcgaagcgcgtattgttctcccatcatcacaccatcgatagttccgaagtacgacattatgtcactgcgcttcagactttacaaatcgctgtcgataacacgcatgagagtcgacgacctgaggtgttgggtgctattaacctgttgaacttgtatgagatccttgactacgcgcattgtcaagaaacatggtctctccacacgcttggagctgcacgactgattcaagcgcgaggcccttcaagctttgtttcggatttcgacatccgactcatgctctcgtctatcaccgccatcactcacgagcatatgaagcagaacgtgacatcatttttcgaggagagctcttggcagcagatgttccaatcattcgtgatcgaagatggtgtaatttcgtcgagaagcgctctgagtatatctttaatctgtctcatggccaaagtaccgcggctgattagggacgtacgtcttgtctttgataatagcaaacttctcaatcattcgaagttggcacagttaagacagagattgaggaacttccgctgcgaacttttgcactggtacgccgaatacgcctccacgacactaatatcaaccccggtggcaacccttgacgatatccgcatggatcttcttgcgagttactactgcctcgtcattagctgttcacggttgctcagttccatatctttgagctctttggatgttctagaggacgaggcagttgctcagtcccacgagttggtcaaactcgagtccgtggtttcatcccgaaacaatcttgccgcgttttatattgatccgaagatggttatcgcaaaggccactctggcaacctccgacagctggcggcaaagctcgaatagctcggaccaggtcattgaaaatgcaaagttcgcggcctggatgtcaatggtactttgcaccgccgggatcaatcccccgattgacgctgcggcatacgcataatcaaacatagatatagtcaactaccgagcgaggtatgttgaccactgatgttgtgtagcatacatctcatctacggatctccagctgaaacttggcaaagctgagatggcattgcagcgagcgatggtctttatagcgacgattcagatttgtacattcgtctatgaactaagcgcacacacattggttgaaatcagaaacggcgacactcgggcatgcgacactttgaaacgtaaccaccggattatcaccgaagacctcgctcttcgccatgatatcaaagtggtacgagtaaccatactggtttttaccgccaggatttgggcaccattgcgcattaccgttgttcggacaaagattggtgaccataacgatgattgattgtccgctgtcacctccgctgccacagccagagcaaggtgccgagcccgtggaggtaagctgatagcatgttccgcagccagaaccacaccacgagcctccagaagcatcgaaaatggcctgtggttatgtgtaattagacaaaactgcagctgtatagaaacccgaaccgccaagctgccaggcgtaggcaccagaacttgtgccgcatccgcatgctccctctaggccatcatagtagcgctatatgcatgagctgactatttcgtcacgagcgcgatatttgttgagcttaccgtagtagtggcagtaccactgagagccgaaaccccagctgccatggcaattccaccacacacgagaaacttcatgatgttggcttggttgatgatttgggtgccgctaaagaaggggatttcacttggcaatcgtgattggagacgaatttatatgactagatactcgcctcagctcagttctataatattcaaccccgggctcccgggatccataccgctctgaaataacggacatcataagattgttgaacgctgggagccggaacatccccccatgcagagactccactcattcgctcccttcattttagacacagagcgaccgactctgttcgcaggcatgtgactattccttgcactcagcgattttttcgccgtctggcttttagagaagacatctgggagtacttccgagatcaatacactttgatttttc

SEQ ID NO: 37167 - DNA, 513 bp, Muscodor strobelii
  misc_feature: SGI cDNA ID NO. 572895
  misc_feature: Encodes the peptide sequence at SEQ ID NO 37168
atgaagtttctcgtgtgtggtggaattgccatggcagctggggtttcggctctcagtggtactgccactactacgcgctactatgatggcctagagggagcatgcggatgcggcacaagttctggtgcctacgcctggcagcttggcggttcgggtttctatacagctgcagctagtcaggccattttcgatgcttctggaggctcgtggtgtggttctggctgcggaacatgctatcagcttacctccacgggctcggcaccttgctctggctgtggcagcggaggtgacagcggacaatcaatcatcgttatggtcaccaatctttgtccgaacaacggtaatgcgcaatggtgcccaaatcctggcggtaaaaaccagtatggttactcgtaccactttgatatcatggcgaagagcgaggtcttcggtgataatccggtggttacgtttcaaagtgtcgcatgcccgagtgtcgccgtttctgatttcaaccaatgtgtgtgcgcttag

SEQ ID NO: 37168 - protein, 170 aa, Muscodor strobelii
  misc_feature: SGI Peptide ID NO. 572895
  misc_feature (21)..(167): Pfam Id: PF02015 Pfam Desc: Glycosyl hydrolase family 45
  misc_feature (55)..(111): Pfam Id: PF03330 Pfam Desc: Rare lipoprotein A (RlpA)-like double-psi beta-barrel
  misc_feature (1)..(169): NCBI GI: 1170136 Blast Desc: GUN5_TRIRE RecName: Full=Endoglucanase-5; AltName: Full=Endoglucanase V; AltName: Full=Endo-1,4-beta-glucanase V; Short=EG V; AltName: Full=Cellulase V; Flags: Precursor V (EGV)
  misc_feature (1)..(169): NCBI GI: 33521684 Blast Desc: endoglucanase V [Trichoderma viride]
  misc_feature (22)..(169): NCBI GI: 194143489 Blast Desc: glycoside hydrolase 45 protein [Penicillium decumbens]
  misc_feature (26)..(169): NCBI GI: 212539808 Blast Desc: endoglucanase, [Penicillium marneffei ATCC 18224] gi|210067358|gb|EEA21450.1| endoglucanase, [Penicillium marneffei ATCC 18224]
  misc_feature (1)..(169): NCBI GI: 212541612 Blast Desc: endoglucanase-5 precursor, [Penicillium marneffei ATCC 18224] gi|210068260|gb|EEA22352.1| endoglucanase-5 precursor, [Penicillium marneffei ATCC 18224]
  misc_feature (50)..(169): NCBI GI: 242803608 Blast Desc: endoglucanase, [Talaromyces stipitatus ATCC 10500] gi|218717554|gb|EED16975.1| endoglucanase, [Talaromyces stipitatus ATCC 10500]
  misc_feature (16)..(169): NCBI GI: 242798241 Blast Desc: endoglucanase-5 precursor, [Talaromyces stipitatus ATCC 10500] gi|218716474|gb|EED15895.1| endoglucanase-5 precursor, [Talaromyces stipitatus ATCC 10500]
  misc_feature (51)..(169): NCBI GI: 159123395 Blast Desc: endoglucanase, [Aspergillus fumigatus A1163]
  misc_feature (51)..(169): NCBI GI: 70986694 Blast Desc: endoglucanase [Aspergillus fumigatus Af293] gi|66846467|gb|EAL86799.1| endoglucanase, [Aspergillus fumigatus Af293]
  misc_feature (48)..(169): NCBI GI: 119483194 Blast Desc: glycosyl hydrolase family 45 protein [Neosartorya fischeri NRRL 181] gi|119409780|gb|EAW19728.1| glycosyl hydrolase family 45 protein [Neosartorya fischeri NRRL 181]
  misc_feature (1)..(169): SWISSPROT Homolog: EC 3.2.1.4 Cellulase
MKFLVCGGIAMAAGVSALSGTATTTRYYDGLEGACGCGTSSGAYAWQLGGSGFYTAAASQAIFDASGGSWCGSGCGTCYQLTSTGSAPCSGCGSGGDSGQSIIVMVTNLCPNNGNAQWCPNPGGKNQYGYSYHFDIMAKSEVFGDNPVVTFQSVACPSVAVSDFNQCVCA

SEQ ID NO: 37169 - DNA, 1679 bp, Muscodor strobelii
  misc_feature: SGI EST ID NO. CUFF.88906.2
  misc_feature: Variant of the nucleotide sequence at SEQ ID NO 37167
ctcggaagtactcccagatgtcttctctaaaagccagacggcgaaaaaatcgctgagtgcaaggaatagtcacatgcctgcgaacagagtcggtcgctctgtgtctaaaatgaagggagcgaatgagtggagtctctgcatggggggatgttccggctcccagcgttcaacaatcttatgatgtccgttatttcagagcggtatggatcccgggagcccggggttgaatattatagaactgagctgaggcgagtatctagtcatataaattcgtctccaatcacgattgccaagtgaaatccccttctttagcggcacccaaatcatcaaccaagccaacatcatgaagtttctcgtgtgtggtggaattgccatggcagctggggtttcggctctcagtggtactgccactactacgcgctactatgatggcctagagggagcatgcggatgcggcacaagttctggtgcctacgcctggcagcttggcggttcgggtttctatacagctgcagctagtcaggccattttcgatgcttctggaggctcgtggtgtggttctggctgcggaacatgctatcagcttacctccacgggctcggcaccttgctctggctgtggcagcggaggtgacagcggacaatcaatcatcgttatggtcaccaatctttgtccgaacaacggtaatgcgcaatggtgcccaaatcctggcggtaaaaaccagtatggttactcgtaccactttgatatcatggcgaagagcgaggtcttcggtgataatccggtggttacgtttcaaagtgtcgcatgcccgagtgtcgccgtttctgatttcaaccaatgtgtgtgcgcttagttcatagacgaatgtacaaatctgaatcgtcgctataaagaccatcgctcgctgcaatgccatctcagctttgccaagtttcagctggagatccgtagatgagatgtatgctacacaacatcagtggtcaacatacctcgctcggtagttgactatatctatgtttgattatgcgtatgccgcagcgtcaatcgggggattgatcccggcggtgcaaagtaccattgacatccaggccgcgaactttgcattttcaatgacctggtccgagctattcgagctttgccgccagctgtcggaggttgccagagtggcctttgcgataaccatcttcggatcaatataaaacgcggcaagattgtttcgggatgaaaccacggactcgagtttgaccaactcgtgggactgagcaactgcctcgtcctctagaacatccaaagagctcaaagatatggaactgagcaaccgtgaacagctaatgacgaggcagtagtaactcgcaagaagatccatgcggatatcgtcaagggttgccaccggggttgatattagtgtcgtggaggcgtattcggcgtaccagtgcaaaagttcgcagcggaagttcctcaatctctgtcttaactgtgccaacttcgaatgattgagaagtttgctattatcaaagacaagacgtacgtccctaatcagccgcggtactttggccatgagacagattaaagatatactcagagcgcttctcgacgaaattacaccatcttcgatcacgaatgattggaacatctgctgccaagagctctcctcgaaaaatgatgtcacgttctgc

SEQ ID NO: 37170 - DNA, 843 bp, Muscodor strobelii
  misc_feature: SGI cDNA ID NO. 572896
  misc_feature: Elevated expression when VOC is produced
  misc_feature: Encodes the peptide sequence at SEQ ID NO 37171
atgaagttctctgctattgtttcggggcttgccctcgccagctctgctgttgccgctcccccatgcaagcgtggcgctctccctaccaccactatcgcaggtgtcgaggttgttgacactcccattgtccgcgccgtccgtgatttcatcgagacctactatgccgagtaccagccctacctcacaaaccacttgtaccgaacatggctcctcggagctgctgccatcaacaacaacgccacgctgaaggccgagttggatcttgaggtccacgccgtcggcaccatgctgcacgatatgggttgggacatcaagccaaactccccctacgtcaccggcgagtatgttttcgaggtcgactccggccgctttgccgtggagtggattaaggactggactgccgccaacggtggtgccgaggagtgggatgaggtccgtctccagaaggtcaacttgggtatcatgctccagacctctcccggctacacggccttcagcttcctcgactctgcctggatcgccgaatctgttgcattcgagttcccccagcccgagtctcctctcattggctctgagaactacgacaacatctgggctgcctactccaacagcaccctcttccgtggcaccaacttcaccttcaccaacatggccgtctacaagggacctaccgtctacaacaacttcatctcctctttcggtgaggcctacattcccggctacagcaccaagggctacactttcttcgatctcatccagggtggtgtccaaggcgagattgcccagtaccccgacgttgagttcgtccagaagattcctcccggaggtcccaaccctctctaa

SEQ ID NO: 37171 - protein, 280 aa, Muscodor strobelii
  misc_feature: SGI Peptide ID NO. 572896
  misc_feature (26)..(250): NCBI GI: 256721693 Blast Desc: NECHADRAFT_44823 [Nectria haematococca mpVI 77-13-4]
  misc_feature (4)..(250): NCBI GI: 116200323 Blast Desc: CHGG_08317 [Chaetomium globosum CBS 148.51] gi|88179596|gb|EAQ87064.1| CHGG_08317 [Chaetomium globosum CBS 148.51]
  misc_feature (32)..(254): NCBI GI: 116202473 Blast Desc: CHGG_09121 [Chaetomium globosum CBS 148.51] gi|88177639|gb|EAQ85107.1| CHGG_09121 [Chaetomium globosum CBS 148.51]
  misc_feature (28)..(256): NCBI GI: 171681192 Blast Desc: protein product [Podospora anserina] gi|170940554|emb|CAP65782.1| protein product [Podospora anserina]
  misc_feature (24)..(250): NCBI GI: 171693093 Blast Desc: protein product [Podospora anserina] gi|170946495|emb|CAP73296.1| protein product [Podospora anserina]
  misc_feature (31)..(160): NCBI GI: 116204295 Blast Desc: CHGG_10031 [Chaetomium globosum CBS 148.51] gi|88176159|gb|EAQ83627.1| CHGG_10031 [Chaetomium globosum CBS 148.51]
  misc_feature (29)..(242): NCBI GI: 13471098 Blast Desc: mlr0982 [Mesorhizobium loti MAFF303099] gi|14021842|dbj|BAB48453.1| mlr0982 [Mesorhizobium loti MAFF303099]
  misc_feature (29)..(235): NCBI GI: 242795716 Blast Desc: conserved [Talaromyces stipitatus ATCC 10500] gi|218719237|gb|EED18657.1| conserved [Talaromyces stipitatus ATCC 10500]
  misc_feature (26)..(242): NCBI GI: 260460254 Blast Desc: conserved [Mesorhizobium opportunistum WSM2075] gi|259033899|gb|EEW35158.1| conserved [Mesorhizobium opportunistum WSM2075]
  misc_feature (72)..(167): NCBI GI: 116178824 Blast Desc: CHGG_00040 [Chaetomium globosum CBS 148.51] gi|88184337|gb|EAQ91805.1| CHGG_00040 [Chaetomium globosum CBS 148.51]
  misc_feature: Useful for introducing or modulating the production of volatile compounds
MKFSAIVSGLALASSAVAAPPCKRGALPTTTIAGVEVVDTPIVRAVRDFIETYYAEYQPYLTNHLYRTWLLGAAAINNNATLKAELDLEVHAVGTMLHDMGWDIKPNSPYVTGEYVFEVDSGRFAVEWIKDWTAANGGAEEWDEVRLQKVNLGIMLQTSPGYTAFSFLDSAWIAESVAFEFPQPESPLIGSENYDNIWAAYSNSTLFRGTNFTFTNMAVYKGPTVYNNFISSFGEAYIPGYSTKGYTFFDLIQGGVQGEIAQYPDVEFVQKIPPGGPNPL

SEQ ID NO: 37172 - DNA, 3665 bp, Muscodor strobelii
  misc_feature: SGI EST ID NO. CUFF.90537.0
  misc_feature: Variant of the nucleotide sequence at SEQ ID NO 37170
cttcgactttaattcctgactaagatgggcaggcaaggctataccacagttgcgctttttcttctctagaagtgtgggctgtaagcggcggatcatcggtaccttgccccaatgtggaagatcagcatgctgtgttaatcttacttggtacgaagacctgaaagttacgaatgtagcatcttcatgcggtaggatctttgcatgtaagcgatggcttggagcggtacctcacgtcaaattgacagaaatggaggaattcgatatataaagttgtatttcctttgacatctagtacgtgtttgctttggatcttcactgctcttccattctcttcctcatcacactccttgaaaatgaagttctctgctattgtttcggggcttgccctcgccagctctgctgttgccgctcccccatgcaagcgtggcgctctccctaccaccactatcgcaggtgtcgaggttgttgacactcccattgtccgcgccgtccgtgatttcatcgagacctactatgccgagtaccagccctacctcacaaaccacttgtaccgaacatggctcctcggagctgctgccatcaacaacaacgccacgctgaaggccgagttggatcttgaggtccacgccgtcggcaccatgctgcacgatatgggttgggacatcaagccaaactccccctacgtcaccggcgagtatgttttcgaggtcgactccggccgctttgccgtggagtggattaaggactggactgccgccaacggtggtgccgaggagtgggatgaggtccgtctccagaaggtcaacttgggtatcatgctccagacctctcccggctacacggccttcagcttcctcgactctgcctggatcgccgaatctgttgcattcgagttcccccagcccgagtctcctctcattggctctgagaactacgacaacatctgggctgcctactccaacagcaccctcttccgtggcaccaacttcaccttcaccaacatggccgtctacaagggacctaccgtctacaacaacttcatctcctctttcggtgaggcctacattcccggctacagcaccaagggctacactttcttcgatctcatccagggtggtgtccaaggcgagattgcccagtaccccgacgttgagttcgtccagaagattcctcccggaggtcccaaccctctctaaatctagtgcatttaatccaaaggtcctcttcttgtatctagcattacttagcatggagtctttaaaatagagctaaaagcagtcatcttacgattataagaccggttttcattttccatgcgattcgtctcctgttatgttctggtcacccaaatggcttcgtactattaatgttctgattgttaatacgggcattgcaccgatgtactagtcagttggaatatgggggtgctaacatggcttacataggagtgaacatcgagttccttgtcttgatccattttttgtacctagcgacagagccttggtagcgagaatctcgttacaaccgcactttcctatcccttgatcgtattttgaatctgctttggggctgtacacttgagtcggctgccgagatgaaaagttatcacgaccgttatgtgataattttacgtcctatcgttatctccacgccatgatctctttaccctatcgggcgcttgagaagtcagttcatgaatcgaggacatacttgcgcttctctagtgcccaccttcctgcacctgaaacttgggcattcgcggttatgatcgcaaccaaataggggtccaatttccgattatcaatcgaaggtacaccgtttagctcgattctggttggtaaagcaaatggcttgttgctgtatacaactcaatgctgtgcgagacaccatgcaacaatcgcgttgaggccggatctatatcgaccccgagcctcgaaaaatttcatggagtattccattgcatctgattatgggggacgagtatgcggcgacagatgtcctccgcactagcagacccagtattttggccaaacttccaatgggagactctcttggcggctcggggaatcgatcaggatggctgcgtaacacgatttcaacagtatgccgagagatgccttccgcaatggacggtctgtgctgcagggcgttttgccgattgacccggatgaattacgacggtagctccccgcgcgatgctcatgctacgtaaaccagtgtcccaacatttgcacaaaattcctgttctcgttaacctcatcgtgggattgacaaatgcgtagctatgaatcaaaaagcacaggcagcacaggctgtacaggcctagtccgtgatcgctctactcacaacatcgacagcatatgtctttcttgacttcgctcctgctgcagtttatgactggctatagatgcatgctgagttcgaggatccttgccacaagatggtcgtgagcgatgcagatgaatgcgattcgtcaattaagaagcaacgggatgcagtccatctcgatgatctagcaaatgatgccacacgcggcacaatatctccaactcttgacatagatcttccaatcctcatacaaaactggtatccgaatgcgcatgctttaggatcccgaaagatgtccgatcacgtcatttacgtaagaattgaattgccgggtcgaaggatgtttgtgaagttgcggaccggctgggccaaggcaatgctttatataaagattctattgtcgaacatcccacttttgaggtgccatcaaggtactcttctacttcgtagtaagacaatattacacactaattcaacccctgaaaacctcattagcattatgcccttgtcaatccaccctctgatcgacaatggtataaccaaaggaagtccagatttctcaggaggttcgctccgttgccgctgcggaaacaatcctgttgagatagaactatctggcaacgtcgctcataaccacgcttgcgggtgctcgaaatgctggaagccacaaggggctctgttctctgttgttggcgttataccccgcgagcaagttaaaatcgtttcgaatggggacaaactcaagatcgtcgatccaaatgctgctatccagcggcacgcatgttccgaatgtggaactcacctctttggtgatattgagaaggaacaccctttcaaaccatttgccttcgtccacgttgagctgtccgatgaaaaggggtggcaggaacctcaatttgcagcattcgtttcttccatcattgagcagggcttcgatccgagcggcatgacagaggttcggcaaacgcttagtagccgtgggttggacagctatgattgtctgtcccctccgcttatggatgcaattgccacatggacagcacagcaagccggcaaataactgtttcaagagtaattaggctgtgtttactatcgaagagacatcaggtggcaatagtaacaattaaggttggatagctgcctcgctagatatttttaaccttttgtaggtaaatctaatttaattagttggcgcctatatacaagtttcctatgcagagcataatcatgacacgcaatgaagaagcggtgcatggatgggataccaggagtccgtaagccgcccacgtctaaagtttcattcaatgaccagtgcaagtccaaatgtgttcaatcac

SEQ ID NO: 37173 - DNA, 561 bp, Muscodor strobelii
  misc_feature: SGI cDNA ID NO. 572897
  misc_feature: Encodes the peptide sequence at SEQ ID NO 37174
atgcccttgtcaatccaccctctgatcgacaatggtataaccaaaggaagtccagatttctcaggaggttcgctccgttgccgctgcggaaacaatcctgttgagatagaactatctggcaacgtcgctcataaccacgcttgcgggtgctcgaaatgctggaagccacaaggggctctgttctctgttgttggcgttataccccgcgagcaagttaaaatcgtttcgaatggggacaaactcaagatcgtcgatccaaatgctgctatccagcggcacgcatgttccgaatgtggaactcacctctttggtgatattgagaaggaacaccctttcaaaccatttgccttcgtccacgttgagctgtccgatgaaaaggggtggcaggaacctcaatttgcagcattcgtttcttccatcattgagcagggcttcgatccgagcggcatgacagaggttcggcaaacgcttagtagccgtgggttggacagctatgattgtctgtcccctccgcttatggatgcaattgccacatggacagcacagcaagccggcaaataa

SEQ ID NO: 37174 - protein, 186 aa, Muscodor strobelii
  misc_feature: SGI Peptide ID NO. 572897
  misc_feature (46)..(132): Pfam Id: PF04828 Pfam Desc: Glutathione-dependent formaldehyde-activating enzyme
  misc_feature (1)..(184): NCBI GI: 256729152 Blast Desc: NECHADRAFT_69107 [Nectria haematococca mpVI 77-13-4]
  misc_feature (1)..(184): NCBI GI: 46138523 Blast Desc: FG10776.1 [Gibberella zeae PH-1]
  misc_feature (1)..(186): NCBI GI: 169777755 Blast Desc: [Aspergillus oryzae RIB40] gi|83772080|dbj|BAE62210.1| protein product [Aspergillus oryzae]
  misc_feature (1)..(186): NCBI GI: 238494976 Blast Desc: glutathione-dependent formaldehyde-activating enzyme, [Aspergillus flavus NRRL3357] gi|220695374|gb|EED51717.1| glutathione-dependent formaldehyde-activating enzyme, flavus
  misc_feature (5)..(186): NCBI GI: 115397069 Blast Desc: glutathione-dependent formaldehyde-activating enzyme [Aspergillus terreus NIH2624] gi|114192317|gb|EAU34017.1| glutathione-dependent formaldehyde-activating enzyme [Aspergillus
  misc_feature (1)..(186): NCBI GI: 212539686 Blast Desc: glutathione-dependent formaldehyde-activating enzyme, [Penicillium marneffei ATCC 18224] gi|210067297|gb|EEA21389.1| glutathione-dependent formaldehyde-activating enzyme, marneffei
  misc_feature (1)..(185): NCBI GI: 145231323 Blast Desc: An02g00080 [Aspergillus niger] gi|134056048|emb|CAK96223.1| protein product [Aspergillus niger]
  misc_feature (3)..(183): NCBI GI: 171677077 Blast Desc: protein product [Podospora anserina] gi|170936606|emb|CAP61265.1| protein product [Podospora anserina]
  misc_feature (1)..(186): NCBI GI: 189201387 Blast Desc: glutathione-dependent formaldehyde-activating enzyme [Pyrenophora tritici-repentis Pt-1C-BFP] gi|187984129|gb|EDU49617.1| glutathione-dependent enzyme
  misc_feature (1)..(186): NCBI GI: 169597625 Blast Desc: SNOG_01600 [Phaeosphaeria nodorum SN15] gi|111070129|gb|EAT91249.1| SNOG_01600 [Phaeosphaeria nodorum SN15]
  misc_feature (3)..(185): SWISSPROT Homolog: EC 4.4.1.22 S-(hydroxymethyl)glutathione synthase
MPLSIHPLIDNGITKGSPDFSGGSLRCRCGNNPVEIELSGNVAHNHACGCSKCWKPQGALFSVVGVIPREQVKIVSNGDKLKIVDPNAAIQRHACSECGTHLFGDIEKEHPFKPFAFVHVELSDEKGWQEPQFAAFVSSIIEQGFDPSGMTEVRQTLSSRGLDSYDCLSPPLMDAIATWTAQQAGK

SEQ ID NO: 37175 - DNA, 3665 bp, Muscodor strobelii; identical to SEQ ID NO: 37172
  misc_feature: SGI EST ID NO. CUFF.90537.0
  misc_feature: Variant of the nucleotide sequence at SEQ ID NO 37173

SEQ ID NO: 37176 - DNA, 1335 bp, Muscodor strobelii
  misc_feature: SGI cDNA ID NO. 572898
  misc_feature: Encodes the peptide sequence at SEQ ID NO 37177
atgccagttactgtcagtatcgcctctcacggagccgagcctgtcaacggcggcaccttcatcgccagtcagtccccagagacacttctccttggcgctgcaccagcaaagcgttcagagataggcactatcattcaaacgtccttctcgcatgatggttgcagtactcggcacatatcacctcgcgagaatggtctagtccgcaccgtctttcaagcatatacctcgcaccatcacttgattcttcgacctgaagacatctggtttgctatattgacccagtttagcttttatgtcaatgccaacgcagaagaactgcgccacaagttcgttgcgcacgaaggcaagatcggcctcgtactatcgcaagaattcacagacctgggatcgattgattatggctctatgtgtgtgaacatgacgcgactcatcgagaaaacaatcaccgatcccactcttcgcgcctggattatgccagcctggagtacgactgtgcacgaagacacaattatcgccagcgtttgcatgatgggcactttgcaacgctacttcgaatatgtttttgatccttgctgttgcggcatcccaactaccacgctgctcggcgatcgtgcggattggactgatctggccgcccgaatcgagcggctggccgagtacggtgaagagcctgccctctttcgcgacctactgcgtcctgtcatgcgcggtttcatcaaaactttcgacgcgccaggggacaaccaagtgaaagacttctggtcgcgtgtaatcgactaccagagtggcagtggcatgaaccacctcagtggatggatcacggctttccaagtatgggacgaggatggtaaatttcgaattaacaagcacatgctgaagagcgacgctgtgaagaattatgggccggatcaggcttcatctgccttgctacatccactctcggagcccggttggggtggctttcgagttgaccttgaccaagtctcggctggatttgtttccgtcccagtcaagctcaaagaccccgctacactaaccatggtcgatacgcaacttcttgcaggttcagttggtatcgaggcgatcgctgcagtagacaagtcttatcctacggctcttccatccggggaaaccgtgctgcccaaaggatctaaagctcgtgacacagtcaagccccttactggctggtggatgtacgaagtaaaggatggagacttaaagaagaagaatatgagtcttccagagtttctggagagcaaaaagggcgagtggacaggccaagtcacgggcaaagtcaaacttgacggctccttctctgtgaatcgcgattggtag

SEQ ID NO: 37177 - protein, 444 aa, Muscodor strobelii
  misc_feature: SGI Peptide ID NO. 572898
  misc_feature (1)..(404): NCBI GI: 238507081 Blast Desc: conserved [Aspergillus flavus NRRL3357] gi|220689455|gb|EED45806.1| conserved [Aspergillus flavus NRRL3357]
  misc_feature (1)..(404): NCBI GI: 169786137 Blast Desc: [Aspergillus oryzae RIB40] gi|83776277|dbj|BAE66396.1| protein product [Aspergillus oryzae]
  misc_feature (1)..(400): NCBI GI: 145247740 Blast Desc: An12g10730 [Aspergillus niger] gi|134080862|emb|CAK41420.1| protein product [Aspergillus niger]
  misc_feature (1)..(408): NCBI GI: 169604216 Blast Desc: SNOG_05119 [Phaeosphaeria nodorum SN15] gi|111066390|gb|EAT87510.1| SNOG_05119 [Phaeosphaeria nodorum SN15]
  misc_feature (1)..(400): NCBI GI: 255942128 Blast Desc: Pc16g15400 [Penicillium chrysogenum Wisconsin 54-1255] gi|211586456|emb|CAP94210.1| Pc16g15400 [Penicillium chrysogenum Wisconsin 54-1255]
  misc_feature (1)..(402): NCBI GI: 255950062 Blast Desc: Pc22g18950 [Penicillium chrysogenum Wisconsin 54-1255] gi|211592815|emb|CAP99183.1| Pc22g18950 [Penicillium chrysogenum Wisconsin 54-1255]
  misc_feature (25)..(413): NCBI GI: 171684309 Blast Desc: protein product [Podospora anserina] gi|170942115|emb|CAP67767.1| protein product [Podospora anserina]
  misc_feature (1)..(392): NCBI GI: 256732860 Blast Desc: NECHADRAFT_79491 [Nectria haematococca mpVI 77-13-4]
  misc_feature (1)..(400): NCBI GI: 170110331 Blast Desc: [Laccaria bicolor S238N-H82] gi|164638672|gb|EDR02948.1| [Laccaria bicolor S238N-H82]
  misc_feature (1)..(400): NCBI GI: 170110335 Blast Desc: [Laccaria bicolor S238N-H82] gi|164638674|gb|EDR02950.1| [Laccaria bicolor S238N-H82]
MPVTVSIASHGAEPVNGGTFIASQSPETLLLGAAPAKRSEIGTIIQTSFSHDGCSTRHISPRENGLVRTVFQAYTSHHHLILRPEDIWFAILTQFSFYVNANAEELRHKFVAHEGKIGLVLSQEFTDLGSIDYGSMCVNMTRLIEKTITDPTLRAWIMPAWSTTVHEDTIIASVCMMGTLQRYFEYVFDPCCCGIPTTTLLGDRADWTDLAARIERLAEYGEEPALFRDLLRPVMRGFIKTFDAPGDNQVKDFWSRVIDYQSGSGMNHLSGWITAFQVWDEDGKFRINKHMLKSDAVKNYGPDQASSALLHPLSEPGWGGFRVDLDQVSAGFVSVPVKLKDPATLTMVDTQLLAGSVGIEAIAAVDKSYPTALPSGETVLPKGSKARDTVKPLTGWWMYEVKDGDLKKKNMSLPEFLESKKGEWTGQVTGKVKLDGSFSVNRDW

SEQ ID NO: 37178 - DNA, 1936 bp, Muscodor strobelii
  misc_feature: SGI EST ID NO. CUFF.88886.0
  misc_feature: Variant of the nucleotide sequence at SEQ ID NO 37176
tgagcaccgagtgttttcgcaataattcttattgagcgggttcttcatctgtgatgtaggggggtggtgttgatggttctccgctcgcttctttcccgcattctgatgtaacacgatttaggcatccatgggaattgaggtttgaccggatgcctatcccgtttatcaagaatataatgacgacgaacgacctcgttctacgcaatactttgtgtctatcacgcaaacgacttcgactttctgaatttctgtctgaaagctcactacgaaaatgccagttactgtcagtatcgcctctcacggagccgagcctgtcaacggcggcaccttcatcgccagtcagtccccagagacacttctccttggcgctgcaccagcaaagcgttcagagataggcactatcattcaaacgtccttctcgcatgatggttgcagtactcggcacatatcacctcgcgagaatggtctagtccgcaccgtctttcaagcatatacctcgcaccatcacttgattcttcgacctgaagacatctggtttgctatattgacccagtttagcttttatgtcaatgccaacgcagaagaactgcgccacaagttcgttgcgcacgaaggcaagatcggcctcgtactatcgcaagaattcacagacctgggatcgattgattatggctctatgtgtgtgaacatgacgcgactcatcgagaaaacaatcaccgatcccactcttcgcgcctggattatgccagcctggagtacgactgtgcacgaagacacaattatcgccagcgtttgcatgatgggcactttgcaacgctacttcgaatatgtttttgatccttgctgttgcggcatcccaactaccacgctgctcggcgatcgtgcggattggactgatctggccgcccgaatcgagcggctggccgagtacggtgaagagcctgccctctttcgcgacctactgcgtcctgtcatgcgcggtttcatcaaaactttcgacgcgccaggggacaaccaagtgaaagacttctggtcgcgtgtaatcgactaccagagtggcagtggcatgaaccacctcagtggatggatcacggctttccaagtatgggacgaggatggtaaatttcgaattaacaagcacatgctgaagagcgacgctgtgaagaattatgggccggatcaggcttcatctgccttgctacatccactctcggagcccggttggggtggctttcgagttgaccttgaccaagtctcggctggatttgtttccgtcccagtcaagctcaaagaccccgctacactaaccatggtcgatacgcaacttcttgcaggttcagttggtatcgaggcgatcgctgcagtagacaagtcttatcctacggctcttccatccggggaaaccgtgctgcccaaaggatctaaagctcgtgacacagtcaagccccttactggctggtggatgtacgaagtaaaggatggagacttaaagaagaagaatatgagtcttccagagtttctggagagcaaaaagggcgagtggacaggccaagtcacgggcaaagtcaaacttgacggctccttctctgtgaatcgcgattggtagttcctttaagattgcacggaatgataggttggttgttgtttcgatagctacgtcaatgcattagcttgctgtagtgaggaagtgctaggcaaatatcggatttactacaaactcatcgtaaggttgtccaaaaagtaatgtagacatgtgcaaaggcgatgaagagcgctgaccctgagttcagtaagtatgggaactggctgaataagcttcatgatgaagctcacggaagcacggagagaacatattaaagaggcagaactagtgcaatcaaagcttgaaataatcgactcagtattccgacggtacggaaagaacaatccactccag

SEQ ID NO: 37179 - DNA, 2112 bp, Muscodor strobelii
  misc_feature: SGI cDNA ID NO. 572899
  misc_feature: Encodes the peptide sequence at SEQ ID NO 37180
atgaatattgaagccggacccaatcaatctgacctagaggggagcaaaacgtctgctcttagattcgaaaatccaatcgactccaaccttcccaatcatccacaccttaatcacgcgcgcgaacgcgttcgacactttttccaccccgacggccgaaaaatccatgttgctcaatcgccggaggaagtggtttcgctacgtcaacagctgagcagaacccagtcgagcaatcggcctgacaacgcgacgaacactgccaacactggcgcaagtaacagtcaaaatatcgggcccgacaatgcaccattcgagatatacctttccggctcgaaagagcatcttgatgccttgcgatcagcgcatgcataccagcgtgtacagcaagacgagctgcgctcgcaggatccaaaaactttcacacgattcgagaatgtgtaccttgaacttgatgcgttgggccgtgagctagacagagtctcaaatcaaggtgttctccttgaggcgcattttaacaaatatggatatgatgcaaagatccgaagctatgatgaactagatgccccaacaggtgctagcacacctaggtcatctgtgacagcttcgaagctttctgaaaatgatggcgcaagcataaagagttcgaaagtggaacgaggatatgcgacttcgctcaagctatggaagagaccggtcgtaagacaatattggcataagggtattctatggcgcgcgtcagcgcaccaagaggtacagtcatttgagctcttcatcgatctcatgtatgtaggcattcttgcgattattggagatactgcagccgaaacaccagatgggcgtacattgttgcagttcattatcacattcctgctcagttggaagatctggaccgacctagagctaaccgtttcttggttcgagactgatgatgtacttcagcggctgtctatcctgctccaactagcacttctattcggtttgacaaccaacatcaccagcgcattcgacgcgacatacccgactttgattggcttttacttagcaggtcgcttgctcattgccgcttatttcttcttcgtatcgctattcgttccgatgatccggccgatcatgctatggctggtcgtcatgattcttgttagttccgcgatttggattgtcagcatccatgtgtcatatcctctacagcttgctccaatctttattggattggtgttcgatatgttttatcaaggtctttgggccgcagcaaccgttttcggccgcaggctcaattcacgctttggcgagtggcttgatcgcgtggtcgaggtagcgcccggcatgaatattgagcatcgcactgagcggatgaatgcattcgtgacgctggtattcggatacatggttgtttcgattctgtaccagagcacgcgtaatggagtcgatgcttacttcggcaaggcagtgcttggtttgacccaggctttctgtttcaactggctttatttcgagattgacaacagtaatctccaagttcacgccatccgccgatctgctgtgtctactctcgtctggaccgtttctcatgtcccattcatcatgtcatttaccttggctggaggtgctttggctcgtcttgttcttgctacagacactgtgaactccgatatcgaggcactgtcacatgctgatcacgagagaagcgagtcggaaatttctgacggcattcggtggttctactgtgcaggcatgggtatatcactcgcgagtatgggtctcataagcatttctcacacgcatcgttcgattgatggtctccgactccgaaagtgttatcgccttatcggccggttcaccgttgcaataattttcatcctccttccgctcgctaaagacctcaactcgctgcagcttgtgggtattgtgacagcgcttgttacattcgtgctcgcgtcggagttatgggcaacaagctgctgttacgagaatctgtgctcgcgagataagccatgtcaatatttcggcaggtgtgggaagaaggatatggagagactagtgcgcgaaggtcaagaaaaggttgatgtggaaactctactgcggaagaatgaacagccagatcttgttctgacgtaa

SEQ ID NO: 37180 - protein, 703 aa, Muscodor strobelii
  misc_feature: SGI Peptide ID NO. 572899
  misc_feature (43)..(683): NCBI GI: 154318628 Blast Desc: BC1G_02703 [Botryotinia fuckeliana B05.10] gi|150857833|gb|EDN33025.1| BC1G_02703 [Botryotinia fuckeliana B05.10]
  misc_feature (40)..(692): NCBI GI: 256735351 Blast Desc: NECHADRAFT_31792 [Nectria haematococca mpVI 77-13-4]
  misc_feature (40)..(676): NCBI GI: 46105366 Blast Desc: FG00311.1 [Gibberella zeae PH-1]
  misc_feature (31)..(458): NCBI GI: 156063756 Blast Desc: SS1G_01996 [Sclerotinia sclerotiorum 1980] gi|154697330|gb|EDN97068.1| SS1G_01996 [Sclerotinia sclerotiorum 1980]
  misc_feature (227)..(674): NCBI GI: 238878691 Blast Desc: conserved [Candida albicans WO-1]
  misc_feature (227)..(674): NCBI GI: 68464715 Blast Desc: CaO19.4749 [Candida albicans SC5314] gi|46445469|gb|EAL04737.1| CaO19.4749 [Candida albicans SC5314]
  misc_feature (227)..(666): NCBI GI: 255728067 Blast Desc: conserved [Candida tropicalis MYA-3404] gi|240133275|gb|EER32831.1| conserved [Candida tropicalis MYA-3404]
  misc_feature (229)..(667): NCBI GI: 190347358 Blast Desc: PGUG_03711 [Pichia guilliermondii ATCC 6260]
  misc_feature (227)..(666): NCBI GI: 241949527 Blast Desc: conserved [Candida dubliniensis CD36] gi|223640824|emb|CAX45139.1| conserved [Candida dubliniensis CD36]
  misc_feature (217)..(639): NCBI GI: 164663223 Blast Desc: MGL_0508 [Malassezia globosa CBS 7966] gi|159106636|gb|EDP45519.1| MGL_0508 [Malassezia globosa CBS 7966]
MNIEAGPNQSDLEGSKTSALRFENPIDSNLPNHPHLNHARERVRHFFHPDGRKIHVAQSPEEVVSLRQQLSRTQSSNRPDNATNTANTGASNSQNIGPDNAPFEIYLSGSKEHLDALRSAHAYQRVQQDELRSQDPKTFTRFENVYLELDALGRELDRVSNQGVLLEAHFNKYGYDAKIRSYDELDAPTGASTPRSSVTASKLSENDGASIKSSKVERGYATSLKLWKRPVVRQYWHKGILWRASAHQEVQSFELFIDLMYVGILAIIGDTAAETPDGRTLLQFIITFLLSWKIWTDLELTVSWFETDDVLQRLSILLQLALLFGLTTNITSAFDATYPTLIGFYLAGRLLIAAYFFFVSLFVPMIRPIMLWLVVMILVSSAIWIVSIHVSYPLQLAPIFIGLVFDMFYQGLWAAATVFGRRLNSRFGEWLDRVVEVAPGMNIEHRTERMNAFVTLVFGYMVVSILYQSTRNGVDAYFGKAVLGLTQAFCFNWLYFEIDNSNLQVHAIRRSAVSTLVWTVSHVPFIMSFTLAGGALARLVLATDTVNSDIEALSHADHERSESEISDGIRWFYCAGMGISLASMGLISISHTHRSIDGLRLRKCYRLIGRFTVAIIFILLPLAKDLNSLQLVGIVTALVTFVLASELWATSCCYENLCSRDKPCQYFGRCGKKDMERLVREGQEKVDVETLLRKNEQPDLVLT

SEQ ID NO: 37181 - DNA, 2577 bp, Muscodor strobelii
  misc_feature: SGI EST ID NO. CUFF.88889.0
  misc_feature: Variant of the nucleotide sequence at SEQ ID NO 37179
cgaattgctattggaggagcattcgtatttctatttgctaatttgatgattgtactattctggtgcctccttttatctgcagcgtgtacgccaccttcatactaacgcgataacacctgtcgctcgcctgcattttgcacatccataatggtgcaccttcttatcggcgccaaataagtcatgccatgccgctcgtcaatcattcaagcatgtccttctgtcttccttgaatcgaggcattcatgaaatcaacgactggttgtgcggttagccatgaatattgaagccggacccaatcaatctgacctagaggggagcaaaacgtctgctcttagattcgaaaatccaatcgactccaaccttcccaatcatccacaccttaatcacgcgcgcgaacgcgttcgacactttttccaccccgacggccgaaaaatccatgttgctcaatcgccggaggaagtggtttcgctacgtcaacagctgagcagaacccagtcgagcaatcggcctgacaacgcgacgaacactgccaacactggcgcaagtaacagtcaaaatatcgggcccgacaatgcaccattcgagatatacctttccggctcgaaagagcatcttgatgccttgcgatcagcgcatgcataccagcgtgtacagcaagacgagctgcgctcgcaggatccaaaaactttcacacgattcgagaatgtgtaccttgaacttgatgcgttgggccgtgagctagacagagtctcaaatcaaggtgttctccttgaggcgcattttaacaaatatggatatgatgcaaagatccgaagctatgatgaactagatgccccaacaggtgctagcacacctaggtcatctgtgacagcttcgaagctttctgaaaatgatggcgcaagcataaagagttcgaaagtggaacgaggatatgcgacttcgctcaagctatggaagagaccggtcgtaagacaatattggcataagggtattctatggcgcgcgtcagcgcaccaagaggtacagtcatttgagctcttcatcgatctcatgtatgtaggcattcttgcgattattggagatactgcagccgaaacaccagatgggcgtacattgttgcagttcattatcacattcctgctcagttggaagatctggaccgacctagagctaaccgtttcttggttcgagactgatgatgtacttcagcggctgtctatcctgctccaactagcacttctattcggtttgacaaccaacatcaccagcgcattcgacgcgacatacccgactttgattggcttttacttagcaggtcgcttgctcattgccgcttatttcttcttcgtatcgctattcgttccgatgatccggccgatcatgctatggctggtcgtcatgattcttgttagttccgcgatttggattgtcagcatccatgtgtcatatcctctacagcttgctccaatctttattggattggtgttcgatatgttttatcaaggtctttgggccgcagcaaccgttttcggccgcaggctcaattcacgctttggcgagtggcttgatcgcgtggtcgaggtagcgcccggcatgaatattgagcatcgcactgagcggatgaatgcattcgtgacgctggtattcggatacatggttgtttcgattctgtaccagagcacgcgtaatggagtcgatgcttacttcggcaaggcagtgcttggtttgacccaggctttctgtttcaactggctttatttcgagattgacaacagtaatctccaagttcacgccatccgccgatctgctgtgtctactctcgtctggaccgtttctcatgtcccattcatcatgtcatttaccttggctggaggtgctttggctcgtcttgttcttgctacagacactgtgaactccgatatcgaggcactgtcacatgctgatcacgagagaagcgagtcggaaatttctgacggcattcggtggttctactgtgcaggcatgggtatatcactcgcgagtatgggtctcataagcatttctcacacgcatcgttcgattgatggtctccgactccgaaagtgttatcgccttatcggccggttcaccgttgcaataattttcatcctccttccgctcgctaaagacctcaactcgctgcagcttgtgggtattgtgacagcgcttgttacattcgtgctcgcgtcggagttatgggcaacaagctgctgttacgagaatctgtgctcgcgagataagccatgtcaatatttcggcaggtgtgggaagaaggatatggagagactagtgcgcgaaggtcaagaaaaggttgatgtggaaactctactgcggaagaatgaacagccagatcttgttctgacgtaagtcggacaggggtgagagatcgatgatcgtgcaagcgtctggaagtatgtagagattgacaatgtgatggtcttccaactcaatgcccaataaaataacgaataacgctgatatatacgcacacataaacctttgtatcatgctctactgggcatgctgaataagtttccttgagaatgtcacataagttag

SEQ ID NO: 37182 - DNA, 915 bp, Muscodor strobelii
  misc_feature: SGI cDNA ID NO. 572900
  misc_feature: Encodes the peptide sequence at SEQ ID NO 37183
atgtcaactgtcattctagttgattcagcggcctcgacagaagtcgataaggccaaaggatccgaaggatacagatccaatctgttagccgactctaagccgaatgacgaagtgaggccgcgagtgcatcgcattcctcgacccgtaagcttcgaagatcaaagggtgtggcagctcagacagatggcgggcgcatttcgcgtctttgcgaggttaggctttgctgatggcagcagtggacatatcagcatacgagaccctgttcagccagaaaccttctggatcaatccttatggcgttcattttggtcttcttaccgtgtccgacatggtacacattgatcgcgaaggcaatcgagttggtggcaatgacgcacctatcaataaagcgggcttcatcattcacgccgcgatacacgaagcgcgaccggacattaacgcagcctgccatgtgcactcgccttacggccgcgcatggagcacatttggccggcctatcgagatgttgaaccaagactgttgcatgttctacaaggatcttgcagtatacgggtctttcggaggcgttgtgcatgcgccggaagaaggtcaacggatctcgcaggcactgggcgcgacgaagaagaacatcatacttaaaaatcatgggcttcttacatgcggggagacggtgggtgaagcggctgggtttttcattgcactcgaacgagcttgccaggcacagttattagttgaaagtgcaattgcttcagtgagtgttgggggcagcgtaacacacctacagaagacgctgattggggacgaggaggcagaatatacgaagaatggaacaggatcgcccgaggtcatgtacatgcaatttgaaccggaatatcagctgtcattgagacaaacgaatggtgagttctgcaattga

SEQ ID NO: 37183 - protein, 304 aa, Muscodor strobelii
  misc_feature: SGI Peptide ID NO. 572900
  misc_feature (60)..(268): Pfam Id: PF00596 Pfam Desc: Class II Aldolase and Adducin N-terminal domain
  misc_feature (25)..(302): NCBI GI: 256729253 Blast Desc: NECHADRAFT_47568 [Nectria haematococca mpVI 77-13-4]
  misc_feature (31)..(302): NCBI GI: 256720204 Blast Desc: NECHADRAFT_89264 [Nectria haematococca mpVI 77-13-4]
  misc_feature (33)..(302): NCBI GI: 212546479 Blast Desc: aldolase, [Penicillium marneffei ATCC 18224] gi|210064913|gb|EEA19008.1| aldolase, [Penicillium marneffei ATCC 18224]
  misc_feature (43)..(304): NCBI GI: 159128536 Blast Desc: class II Aldolase and Adducin N-terminal domain protein [Aspergillus fumigatus A1163]
  misc_feature (45)..(302): NCBI GI: 46107814 Blast Desc: FG00790.1 [Gibberella zeae PH-1]
  misc_feature (45)..(304): NCBI GI: 256724507 Blast Desc: [Nectria haematococca mpVI 77-13-4]
  misc_feature (45)..(302): NCBI GI: 256734794 Blast Desc: NECHADRAFT_90416 [Nectria haematococca mpVI 77-13-4]
  misc_feature (45)..(304): NCBI GI: 39962958 Blast Desc: MGG_09685 [Magnaporthe grisea 70-15] gi|145022719|gb|EDK06559.1| MGG_09685 [Magnaporthe grisea 70-15]
  misc_feature (53)..(302): NCBI GI: 255712757 Blast Desc: KLTH0C10164p [Lachancea thermotolerans] gi|238934040|emb|CAR22223.1| KLTH0C10164p [Lachancea thermotolerans]
  misc_feature (43)..(302): NCBI GI: 50304319 Blast Desc: protein product [Kluyveromyces lactis] gi|49641241|emb|CAH02502.1| KLLA0B12980p [Kluyveromyces lactis]
  misc_feature (57)..(246): SWISSPROT Homolog: EC 4.1.2.17 L-fuculose-phosphate aldolase
MSTVILVDSAASTEVDKAKGSEGYRSNLLADSKPNDEVRPRVHRIPRPVSFEDQRVWQLRQMAGAFRVFARLGFADGSSGHISIRDPVQPETFWINPYGVHFGLLTVSDMVHIDREGNRVGGNDAPINKAGFIIHAAIHEARPDINAACHVHSPYGRAWSTFGRPIEMLNQDCCMFYKDLAVYGSFGGVVHAPEEGQRISQALGATKKNIILKNHGLLTCGETVGEAAGFFIALERACQAQLLVESAIASVSVGGSVTHLQKTLIGDEEAEYTKNGTGSPEVMYMQFEPEYQLSLRQTNGEFCN

SEQ ID NO: 37184 - DNA, 1581 bp, Muscodor strobelii
  misc_feature: SGI EST ID NO. CUFF.88899.0
  misc_feature: Variant of the nucleotide sequence at SEQ ID NO 37182
tagtgtcataccttcgctctgaagaacggaactatccgtcgaattaaattaactacttgatttcgtcaatacgccctgtagaagtgtgttcgtggccataaaagttcaataggacctcgacactataactcggcctaaagcctgaaggagatgcccagcctttgtttctcgaacatttgcgatccgtcctaggtacatacagtatcgaatcacattatataagaacttgagtggggagggtgtttgtttttttcgtgcgcctttgaagtcttctcattcaacgaagatgattgaagagacgaagcagaacgtctattcaaatagctcatcggatgctagtccgcaacgccggtccgtcgtcaccgatagtggacctcctatcaagtgctggggtagccctgagcggtcttgtcttctaatgccattgtttccagttaacattcatgcagagagtcgagtttcattccattaaagtgagcaaagagcgtaagataaagagccttcagaccacgtaatgtcaactgtcattctagttgattcagcggcctcgacagaagtcgataaggccaaaggatccgaaggatacagatccaatctgttagccgactctaagccgaatgacgaagtgaggccgcgagtgcatcgcattcctcgacccgtaagcttcgaagatcaaagggtgtggcagctcagacagatggcgggcgcatttcgcgtctttgcgaggttaggctttgctgatggcagcagtggacatatcagcatacgagaccctgttcagccagaaaccttctggatcaatccttatggcgttcattttggtcttcttaccgtgtccgacatggtacacattgatcgcgaaggcaatcgagttggtggcaatgacgcacctatcaataaagcgggcttcatcattcacgccgcgatacacgaagcgcgaccggacattaacgcagcctgccatgtgcactcgccttacggccgcgcatggagcacatttggccggcctatcgagatgttgaaccaagactgttgcatgttctacaaggatcttgcagtatacgggtctttcggaggcgttgtgcatgcgccggaagaaggtcaacggatctcgcaggcactgggcgcgacgaagaagaacatcatacttaaaaatcatgggcttcttacatgcggggagacggtgggtgaagcggctgggtttttcattgcactcgaacgagcttgccaggcacagttattagttgaaagtgcaattgcttcagtgagtgttgggggcagcgtaacacacctacagaagacgctgattggggacgaggaggcagaatatacgaagaatggaacaggatcgcccgaggtcatgtacatgcaatttgaaccggaatatcagctgtcattgagacaaacgaatggtgagttctgcaattgagtgcactgagacagtccaagatgaggtggaatagcttccttgtctgtcgcacgcatgctttcacatctctacagaaggcagccatcttggtagctcgcgaacttagcacctaacatggcaacaacggggttgaaacaacaactgaaacccaa

SEQ ID NO: 37185 - DNA, 1227 bp, Muscodor strobelii
  misc_feature: SGI cDNA ID NO. 572901
  misc_feature: Encodes the peptide sequence at SEQ ID NO 37186
atgtctgtcgttgctccatttaacatcagtgtccctgagaagagactacaacgcttacagcagaagcttgcactggtagactttccagatgagatctcagatctaagcccagatgaagtatggtcgaggggagcccctttgactgacatgaagcgcctcgctgcttactggcagcacggctttaactggcgtaaagcagaagagatgctgaacaagttcccccaatacactacagaaattagcatagacacattcggcagctatcaagtccacttcatccatcaaccaagtgaagtatcgggagcaattcctctgctttttctacatggatggcctagcaatttcatcgaagtcatcaaactcttaccgattctggttgatggccaaggatcgtatccatcctttcatgtcgttgcgcccagtttgattgactttgggttctcgtcggccagtcgaacgaaaacattccggtttgatcagcatgccgaagcataccataagttgatgcttgccttgggatacgaacaatacgtagttgttgaagctggtgatgtaggctacctcgttgctcgcagaatggcctctatatacggaccgaagcatctcaaggcgcttcatacaaacggtgcagcacctgccgagccaaatccgaaagatcatccggaagtctacgccaagaccgaagagacgcccttgaatgattcagacaaagctggcttagaaaggactgcgatgttcttgaaggagggaaatggatactaccaacagctatccacaaggccccaaactatcgggtatagccttacagatagtcctgttgggctcttggcttggctgtatgaaaagttgcacgattgggccgacgcatatccttggacggacgacgagatcttgacgtgggttagtttgcactatttctcgactccgggtcccagcgctcctggtcatgtctattatacaatggaacatagtgttccccgtgcatttgaagcttcacagaaatatgcggatgtgcctctgggtattacacgattctccaacaatctcatattactaccgcaggtgtggaaccaaactctgggccccgtcatttttgagagccaatattctaagggtggtcattttgcggcgtgggagtgcccagaggatgttggcagggatataagagtcatgttcggaagagatggcccaggctataactgcatcggcggaaaagatgggttttga

SEQ ID NO: 37186 - protein, 408 aa, Muscodor strobelii
  misc_feature: SGI Peptide ID NO. 572901
  misc_feature (135)..(390): Pfam Id: PF00561 Pfam Desc: alpha/beta hydrolase fold
  misc_feature (5)..(122): Pfam Id: PF06441 Pfam Desc: Epoxide hydrolase N terminus
  misc_feature (135)..(242): Pfam Id: PF00561 Pfam Desc: alpha/beta hydrolase fold
  misc_feature (5)..(80): Pfam Id: PF06441 Pfam Desc: Epoxide hydrolase N terminus
  misc_feature (89)..(122): Pfam Id: PF06441 Pfam Desc: Epoxide hydrolase N terminus
  misc_feature (1)..(392): NCBI GI: 256724723 Blast Desc: NECHADRAFT_48156 [Nectria haematococca mpVI 77-13-4]
  misc_feature (1)..(408): NCBI GI: 238841134 Blast Desc: epoxide hydrolase [Microsporum canis CBS 113480]
  misc_feature (4)..(402): NCBI GI: 256730470 Blast Desc: NECHADRAFT_30008 [Nectria haematococca mpVI 77-13-4]
  misc_feature (6)..(408): NCBI GI: 255950628 Blast Desc: Pc22g21860 [Penicillium chrysogenum Wisconsin 54-1255] gi|211593098|emb|CAP99474.1| Pc22g21860 [Penicillium chrysogenum Wisconsin 54-1255]
  misc_feature (1)..(408): NCBI GI: 70994616 Blast Desc: epoxide hydrolase [Aspergillus fumigatus Af293] gi|66849719|gb|EAL90047.1| epoxide hydrolase, [Aspergillus fumigatus Af293]
  misc_feature (1)..(408): NCBI GI: 159125001 Blast Desc: epoxide hydrolase, [Aspergillus fumigatus A1163]
  misc_feature (1)..(408): NCBI GI: 119501056 Blast Desc: epoxide hydrolase, [Neosartorya fischeri NRRL 181] gi|119415450|gb|EAW25388.1| epoxide hydrolase, [Neosartorya fischeri NRRL 181]
  misc_feature (4)..(408): NCBI GI: 189188968 Blast Desc: epoxide hydrolase 1 [Pyrenophora tritici-repentis Pt-1C-BFP] gi|187972429|gb|EDU39928.1| epoxide hydrolase 1 [Pyrenophora tritici-repentis Pt-1C-BFP]
  misc_feature (6)..(408): NCBI GI: 169773733 Blast Desc: [Aspergillus oryzae RIB40] gi|83769196|dbj|BAE59333.1| protein product [Aspergillus oryzae]
  misc_feature (4)..(408): NCBI GI: 149210895 Blast Desc: MGCH7_ch7g920 [Magnaporthe grisea 70-15] gi|86196875|gb|EAQ71513.1| MGCH7_ch7g920 [Magnaporthe grisea 70-15]
  misc_feature (50)..(393): SWISSPROT Homolog: EC 3.3.2.9 Microsomal epoxide hydrolase
MSVVAPFNISVPEKRLQRLQQKLALVDFPDEISDLSPDEVWSRGAPLTDMKRLAAYWQHGFNWRKAEEMLNKFPQYTTEISIDTFGSYQVHFIHQPSEVSGAIPLLFLHGWPSNFIEVIKLLPILVDGQGSYPSFHVVAPSLIDFGFSSASRTKTFRFDQHAEAYHKLMLALGYEQYVVVEAGDVGYLVARRMASIYGPKHLKALHTNGAAPAEPNPKDHPEVYAKTEETPLNDSDKAGLERTAMFLKEGNGYYQQLSTRPQTIGYSLTDSPVGLLAWLYEKLHDWADAYPWTDDEILTWVSLHYFSTPGPSAPGHVYYTMEHSVPRAFEASQKYADVPLGITRFSNNLILLPQVWNQTLGPVIFESQYSKGGHFAAWECPEDVGRDIRVMFGRDGPGYNCIGGKDGF

SEQ ID NO: 37187 - DNA, 2055 bp, Muscodor strobelii
  misc_feature: SGI cDNA ID NO. 572902
  misc_feature: Encodes the peptide sequence at SEQ ID NO 37188
atgcgcaacaccatcctgtttgtcagtcttgttatcagtcaagcgtttgcgaaacctctaggctcgctacctattcacatcgagacgcgctcaaaattagactccaacttagccaacattcacatccaagtcctcgaaggcgtcgatggtcatgttactttcacgtatgggaagtgcgagggcgctatccatgatgcacactaccagatcactgtgagctcggccgccaccgatggaagacttgtctggctaatgcctaacgatgtggcgccaggaggatgtatttcagcgtgggactctaagggtgctgtcatcggccgcagtgatgctcaaaagttgcagccaagtaggcggaatgccattctgcgtggacgaggcgagaacagcataaagatgagcaatgctaatggcatcgatgtgtccgggccgtggttcgacggtgttgctctcctcgagagcaagaatctcagcactgtcgacgacgcctcagccaaaaataagaacatcgccatcgttggggctggaatgtctggtctcatgacctacttggtcctccatcagtctggattcaacaacattagtatcatcgaagctggtcagcgtcttggcggtcgcgtccacaccgaatacctctctggtggtcctttcgactattcctatcaggaaatgggccccatgcgctttccgagcaccttggatgttgcgaacaagacttacaatattactgatcaccagttggtgttccagctagcagatgagatgaacatgctcaacggccatgctaagaattggagtgtggacttcattccttggtaccagtccaattcgaatggacttgtctaccgcaatggattcaagctcgatactggattgccgcctaccgtctctcaaatagccgcaaatccgtcgcttttggctgaccctgcaatgaacccttcaaccaaaatggtctcggagaagattgaggccattacaagtaatgataccttcaagattgagctagcgctgaacatgcaccaagctcacaaggatttcctcgagggcgccgccacgaatgggtttcgcggcgacgagtggtccgaattcgcatatctggtcaactatgtgaaggccaacttgaatgacaccgacgtcgtcttaggcggttcttttgtgacatctttttgggatgacttctacgagggcatgtactttgaggccgccacatggaggaccattgacggcggcttgagcagacttccgtcagcgttccatcccctagtggacaataaaacgactatgaatcgccctattgaacgtattgactggctacagaaagaacagaaggtacaactagcatggaaagacaggagaacaaacggcaactatgtgtggaagaatgccagttacgactacgccattcttgcagccccgttcgcagtgatcaaaggttggcgcatgcctgaattaccgacgaccatctccgccgccatcacagaggtgcccatgacggcggcgtgcaaggtagcgcttgagttcaatacgcgcttctgggaacaatttgagaatcccatttacggcggctgctcaacgaccagtgacattcctgggatcagcagtatctgctatccttcctacaatatcaatggcacgggtcccgcatcaatgcttgcctcgtacatcaacggtaacgattggggccagtattgggtatcagctcctgaggccgagcacgtgcaatacgttcttgacgcaatgatcgagatacacggcgacgtcgccgcacgcgaatacacgggcaattacaacaggcgctgttgggcacaggacccatacacaaaggggtcatgggcaagtcccaaaatcgggcagcatgagctctatattccagagtatttcaagacgtacagcaatatgatatttgttggcgagcacacttcgtatacacacgcctggatctcttcggccctcgagtctggcgtccgtggtgccattcagctcatgctcgaactgggcttagtcgatgaagcgaaagctgcgaacgagaagtggatggctagatggatccacgtttaa

SEQ ID NO: 37188 - protein, 684 aa, Muscodor strobelii
  misc_feature: SGI Peptide ID NO. 572902
  misc_feature (176)..(661): Pfam Id: PF01593 Pfam Desc: Flavin containing amine oxidoreductase
  misc_feature (168)..(204): Pfam Id: PF01266 Pfam Desc: FAD dependent oxidoreductase
  misc_feature (1)..(684): NCBI GI: 46138261 Blast Desc: FG10645.1 [Gibberella zeae PH-1]
  misc_feature (21)..(684): NCBI GI: 85104142 Blast Desc: NCU01066 [Neurospora crassa OR74A] gi|30316355|sp|P23623.2|OXLA_NEUCR RecName: Full=L-amino-acid oxidase; Short=LAAO; Short=LAO; Flags: Precursor L-amino-acid
  misc_feature (5)..(684): NCBI GI: 145615273 Blast Desc: MGG_05485 [Magnaporthe grisea 70-15] gi|145022143|gb|EDK06163.1| MGG_05485 [Magnaporthe grisea 70-15]
  misc_feature (7)..(684): NCBI GI: 171678187 Blast Desc: protein product [Podospora anserina] gi|170937163|emb|CAP61820.1| protein product [Podospora anserina]
  misc_feature (5)..(684): NCBI GI: 145613762 Blast Desc: MGG_01384 [Magnaporthe grisea 70-15] gi|145020787|gb|EDK04916.1| MGG_01384 [Magnaporthe grisea 70-15]
  misc_feature (5)..(684): NCBI GI: 261361360 Blast Desc: L-amino-acid oxidase [Verticillium albo-atrum VaMs.102]
  misc_feature (39)..(684): NCBI GI: 39972637 Blast Desc: MGG_07620 [Magnaporthe grisea 70-15] gi|145016831|gb|EDK01261.1| MGG_07620 [Magnaporthe grisea 70-15]
  misc_feature (36)..(684): NCBI GI: 261354618 Blast Desc: L-amino-acid oxidase [Verticillium albo-atrum VaMs.102]
  misc_feature (36)..(684): NCBI GI: 238500802 Blast Desc: amine oxidase, [Aspergillus flavus NRRL3357] gi|220691872|gb|EED48219.1| amine oxidase, [Aspergillus flavus NRRL3357]
  misc_feature (36)..(684): NCBI GI: 255940418 Blast Desc: Pc16g06420 [Penicillium chrysogenum Wisconsin 54-1255] gi|211585601|emb|CAP93312.1| Pc16g06420 [Penicillium chrysogenum Wisconsin 54-1255]
  misc_feature (21)..(684): SWISSPROT Homolog: EC 1.4.3.2 L-amino-acid oxidase
MRNTILFVSLVISQAFAKPLGSLPIHIETRSKLDSNLANIHIQVLEGVDGHVTFTYGKCEGAIHDAHYQITVSSAATDGRLVWLMPNDVAPGGCISAWDSKGAVIGRSDAQKLQPSRRNAILRGRGENSIKMSNANGIDVSGPWFDGVALLESKNLSTVDDASAKNKNIAIVGAGMSGLMTYLVLHQSGFNNISIIEAGQRLGGRVHTEYLSGGPFDYSYQEMGPMRFPSTLDVANKTYNITDHQLVFQLADEMNMLNGHAKNWSVDFIPWYQSNSNGLVYRNGFKLDTGLPPTVSQIAANPSLLADPAMNPSTKMVSEKIEAITSNDTFKIELALNMHQAHKDFLEGAATNGFRGDEWSEFAYLVNYVKANLNDTDVVLGGSFVTSFWDDFYEGMYFEAATWRTIDGGLSRLPSAFHPLVDNKTTMNRPIERIDWLQKEQKVQLAWKDRRTNGNYVWKNASYDYAILAAPFAVIKGWRMPELPTTISAAITEVPMTAACKVALEFNTRFWEQFENPIYGGCSTTSDIPGISSICYPSYNINGTGPASMLASYINGNDWGQYWVSAPEAEHVQYVLDAMIEIHGDVAAREYTGNYNRRCWAQDPYTKGSWASPKIGQHELYIPEYFKTYSNMIFVGEHTSYTHAWISSALESGVRGAIQLMLELGLVDEAKAANEKWMARWIHV

SEQ ID NO: 37189 - DNA, 3688 bp, Muscodor strobelii
  misc_feature: SGI EST ID NO. CUFF.88910.0
  misc_feature: Variant of the nucleotide sequence at SEQ ID NO 37187
ctttgagtttgttatgacttcaataaaccaaaaaacgaaagcaccagttgtcctctcagtcaattttcaagtcgcaagtcaaatacatgtatatttaaatcgtcatcaccaagtctctccgtagagtctcagggaacatatacaccgacataacacgatgccactaatcccaacccctcccatcgcctgcacatccccgcaacacatcgagagataacaaaacttttgcgccgctctaaagccgcttatcagttgaatgtccaacgctgacatggcatgtaaggcgcgtggggagatttgtttcttacatgccattggatcaacatgaccgggacctcgagataggcaggttctgcaaatctcagccgtgagatccatggcagggcgtagatacagagtgtgttgcgtagccgaaggtcggcggcgctgggaaggagtctggtcacgcctcgctcgtcgcataaagacttggctctggacgacaatatgcgcaattagcagacgtctctgcttaattgccccttagcaaccgaggcatagccaatcaagccgccatcaggggcagtcaagatgcgcaacaccatcctgtttgtcagtcttgttatcagtcaagcgtttgcgaaacctctaggctcgctacctattcacatcgagacgcgctcaaaattagactccaacttagccaacattcacatccaagtcctcgaaggcgtcgatggtcatgttactttcacgtatgggaagtgcgagggcgctatccatgatgcacactaccagatcactgtgagctcggccgccaccgatggaagacttgtctggctaatgcctaacgatgtggcgccaggaggatgtatttcagcgtgggactctaagggtgctgtcatcggccgcagtgatgctcaaaagttgcagccaagtaggcggaatgccattctgcgtggacgaggcgagaacagcataaagatgagcaatgctaatggcatcgatgtgtccgggccgtggttcgacggtgttgctctcctcgagagcaagaatctcagcactgtcgacgacgcctcagccaaaaataagaacatcgccatcgttggggctggaatgtctggtctcatgacctacttggtcctccatcagtctggattcaacaacattagtatcatcgaagctggtcagcgtcttggcggtcgcgtccacaccgaatacctctctggtggtcctttcgactattcctatcaggaaatgggccccatgcgctttccgagcaccttggatgttgcgaacaagacttacaatattactgatcaccagttggtgttccagctagcagatgagatgaacatgctcaacggccatgctaagaattggagtgtggacttcattccttggtaccagtccaattcgaatggacttgtctaccgcaatggattcaagctcgatactggattgccgcctaccgtctctcaaatagccgcaaatccgtcgcttttggctgaccctgcaatgaacccttcaaccaaaatggtctcggagaagattgaggccattacaagtaatgataccttcaagattgagctagcgctgaacatgcaccaagctcacaaggatttcctcgagggcgccgccacgaatgggtttcgcggcgacgagtggtccgaattcgcatatctggtcaactatgtgaaggccaacttgaatgacaccgacgtcgtcttaggcggttcttttgtgacatctttttgggatgacttctacgagggcatgtactttgaggccgccacatggaggaccattgacggcggcttgagcagacttccgtcagcgttccatcccctagtggacaataaaacgactatgaatcgccctattgaacgtattgactggctacagaaagaacagaaggtacaactagcatggaaagacaggagaacaaacggcaactatgtgtggaagaatgccagttacgactacgccattcttgcagccccgttcgcagtgatcaaaggttggcgcatgcctgaattaccgacgaccatctccgccgccatcacagaggtgcccatgacggcggcgtgcaaggtagcgcttgagttcaatacgcgcttctgggaacaatttgagaatcccatttacggcggctgctcaacgaccagtgacattcctgggatcagcagtatctgctatccttcctacaatatcaatggcacgggtcccgcatcaatgcttgcctcgtacatcaacggtaacgattggggccagtattgggtatcagctcctgaggccgagcacgtgcaatacgttcttgacgcaatgatcgagatacacggcgacgtcgccgcacgcgaatacacgggcaattacaacaggcgctgttgggcacaggacccatacacaaaggggtcatgggcaagtcccaaaatcgggcagcatgagctctatattccagagtatttcaagacgtacagcaatatgatatttgttggcgagcacacttcgtatacacacgcctggatctcttcggccctcgagtctggcgtccgtggtgccattcagctcatgctcgaactgggcttagtcgatgaagcgaaagctgcgaacgagaagtggatggctagatggatccacgtttaatgagttatgagtgatcgagaacaggatagacactttacggcttgcgacaccagctagactagatgctcggccacaagtctcatggtggcgtagctttgaataatacggcttacgaagcatgagtttcgccttctccccacgtcgaattctccatgattttctgggctttacagccggcattccgttactgcacgagatgattgttatgtgtgtatcttcgccacaaactctgctccccagacctctctcggatccgtgaatagacagaataatacttcttgaaagttcaagccaaagtctcaagttttaaccattcaatcatcttattgcataatctgagtactagcatcaaaacccatcttttccgccgatgcagttatagcctgggccatctcttccgaacatgactcttatatccctgccaacatcctctgggcactcccacgccgcaaaatgaccacccttagaatattggctctcaaaaatgacggggcccagagtttggttccacacctgcggtagtaatatgagattgttggagaatcgtgtaatacccagaggcacatccgcatatttctgtgaagcttcaaatgcacggggaacactatgttccattgtataatagacatgaccaggagcgctgggacccggagtcgagaaatagtgcaaactaacccacgtcaagatctcgtcgtccgtccaaggatatgcgtcggcccaatcgtgcaacttttcatacagccaagccaagagcccaacaggactatctgtaaggctatacccgatagtttggggccttgtggatagctgttggtagtatccatttccctccttcaagaacatcgcagtcctttctaagccagctttgtctgaatcattcaagggcgtctcttcggtcttggcgtagacttccggatgatctttcggatttggctcggcaggtgctgcaccgtttgtatgaagcgccttgagatgcttcggtccgtatatagaggccattctgcgagcaacgaggtagcctacatcaccagcttcaacaactactgtggatcagtaatacgaa

SEQ ID NO: 37190 - DNA, 1077 bp, Muscodor strobelii
  misc_feature: SGI cDNA ID NO. 572903
  misc_feature: Elevated expression when VOC is produced
  misc_feature: Encodes the peptide sequence at SEQ ID NO 37191
atggcgttgggtatcttccaagatcagatacagggcaccgtctttgtgttcggtctcgtcacagcaccgctcctgatattcgcccttacgctccgcgtaattgccgcccggcgctcagggcggaagattggatatgaagattggttcgctcttgcagccttatttgtgtacctactcaatctcgtcttgcttttcattagtatatttgtcctcaatggcaagacatacgctgaagtctcgacctcggacctcctttacgtagtgagagtcaccttcgtggaaatcatcttttcctgggtcaaccaatctcttgccaagtgcagtctgcttttcttgtattaccgcatatttggcgtcgatcgagtcttcgcccggtggatctggggcattggcatctttcacgtgtccttcacgctggcaatcctgctgaccgtgatattcgcctgtcatcccatcgaaaaagcatggaatccgacactgtcgggcacatgcgtcacgagtgcgccgcacccttatctccccatcgcagaaagcatcaactcgggcgttgacttcgcgatggtcatccttgccgtggtcatggtgcataggttggaaatgcgagcctcggtgaagctcaagctagctttcttattcgcgcttggtggcttggccggtgttattggaattgtcaagatcgtcgagtcgctttctaagaacgcgggtggcgtttccaaagccgtgaatgagacgatcggtctctggtccatcatacagcaagctgccagcgttgcctgctgctgtgctcctatagccaaacagatactcccgaaggacagtttcggcgctcggatacttggtagcatgaagatctacgggtcgaaggccactagtctcctccgctccaagacgtcaaagcagtcgatcgacgcccactcctccaatgacaaggacagctggctgcgaccggatatgagtagcgagaccaaacggccctggaccgaagttcatgcacagcatcgccccagcactggtagtagcagtccttcgcatcccaccaagacaacccgactagagcagagtgtagagatggtctga

SEQ ID NO: 37191 - protein, 358 aa, Muscodor strobelii
  misc_feature: SGI Peptide ID NO. 572903
  misc_feature (1)..(323): NCBI GI: 242821836 Blast Desc: conserved [Talaromyces stipitatus ATCC 10500] gi|218712683|gb|EED12108.1| conserved [Talaromyces stipitatus ATCC 10500]
  misc_feature (31)..(356): NCBI GI: 119483176 Blast Desc: NFIA_027930 [Neosartorya fischeri NRRL 181] gi|119409771|gb|EAW19719.1| conserved [Neosartorya fischeri NRRL 181]
  misc_feature (8)..(332): NCBI GI: 115395874 Blast Desc: conserved [Aspergillus terreus NIH2624] gi|114193145|gb|EAU34845.1| conserved [Aspergillus terreus NIH2624]
  misc_feature (24)..(298): NCBI GI: 261359081 Blast Desc: integral membrane protein [Verticillium albo-atrum VaMs.102]
  misc_feature (31)..(356): NCBI GI: 146324882 Blast Desc: conserved [Aspergillus fumigatus Af293] gi|129556612|gb|EAL86807.2| conserved [Aspergillus fumigatus Af293]
  misc_feature (31)..(309): NCBI GI: 67900490 Blast Desc: AN7232.2 [Aspergillus nidulans FGSC A4] gi|40742089|gb|EAA61279.1| AN7232.2 [Aspergillus nidulans FGSC A4] gi|259483424|tpe|CBF78803.1| TPA: conserved [Aspergillus FGSC
  misc_feature (14)..(317): NCBI GI: 256726386 Blast Desc: NECHADRAFT_100276 [Nectria haematococca mpVI 77-13-4]
  misc_feature (34)..(352): NCBI GI: 261202796 Blast Desc: integral membrane protein [Ajellomyces dermatitidis SLH14081] gi|239590709|gb|EEQ73290.1| integral membrane protein [Ajellomyces dermatitidis SLH14081]
  misc_feature (73)..(269): NCBI GI: 238839298 Blast Desc: integral membrane protein [Microsporum canis CBS 113480]
  misc_feature (42)..(312): NCBI GI: 145252736 Blast Desc: An16g05730 [Aspergillus niger] gi|134083435|emb|CAK46913.1| protein product [Aspergillus niger]
  misc_feature: Useful for introducing or modulating the production of volatile compounds
MALGIFQDQIQGTVFVFGLVTAPLLIFALTLRVIAARRSGRKIGYEDWFALAALFVYLLNLVLLFISIFVLNGKTYAEVSTSDLLYVVRVTFVEIIFSWVNQSLAKCSLLFLYYRIFGVDRVFARWIWGIGIFHVSFTLAILLTVIFACHPIEKAWNPTLSGTCVTSAPHPYLPIAESINSGVDFAMVILAVVMVHRLEMRASVKLKLAFLFALGGLAGVIGIVKIVESLSKNAGGVSKAVNETIGLWSIIQQAASVACCCAPIAKQILPKDSFGARILGSMKIYGSKATSLLRSKTSKQSIDAHSSNDKDSWLRPDMSSETKRPWTEVHAQHRPSTGSSSPSHPTKTTRLEQSVEMV

SEQ ID NO: 37192 - DNA, 3176 bp, Muscodor strobelii
  misc_feature: SGI EST ID NO. CUFF.89167.1
  misc_feature: Variant of the nucleotide sequence at SEQ ID NO 37190
cggtaccaatggttccatattctgctctctttcctgggcagaggttatgtcaggctgcggcacatgttgggcaattggttccgacctcaacgccagttgatgttcgagttccgctgtactagtgttggtcttccacatatctccttctcactccgctcgacacacacagacacgtgaacgtacctatacgattgcggagggcattgtgattgtttctcttctggccacggggtatcctttgatggtcgatctcacagctcttctgtgaaatgacacacgcgccacaaataggtcgttgtctgtcacaacgaagtttcttcttacggcattctatgtatcaggtcagagaaatcagtgggaaatacccgaatccgtgaacaggggtatcagtgtggcacggtaataatgagctttaccttggcatgcatgaccggggagctggcggggaacgttttgttcgagcatttctgttcaactacgactttggcgtacacactagtcttttcaaaatcgatgcttcttctgcgcagataccgacagagaggtagttgaatgtcatatatcatcaagtgaaggcggacccgtcggacgagcagttccatgacgagatagatcagcggccagcgtctcaccagctgagcccaagatcgatcgcgccatgcacgaacgtcgcatatggtagcattcgaaggcaggctgccattatggcgccaaacgaagcgaaataggacttttccattaccctttctcccttttcttggctactttcaagctgtgccatgatacatgttactatcgggtgatcaatcgacagatctaacaaaagcatttggtatattcgcgacgcccaagtctaacagacgaacacaattgttgatccgatcactttcgtcattggtcccgttctaagatccgttagttttgcattcagtccgcgttgtgagcgtggcttcagcgacaccaaagcgacccagatcacaccgtggcctgcatgcattgtgtaacgggtgggtgagcagtcgctctgaaataaggaataggggataaagggaagtttttccggcttacgccgtattgactgtgcggacttttcgaaatgcaactcaatgcgatacacaatcaggtttaacgcggctctaggccgaccgacgtcgtagagaaggatcgcggattgtctagccctggtttactatgatgagacgacgctctacttcgttgaagtacgccctagattctcaggcggcggttttggggtcagtatgcaggtgggcaaggtttgcagcatagcatatgggatgagtggcttcgcttcgcgctccaattggagtctccaacctgccttagtcgcttatggttacatcaacacacccatcttctagcagttggtgactcgcaattgtgagctacggatataatatagcgggggttcttactaagttcaattccatcaccctcgctctggcccaggtccatcccgctggatcgattattaattcataggcgccctctacctaacgatagtaacgaagatcagttgctctagtcagagaaccatcacaatggcgttgggtatcttccaagatcagatacagggcaccgtctttgtgttcggtctcgtcacagcaccgctcctgatattcgcccttacgctccgcgtaattgccgcccggcgctcagggcggaagattggatatgaagattggttcgctcttgcagccttatttgtgtacctactcaatctcgtcttgcttttcattagtatgtctctctttctacctgctgtttcgtaagtctcttgtgtcgggatctacctttctaactcgatcgataaacaggtatatttgtcctcaatggcaagacatacgctgaagtctcgacctcggacctcctttacgtagtgagagtcaccttcgtggaaatcatcttttcctgggtcaaccaatctcttgccaagtgcagtctgcttttcttgtattaccgcatatttggcgtcgatcgagtcttcgcccggtggatctggggcattggcatctttcacgtgtccttcacgctggcaatcctgctgaccgtgatattcgcctgtcatcccatcgaaaaagcatggaatccgacactgtcgggcacatgcgtcacgagtgcgccgcacccttatctccccatcgcagaaagcatcaactcgggcgttgacttcgcgatggtcatccttgccgtggtcatggtgcataggttggaaatgcgagcctcggtgaagctcaagctagctttcttattcgcgcttggtggcttggccggtgttattggaattgtcaagatcgtcgagtcgctttctaagaacgcgggtggcgtttccaaagccgtgaatgagacgatcggtctctggtccatcatacagcaagctgccagcgttgcctgctgctgtgctcctatagccaaacagatactcccgaaggacagtttcggcgctcggatacttggtagcatgaagatctacgggtcgaaggccactagtctcctccgctccaagacgtcaaagcagtcgatcgacgcccactcctccaatgacaaggacagctggctgcgaccggatatgagtagcgagaccaaacggccctggaccgaagttcatgcacagcatcgccccagcactggtagtagcagtccttcgcatcccaccaagacaacccgactagagcagagtgtagagatggtctgaaatcttctggtgggttgataaatggacatagagacagagacatccccaaagcagttatgaacagcactgagaatcatcaacaggtaatttcaaagcggaaattgcatgtaggtgagagcgttcggtatgcgtttatgctctgattgatattgtgtacgtctagggggacttggatacatagctgtgagttacttgaaatatcaagagcacacaatgggtttcagcctatgacgcattctattcgatagtgctatattttcatcgcgacttgtttgatttagtagctatgcaacacatgtaaagaatcaaagacggtggccatccttggttgacggagagttgcctggagcagattacaagattgatacgatgacaatcataaggttaacagagaagtccagtccgctctggacggggcgtagcccaattacttacaagcctgagatgtgttgtaccgcgtgtg

SEQ ID NO: 37193 - DNA, 1536 bp, Muscodor strobelii
  misc_feature: SGI cDNA ID NO. 572904
  misc_feature: Elevated expression when VOC is produced
  misc_feature: Encodes the peptide sequence at SEQ ID NO 37194
atgtggaagaccaacactagtacagcggaactcgaacatcaactggcgttgaggtcggaaccaattgcccaacatgtgccgcagcctgacataacctctgcccaggaaagagagcagaatatggaaccattggtaccgttcgacttcaccaccgattggaatgtcctgaatgacgagtacgactgccctgagaccattctccaaccgcattattcagattgcatcttgtcgggtctgcccacgccaatgccgaccgatgagccatctcatcagcatcttgctagtactgaagatgggtttcccaccaacgagatcaaaactgagctgatacagattttttttgatcgaattcatcccaccatcccaatcctctgccattcgcggactctggaatggattggcgatgatagaccattggatgcgtaccgccagtgcctaaggaatgctatattcacgtgcgccacagctgtctctagccgttttgacggtatccaggatcgactttacgcgaggactcgctcattagctgaaaaatttgacctggaagacagcgattggccagcctgccgcatagagcatgtccaatcttggatactcctggcttttttcgagctcgctaaaacaagtcaccgctgtgggtggctgagtgctggtagagtctttcgtcttgttcaatatggaaggttcttcgaaattgataggacgacggaactatccaaaatcccagtatatggggaagaagcactactaactgaggagaagagacgagcattttgggctgcttattgcctagatcatcttctagcggctagtgagggtacatctgtgaccctaagcgacggcatgatctacacccgtcttcctggcgatgacgctgaatacgcgcgtgcaagtccaaagaagattgcctcattcttgccagaggctctactgtcaaccgacacgacatccgcttcgccatttcacgagtgcataatacttgtcactttatgtggaaaactcatctctcggggacaagcctttcccaacgatacggtctctagcgtcaggcatgttgacatggtatcgcagtatacgtgggcggaaggcattgtggcgcggcgagcagaagacctgcgcacacgtcatgatgccattcatctagctactgatgcattgactatattcgtgtacatgttagctcagtcagcggtgttgtgttcgtggccgtccgctttgacatcgaatggcggagactgtgactcggctcttacctggcgagccgaggacaagaatgtagttgctgcgcgagaaaccgcccgcttagccggtcagcttagtcgactcggcgccttcaaggctcatctcttgacaccgctggtgatcttcctaggcgcttcaagactgaaaaggtgcctgatgcctcataaagagacagctaggatgtctcaatcagcgatgtcggtcgagtcgtgtttaagaacatgcgtcgaggccctacagcacttaaagtcagtaaatagtctcgctagctattatctacagaagctagagtaa

SEQ ID NO: 37194 - protein, 511 aa, Muscodor strobelii
  misc_feature: SGI Peptide ID NO. 572904
  misc_feature (190)..(291): Pfam Id: PF04082 Pfam Desc: Fungal specific transcription factor domain
  misc_feature (81)..(511): NCBI GI: 121719478 Blast Desc: fungal specific transcription factor domain protein [Aspergillus clavatus NRRL 1] gi|119404636|gb|EAW15012.1| fungal specific transcription factor domain protein [Aspergillus NRRL 1]
  misc_feature (105)..(511): NCBI GI: 85091890 Blast Desc: NCU04866 [Neurospora crassa OR74A] gi|28920523|gb|EAA29887.1| [Neurospora crassa OR74A]
  misc_feature (102)..(511): NCBI GI: 106879078 Blast Desc: citrinin biosynthesis transcriptional activator CtnR [Monascus purpureus]
  misc_feature (77)..(511): NCBI GI: 171688046 Blast Desc: protein product [Podospora anserina] gi|170943985|emb|CAP70095.1| protein product [Podospora anserina]
  misc_feature (76)..(511): NCBI GI: 212539225 Blast Desc: conserved [Penicillium marneffei ATCC 18224] gi|210069510|gb|EEA23601.1| conserved [Penicillium marneffei ATCC 18224]
  misc_feature (105)..(504): NCBI GI: 212539085 Blast Desc: conserved [Penicillium marneffei ATCC 18224] gi|210069440|gb|EEA23531.1| conserved [Penicillium marneffei ATCC 18224]
  misc_feature (105)..(504): NCBI GI: 242819640 Blast Desc: conserved [Talaromyces stipitatus ATCC 10500] gi|218713824|gb|EED13248.1| conserved [Talaromyces stipitatus ATCC 10500]
  misc_feature (112)..(446): NCBI GI: 116197108 Blast Desc: CHGG_05152 [Chaetomium globosum CBS 148.51] gi|88181065|gb|EAQ88533.1| CHGG_05152 [Chaetomium globosum CBS 148.51]
  misc_feature (102)..(399): NCBI GI: 115389932 Blast Desc: [Aspergillus terreus NIH2624] gi|114194867|gb|EAU36567.1| [Aspergillus terreus NIH2624]
  misc_feature (105)..(511): NCBI GI: 242821875 Blast Desc: conserved [Talaromyces stipitatus ATCC 10500] gi|218712691|gb|EED12116.1| conserved [Talaromyces stipitatus ATCC 10500]
  misc_feature: Useful for introducing or modulating the production of volatile compounds
MWKTNTSTAELEHQLALRSEPIAQHVPQPDITSAQEREQNMEPLVPFDFTTDWNVLNDEYDCPETILQPHYSDCILSGLPTPMPTDEPSHQHLASTEDGFPTNEIKTELIQIFFDRIHPTIPILCHSRTLEWIGDDRPLDAYRQCLRNAIFTCATAVSSRFDGIQDRLYARTRSLAEKFDLEDSDWPACRIEHVQSWILLAFFELAKTSHRCGWLSAGRVFRLVQYGRFFEIDRTTELSKIPVYGEEALLTEEKRRAFWAAYCLDHLLAASEGTSVTLSDGMIYTRLPGDDAEYARASPKKIASFLPEALLSTDTTSASPFHECIILVTLCGKLISRGQAFPNDTVSSVRHVDMVSQYTWAEGIVARRAEDLRTRHDAIHLATDALTIFVYMLAQSAVLCSWPSALTSNGGDCDSALTWRAEDKNVVAARETARLAGQLSRLGAFKAHLLTPLVIFLGASRLKRCLMPHKETARMSQSAMSVESCLRTCVEALQHLKSVNSLASYYLQKLE

SEQ ID NO: 37195 - DNA, 3092 bp, Muscodor strobelii
  misc_feature: SGI EST ID NO. CUFF.89166.3
  misc_feature: Variant of the nucleotide sequence at SEQ ID NO 37193
tctcactacgtaaaggaggtccgaggtcgagacttcagcgtatgtcttgccattgaggacaaatatactaatgaaaagcaagacgagattgagtaggtacacaaataaggctgcaagagcgaaccaatcttcatatccaatcttccgccctgagcgccgggcggcaattacgcggagcgtaagggcgaatatcaggagcggtgctgtgacgagaccgaacacaaagacggtgccctgtatctgatcttggaagatacccaacgccattgtgatggttctctgactagagcaactgatcttcgttactatcgttaggtagagggcgcctatgaattaataatcgatccagcgggatggacctgggccagagcgagggtgatggaattgaacttagtaagaacccccgctatattatatccgtagctcacaattgcgagtcaccaactgctagaagatgggtgtgttgatgtaaccataagcgactaaggcaggttggagactccaattggagcgcgaagcgaagccactcatcccatatgctatgctgcaaaccttgcccacctgcatactgaccccaaaaccgccgcctgagaatctagggcgtacttcaacgaagtagagcgtcgtctcatcatagtaaaccagggctagacaatccgcgatccttctctacgacgtcggtcggcctagagccgcgttaaacctgattgtgtatcgcattgagttgcatttcgaaaagtccgcacagtcaatacggcgtaagccggaaaaacttccctttatcccctattccttatttcagagcgactgctcacccacccgttacacaatgcatgcaggccacggtgtgatctgggtcgctttggtgtcgctgaagccacgctcacaacgcggactgaatgcaaaactaacggatcttagaacgggaccaatgacgaaagtgatcggatcaacaattgtgttcgtctgttagacttgggcgtcgcgaatataccaaatgcttttgttagatctgtcgattgatcacccgatagtaacatgtatcatggcacagcttgaaagtagccaagaaaagggagaaagggtaatggaaaagtcctatttcgcttcgtttggcgccataatggcagcctgccttcgaatgctaccatatgcgacgttcgtgcatggcgcgatcgatcttgggctcagctggtgagacgctggccgctgatctatctcgtcatggaactgctcgtccgacgggtccgccttcacttgatgatatatgacattcaactacctctctgtcggtatctgcgcagaagaagcatcgattttgaaaagactagtgtgtacgccaaagtcgtagttgaacagaaatgctcgaacaaaacgttccccgccagctccccggtcatgcatgccaagaatgccgtaagaagaaacttcgttgtgacagacaacgacctatttgtggcgcgtgtgtcatttcacagaagagctgtgagatcgaccatcaaaggataccccgtggccagaagagaaacaatcacaatgccctccgcaatcgtatagcggaactcgaacatcaactggcgttgaggtcggaaccaattgcccaacatgtgccgcagcctgacataacctctgcccaggaaagagagcagaatatggaaccattggtaccgttcgacttcaccaccgattggaatgtcctgaatgacgagtacgactgccctgagaccattctccaaccgcattattcagattgcatcttgtcgggtctgcccacgccaatgccgaccgatgagccatctcatcagcatcttgctagtactgaagatgggtttcccaccaacgagatcaaaactgagctgatacagattttttttgatcgaattcatcccaccatcccaatcctctgccattcgcggactctggaatggattggcgatgatagaccattggatgcgtaccgccagtgcctaaggaatgctatattcacgtgcgccacagctgtctctagccgttttgacggtatccaggatcgactttacgcgaggactcgctcattagctgaaaaatttgacctggaagacagcgattggccagcctgccgcatagagcatgtccaatcttggatactcctggcttttttcgagctcgctaaaacaagtcaccgctgtgggtggctgagtgctggtagagtctttcgtcttgttcaatatggaaggttcttcgaaattgataggacgacggaactatccaaaatcccagtatatggggaagaagcactactaactgaggagaagagacgagcattttgggctgcttattgcctagatcatcttctagcggctagtgagggtacatctgtgaccctaagcgacggcatgatctacacccgtcttcctggcgatgacgctgaatacgcgcgtgcaagtccaaagaagattgcctcattcttgccagaggctctactgtcaaccgacacgacatccgcttcgccatttcacgagtgcataatacttgtcactttatgtggaaaactcatctctcggggacaagcctttcccaacgatacggtctctagcgtcaggcatgttgacatggtatcgcagtatacgtgggcggaaggcattgtggcgcggcgagcagaagacctgcgcacacgtcatgatgccattcatctagctactgatgcattgactatattcgtgtacatgttagctcagtcagcggtgttgtgttcgtggccgtccgctttgacatcgaatggcggagactgtgactcggctcttacctggcgagccgaggacaagaatgtagttgctgcgcgagaaaccgcccgcttagccggtcagcttagtcgactcggcgccttcaaggctcatctcttgacaccgctggtgatcttcctaggcgcttcaagactgaaaaggtgcctgatgcctcataaagagacagctaggatgtctcaatcagcgatgtcggtcgagtcgtgtttaagaacatgcgtcgaggccctacagcacttaaagtcagtaaatagtctcgctagctattatctacagaagctagagtaatgttcctacacaattcacttgcaa

SEQ ID NO: 37196 - DNA, 1422 bp, Muscodor strobelii
  misc_feature: SGI cDNA ID NO. 572905
  misc_feature: Elevated expression when VOC is produced
  misc_feature: Encodes the peptide sequence at SEQ ID NO 37197
atgaaagactttggggtcttcagccagtgtttactggcttctgtcgggggcaattcgtcttcagttgctttcccgggctcacatggccatgatggaaactctacgattatcagcccatacaatcttgacgtactcgctacgccgattgccgtgattattccaaacacaacagagcaagtcgccgcagctgtcagatgtgccttcgacagcgatgtcaaggtccaagctagaagcggaggacatagctatgcaaacttcggtctggccagtggagggctttcgattgatttggaactgctgcgagacttttctctgaacggagcaagcggcctagcagtagtgggaagcggcacgctactgggacagctcaatgccgagctgtatgagtctcatggactctacgtacctcatggtttgagcttcactatcggcactggtggtcacgcgactgtcggagggtttggtattgcgtctagagcagccggccttatgctcgaccacatagtggaagccgaggtcgtcgtcgccaacggctcggtcgtgacttgttccgaagcaaagcaaccagacttattcttcgccatcagaggggccgctgcttcctttggcattgtcacacgactcactctagcagctcgggcggccccgccttctattgtaaactattcctacgcctgggttggaggaaactccagctttcgggcggatatcttccgtacttggcaggaagtcgtctacgatataactttgccatgggcgctctctgccaccttgacgattagtccgggcgccatcgtcttgtctggcgggttcctcggcaccgaggatcagttcgacgagatcaaccttagccaatattttgattcgcctactttagtgtcaaaagacgtgtacgataacttcaataacatctccagtgtgtggaatcaagaaattgagagcactggcatagctggcccgtcttacttctacgccaagtctgccttctttggcaacgagactcgtatactgaatgacacggtgggtaggatcatgacacaccttgacacagcggcgaacggtacgcggctttgggttgtcaacttcgagatgagcggaggttatgtcgcatcgatcccgatttcgagcacagctatgccacacaggcaagcaaggtacgcgatgttgtcgtatgctcagaccagtgtaaaggtatcagacaccactttccagttcctcgatgatcttagctcgatagctaagagcgatcaccccaacgcgttttacgggcagtacactggttacgtggatccaagacaggacagcgacgaggcaaggcgcgcacactgggccgacagtttggagaagcttcaatgcataaaagcacgtctggacccgtatgatattttccacaatcagcaatctgtacttccaatttgttga

SEQ ID NO: 37197 - protein, 473 aa, Muscodor strobelii
  misc_feature: SGI Peptide ID NO. 572905
  misc_feature (424)..(470): Pfam Id: PF08031 Pfam Desc: Berberine and berberine like
  misc_feature (48)..(184): Pfam Id: PF01565 Pfam Desc: FAD binding domain
  misc_feature (1)..(473): NCBI GI: 255953609 Blast Desc: Pc21g05110 [Penicillium chrysogenum Wisconsin 54-1255] gi|211589268|emb|CAP95408.1| Pc21g05110 [Penicillium chrysogenum Wisconsin 54-1255]
  misc_feature (1)..(471): NCBI GI: 259485766 Blast Desc: TPA: glucooligosaccharide oxidase, (AFU_orthologue; AFUA_6G14340) [Aspergillus nidulans FGSC A4]
  misc_feature (1)..(471): NCBI GI: 67525621 Blast Desc: AN3268.2 [Aspergillus nidulans FGSC A4] gi|40743987|gb|EAA63169.1| AN3268.2 [Aspergillus nidulans FGSC A4]
  misc_feature (7)..(472): NCBI GI: 116198987 Blast Desc: CHGG_07649 [Chaetomium globosum CBS 148.51] gi|88178928|gb|EAQ86396.1| CHGG_07649 [Chaetomium globosum CBS 148.51]
  misc_feature (6)..(469): NCBI GI: 242796746 Blast Desc: glucooligosaccharide oxidase, [Talaromyces stipitatus ATCC 10500] gi|218719453|gb|EED18873.1| glucooligosaccharide oxidase, [Talaromyces stipitatus ATCC 10500]
  misc_feature (6)..(469): NCBI GI: 212536760 Blast Desc: glucooligosaccharide oxidase, [Penicillium marneffei ATCC 18224] gi|210070935|gb|EEA25025.1| glucooligosaccharide oxidase, [Penicillium marneffei ATCC 18224]
  misc_feature (9)..(471): NCBI GI: 145231154 Blast Desc: An01g14520 [Aspergillus niger] gi|134055971|emb|CAK44150.1| protein product [Aspergillus niger]
  misc_feature (7)..(469): NCBI GI: 212539235 Blast Desc: conserved [Penicillium marneffei ATCC 18224] gi|210069515|gb|EEA23606.1| conserved [Penicillium marneffei ATCC 18224]
  misc_feature (10)..(469): NCBI GI: 121707059 Blast Desc: glucooligosaccharide oxidase, [Aspergillus clavatus NRRL 1] gi|119399867|gb|EAW10293.1| glucooligosaccharide oxidase, [Aspergillus clavatus NRRL 1]
  misc_feature (9)..(471): NCBI GI: 169768632 Blast Desc: [Aspergillus oryzae RIB40] gi|83766644|dbj|BAE56784.1| protein product [Aspergillus oryzae]
  misc_feature: Useful for introducing or modulating the production of volatile compounds
MKDFGVFSQCLLASVGGNSSSVAFPGSHGHDGNSTIISPYNLDVLATPIAVIIPNTTEQVAAAVRCAFDSDVKVQARSGGHSYANFGLASGGLSIDLELLRDFSLNGASGLAVVGSGTLLGQLNAELYESHGLYVPHGLSFTIGTGGHATVGGFGIASRAAGLMLDHIVEAEVVVANGSVVTCSEAKQPDLFFAIRGAAASFGIVTRLTLAARAAPPSIVNYSYAWVGGNSSFRADIFRTWQEVVYDITLPWALSATLTISPGAIVLSGGFLGTEDQFDEINLSQYFDSPTLVSKDVYDNFNNISSVWNQEIESTGIAGPSYFYAKSAFFGNETRILNDTVGRIMTHLDTAANGTRLWVVNFEMSGGYVASIPISSTAMPHRQARYAMLSYAQTSVKVSDTTFQFLDDLSSIAKSDHPNAFYGQYTGYVDPRQDSDEARRAHWADSLEKLQCIKARLDPYDIFHNQQSVLPIC

SEQ ID NO: 37198 - DNA, 3263 bp, Muscodor strobelii
  misc_feature: SGI EST ID NO. CUFF.89035.0
  misc_feature: Variant of the nucleotide sequence at SEQ ID NO 37196
gttggatccaagttatgccttagcgacttacacccttgcctaacactacctagtcctccttggcaggtggtttctacccaccacgcccagtatcggcaatgaaagactttggggtcttcagccagtgtttactggcttctgtcgggggcaattcgtcttcagttgctttcccgggctcacatggccatgatggaaactctacgattatcagcccatacaatcttgacgtactcgctacgccgattgccgtgattattccaaacacaacagagcaagtcgccgcagctgtcagatgtgccttcgacagcgatgtcaaggtccaagctagaagcggaggacatagctatgcaaacttcggtctggccagtggagggctttcgattgatttggaactgctgcgagacttttctctgaacggagcaagcggcctagcagtagtgggaagcggcacgctactgggacagctcaatgccgagctgtatgagtctcatggactctacgtacctcatggtttgagcttcactatcggcactggtggtcacgcgactgtcggagggtttggtattgcgtctagagcagccggccttatgctcgaccacatagtggaagccgaggtcgtcgtcgccaacggctcggtcgtgacttgttccgaagcaaagcaaccagacttattcttcgccatcagaggggccgctgcttcctttggcattgtcacacgactcactctagcagctcgggcggccccgccttctattgtaaactattcctacgcctgggttggaggaaactccagctttcgggcggatatcttccgtacttggcaggaagtcgtctacgatataactttgccatgggcgctctctgccaccttgacgattagtccgggcgccatcgtcttgtctggcgggttcctcggcaccgaggatcagttcgacgagatcaaccttagccaatattttgattcgcctactttagtgtcaaaagacgtgtacgataacttcaataacatctccagtgtgtggaatcaagaaattgagagcactggcatagctggcccgtcttacttctacgccaagtctgccttctttggcaacgagactcgtatactgaatgacacggtgggtaggatcatgacacaccttgacacagcggcgaacggtacgcggctttgggttgtcaacttcgagatgagcggaggttatgtcgcatcgatcccgatttcgagcacagctatgccacacaggcaagcaaggtacgcgatgttgtcgtatgctcagaccagtgtaaaggtatcagacaccactttccagttcctcgatgatcttagctcgatagctaagagcgatcaccccaacgcgttttacgggcagtacactggttacgtggatccaagacaggacagcgacgaggcaaggcgcgcacactgggccgacagtttggagaagcttcaatgcataaaagcacgtctggacccgtatgatattttccacaatcagcaatctgtacttccaatttgttgaggaatgctggtgtaatgcttcacctgattgggatcctcaacccgcctcccttgtaacttttcagtgctactcatagaaatagattggcattacatcgtctattaccgtaattgattaatacacgacatgtatccttattgcctagactacaactgtatcatttgcgtataacagcgccagggatggctaaatggaagagctccctgtaacacgttgaaactccgcctctgtatgcttccaagcctcgtccgcgatgccctcttttcgtaattttgaaaggagagatagaacgctctgacctgccgagtcattgacgctatcgatcgagtatactccaccaccaatctcaccctcggtactcgtcgcaatctcaagaccttcgccgagaggcacgccgttagcgtcgccagtctgcggtgggaatctggcgcttgttgcgaggaagacttgacgctctcctacttcaccgattggcgtgttcaagaacagaccgacaaccttgaaaatgcccttcattacgatagtcatagcagtaggtttcaattctcgggacatgcccgtattgacgaagcccggatagtcgtgaatgaaacttacttcgggcgcttgcttaccgatgtgctcgaaagcaagggtgatcattgagactatatgaccacgggctttatgtatagggagtcgaagagcctggaaatcgtcggtgtggatgggtccttccttggtggcggcgaaaaccgtcatgacgcggcgaagagcggaagctctcttgatcagcggcagtaaattgacgacgaatcggatacggcaataatatgttaaagccatggcgtagtgtatgttctcgtcagtctctgcgatgttataagctgtgacactgcgcaagccgatcaactagtcccggacagatgacatactcgtcccactgatgagagtccctatcgaaatggagaggagattgattgatgtttctttcgctgctatgtcacgacacaaggaatcgacattgcgaagcagactgctatcgtgttcgaggtagatgtactcgccgtcaggattgagcttttgcagttcctcccggatccggaggccgcacgcacgacgccggccagtaaagtagatgcgcggcttaagtgtgcttgtagcaaagtgcttgagaccggtctcgccgatgccgctcgtggcgccaatgaatacggcgacgagctggcttgggaggttggacttgatcctcgcattcgaggcgcggacaacttcgagagataccatgtttgaaattgtttgcctgcgctcttgttctcgtggatggcggaagatgtgtttagtcgcgtcccagtctgctcttggcgagcgtgcgtcgggttggggatgatgacctcacttcagttcggcgttcattcactggcgccagtgccatatcgatattgcctgccgtaactctacacccaattggctcggttgctcccggagttctggacttatgaaacctttgtcggggctcgcgctctgcacgttatacaagttacatcctttgtatccccttcaacaatgttcggagatcgctactcgattacatgaatgcgacaggtcacaggcatcgcctcgaatcagtaggagcatggtgtggccactggagtactaccctagtcattacaggatggaaggcaggtaggaattgtctatatacacctgacataggtgtctttagcaaattgggcttgctgctacctttgcgctgactcccac

SEQ ID NO: 37199 - DNA, 1017 bp, Muscodor strobelii
  misc_feature: SGI cDNA ID NO. 572906
  misc_feature: Encodes the peptide sequence at SEQ ID NO 37200
atggtatctctcgaagttgtccgcgcctcgaatgcgaggatcaagtccaacctcccaagccagctcgtcgccgtattcattggcgccacgagcggcatcggcgagaccggtctcaagcactttgctacaagcacacttaagccgcgcatctactttactggccggcgtcgtgcgtgcggcctccggatccgggaggaactgcaaaagctcaatcctgacggcgagtacatctacctcgaacacgatagcagtctgcttcgcaatgtcgattccttgtgtcgtgacatagcagcgaaagaaacatcaatcaatctcctctccatttcgatagggactctcatcagtgggacgaagactgacgagaacatacactacgccatggctttaacatattattgccgtatccgattcgtcgtcaatttactgccgctgatcaagagagcttccgctcttcgccgcgtcatgacggttttcgccgccaccaaggaaggacccatccacaccgacgatttccaggctcttcgactccctatacataaagcccgtggtcatatagtctcaatgatcacccttgctttcgagcacatcggtaagcaagcgcccgaagtaagtttcattcacgactatccgggcttcgtcaatacgggcatgtcccgagaattgaaacctactgctatgactatcgtaatgaagggcattttcaaggttgtcggtctgttcttgaacacgccaatcggtgaagtaggagagcgtcaagtcttcctcgcaacaagcgccagattcccaccgcagactggcgacgctaacggcgtgcctctcggcgaaggtcttgagattgcgacgagtaccgagggtgagattggtggtggagtatactcgatcgatagcgtcaatgactcggcaggtcagagcgttctatctctcctttcaaaattacgaaaagagggcatcgcggacgaggcttggaagcatacagaggcggagtttcaacgtgttacagggagctcttccatttag

SEQ ID NO: 37200 - protein, 338 aa, Muscodor strobelii
  misc_feature: SGI Peptide ID NO. 572906
  misc_feature (1)..(338): NCBI GI: 119487451 Blast Desc: NFIA_030540 [Neosartorya fischeri NRRL 181] gi|119410675|gb|EAW20621.1| conserved [Neosartorya fischeri NRRL 181]
  misc_feature (1)..(338): NCBI GI: 121719480 Blast Desc: conserved [Aspergillus clavatus NRRL 1] gi|119404637|gb|EAW15013.1| conserved [Aspergillus clavatus NRRL 1]
  misc_feature (1)..(338): NCBI GI: 116198989 Blast Desc: CHGG_07650 [Chaetomium globosum CBS 148.51] gi|88178929|gb|EAQ86397.1| CHGG_07650 [Chaetomium globosum CBS 148.51]
  misc_feature (1)..(333): NCBI GI: 255932335 Blast Desc: Pc12g08960 [Penicillium chrysogenum Wisconsin 54-1255] gi|211582343|emb|CAP80523.1| Pc12g08960 [Penicillium chrysogenum Wisconsin 54-1255]
  misc_feature (1)..(338): NCBI GI: 46134165 Blast Desc: FG09222.1 [Gibberella zeae PH-1]
  misc_feature (1)..(338): NCBI GI: 145248247 Blast Desc: An13g02340 [Aspergillus niger] gi|134081123|emb|CAK41633.1| protein product [Aspergillus niger]
  misc_feature (1)..(338): NCBI GI: 171688050 Blast Desc: protein product [Podospora anserina] gi|170943987|emb|CAP70097.1| protein product [Podospora anserina]
  misc_feature (1)..(338): NCBI GI: 256732276 Blast Desc: NECHADRAFT_80716 [Nectria haematococca mpVI 77-13-4]
  misc_feature (1)..(335): NCBI GI: 116197096 Blast Desc: CHGG_05146 [Chaetomium globosum CBS 148.51] gi|88181059|gb|EAQ88527.1| CHGG_05146 [Chaetomium globosum CBS 148.51]
  misc_feature (1)..(334): NCBI GI: 212526408 Blast Desc: short-chain dehydrogenases/reductase, [Penicillium marneffei ATCC 18224] gi|210072759|gb|EEA26846.1| short-chain dehydrogenases/reductase, [Penicillium marneffei ATCC 18224]
MVSLEVVRASNARIKSNLPSQLVAVFIGATSGIGETGLKHFATSTLKPRIYFTGRRRACGLRIREELQKLNPDGEYIYLEHDSSLLRNVDSLCRDIAAKETSINLLSISIGTLISGTKTDENIHYAMALTYYCRIRFVVNLLPLIKRASALRRVMTVFAATKEGPIHTDDFQALRLPIHKARGHIVSMITLAFEHIGKQAPEVSFIHDYPGFVNTGMSRELKPTAMTIVMKGIFKVVGLFLNTPIGEVGERQVFLATSARFPPQTGDANGVPLGEGLEIATSTEGEIGGGVYSIDSVNDSAGQSVLSLLSKLRKEGIADEAWKHTEAEFQRVTGSSSI

SEQ ID NO: 37201 - DNA, 2833 bp, Muscodor strobelii
  misc_feature: SGI EST ID NO. CUFF.89036.1
  misc_feature: Variant of the nucleotide sequence at SEQ ID NO 37199
gtgggagtcagcgcaaaggtagcagcaagcccaatttgctaaagacacctatgtcaggtgtatatagacaattcctacctgccttccatcctgtaatgactagggtagtactccagtggccacaccatgctcctactgattcgaggcgatgcctgtgacctgtcgcattcatgtaatcgagtagcgatctccgaacattgttgaaggggatacaaaggatgtaacttgtataacgtgcagagcgcgagccccgacaaaggtttcataagtccagaactccgggagcaaccgagccaattgggtgtagagttacggcaggcaatatcgatatggcactggcgccagtgaatgaacgccgaactgaagtgaggtcatcatccccaacccgacgcacgctcgccaagagcagactgggacgcgactaaacacatcttccgccatccacgagaacaagagcgcaggcaaacaatttcaaacatggtatctctcgaagttgtccgcgcctcgaatgcgaggatcaagtccaacctcccaagccagctcgtcgccgtattcattggcgccacgagcggcatcggcgagaccggtctcaagcactttgctacaagcacacttaagccgcgcatctactttactggccggcgtcgtgcgtgcggcctccggatccgggaggaactgcaaaagctcaatcctgacggcgagtacatctacctcgaacacgatagcagtctgcttcgcaatgtcgattccttgtgtcgtgacatagcagcgaaagaaacatcaatcaatctcctctccatttcgatagggactctcatcagtgggacgaagactgacgagaacatacactacgccatggctttaacatattattgccgtatccgattcgtcgtcaatttactgccgctgatcaagagagcttccgctcttcgccgcgtcatgacggttttcgccgccaccaaggaaggacccatccacaccgacgatttccaggctcttcgactccctatacataaagcccgtggtcatatagtctcaatgatcacccttgctttcgagcacatcggtaagcaagcgcccgaagtaagtttcattcacgactatccgggcttcgtcaatacgggcatgtcccgagaattgaaacctactgctatgactatcgtaatgaagggcattttcaaggttgtcggtctgttcttgaacacgccaatcggtgaagtaggagagcgtcaagtcttcctcgcaacaagcgccagattcccaccgcagactggcgacgctaacggcgtgcctctcggcgaaggtcttgagattgcgacgagtaccgagggtgagattggtggtggagtatactcgatcgatagcgtcaatgactcggcaggtcagagcgttctatctctcctttcaaaattacgaaaagagggcatcgcggacgaggcttggaagcatacagaggcggagtttcaacgtgttacagggagctcttccatttagccatccctggcgctgttatacgcaaatgatacagttgtagtctaggcaataaggatacatgtcgtgtattaatcaattacggtaatagacgatgtaatgccaatctatttctatgagtagcactgaaaagttacaagggaggcgggttgaggatcccaatcaggtgaagcattacaccagcattcctcaacaaattggaagtacagattgctgattgtggaaaatatcatacgggtccagacgtgcttttatgcattgaagcttctccaaactgtcggcccagtgtgcgcgccttgcctcgtcgctgtcctgtcttggatccacgtaaccagtgtactgcccgtaaaacgcgttggggtgatcgctcttagctatcgagctaagatcatcgaggaactggaaagtggtgtctgatacctttacactggtctgagcatacgacaacatcgcgtaccttgcttgcctgtgtggcatagctgtgctcgaaatcgggatcgatgcgacataacctccgctcatctcgaagttgacaacccaaagccgcgtaccgttcgccgctgtgtcaaggtgtgtcatgatcctacccaccgtgtcattcagtatacgagtctcgttgccaaagaaggcagacttggcgtagaagtaagacgggccagctatgccagtgctctcaatttcttgattccacacactggagatgttattgaagttatcgtacacgtcttttgacactaaagtaggcgaatcaaaatattggctaaggttgatctcgtcgaactgatcctcggtgccgaggaacccgccagacaagacgatggcgcccggactaatcgtcaaggtggcagagagcgcccatggcaaagttatatcgtagacgacttcctgccaagtacggaagatatccgcccgaaagctggagtttcctccaacccaggcgtaggaatagtttacaatagaaggcggggccgcccgagctgctagagtgagtcgtgtgacaatgccaaaggaagcagcggcccctctgatggcgaagaataagtctggttgctttgcttcggaacaagtcacgaccgagccgttggcgacgacgacctcggcttccactatgtggtcgagcataaggccggctgctctagacgcaataccaaaccctccgacagtcgcgtgaccaccagtgccgatagtgaagctcaaaccatgaggtacgtagagtccatgagactcatacagctcggcattgagctgtcccagtagcgtgccgcttcccactactgctaggccgcttgctccgttcagagaaaagtctcgcagcagttccaaatcaatcgaaagccctcca

SEQ ID NO: 37202 - DNA, 1632 bp, Muscodor strobelii
  misc_feature: SGI cDNA ID NO. 572907
  misc_feature: Encodes the peptide sequence at SEQ ID NO 37203
atgtcatcccatgcagaagatcacgtatccaaagtagagccagagtcactagtcccaaaaacccacggagatcaaaatggtcgtattccgcaggaagacacattcgagtacattaccggtacaaggttatactttgtgctcattgcgctgacggtcgtctattttctgatgatgctagacaacaccatcatcgccacggccattcccttcatttccaatgagtttaactcgttcagtgacgtcgggtgtccaagagccgcgctccaattacttggtggaaagatctatgctctgctagactctaagtgggagtatcagtggtctttcctcagctatcttgccctattcgagattggctcaaccatctgcggcagcgcaccgtcatctactgctttcatcataggaagagccgtcgctggcgtgggaggctcggggctgatgaccgggtccctggttatcttgaactcttgcgttccagcacaccgccagccagtgctcgtcggtgccctcatcggaatcggccagttcggccttgctcttggtccccttcttgggggcgcactgacgcagtacgccacttggagatggtgcttttacctcaatcttcccattggaggtgttgttgcagttgtcattgggttcataaccatacctgaccatatctcgaaacactcacttgcttcgatcatccccaacgttatcacacaatttaacatacctggacttgttctctttgcctcagccaccgttcagctcattttggcattgcaatggggcggcaaccgattcgcctggaagagttctcaaatcattggtcttttcctgggggctacggtgacctacatgatatggttgctgtgggatacccgattggcaagaactgccgtcataccactttccattgtcaagaaacgagtggtctgggcaagctgcgcagtagcgtctcttctaagcgcgactctttttgtcacaggttattatctccctatatatttccaggctgtgctggatttctccccattcctctctggcgtgaatgttcttccgaatatactcacgcagttggtcttcggggttttagcaggcggtatgatacaacgtgtaggctactacacgccattcctgctgatagggttggccatgaacgccgtgggatgtgcgattctgagtttacttaacaccaaagcccaagtaagcgcatgggtcggctatcaagtcgttttcggcgtcgggcgcggactgtgtctagcagtacccatcttggcggttcagttgacccagccgaagccgctcattccgatcactatatcgttgctcgtattcttgcagaatctaagcgcagcggttgctgttacgttagcgcaagtcattctcttcaacaggctcatcagtacgctgccacactacgcccagggcgttgacccaaccctaattagccgtagcggcacgactaatttccgatcaattgtgcctgaagagaagcttgaaggcgtcctgatggcatatgtactaagtttgaaggacgtctggtactattgcagtggcgtgggagctgcggctgtgttcttcggatttttctttggttggagaaatattaagaagaatgacgaagcctctacagtcgaaagttga

SEQ ID NO: 37203 - protein, 543 aa, Muscodor strobelii
  misc_feature: SGI Peptide ID NO. 572907
  misc_feature (50)..(451): Pfam Id: PF07690 Pfam Desc: Major Facilitator Superfamily
  misc_feature (6)..(536): NCBI GI: 145236515 Blast Desc: An06g00770 [Aspergillus niger] gi|134075361|emb|CAK44984.1| protein product [Aspergillus niger]
  misc_feature (11)..(537): NCBI GI: 119483622 Blast Desc: MFS transporter, [Neosartorya fischeri NRRL 181] gi|119409870|gb|EAW19817.1| MFS transporter, [Neosartorya fischeri NRRL 181]
  misc_feature (11)..(540): NCBI GI: 70983169 Blast Desc: MFS multidrug transporter [Aspergillus fumigatus Af293] gi|66844737|gb|EAL85074.1| MFS multidrug transporter, [Aspergillus fumigatus Af293]
  misc_feature (11)..(540): NCBI GI: 159123996 Blast Desc: MFS multidrug transporter, [Aspergillus fumigatus A1163]
  misc_feature (36)..(536): NCBI GI: 212539209 Blast Desc: MFS multidrug transporter, [Penicillium marneffei ATCC 18224] gi|210069502|gb|EEA23593.1| MFS multidrug transporter, [Penicillium marneffei ATCC 18224]
  misc_feature (8)..(536): NCBI GI: 242760731 Blast Desc: MFS multidrug transporter, [Talaromyces stipitatus ATCC 10500] gi|218723245|gb|EED22662.1| MFS multidrug transporter, [Talaromyces stipitatus ATCC 10500]
  misc_feature (18)..(539): NCBI GI: 212541702 Blast Desc: conserved [Penicillium marneffei ATCC 18224] gi|210068305|gb|EEA22397.1| conserved [Penicillium marneffei ATCC 18224]
  misc_feature (13)..(543): NCBI GI: 23574647 Blast Desc: efflux pump [Penicillium citrinum]
  misc_feature (3)..(536): NCBI GI: 242795376 Blast Desc: efflux pump antibiotic resistance protein, [Talaromyces stipitatus ATCC 10500] gi|218719162|gb|EED18582.1| efflux pump antibiotic resistance protein, [Talaromyces ATCC
  misc_feature (4)..(542): NCBI GI: 212536316 Blast Desc: conserved [Penicillium marneffei ATCC 18224] gi|210070713|gb|EEA24803.1| conserved [Penicillium marneffei ATCC 18224]
MSSHAEDHVSKVEPESLVPKTHGDQNGRIPQEDTFEYITGTRLYFVLIALTVVYFLMMLDNTIIATAIPFISNEFNSFSDVGCPRAALQLLGGKIYALLDSKWEYQWSFLSYLALFEIGSTICGSAPSSTAFIIGRAVAGVGGSGLMTGSLVILNSCVPAHRQPVLVGALIGIGQFGLALGPLLGGALTQYATWRWCFYLNLPIGGVVAVVIGFITIPDHISKHSLASIIPNVITQFNIPGLVLFASATVQLILALQWGGNRFAWKSSQIIGLFLGATVTYMIWLLWDTRLARTAVIPLSIVKKRVVWASCAVASLLSATLFVTGYYLPIYFQAVLDFSPFLSGVNVLPNILTQLVFGVLAGGMIQRVGYYTPFLLIGLAMNAVGCAILSLLNTKAQVSAWVGYQVVFGVGRGLCLAVPILAVQLTQPKPLIPITISLLVFLQNLSAAVAVTLAQVILFNRLISTLPHYAQGVDPTLISRSGTTNFRSIVPEEKLEGVLMAYVLSLKDVWYYCSGVGAAAVFFGFFFGWRNIKKNDEASTVES

SEQ ID NO: 37204 - DNA, 818 bp, Muscodor strobelii
  misc_feature: SGI EST ID NO. CUFF.88922.0
  misc_feature: Variant of the nucleotide sequence at SEQ ID NO 37202
ggtctttcctcagctatcttgccctattcgagattggctcaaccatctgcggcagcgcaccgtcatctactgctttcatcataggaagagccgtcgctggcgtgggaggctcggggctgatgaccgggtccctggttatcttgaactcttgcgttccagcacaccgccagccaggtatgttcttcccgcccctgcagaattgatgattccagcttatgacagtacagtgctcgtcggtgccctcatcggaagtacgtatggccgatgcgctatcatgccttcgtgtatttatacttacgttcgaaataaatcattatagtcggccagttcggccttgctcttggtccccttcttgggggcgcactgacgcagtacgccacttggagatggtgcttttacctcaatcttcccattggaggtgttgttgcagttgtcattgggttcataaccatacctgaccatatctcgaaacactcacttgcttcgatcatccccaacgttatcacacaatttaacatacctggacttgttctctttgcctcagccaccgttcagctcattttggcattgcaatggggcggcaaccgattcgcctggaagagttctcaaatcattggtcttttcctgggggctacggtgacctacatgatatggttgctgtgggatacccgattggcaagaactgccgtcataccactttccattgtcaagaaacgagtggtctgggcaagctgcgcagtagcgtctcttctaagcgcgactctttttgtcacaggttattatctccctatatatttccaggctgtgctggatttctc

SEQ ID NO: 37205 - DNA, 1401 bp, Muscodor strobelii
  misc_feature: SGI cDNA ID NO. 572908
  misc_feature: Elevated expression when VOC is produced
  misc_feature: Encodes the peptide sequence at SEQ ID NO 37206
atggactctcaaaagctgagttcacagggaggttctgtggatgtcgttggccaattcccgcagctgaagacattcaatcacggcttgttattgtttcctatctccgagaatactacagacgcgatcataacgactgcattgaaggaggccatttcgactgtcatcaaacatgtcccatggcttggtgagcaggttgtccacgaaggccagcaagaggggcgttctggcacctttaggacgaaacctatcgatcttcagagcatcgaagacgtgatcctctacactaaggattgtcgcgacctttgtccctcgtatgccgagatagttgaggctggtgggccactttcaatgcttgacggcaacgttctatgcccctttccaggtttcccattgagctatgatggtgtcattaccggaccggtgcctgtcgtggcgattcaagcaaacttcatccaaggtggcctacttctcaacttctccaaccagcataacatgatggacgcgacaggcacgttcaattttatcagtctcctctctttccccttgcgaggagagattatccccaaagcaaatatcgatcaggccaacactgatcgcagcaatgtcattccgttgctggatcccaatgagcctctactcgatcacgcccaccttctcgaagcgccgattccacggtcgatgattgcatccgggatagcaaagctggggccatgcaaatgggcagtcttccgctttcgtcaacagaacattgccgcagtcaagctgtcagcctcccgacgcgatgaattcgttgactcaattcagtatataactagcaatgatgctatttgtgcgcatttctggaaaagtcttgcaagagctcgcctccggaatggtagcgtagattcaacctcaaaatcaaaatttctgcgggccatcgacgctcgttcagcagtcaaagcacccccaggctacatgggtcaaatggtgtaccatgctgcaacgacattgacgtaccaggagctggtaagcagcaagctgacgctttcgaacttggcatctagactacgcgccgacttgaacaaatctaacagtgaatgggccgtccgtagctatgcaaccttcatatctcgtctaccagacaagtccaagcttgtctacggcggagggatgaatccactgctagacgtcgggaactcgtcgatgtctcaactcaacatagacgatataaatttcggaacccttggcaaagcgactatgagccggcggccaaacctggcgccagtaccgggacttatgtacctcttcccgcctgattctgtgacgcgaaacttgccgcttttggtgtgccttggcaacagtgacctgcaggctatgaggtcggacgtggaatggagcgctgtagctgaatacgtaggctag

SEQ ID NO: 37206 - protein, 466 aa, Muscodor strobelii
  misc_feature: SGI Peptide ID NO. 572908
  misc_feature (11)..(459): Pfam Id: PF02458 Pfam Desc: Transferase family
  misc_feature (14)..(459): NCBI GI: 189188766 Blast Desc: trichothecene 3-O-acetyltransferase [Pyrenophora tritici-repentis Pt-1C-BFP] gi|187972328|gb|EDU39827.1| trichothecene 3-O-acetyltransferase [Pyrenophora tritici-repentis
  misc_feature (14)..(466): NCBI GI: 242760662 Blast Desc: trichothecene 3-O-acetyltransferase, [Talaromyces stipitatus ATCC 10500] gi|218723232|gb|EED22649.1| trichothecene 3-O-acetyltransferase, [Talaromyces stipitatus ATCC 10500]
  misc_feature (14)..(466): NCBI GI: 212539231 Blast Desc: trichothecene 3-O-acetyltransferase, [Penicillium marneffei ATCC 18224] gi|210069513|gb|EEA23604.1| trichothecene 3-O-acetyltransferase, [Penicillium marneffei ATCC 18224]
  misc_feature (10)..(466): NCBI GI: 145241698 Blast Desc: An09g01800 [Aspergillus niger] gi|134078035|emb|CAK40118.1| protein product [Aspergillus niger]
  misc_feature (14)..(466): NCBI GI: 116204289 Blast Desc: CHGG_10028 [Chaetomium globosum CBS 148.51] gi|88176156|gb|EAQ83624.1| CHGG_10028 [Chaetomium globosum CBS 148.51]
  misc_feature (14)..(466): NCBI GI: 145245852 Blast Desc: An12g00930 [Aspergillus niger] gi|134079891|emb|CAK41023.1| protein product [Aspergillus niger]
  misc_feature (14)..(466): NCBI GI: 212539165 Blast Desc: trichothecene 3-O-acetyltransferase, [Penicillium marneffei ATCC 18224] gi|210069480|gb|EEA23571.1| trichothecene 3-O-acetyltransferase, [Penicillium marneffei ATCC 18224]
  misc_feature (14)..(466): NCBI GI: 242760837 Blast Desc: trichothecene 3-O-acetyltransferase, [Talaromyces stipitatus ATCC 10500] gi|218723265|gb|EED22682.1| trichothecene 3-O-acetyltransferase, [Talaromyces stipitatus ATCC 10500]
  misc_feature (14)..(466): NCBI GI: 169785391 Blast Desc: [Aspergillus oryzae RIB40] gi|83775904|dbj|BAE66023.1| protein product [Aspergillus oryzae]
  misc_feature (14)..(466): NCBI GI: 238506385 Blast Desc: transferase family protein [Aspergillus flavus NRRL3357] gi|220689107|gb|EED45458.1| transferase family protein [Aspergillus flavus NRRL3357]
  misc_feature: Useful for introducing or modulating the production of volatile compounds
MDSQKLSSQGGSVDVVGQFPQLKTFNHGLLLFPISENTTDAIITTALKEAISTVIKHVPWLGEQVVHEGQQEGRSGTFRTKPIDLQSIEDVILYTKDCRDLCPSYAEIVEAGGPLSMLDGNVLCPFPGFPLSYDGVITGPVPVVAIQANFIQGGLLLNFSNQHNMMDATGTFNFISLLSFPLRGEIIPKANIDQANTDRSNVIPLLDPNEPLLDHAHLLEAPIPRSMIASGIAKLGPCKWAVFRFRQQNIAAVKLSASRRDEFVDSIQYITSNDAICAHFWKSLARARLRNGSVDSTSKSKFLRAIDARSAVKAPPGYMGQMVYHAATTLTYQELVSSKLTLSNLASRLRADLNKSNSEWAVRSYATFISRLPDKSKLVYGGGMNPLLDVGNSSMSQLNIDDINFGTLGKATMSRRPNLAPVPGLMYLFPPDSVTRNLPLLVCLGNSDLQAMRSDVEWSAVAEYVG

SEQ ID NO: 37207 - DNA, 1739 bp, Muscodor strobelii
  misc_feature: SGI EST ID NO. CUFF.88930.0
  misc_feature: Variant of the nucleotide sequence at SEQ ID NO 37205
ccggactttgattgtaataggcaaatgtacacctggaattagatgttgagaaagatagcgtaaatttatatgcaatcggcgttgtaggcagagagtaggcaattagacgatttgtgaacgctcgcaaccatgtatgtggagccttggacggcgcagatagcaatgcttgctgataccgccacgaaatcctacgaacgcctgtctgagactgaatgatggactctcaaaagctgagttcacagggaggttctgtggatgtcgttggccaattcccgcagctgaagacattcaatcacggcttgttattgtttcctatctccgagaatactacagacgcgatcataacgactgcattgaaggaggccatttcgactgtcatcaaacatgtcccatggcttggtgagcaggttgtccacgaaggccagcaagaggggcgttctggcacctttaggacgaaacctatcgatcttcagagcatcgaagacgtgatcctctacactaaggattgtcgcgacctttgtccctcgtatgccgagatagttgaggctggtgggccactttcaatgcttgacggcaacgttctatgcccctttccaggtttcccattgagctatgatggtgtcattaccggaccggtgcctgtcgtggcgattcaagcaaacttcatccaaggtggcctacttctcaacttctccaaccagcataacatgatggacgcgacaggcacgttcaattttatcagtctcctctctttccccttgcgaggagagattatccccaaagcaaatatcgatcaggccaacactgatcgcagcaatgtcattccgttgctggatcccaatgagcctctactcgatcacgcccaccttctcgaagcgccgattccacggtcgatgattgcatccgggatagcaaagctggggccatgcaaatgggcagtcttccgctttcgtcaacagaacattgccgcagtcaagctgtcagcctcccgacgcgatgaattcgttgactcaattcagtatataactagcaatgatgctatttgtgcgcatttctggaaaagtcttgcaagagctcgcctccggaatggtagcgtagattcaacctcaaaatcaaaatttctgcgggccatcgacgctcgttcagcagtcaaagcacccccaggctacatgggtcaaatggtgtaccatgctgcaacgacattgacgtaccaggagctggtaagcagcaagctgacgctttcgaacttggcatctagactacgcgccgacttgaacaaatctaacagtgaatgggccgtccgtagctatgcaaccttcatatctcgtctaccagacaagtccaagcttgtctacggcggagggatgaatccactgctagacgtcgggaactcgtcgatgtctcaactcaacatagacgatataaatttcggaacccttggcaaagcgactatgagccggcggccaaacctggcgccagtaccgggacttatgtacctcttcccgcctgattctgtgacgcgaaacttgccgcttttggtgtgccttggcaacagtgacctgcaggctatgaggtcggacgtggaatggagcgctgtagctgaatacgtaggctagaagcaacaagatgctaccgttacctgataagaaatgttgagggaggcaatcgatagacgatttacgtaaattattttgtatagattctatcgacccaaatcacaaacgtgccaagcaagcgat

SEQ ID NO: 37208 - DNA, 7665 bp, Muscodor strobelii
  misc_feature: SGI cDNA ID NO. 572909
  misc_feature: Encodes the peptide sequence at SEQ ID NO 37209
atggaaagcgcaacgccgcttacggagccgctcgcggttattggaatggcatgtcgtttcgcaggagatgtcaacagccccgagaagctctggacgatgtgtgccgaggggcgcaatggttggagtgaagttcctgcttcgagatttaattcgaacgtaacgggcggctatttcctgtccgaagatccagggctgttcgacgcgaacttcttcaacatatcagcagaggctgcagccagtctggacccccagtttcgattacagctggagacaacatacgaagcatttgagagtgctggattaacactcggagatgttgctggatccaatacatcggtgttctcgggtgtcttttttcgagattatcttgagggtcaattgagagatcccgagtcactaccccgacttctcctactgggggctggtggtgctatggcatcgaacagaatttctcatttcttcgatctaaagggaccgagtatgtccatcgacacagggtgttctaccacgcttactgcttttcatcaagcctgccaaagtctacgaaaccgagaaagcgacatgtccgtagtcggaggcgcaaacatcatgttgaaccctgacatgttcatagtcatgtcatcattgactttactatcgccggatggtcgttcgtacgcttttgacagtcgagcttccggatatggtcgtggagagggctccgccactatcgttcttaaacgactgggagacgccctacgctctggcgatcccattagagcggtgattcgcgagacaggcatcaatcaagacggcaagacggagacaatcacgacaccgagcccgcaatcgcaagaaagtcttattcggcaatgttatgcaagagcgggcttggatccgaatgaaacaacgtacttcgaagcccatggcactggcactgcttcaggcgatccgatagaggctgcagcgattgccgctgctttcaggagagacccggactttccgctcttgtttggatcagtcaaaacaaatatcgggcataccgagaactcgagtggtctggcaagcatcataaaagtcatcatggcgcttcagcattcgcagatccccccgagtcttaattttgaaattccaaacgaaaagatcagtatacaggagaagggacttatgatatcgacgagactaacgccgtggcggggagcaaatggtatccggcgtgcgtcagtgaacaacttcggttatggtggctccaatgcacatgctatcatagaggactacgggtcttacgctgctcagttctcggacgcaggttctatttcgacacacgatcctcaatgcaatggagaaaagcaacatttgaatggtacttatgcagagagtatagatcaaggtggtaacaacaagtcaagggtattcgtcctcagtgctcgtgatgaaaggacggtcaaagttatggcgcgaaatctctcaaatcacattgaccgcttgtcgttgccggccagggacgaccttatggacagtctagcatacactctcggccaacgtcgcactagattttctcgaactatcacgctggtcgccagcgatggatccggtctgttgacagcgttggattcagacccttccgtctcttgtactaagtccagcgagccaaatattgcctttgtcttcactggacaaggtgcccagtggtgggggatgggcagagagctcttcgcttcgtatccagtctacagaaactctttactcgattgtcagcagcttctacgtgggtttcaatgcccgtggcttctaatagaagagctgaacaaagatgccacgacgacgagagtaaacgagacacagttcagcatgccaatatgcacggctgttcagattgctcttgtagaccttctgaggtcgtggaatatcaactgctcggcaattacaagtcactctagtggcgagatagcggcagcttacgcagcaagggcattaacgaaggaagcagcaatacacattagctacgcgcgcagtcagttcgtagtgagctccaaaggatctatgacagctgtgggcctgagtgccgatgattgcgtccgttacacctcaagactcacccgaggcagagtggtggtagcatgtatgaacagtccaaaaagcaccacactctctggagatatatccgctctggatgagctggaaagcgttcttcacactgaagggatattcttcagacgactgcgtgtcggagctgcttaccattcattccatatggacccttactatgagccgtatgttgcctggttggactccaagattgattttcccaactcaaaacacgcaaatatcgatgacgagctttcggtggtcttcgcatcacccaccacgggaggtatacttacaagccggcaacagttgtgttctccgtcgcactgggctcggagccttgtgaacccggtccgcttcgctgaggcgttcaaacaaatgtgtttggcacagggaagtaatcaactcgacattgttgtagaaataggaccgcacagtgctctggtcggtcccattcaggatcttctctctacccctgaactccgcaaccaaagtatccagtatgcgccttgtttggtcaggggcagagaggctgccgtaacgatgaaagacgtggtgtgtagtctgctacgatgcggatatccagttgatctagggagcgtgaactttccgacaggtatcaagggtctgcgcaccattcctgatctgcccagttacccctggcaccactcggtacggtactggaatgaaccacgccataataaggcatggagacaaagatcatcgccatcttgctgtgttctcggaaatcttgttcctggagcgaatgagaaaaatctagtgtggcggaatattatccgagcttcagatataccctggattcgggatcacgttgtgcaatcgaaactggtgtacccaggagcaggcatgatatgtatggcaatccaggcagcacttcaagtgtcaaaacgtaggcttcagacagtctcaggatttactctacgtgacatagagatacatcaagctctagtcattccccatgacattgagagtacggaggctcagatcgaacttcgtgagtgtagtgcgtgggacctgtctacaagaggttggaaacacttcacaataaataaagtggacaacgagaacgtgtggatcgaggtctgcagcggcttcataggaatcgacacggagaacgagagcatctcactggagccgtccgtacaaacgagttcagaagcctggcacaactccacccactactatcacaacatcccacccatgcgactgtatgcgcgtatgtccgactcggatataatccatggtccttcatttcaaaacatcaaacgggttaggacacggaggaatcaggctctctgcgactttcaagttggcacagcagcacatgttactgcccactcttgtcaccatgatcatgtaatccacccgacaacactcgacactatctttcaatgtttatacgcagcaatacccaggccagttctcaaggaaagtatgcctctggtacctgtctttctcaagtctctccgtatagcccgtaacatggctcaatcagtcggagccggatttgtggctgaagcgttcttcctgcgcgcagacaaacaaaaaacagaaggcaatgtaattgtatacgacaacaagagccacgagagggtcattagtgctgatggccttattctcaagtcacttgtgggtgccacgaccattgaacctcgagcgtctgctaaacatgttgactgggtggacctaagatggggccctgatattactttcttatctgcttccacgcttcgagcctcgctgagcgtagagatccccgtggatgaagcactagttattcaggatttaagccgagccagttactattttctcaacgatgcacgcgccgagttgtccaaagtcgatattggccgtctggagcctcattttcagaagtatctggaatgggttcatagttgttgtgaccgggctgaccataaggggctgccgggtcacagccaggagtgggcagaccatgacgaagaaacaagagcaatgatcatccacagggtagcaagcgcaagtgccaatggcgaaatggtttgtcgtctaggtccccagattccagccgtacttcgaggagaaaaggtggcattggaaatgatgactcgggacggcttactcgaaagatactacaccgagggcttgaaatggcaaagatcataccaacagatgatccaaattgtacggcactttctgcacaagcatccgcaagccactatactggaggttgggggaggcactgggggattcaccaggcagctgcttaccaccttggactcagaggttcaaacagcaacctatcatttcacagatatttcacatggattccttgaaggtgcacgagacaagttccctaagtgggaccatcttatgacttacaaaagactcgacattgaacaagatccggcgacgcaggggttccaggcccaggcctacgatctcgtcattgcatcacaagttctccatgctacaagttcaatgaaacggacattgactaacgtcagaaaacttctacgtccttctggaagactattcatgatcgagacaacaaaagatcagctcgatgtgcagcttgcattcggcttgttaccaggatggtggctatcgaccgagatggagcgaaggtcaagcccatcgctttcaacggcaatgtgggatcaggtcttgagaaagacgggttttagcggagttgagctcgacattcacgattgccaagacgaagacctgtactcgttcagcgtcattacatcaactgcgagaccagttgctctcaaaaatggcgtgcacattccgaatggaaaaccatgcaccgatgataagtctcaggccgagataacgctaggagatatcgcactcgtaactcgcaatagcacgtcaacgagagctctcgagtggcttaaactactacagtcatccatctcggacgtcagtcatcggactcctcaaatatcaagtatatcagatgttgatccctcaggtaagatcgttatctacgtgggtgatattgaggagggcaccgttcttcaagaaccgggcatagagaactttgagcaagttaaggctctctgcagccgatcgagggcgctactttgggtcacacgaggtggcgctgcactctgtgagatcaccgaggaagctgtgccttgggggtttcttcggacggtgagaactgagtatactactaagaacttgatcgccctcgatttggatcctaggagagaaccgtggtccaccatcagcgtcccgattgttacagacgtcgttcggagtatcatgcttgagccaaagcaagattatatctcgcaagatttcgagttcgccgagcgggatggtgtagtccaagtactccggtacttcgcggacgaagcgagatcaaaaattctccattctcaatcggaacaaaggccagtagtgtctcagatttttgaacagacgaatcgagtagtcaagatgagcatcggcacgcctggattgctcgaaactttgagattcgaggagtggtcagaccctggcaaagacattgaagcgataggcctcgaaatcaatcccaaggcattcggggtgaactttcgcgacatcatggtggccatgggacagcttggccgcgaagagataatgggtttcgagtgtgccggcgtagtgactcgagtgggtaagcttgctatggagcatggtttcgcggtaggtgatcgtgttgcagcactcatgaaggggaattacagcaacatagtacaagtcccctggaccaacgcaatccacataccgcatagcatgtcattcgagattgcctcttccattccgatgatatttacgactgcacatattgcactggtaaacaacgcgcgcatcactcccggcgagtcggttctcatccatgctgcgactgggggagtcggtcaggctgcaatcatgattgcgaagcacatcggcgcgacggtttatgccacagcggggaccccggagaagagacggtttctcacagaaaaatatggaatcccagaaacgcatgttttctccagtcgcaacgacagattcagcagtggcgtcctcgctgtgacaaataagcgaggggtcgacgttgtcctcaattcactcgcgggagacttgatccagcatggactcgactgtcttgcgcaatttggtcgttttgtggagattggtaaaagagacatcgagacaaatagcaggattggactgcaagctttctcacgctcgatctcatttagtcacttggacctcttgcagctcgaggaccatgagggacctttagtccatcggaccctgaaaaacataatgaccatgtttgaagagcgggtattttcaccggtcgaacccgtctccgtatatcctatcggcgaagttgagaacacattccgtctgatgcaagctggaagacacatgggcaagattgtcgttcgtgttggaacaaacgatactgtacctgtaagtcaattactcaaggctggagacgcgtattgctcttatctggttgtcggtggaaatggcggccttggtcgttcgatatgcctttggttggcagagcatggagccaaagatttaattgcgctgtcgcgcagtgcggacaaaagaactcagccacatggacttgtactagatatggaacaattaggttgtcgcgttgagtttgttgcatgtgacgtagcggacaaacatgagcttgcaaaagttgtcgccgatttgaaggcttcgaagccgcgcattcgaggcatcatccacggtgctatggtgcttcaggattccgtgctagagaatatgacactagatgattatcgggccgccacaaggccgaaaattaatggctctcagaacttgcatgagctttttgccgacgaagacctagactttttcatcatgttgtcgtcgctcaccagtatcattgggtaccctagccaagccaactacggcgctgggggaagctttcaggacgccttggctcatcaccgcaacgcacaggggttacccggcgtctccattaacctgggtgctgtcggatccgttgggtacgttgccgcgcacgagggcacagcaaatcgcctggtaaattccggatacactatactcagcgaggaagaagttttaagatgtattgggctcgcaatactagctccaatgagcggacagatactgctaggaattaacagggacgatggtcagcactggaacgactcgccactgggtcgggatgcacgcttcgccagactgcgtcgtgatgtgcaagatgagagcagaggccatgcgcatatggataaaaccaactcatgcgacacgacagtcaacatcgctgtagcatcgaagctcgaagacgcaattggcgccgtggtcggttgccttttaaagaggctagcgcgcctcttcacgatgccagacggtgatcttgacgaaagcaagagtctcactgactatggagttgactctttggtggcaattgaactgcgcaatgtgctgcttcatcaagtcggttctgagatttctatcttcgacatcatgcagagttcctcgatcagagatctagcatcgctggcggccacgaaaagtgtacatctagataagagtcttctgatacccgagagctag

SEQ ID NO: 37209 - protein, 2554 aa, Muscodor strobelii
  misc_feature: SGI Peptide ID NO. 572909
  misc_feature (547)..(885): Pfam Id: PF00698 Pfam Desc: Acyl transferase domain
  misc_feature (1866)..(1944): Pfam Id: PF08240 Pfam Desc: Alcohol dehydrogenase GroES-like domain
  misc_feature (2183)..(2350): Pfam Id: PF00106 Pfam Desc: short chain dehydrogenase
  misc_feature (1975)..(2127): Pfam Id: PF00107 Pfam Desc: Zinc-binding dehydrogenase
  misc_feature (9)..(245): Pfam Id: PF00109 Pfam Desc: Beta-ketoacyl synthase, N-terminal domain
  misc_feature (253)..(369): Pfam Id: PF02801 Pfam Desc: Beta-ketoacyl synthase, C-terminal domain
  misc_feature (2183)..(2363): Pfam Id: PF08659 Pfam Desc: KR domain
  misc_feature (1431)..(1536): Pfam Id: PF08241 Pfam Desc: Methyltransferase domain
  misc_feature (1431)..(1534): Pfam Id: PF08242 Pfam Desc: Methyltransferase domain
  misc_feature (2186)..(2256): Pfam Id: PF01073 Pfam Desc: 3-beta hydroxysteroid dehydrogenase/isomerase family
  misc_feature (547)..(843): Pfam Id: PF00698 Pfam Desc: Acyl transferase domain
  misc_feature (1874)..(1944): Pfam Id: PF08240 Pfam Desc: Alcohol dehydrogenase GroES-like domain
  misc_feature (1975)..(2098): Pfam Id: PF00107 Pfam Desc: Zinc-binding dehydrogenase
  misc_feature (10)..(2550): NCBI GI: 171688048 Blast Desc: protein product [Podospora anserina] gi|170943986|emb|CAP70096.1| protein product [Podospora anserina]
  misc_feature (10)..(2549): NCBI GI: 85091888 Blast Desc: NCU04865 [Neurospora crassa OR74A] gi|28920522|gb|EAA29886.1| conserved [Neurospora crassa OR74A]
  misc_feature (8)..(2551): NCBI GI: 29027893 Blast Desc: type I polyketide synthase [Phoma sp. C2932]
  misc_feature (8)..(2541): NCBI GI: 145241724 Blast Desc: An09g01930 [Aspergillus niger] gi|134078048|emb|CAK40131.1| protein product [Aspergillus niger]
  misc_feature (9)..(2551): NCBI GI: 67541242 Blast Desc: AN6791.2 [Aspergillus nidulans FGSC A4] gi|40739419|gb|EAA58609.1| AN6791.2 [Aspergillus nidulans FGSC A4] gi|259480385|tpe|CBF71467.1| TPA: polyketide synthase, (JCVI)
  misc_feature (8)..(2541): NCBI GI: 23574645 Blast Desc: polyketide synthase [Penicillium citrinum]
  misc_feature (10)..(2542): NCBI GI: 116197098 Blast Desc: CHGG_05147 [Chaetomium globosum CBS 148.51] gi|88181060|gb|EAQ88528.1| CHGG_05147 [Chaetomium globosum CBS 148.51]
  misc_feature (8)..(2546): NCBI GI: 115401384 Blast Desc: ATEG_07659 [Aspergillus terreus NIH2624] gi|114190221|gb|EAU31921.1| ATEG_07659 [Aspergillus terreus NIH2624]
  misc_feature (10)..(2551): NCBI GI: 40787368 Blast Desc: polyketide synthase [Cochliobolus heterostrophus]
  misc_feature (3)..(2541): NCBI GI: 74275562 Blast Desc: polyketide synthase [Monascus pilosus]
  misc_feature (9)..(1760): SWISSPROT Homolog: EC 2.3.1.161 Lovastatin nonaketide synthase
  misc_feature: Useful for fungicidal and/or biocontrol applications
MESATPLTEPLAVIGMACRFAGDVNSPEKLWTMCAEGRNGWSEVPASRFNSNVTGGYFLSEDPGLFDANFFNISAEAAASLDPQFRLQLETTYEAFESAGLTLGDVAGSNTSVFSGVFFRDYLEGQLRDPESLPRLLLLGAGGAMASNRISHFFDLKGPSMSIDTGCSTTLTAFHQACQSLRNRESDMSVVGGANIMLNPDMFIVMSSLTLLSPDGRSYAFDSRASGYGRGEGSATIVLKRLGDALRSGDPIRAVIRETGINQDGKTETITTPSPQSQESLIRQCYARAGLDPNETTYFEAHGTGTASGDPIEAAAIAAAFRRDPDFPLLFGSVKTNIGHTENSSGLASIIKVIMALQHSQIPPSLNFEIPNEKISIQEKGLMISTRLTPWRGANGIRRASVNNFGYGGSNAHAIIEDYGSYAAQFSDAGSISTHDPQCNGEKQHLNGTYAESIDQGGNNKSRVFVLSARDERTVKVMARNLSNHIDRLSLPARDDLMDSLAYTLGQRRTRFSRTITLVASDGSGLLTALDSDPSVSCTKSSEPNIAFVFTGQGAQWWGMGRELFASYPVYRNSLLDCQQLLRGFQCPWLLIEELNKDATTTRVNETQFSMPICTAVQIALVDLLRSWNINCSAITSHSSGEIAAAYAARALTKEAAIHISYARSQFVVSSKGSMTAVGLSADDCVRYTSRLTRGRVVVACMNSPKSTTLSGDISALDELESVLHTEGIFFRRLRVGAAYHSFHMDPYYEPYVAWLDSKIDFPNSKHANIDDELSVVFASPTTGGILTSRQQLCSPSHWARSLVNPVRFAEAFKQMCLAQGSNQLDIVVEIGPHSALVGPIQDLLSTPELRNQSIQYAPCLVRGREAAVTMKDVVCSLLRCGYPVDLGSVNFPTGIKGLRTIPDLPSYPWHHSVRYWNEPRHNKAWRQRSSPSCCVLGNLVPGANEKNLVWRNIIRASDIPWIRDHVVQSKLVYPGAGMICMAIQAALQVSKRRLQTVSGFTLRDIEIHQALVIPHDIESTEAQIELRECSAWDLSTRGWKHFTINKVDNENVWIEVCSGFIGIDTENESISLEPSVQTSSEAWHNSTHYYHNIPPMRLYARMSDSDIIHGPSFQNIKRVRTRRNQALCDFQVGTAAHVTAHSCHHDHVIHPTTLDTIFQCLYAAIPRPVLKESMPLVPVFLKSLRIARNMAQSVGAGFVAEAFFLRADKQKTEGNVIVYDNKSHERVISADGLILKSLVGATTIEPRASAKHVDWVDLRWGPDITFLSASTLRASLSVEIPVDEALVIQDLSRASYYFLNDARAELSKVDIGRLEPHFQKYLEWVHSCCDRADHKGLPGHSQEWADHDEETRAMIIHRVASASANGEMVCRLGPQIPAVLRGEKVALEMMTRDGLLERYYTEGLKWQRSYQQMIQIVRHFLHKHPQATILEVGGGTGGFTRQLLTTLDSEVQTATYHFTDISHGFLEGARDKFPKWDHLMTYKRLDIEQDPATQGFQAQAYDLVIASQVLHATSSMKRTLTNVRKLLRPSGRLFMIETTKDQLDVQLAFGLLPGWWLSTEMERRSSPSLSTAMWDQVLRKTGFSGVELDIHDCQDEDLYSFSVITSTARPVALKNGVHIPNGKPCTDDKSQAEITLGDIALVTRNSTSTRALEWLKLLQSSISDVSHRTPQISSISDVDPSGKIVIYVGDIEEGTVLQEPGIENFEQVKALCSRSRALLWVTRGGAALCEITEEAVPWGFLRTVRTEYTTKNLIALDLDPRREPWSTISVPIVTDVVRSIMLEPKQDYISQDFEFAERDGVVQVLRYFADEARSKILHSQSEQRPVVSQIFEQTNRVVKMSIGTPGLLETLRFEEWSDPGKDIEAIGLEINPKAFGVNFRDIMVAMGQLGREEIMGFECAGVVTRVGKLAMEHGFAVGDRVAALMKGNYSNIVQVPWTNAIHIPHSMSFEIASSIPMIFTTAHIALVNNARITPGESVLIHAATGGVGQAAIMIAKHIGATVYATAGTPEKRRFLTEKYGIPETHVFSSRNDRFSSGVLAVTNKRGVDVVLNSLAGDLIQHGLDCLAQFGRFVEIGKRDIETNSRIGLQAFSRSISFSHLDLLQLEDHEGPLVHRTLKNIMTMFEERVFSPVEPVSVYPIGEVENTFRLMQAGRHMGKIVVRVGTNDTVPVSQLLKAGDAYCSYLVVGGNGGLGRSICLWLAEHGAKDLIALSRSADKRTQPHGLVLDMEQLGCRVEFVACDVADKHELAKVVADLKASKPRIRGIIHGAMVLQDSVLENMTLDDYRAATRPKINGSQNLHELFADEDLDFFIMLSSLTSIIGYPSQANYGAGGSFQDALAHHRNAQGLPGVSINLGAVGSVGYVAAHEGTANRLVNSGYTILSEEEVLRCIGLAILAPMSGQILLGINRDDGQHWNDSPLGRDARFARLRRDVQDESRGHAHMDKTNSCDTTVNIAVASKLEDAIGAVVGCLLKRLARLFTMPDGDLDESKSLTDYGVDSLVAIELRNVLLHQVGSEISIFDIMQSSSIRDLASLAATKSVHLDKSLLIPES

SEQ ID NO: 37210 - DNA, 1350 bp, Muscodor strobelii
  misc_feature: SGI cDNA ID NO. 572910
  misc_feature: Encodes the peptide sequence at SEQ ID NO 37211
atggctacaaatcaacatgttcatgaacaacaagatagttctccgaatgaggctggcactgtcattgcggtgattggcggtggtattgttggtatctcactggcactcggtctccttgaacgcggtgtaagggttgccgtttacgagcgagcatccaacatcgacgaactaggcgccggcatcgcattcacaggtgttgcgagggaatgcatggccagattaagtcccaaaattgccgaatcttttcaaagagtcgccagtaagactgaacacgcatatgacaattactgggatggatatcatggcggcgcagcaaaccaggagagcagtgcccagagtctcctcttcgaactgccgaatgcgagaatgggttggtgggggtgtttacgttcgcactttcttaatgatctggctgggaacttacctgcagatgtcatcagcttcaacaagtgtctagagagatatacagatcgtacagccgaagaaggcatgattacgcttcatttcagcgacggaacgacagcaacttgcaacgtgcttgtcgggtgtgacggcgttcattcccgtgtgagatcacaaatgtgttttagtacatgccccgagatgtgcgcagcccagtacacgaataagacaagctaccgttttatggtccctatggaaaaggcaaaacatgtattagggccgtccaaagcgcagaatcactgcatgcagacagggccaggcgctcacattctaagctaccccgttgggcagaatacgctgttgaatgttgttcttttcgtgacggactacaccaaatctgacgacagggttcagccaggggatttgaagacatcgattctggcacaattcgcctcctggagacccgaagtccgcgacttgttggcccttatgccagaacaacctatgtcgtggcgcatctatgacacagcggagtttccggcccccttttattcgcgaggatgcgtttgtatcgctggcgacgctgcacatgccagtgcaccacatcacggtgctggtgctggatttgggatggaggatgctctggctcttgctacagccttgtcactagcagttaaagtgcctcaagatagacagaggcgtgctcgagaatctgcgttgcaggtatttaacagtgtgcgatatgaccgcactcagtggcttatacgcagctcgcgagaaactggtgacatataccagtgggcatatcccctgagtggaagcgaccctggtaagatgagagagcaaataatggcacgtcagggaataatatgtcagttcgatgtatctgccatgattgagcgtgtgaggatgggttatcaagagatactagttaacataagttcatag

SEQ ID NO: 37211 - protein, 449 aa, Muscodor strobelii
  misc_feature: SGI Peptide ID NO. 572910
  misc_feature (18)..(392): Pfam Id: PF01494 Pfam Desc: FAD binding domain
  misc_feature (21)..(51): Pfam Id: PF01266 Pfam Desc: FAD dependent oxidoreductase
  misc_feature (35)..(441): NCBI GI: 115401390 Blast Desc: conserved [Aspergillus terreus NIH2624] gi|114190224|gb|EAU31924.1| conserved [Aspergillus terreus NIH2624]
  misc_feature (13)..(387): NCBI GI: 121700482 Blast Desc: FAD binding domain protein [Aspergillus clavatus NRRL 1] gi|119396648|gb|EAW07080.1| FAD binding domain protein [Aspergillus clavatus NRRL 1]
  misc_feature (7)..(440): NCBI GI: 116198977 Blast Desc: CHGG_07644 [Chaetomium globosum CBS 148.51] gi|88178923|gb|EAQ86391.1| CHGG_07644 [Chaetomium globosum CBS 148.51]
  misc_feature (22)..(442): NCBI GI: 242760657 Blast Desc: monoxygenase, [Talaromyces stipitatus ATCC 10500] gi|218723231|gb|EED22648.1| monoxygenase, [Talaromyces stipitatus ATCC 10500]
  misc_feature (22)..(444): NCBI GI: 212539233 Blast Desc: salicylate hydroxylase, [Penicillium marneffei ATCC 18224] gi|210069514|gb|EEA23605.1| salicylate hydroxylase, [Penicillium marneffei ATCC 18224]
  misc_feature (22)..(442): NCBI GI: 119191045 Blast Desc: CIMG_05570 [Coccidioides immitis RS]
  misc_feature (22)..(442): NCBI GI: 240107411 Blast Desc: salicylate hydroxylase, [Coccidioides posadasii C735 delta SOWgp]
  misc_feature (22)..(388): NCBI GI: 116204275 Blast Desc: CHGG_10021 [Chaetomium globosum CBS 148.51] gi|88176149|gb|EAQ83617.1| CHGG_10021 [Chaetomium globosum CBS 148.51]
  misc_feature (35)..(447): NCBI GI: 67517702 Blast Desc: AN1033.2 [Aspergillus nidulans FGSC A4] gi|40746445|gb|EAA65601.1| AN1033.2 [Aspergillus nidulans FGSC A4] gi|259488670|tpe|CBF88297.1| TPA: [Aspergillus nidulans FGSC
  misc_feature (22)..(442): NCBI GI: 238495582 Blast Desc: monoxygenase, [Aspergillus flavus NRRL3357] gi|220695677|gb|EED52020.1| monoxygenase, [Aspergillus flavus NRRL3357]
  misc_feature (43)..(441): SWISSPROT Homolog: EC 1.14.13.1 Salicylate 1-monooxygenase
MATNQHVHEQQDSSPNEAGTVIAVIGGGIVGISLALGLLERGVRVAVYERASNIDELGAGIAFTGVARECMARLSPKIAESFQRVASKTEHAYDNYWDGYHGGAANQESSAQSLLFELPNARMGWWGCLRSHFLNDLAGNLPADVISFNKCLERYTDRTAEEGMITLHFSDGTTATCNVLVGCDGVHSRVRSQMCFSTCPEMCAAQYTNKTSYRFMVPMEKAKHVLGPSKAQNHCMQTGPGAHILSYPVGQNTLLNVVLFVTDYTKSDDRVQPGDLKTSILAQFASWRPEVRDLLALMPEQPMSWRIYDTAEFPAPFYSRGCVCIAGDAAHASAPHHGAGAGFGMEDALALATALSLAVKVPQDRQRRARESALQVFNSVRYDRTQWLIRSSRETGDIYQWAYPLSGSDPGKMREQIMARQGIICQFDVSAMIERVRMGYQEILVNISS

SEQ ID NO: 37212 - DNA, 1911 bp, Muscodor strobelii
  misc_feature: SGI EST ID NO. CUFF.88951.0
  misc_feature: Variant of the nucleotide sequence at SEQ ID NO 37210
gccagtaagactgaacacgcatatgacaattactgggatggatatcatggcggcgcagcaaaccaggagagcagtgcccagagtctcctcttcgaactgccgaatgcgagaatgggttggtgggggtgtttacgttcgcactttcttaatgatctggctgggaacttacctgcagatgtcatcagcttcaacaagtgtctagagagatatacagatcgtacagccgaagaaggcatgattacgcttcatttcagcgacggaacgacagcaacttgcaacgtgcttgtcgggtgtgacggcgttcattcccgtgtgagatcacaaatgtgttttagtacatgccccgagatgtgcgcagcccagtacacgaataagacaagctaccgttttatggtccctatggaaaaggcaaaacatgtattagggccgtccaaagcgcagaatcactgcatgcagacagggccaggcgctcacattctaagctaccccgttgggcagaatacgctgttgaatgttgttcttttcgtgacggactacaccaaatctgacgacagggttcagccaggggatttgaagacatcgattctggcacaattcgcctcctggagacccgaagtccgcgacttgttggcccttatgccagaacaacctatgtcgtggcgcatctatgacacagcggagtttccggcccccttttattcgcgaggatgcgtttgtatcgctggcgacgctgcacatgccagtgcaccacatcacggtgctggtgctggatttgggatggaggatgctctggctcttgctacagccttgtcactagcagttaaagtgcctcaagatagacagaggcgtgctcgagaatctgcgttgcaggtatttaacagtgtgcgatatgaccgcactcagtggcttatacgcagctcgcgagaaactggtgacatataccagtgggcatatcccctgagtggaagcgaccctggtaagatgagagagcaaataatggcacgtcagggaataatatgtcagttcgatgtatctgccatgattgagcgtgtgaggatgggttatcaagagatactagttaacataagttcatagatcacctctttagtatatcgaacctcctagctctcgggtatcagaagactcttatctagatgtacacttttcgtggccgccagcgatgctagatctctgatcgaggaactctgcatgatgtcgaagatagaaatctcagaaccgacttgatgaagcagcacattgcgcagttcaattgccaccaaagagtcaactccatagtcagtgagactcttgctttcgtcaagatcaccgtctggcatcgtgaagaggcgcgctagcctctttaaaaggcaaccgaccacggcgccaattgcgtcttcgagcttcgatgctacagcgatgttgactgtcgtgtcgcatgagttggttttatccatatgcgcatggcctctgctctcatcttgcacatcacgacgcagtctggcgaagcgtgcatcccgacccagtggcgagtcgttccagtgctgaccatcgtccctgttaattcctagcagtatctgtccgctcattggagctagtattgcgagcccaatacatcttaaaacttcttcctcgctgagtatagtgtatccggaatttaccaggcgatttgctgtgccctcgtgcgcggcaacgtacccaacggatccgacagcacccaggttaatggagacgccgggtaacccctgtgcgttgcggtgatgagccaaggcgtcctgaaagcttcccccagcgccgtagttggcttggctagggtacccaatgatactggtgagcgacgacaacatgatgaaaaagtctaggtcttcgtcggcaaaaagctcatgcaagttctgagagccattaattttcggc

SEQ ID NO: 37213 - DNA, 1218 bp, Muscodor strobelii
  misc_feature: SGI cDNA ID NO. 572911
  misc_feature: Elevated expression when VOC is produced
  misc_feature: Encodes the peptide sequence at SEQ ID NO 37214
atgctcccaacgcaagatccctggtatacagcaacgcctgacttcgagacacatcgtccgggtgctgttcttcgagtccgaaacgtcccagatggaacatgtgcgcttgaaaatgtctgcaatgcctaccatattatgttccgaactacaggctcgagatatcagccagcctgggcagtgacatctctacttgttcccaagaatgttcatgttttgtcaacggggcaccgggccttgttatcctaccagatcgcatacaactcgccatctatcgactgggcgccctcgtaccggatatttcagcccccaattgcgaataggtatggtataccaactgaccgagatgctattgagaacatgcttagtttgggctggttcttgagcattcctgactaccaaggacatcgtgctgcattcggcgcgacagttatgaatgggcacgcaatccttgatagtatccgtgccgtgttgtcatacatgagcagtacgcatgccgaaacgctgttcagatatgctgcatggggttacagcggcgctgctatggccacagaaaaagcaactgagttgcaagtccaatacgcacccgaattacttcctaactttgcaggcgcggcattaggtggagtgttgggcgacatcaaagacatgatccaggctacaaacaagactctttatacaggcaaccttgttctcggaattttgggacttatgaacgaatatcctgagctggacgcctacatttgcagcagattaaaaaccgatgggcctcagagtcgttcaatctttctgagcgggcgtaccatggattctctgcaggcctttcccgtctttagggaccaagatctatatggctttttcatcgggggtcaggcagacttggaagagtcccagctctttcagaaaatagcaaatgccgaatggaagcttggataccatggcgtccctcaaatccctttattcttctataaagccattggcgatgaaatgtctcccattgacgattcagataaccttattgcgcattacagacgatacgggtgctctatcatttacgagcgcaaccttgtcggtggccatatctccgagatcgtgaatggcagggcccgtgcattggcatggttagcaagagcctttgatggcttcacaggcacgatggatcttgtctttgaaacacgcgacgtgatggtggacttatacaaattgccgacgaccttatga

SEQ ID NO: 37214 - protein, 405 aa, Muscodor strobelii
  misc_feature: SGI Peptide ID NO. 572911
  misc_feature (106)..(386): Pfam Id: PF03583 Pfam Desc: Secretory lipase
  misc_feature (117)..(255): Pfam Id: PF03583 Pfam Desc: Secretory lipase
  misc_feature (309)..(386): Pfam Id: PF03583 Pfam Desc: Secretory lipase
  misc_feature (3)..(380): NCBI GI: 226509938 Blast Desc: LOC100274543 [Zea mays] gi|194708508|gb|ACF88338.1| [Zea mays]
  misc_feature (3)..(380): NCBI GI: 145236980 Blast Desc: An07g00440 [Aspergillus niger] gi|134075602|emb|CAK39268.1| protein product [Aspergillus niger]
  misc_feature (3)..(398): NCBI GI: 169778470 Blast Desc: [Aspergillus oryzae RIB40] gi|83772438|dbj|BAE62567.1| protein product [Aspergillus oryzae]
  misc_feature (3)..(379): NCBI GI: 256724167 Blast Desc: NECHADRAFT_53596 [Nectria haematococca mpVI 77-13-4]
  misc_feature (3)..(380): NCBI GI: 116195544 Blast Desc: CHGG_04370 [Chaetomium globosum CBS 148.51] gi|88180283|gb|EAQ87751.1| CHGG_04370 [Chaetomium globosum CBS 148.51]
  misc_feature (3)..(396): NCBI GI: 46116008 Blast Desc: FG03846.1 [Gibberella zeae PH-1]
  misc_feature (3)..(380): NCBI GI: 256723301 Blast Desc: NECHADRAFT_105602 [Nectria haematococca mpVI 77-13-4]
  misc_feature (3)..(378): NCBI GI: 13621072 Blast Desc: AF359360_9 Tri8 [Fusarium sporotrichioides] gi|15054398|gb|AAK77934.1| T-2 toxin biosynthesis protein [Fusarium sporotrichioides]
  misc_feature (3)..(378): NCBI GI: 4249358 Blast Desc: T-2 toxin biosynthesis protein [Fusarium sporotrichioides]
  misc_feature (3)..(394): NCBI GI: 14091066 Blast Desc: AF336366_1 TRI8 [Gibberella zeae]
  misc_feature (3)..(380): SWISSPROT Homolog: EC 3.1.1.3 Triacylglycerol lipase
  misc_feature: Useful for introducing or modulating the production of volatile compounds
MLPTQDPWYTATPDFETHRPGAVLRVRNVPDGTCALENVCNAYHIMFRTTGSRYQPAWAVTSLLVPKNVHVLSTGHRALLSYQIAYNSPSIDWAPSYRIFQPPIANRYGIPTDRDAIENMLSLGWFLSIPDYQGHRAAFGATVMNGHAILDSIRAVLSYMSSTHAETLFRYAAWGYSGAAMATEKATELQVQYAPELLPNFAGAALGGVLGDIKDMIQATNKTLYTGNLVLGILGLMNEYPELDAYICSRLKTDGPQSRSIFLSGRTMDSLQAFPVFRDQDLYGFFIGGQADLEESQLFQKIANAEWKLGYHGVPQIPLFFYKAIGDEMSPIDDSDNLIAHYRRYGCSIIYERNLVGGHISEIVNGRARALAWLARAFDGFTGTMDLVFETRDVMVDLYKLPTTL

SEQ ID NO: 37215 - DNA, 1277 bp, Muscodor strobelii
  misc_feature: SGI EST ID NO. CUFF.88957.0
  misc_feature: Variant of the nucleotide sequence at SEQ ID NO 37213
gccagaagcagcgcaggagccagtgatgctcccaacgcaagatccctggtatacagcaacgcctgacttcgagacacatcgtccgggtgctgttcttcgagtccgaaacgtcccagatggaacatgtgcgcttgaaaatgtctgcaatgcctaccatattatgttccgaactacaggctcgagatatcagccagcctgggcagtgacatctctacttgttcccaagaatgttcatgttttgtcaacggggcaccgggccttgttatcctaccagatcgcatacaactcgccatctatcgactgggcgccctcgtaccggatatttcagcccccaattgcgaataggtatggtataccaactgaccgagatgctattgagaacatgcttagtttgggctggttcttgagcattcctgactaccaaggacatcgtgctgcattcggcgcgacagttatgaatgggcacgcaatccttgatagtatccgtgccgtgttgtcatacatgagcagtacgcatgccgaaacgctgttcagatatgctgcatggggttacagcggcgctgctatggccacagaaaaagcaactgagttgcaagtccaatacgcacccgaattacttcctaactttgcaggcgcggcattaggtggagtgttgggcgacatcaaagacatgatccaggctacaaacaagactctttatacaggcaaccttgttctcggaattttgggacttatgaacgaatatcctgagctggacgcctacatttgcagcagattaaaaaccgatgggcctcagagtcgttcaatctttcacgatacgggtgctctatcatttacgagcgcaaccttgtcggtggccatatctccgagatcgtgaatggcagggcccgtgcattggcatggttagcaagagcctttgatggcttcacaggcacgatggatcttgtctttgaaacacgcgacgtgatggtggacttatacaaattgccgacgaccttatgatcgggcattatagattattctaagtacaatgatgtttaattgaaataaactttcaggtgttttgatttcgaatacagcgtgtaatcgctaaaaggcccggggtttgaattgctaaatgcggtgcagactattgagctaactcgcaatcagctcgaaagccagctactgcctcctgttcctattcttctacaccttgtaagataggtagatagtcggcttgatggtgaatgcagtttgttgataaagccttgagtagatgctggactcatctgccc

SEQ ID NO: 37216 - DNA, 7830 bp, Muscodor strobelii
  misc_feature: SGI cDNA ID NO. 572912
  misc_feature: Encodes the peptide sequence at SEQ ID NO 37217
atgcataactgcgccaagatcacggcgcttctgctgtgtggccctcaaccagtctctgtatctgcggccgctctcttgtcacacgtccagtctgagttagctgatgaggctggtgacctgaaagagtgggttttgacgatacttgatgagctccctaagttctggtacaccattgccgatgaagtgcctcagcttgcctccacaagagaggtattttcgacgcaacttaaagatctctacgtttatgtgaaaggcgatggaatacaagatactgagacaactgtatcgaggatgccaaacatgctccttgcaccccttgttgttttaacacagatcttgcagtaccggaggcattttgagctctatacaaagtgcaatgagagggaaccacaccccgactgtaaggtccggtgcatggggttctgtatcggtgtattcagtgcttgtgccattgcgagctcctcaacgagggtggaattgcaagaaaactgtgtggtcgcaatacgactagctgtcatcgccggagctgttgtcgacttccatgacttgagacatgggccagctatttctttcacaactttgtgtcattctaccgcagaagaagcggagatgcaccgcatgttggctgattcaccaggggacgcatataagtctgttgtctatgacaataataggcacacgctgaccgtgtctgaacaaactgcgtcgggactaattcgcgacttgacacaagccggtatcatgacggctgagacccgtctccgtgggcgattccacaacgttttgcatcaagacatactcgacgctctgcttgccgtgtgcgatcgtaaagagtatcgcttacagttctcacaagctgccgagcccattgtgagcttgatcagtaaccacggtcgcggattgtccagtggctcactgcacagacacgctctggcagtggtcttaattgaacaggctgattggtacggttctctggcagctatatggcatggactggacctaaacacggatgttatcacattgggattggaacagtgtataccgcatagcctcatacgccagacgaacgcgcgaattgccccgcccagagagcgtaagcgtgttcgatcacgtccgaacactgtagagtatccgaacaatggcacgacagtcacggaacgcatggatgacatcgccatcgttggaatgtctgtaaaggtagctggtgcggatgacgtggatgagttcacggaacttctacgatcgggcaagtcgactcacattcgagtgcctgagtctcgcgttccttttggaaccatgcccaccagttggcgatcaggttctgagcggcacgagtggtacggcaatttcttgaatgatatcgatgcctttgatcatcgtttcttccgacatagtccccgggaaagcgcagccatggatccacaacagcgcctcatcctccaggcggcatatcaagctgcagaaatgggtggatggttcgccaccggccatgaggaaagaaatgcgcaggttggtgtgtatgtcggcacttgtgctacggactatgaacatcacgtcgcgtgctatcaggccggagcatactcagctacgggattactcaggggattcattcccggtaaagtgtcgcatttctttggctggactggcccatctatgagctttgacaccgcatgttcgggttctgccgtcgccatacacacagcgtgtcaggcgatcttgagtggcgaatgtgatatggcgctgtgtgggggagtgaacacgatcggtaatccgacttggtttcagaaccttgctggtgcgtcgtttctcagccctactgggcagtgtaaaccatttgatgatctcgccgatggttactgtcgtggcgagggtattgcatgcgtattcttgaagccgatgaaacgtgctctccaagatgggaatcgtatttttggatgtattgcgagcacggccgtggcacaaaatgacaaaagtacgccgctattcgtgcctaacgtaccgtctctctcccgacttttcaatcacgttgtgaaccgggcacaggtcaaccctaacgacattacatttgtcgaggcacacggcaccgggacccccgtgggagatccagctgagtacgatagtatacggaatgctctcgggagtccaaaacgatccaaacccctgatggttggatcggttaagggctttatcggacacaccgagagcgcttctggcattgtttcgctgattaaagtactctgcatgatgaacggaaatttcgtcccctgtcaagcaagcttctcgcgtctgagccgccatatcaagcaatattcttccgatatgattgagattcccaccgatcttcgactgtgggacgagcggcggaaagtagcgctgattaataactacggcgcatcaggatctaatgcctctattatagtgcgccatacagcgcatgatgttgggaccaccaaacactccatacaccagtgcgcgcgacagcctttctggatcagcgccgcgtcagagaacagtatcgaggcatacagtagaaagctagtaagctttgtcaagcgggagtcggctactgtatctctggccgatatctccttcaatcttgcaagccagactaatcgtgatttggccaacggcctgatcttcagttgcgcatctgttccagagttgactgatatccttctgagtggtcgggtacccgtcaaaaagatcaagagacagcggccgatcatcctttgctttggaggccaaatatcaagatctgtaggattagaccgcaaactattcgaatccgtgaatttagttcgcaagtatgtcgaagaatgcaatagtatcatctgctctctggagctggactcgatcctacccgctatcttctcccgggaaccgtgtgatgacgtggtccagctgcaaacgatgctcttcacagtccaatatgtctctgccatgtgctggattgacagtgggctcgaggtcgaggcggttattgggcacagcctaggtgaaattacggcgctttgtgtttgcggtacattgactttgatagatgctatcaagctcattgcaggtcgtgcacaggctgtgaaagattcatggggctttgatcccggatcgatgctggccattgaggcagatttgaggttagtccaaagcctgatttctgaggcgaacatgctctacaatggacaatttcgcattgagattgcatgttataacggtccaagaagctttacactttccggtgcaagcgacgcaatggatattttgaccaatctgattcatacaagagatacgaatgcttctctcaaaacccggaagctcaaagtcacgcatgctttccactcgacacttgttgaaccacttcaatcagtgctgaatgctgttggacgaggggtagtgttccacaaccctaccattcgccatgaaaggtccaccgaagacggcatgctgtcgactccgcgaacgtcgtcttttgcattccagcacatgcgaaatcctgtctattttcaccaggccgcgcagaggctcggtagggattatcctgctagtatatggctcgaggcgggctctgcatcgacaattacaatgatggccaagcgagcactcggaagccagactgagatgcatttccaagccatggacttgagtggagacagagcaatagaaagacttgcggacacgactgtcgccttatggagtgaaggtgctcgaatgtgtttctgggcacatcacgcagtgcagtcaaccatattcaagcctctgctgctcccaccgtaccaatttgaaaagtctagacattggcttgactataagccgacaagccatgtaaagtccagcaccaaacggctttcggtttccaaatcgacgtcagagacactctggaccttcattgggtattctgatggccaacagagacatcgagcgcgttttcgggtcaacaccgataccgaaacttacgcatcactcttagccggccatgtcgctgcgcagactgcgccaatatgcccggcgacattggctatcgacatggcgatagaaacatttcgcagcttacatggaacaggagatcaccgtattccagttgtgagggacatcaagaatcacatccctctctgtatcaaccccaccgctacggtgtggcttgatctcgagacctctggaacttcttggtcggaatgcaagtggaagatcacatcaacaccgggtgaaaaaaatgacagctctcgtgagctagtatgcgtagagggccaaatcgagctgttctcggcggacgatcgcatctacaaagctgagttcgcgggatttgagcgctgggcacggtacaagtcttgtgcagaaatcctcaacagcgctgtgggagggagaagtcaagtctttgaaggcaaagacgtttatcaagccttcaatcacgttgtggagtacggtgattactaccaaggtgtcacgcatttggttggcagaggcgacgaatctgcaggtattgtctgcacacgcgatcctagcgagacatggtttgacgtttcaacatcggacgccctcagccaggtcgccggtttctgggtcaactacgtggctggtaccccgggcgaggacatgttcatagcaacaggtgttgacacgcttatgcggtcctctcggcccgtgcatcctcatgaatatcatatacttgctcgtcaccaccggcaaaccaacaatttgtatgtgtccgatgtatatgtgttcgatccacccactggccgcttagtagacgtgatgttgggtattcgttacagcagagttgcaaggcactccttcagcaagattctggtcaatcttaccggcgacgagtcagttctcaaaggtggattacgcactagcgggaaaccgatggcaattgcccacggaaagagcaaaacggacgatgggaaagacccgcaacgcgcagacatttctcgtgatctcaaagctgtagttgcccatgtctgcggtgttgaactacatgaaattcgaggcgactcagaaatggcaacaatgggcgttgacagcctgatgagtatggaacttgcacgagagatagaaagcttcttccaatgcaaaatggaccacatgagcgtcgtggaagtcatatgtttcgatgacctggtcgcctgcgcctcaagagcaatttacggtgacaattaccaacctgggccgacgagtgacgagcatagcgatgatacacaaagtcaggatgggcgtatctactgtgtcagttctgagacggctagtacgtcgataatgagctcacctgttgaagtgaacccgcaagaagttcattcgatgacattcgaggaagagctcactagaacatcggacgatagtggttcttgtctggagttgcctcttgctgacatcttagcggtgttcgaaggggtcaaatggtcatctgatcaacggattactgacgcagggcttcagaacacggactctgttattgttgccaaatcgaataggctctgtgttgcactgatcgtcgaggcgtttcaggagcttggttgctcccttaacgaagctacagatggacagcccctcacacgcatacagcacttatcacagcatagtcgtctcgttgactggctgtacgatttcttgcacaaagtcgctcgtcttatcgaagtcaataaagagggacaaatacatcggacccatatttcaacaccccggagaacctcacaggagttatttcatgagctcaaccaagtcccagatagttggattctggcccatcaactagtatactacgcggggagaaatctagcagatgttttgcgcggtgctaaagatggtattacactgctgttcggatcgatacaggggcgagagcttgttcaaaaactctattgtgatcttcccttcaaccgtgttgcttacgagcagatgagagacgtaatagcaggtctaatgacaaagctgtcgccctgcaaagggccgttgcgaatcttagaggtgggcgccggtacgggtggcacaacgcgtcttctagttcagctacttgccaatcaggatatctcagtcgagtacacatttacagacatctctccaagtatgatagcgcgggctcggaaaactttccaagctcaccctttcatgcgctacgcggtgcacgatattgagacaccggtggctgagatgctgaagggacagcacattgttttggccagtaacgcaatacatgccacgcacaatctacacacgtcgctggccaatctccggggcgcgcttcgagaggacggattcttgatgatgacggaaatgacagaatgtttgccgttcgcagacttgacatttggacttctcgaagggtggtggctgtttgatgatggtcgtcaacacgcactcgtctccgagactaagtgggaaactgaattgctcgccgccggattcggatatgttgactggacagacggcgttctagatgagaatcgcattcagcgagtcatcatcgccacggcttctcggactcggcacaaaaggacggaggagcctcccactgtacaaattgttccggcaacgacgaaggacgagaagtttcgtgaggctacagcggaagcatacgtcaaaaagtatagccacgggtttcgcgacaaagtgctcttcccagtcaccaatagccaaccgggtggtgaagcaccagaaagaagaacaactaatgtagttgtcaccggcgccacgggcagccttggggcttttcttgttgctgcattggttggtcagagggacatcagctctgtcatctgcctgaaccgccgcaatacccgtattgcgcctgcagaccgtcagctggaggcattctcttccaagggaatcagcatcccatcgcaatataaacagaagctgcaagtcttccagacggacatttccaaaccccgcctcggactgtccgatgagcaatatgaggttatcagccgccgtgtgacgcacatcgttcataacgcttggccaatgagcggatctagaaaactcgacgcgttcgagccgcagttcgtcgcgatgaggaatctgatagatcttgccgcatcggcaatacagcacgttgctggtgggcgtggcgtagtcacctttcaatttgtctcttcgatcagcgtggtaggacactataactcggacacgggtgtccgcactgcagagatccccgagcaacacatgcctatgcctgccgttctcccactgggttattgcgaagcaaagtggacatgtgaacgaatcttagaagagacgctgtgtcgattccccgatcgcttccgagcaatggtggtgcgcccagggcagattgcaggtagccgcatcagtgggtactggaacccagtggagcatctgccattcctaatcaagtcatctgagtcactgggtgtcctgccagcgctgcgcggcagactgcaatgggtcaccgtcgaggatgtagcgagcacgatggtgaatctcctacaacgccggcagtgcgatgatgtgtacccggtctatcacattgacaatccagtaggccagccgtgggaagatatggtgaagttactggcagaagagctaggcatagacaggaccttgccgttctccgactgggtacgcatggtgcggcgcagtccactcgcacgggagacggaaaatcccattgttcagctcatccaatttgtgtcgcaagattttgaacgcatgtcctgcggcggcattgtcatggacacaacccgaactcgcaaccattcggccactttagctgcggtaggacctatcccggataacactacgcgcaagttcgtgaggacttggaggcggaccgggttcctgcacaggggagcaggggagaaggagcgatttagtagataa

SEQ ID NO: 37217 - protein, 2609 aa, Muscodor strobelii
  misc_feature: SGI Peptide ID NO. 572912
  misc_feature (909)..(1236): Pfam Id: PF00698 Pfam Desc: Acyl transferase domain
  misc_feature (389)..(636): Pfam Id: PF00109 Pfam Desc: Beta-ketoacyl synthase, N-terminal domain
  misc_feature (644)..(761): Pfam Id: PF02801 Pfam Desc: Beta-ketoacyl synthase, C-terminal domain
  misc_feature (1985)..(2086): Pfam Id: PF08241 Pfam Desc: Methyltransferase domain
  misc_feature (1985)..(2084): Pfam Id: PF08242 Pfam Desc: Methyltransferase domain
  misc_feature (2224)..(2475): Pfam Id: PF07993 Pfam Desc: Male sterility protein
  misc_feature (963)..(1177): Pfam Id: PF00698 Pfam Desc: Acyl transferase domain
  misc_feature (2224)..(2316): Pfam Id: PF07993 Pfam Desc: Male sterility protein
  misc_feature (2336)..(2475): Pfam Id: PF07993 Pfam Desc: Male sterility protein
  misc_feature (1643)..(1692): Pfam Id: PF00550 Pfam Desc: Phosphopantetheine attachment site
  misc_feature (41)..(2585): NCBI GI: 67517704 Blast Desc: AN1034.2 [Aspergillus nidulans FGSC A4] gi|40746446|gb|EAA65602.1| AN1034.2 [Aspergillus nidulans FGSC A4] gi|259488669|tpe|CBF88295.1| TPA: polyketide synthase, (JCVI)
  misc_feature (41)..(2598): NCBI GI: 115401388 Blast Desc: ATEG_07661 [Aspergillus terreus NIH2624] gi|114190223|gb|EAU31923.1| ATEG_07661 [Aspergillus terreus NIH2624]
  misc_feature (10)..(2599): NCBI GI: 212539163 Blast Desc: polyketide synthase, [Penicillium marneffei ATCC 18224] gi|210069479|gb|EEA23570.1| polyketide synthase, [Penicillium marneffei ATCC 18224]
  misc_feature (10)..(2598): NCBI GI: 242760842 Blast Desc: polyketide synthase, [Talaromyces stipitatus ATCC 10500] gi|218723266|gb|EED22683.1| polyketide synthase, [Talaromyces stipitatus ATCC 10500]
  misc_feature (1)..(2597): NCBI GI: 238841419 Blast Desc: polyketide synthase [Microsporum canis CBS 113480]
  misc_feature (10)..(2598): NCBI GI: 240109915 Blast Desc: polyketide synthase, [Coccidioides posadasii C735 delta SOWgp]
  misc_feature (10)..(2597): NCBI GI: 242821914 Blast Desc: polyketide synthase, [Talaromyces stipitatus ATCC 10500] gi|218712699|gb|EED12124.1| polyketide synthase, [Talaromyces stipitatus ATCC 10500]
  misc_feature (2)..(2597): NCBI GI: 115390210 Blast Desc: ATEG_03432 [Aspergillus terreus NIH2624] gi|114195006|gb|EAU36706.1| ATEG_03432 [Aspergillus terreus NIH2624]
  misc_feature (10)..(2598): NCBI GI: 145241710 Blast Desc: An09g01860 [Aspergillus niger] gi|134078041|emb|CAK40124.1| protein product [Aspergillus niger]
  misc_feature (10)..(2598): NCBI GI: 119184607 Blast Desc: CIMG_07081 [Coccidioides immitis RS]
  misc_feature: Useful for fungicidal and/or biocontrol applications
MHNCAKITALLLCGPQPVSVSAAALLSHVQSELADEAGDLKEWVLTILDELPKFWYTIADEVPQLASTREVFSTQLKDLYVYVKGDGIQDTETTVSRMPNMLLAPLVVLTQILQYRRHFELYTKCNEREPHPDCKVRCMGFCIGVFSACAIASSSTRVELQENCVVAIRLAVIAGAVVDFHDLRHGPAISFTTLCHSTAEEAEMHRMLADSPGDAYKSVVYDNNRHTLTVSEQTASGLIRDLTQAGIMTAETRLRGRFHNVLHQDILDALLAVCDRKEYRLQFSQAAEPIVSLISNHGRGLSSGSLHRHALAVVLIEQADWYGSLAAIWHGLDLNTDVITLGLEQCIPHSLIRQTNARIAPPRERKRVRSRPNTVEYPNNGTTVTERMDDIAIVGMSVKVAGADDVDEFTELLRSGKSTHIRVPESRVPFGTMPTSWRSGSERHEWYGNFLNDIDAFDHRFFRHSPRESAAMDPQQRLILQAAYQAAEMGGWFATGHEERNAQVGVYVGTCATDYEHHVACYQAGAYSATGLLRGFIPGKVSHFFGWTGPSMSFDTACSGSAVAIHTACQAILSGECDMALCGGVNTIGNPTWFQNLAGASFLSPTGQCKPFDDLADGYCRGEGIACVFLKPMKRALQDGNRIFGCIASTAVAQNDKSTPLFVPNVPSLSRLFNHVVNRAQVNPNDITFVEAHGTGTPVGDPAEYDSIRNALGSPKRSKPLMVGSVKGFIGHTESASGIVSLIKVLCMMNGNFVPCQASFSRLSRHIKQYSSDMIEIPTDLRLWDERRKVALINNYGASGSNASIIVRHTAHDVGTTKHSIHQCARQPFWISAASENSIEAYSRKLVSFVKRESATVSLADISFNLASQTNRDLANGLIFSCASVPELTDILLSGRVPVKKIKRQRPIILCFGGQISRSVGLDRKLFESVNLVRKYVEECNSIICSLELDSILPAIFSREPCDDVVQLQTMLFTVQYVSAMCWIDSGLEVEAVIGHSLGEITALCVCGTLTLIDAIKLIAGRAQAVKDSWGFDPGSMLAIEADLRLVQSLISEANMLYNGQFRIEIACYNGPRSFTLSGASDAMDILTNLIHTRDTNASLKTRKLKVTHAFHSTLVEPLQSVLNAVGRGVVFHNPTIRHERSTEDGMLSTPRTSSFAFQHMRNPVYFHQAAQRLGRDYPASIWLEAGSASTITMMAKRALGSQTEMHFQAMDLSGDRAIERLADTTVALWSEGARMCFWAHHAVQSTIFKPLLLPPYQFEKSRHWLDYKPTSHVKSSTKRLSVSKSTSETLWTFIGYSDGQQRHRARFRVNTDTETYASLLAGHVAAQTAPICPATLAIDMAIETFRSLHGTGDHRIPVVRDIKNHIPLCINPTATVWLDLETSGTSWSECKWKITSTPGEKNDSSRELVCVEGQIELFSADDRIYKAEFAGFERWARYKSCAEILNSAVGGRSQVFEGKDVYQAFNHVVEYGDYYQGVTHLVGRGDESAGIVCTRDPSETWFDVSTSDALSQVAGFWVNYVAGTPGEDMFIATGVDTLMRSSRPVHPHEYHILARHHRQTNNLYVSDVYVFDPPTGRLVDVMLGIRYSRVARHSFSKILVNLTGDESVLKGGLRTSGKPMAIAHGKSKTDDGKDPQRADISRDLKAVVAHVCGVELHEIRGDSEMATMGVDSLMSMELAREIESFFQCKMDHMSVVEVICFDDLVACASRAIYGDNYQPGPTSDEHSDDTQSQDGRIYCVSSETASTSIMSSPVEVNPQEVHSMTFEEELTRTSDDSGSCLELPLADILAVFEGVKWSSDQRITDAGLQNTDSVIVAKSNRLCVALIVEAFQELGCSLNEATDGQPLTRIQHLSQHSRLVDWLYDFLHKVARLIEVNKEGQIHRTHISTPRRTSQELFHELNQVPDSWILAHQLVYYAGRNLADVLRGAKDGITLLFGSIQGRELVQKLYCDLPFNRVAYEQMRDVIAGLMTKLSPCKGPLRILEVGAGTGGTTRLLVQLLANQDISVEYTFTDISPSMIARARKTFQAHPFMRYAVHDIETPVAEMLKGQHIVLASNAIHATHNLHTSLANLRGALREDGFLMMTEMTECLPFADLTFGLLEGWWLFDDGRQHALVSETKWETELLAAGFGYVDWTDGVLDENRIQRVIIATASRTRHKRTEEPPTVQIVPATTKDEKFREATAEAYVKKYSHGFRDKVLFPVTNSQPGGEAPERRTTNVVVTGATGSLGAFLVAALVGQRDISSVICLNRRNTRIAPADRQLEAFSSKGISIPSQYKQKLQVFQTDISKPRLGLSDEQYEVISRRVTHIVHNAWPMSGSRKLDAFEPQFVAMRNLIDLAASAIQHVAGGRGVVTFQFVSSISVVGHYNSDTGVRTAEIPEQHMPMPAVLPLGYCEAKWTCERILEETLCRFPDRFRAMVVRPGQIAGSRISGYWNPVEHLPFLIKSSESLGVLPALRGRLQWVTVEDVASTMVNLLQRRQCDDVYPVYHIDNPVGQPWEDMVKLLAEELGIDRTLPFSDWVRMVRRSPLARETENPIVQLIQFVSQDFERMSCGGIVMDTTRTRNHSATLAAVGPIPDNTTRKFVRTWRRTGFLHRGAGEKERFSR

SEQ ID NO: 37218 - DNA, 1254 bp, Muscodor strobelii
  misc_feature: SGI cDNA ID NO. 572913
  misc_feature: Encodes the peptide sequence at SEQ ID NO 37219
atgtcgtgctctatcggtgaaagtcttcatcagttcggaaaccgtataagactactagaaagccacgatgatagcacaactgacataatcagagctaccatcagtaatgatggccatagtcagtttcatgggcaatggatcagcggtctaacccagacgactgttcttggtgtgcctgacacggagctcatcactccactaactcgggcaaacttaatctctgctaccggcaccgtagatggaagagagctttccatcgcgtttgatgctgatagcggaggaccagcaatcgaaatccctactttagtgaccacattggcgcgtaagggagtttcaatgatcattctcgaggacaaagaagtttttgagccaggccagaaggtcaactctctggctgcttcgtcagactctcaggggcaagccgatcctcaggagtttgcgagaactctggctactttcaagcgagccaaattggaagacgcaaggaaagatatgtatatcacggcacgtattgaaagcttcacttgccgcaaggtgatcaagtcagatgatgcagcggagaaggcttctgtagacaaggcgctacaacaagctctagagcgtgccgccatatacagaaatgcaggcgcggatgccatcatgatacacagtaagagcaaatcacctgatgaagtcctggctttcttgcgaggatttcgggctacggataatagtgatacgcctctggtggtggtgccaaccacgtatggaaccacgcacgagaacacgctcttcgaagccggagccaacgtcatcatctacgcaaaccacttgatgcgtgctaagatccaggccgtcagtgaatatgttgattcaggagcttccaaaatacacgaagtctgccctgaaccactcactaccgctctgacagcacaaaacttcggctatctacttcgtgccctgcagtattataggagctcatcttcagatggccatcttcaatctaaattggaggatttcttagcagaagccgaacgccgggcctatcaagccatggaacatactgcccgagatcttctagaccacaaagaggctggaggtgctgataagctgcttgtgcctgtcaaggtcttgttgtccataaactccgtccatctatctgacttaggacgccggccagttgcgccatctcgtagactgttgaagcttttgaccggtcggtcacgcagtcgaaacatttcggttgggcggacaatgacccgacttttaacttag

SEQ ID NO: 37219 - protein, 417 aa, Muscodor strobelii
  misc_feature: SGI Peptide ID NO. 572913
  misc_feature (1)..(318): NCBI GI: 46116280 Blast Desc: FG03982.1 [Gibberella zeae PH-1]
  misc_feature (1)..(315): NCBI GI: 242790786 Blast Desc: phosphoenolpyruvate phosphomutase, [Talaromyces stipitatus ATCC 10500] gi|218718213|gb|EED17633.1| phosphoenolpyruvate phosphomutase, [Talaromyces stipitatus ATCC
  misc_feature (16)..(281): NCBI GI: 224437596 Blast Desc: phosphoenolpyruvate phosphomutase [Helicobacter cinaedi CCUG 18818]
  misc_feature (16)..(279): NCBI GI: 225175794 Blast Desc: phosphoenolpyruvate phosphomutase [Dethiobacter alkaliphilus AHT 1] gi|225168718|gb|EEG77519.1| phosphoenolpyruvate phosphomutase [Dethiobacter alkaliphilus AHT
  misc_feature (19)..(281): NCBI GI: 227871664 Blast Desc: phosphoenolpyruvate phosphomutase [Oribacterium sinus F0268] gi|227842486|gb|EEJ52702.1| phosphoenolpyruvate phosphomutase [Oribacterium sinus F0268]
  misc_feature (16)..(285): NCBI GI: 1754529 Blast Desc: phosphoenolpyruvate phosphomutase [Streptomyces wedmorensis]
  misc_feature (16)..(285): NCBI GI: 196166524 Blast Desc: phosphoenolpyruvate phosphomutase [Streptomyces fradiae]
  misc_feature (11)..(281): NCBI GI: 266620158 Blast Desc: phosphoenolpyruvate phosphomutase [Clostridium hathewayi DSM 13479]
  misc_feature (16)..(289): NCBI GI: 218133513 Blast Desc: BACPEC_01380 [Bacteroides pectinophilus ATCC 43243] gi|217990888|gb|EEC56894.1| BACPEC_01380 [Bacteroides pectinophilus ATCC 43243]
  misc_feature (16)..(281): NCBI GI: 282856408 Blast Desc: phosphoenolpyruvate mutase [Pyramidobacter piscolens W5455] gi|282585779|gb|EFB91068.1| phosphoenolpyruvate mutase [Pyramidobacter piscolens W5455]
  misc_feature (18)..(281): SWISSPROT Homolog: EC 5.4.2.9 Phosphoenolpyruvate mutase
MSCSIGESLHQFGNRIRLLESHDDSTTDIIRATISNDGHSQFHGQWISGLTQTTVLGVPDTELITPLTRANLISATGTVDGRELSIAFDADSGGPAIEIPTLVTTLARKGVSMIILEDKEVFEPGQKVNSLAASSDSQGQADPQEFARTLATFKRAKLEDARKDMYITARIESFTCRKVIKSDDAAEKASVDKALQQALERAAIYRNAGADAIMIHSKSKSPDEVLAFLRGFRATDNSDTPLVVVPTTYGTTHENTLFEAGANVIIYANHLMRAKIQAVSEYVDSGASKIHEVCPEPLTTALTAQNFGYLLRALQYYRSSSSDGHLQSKLEDFLAEAERRAYQAMEHTARDLLDHKEAGGADKLLVPVKVLLSINSVHLSDLGRRPVAPSRRLLKLLTGRSRSRNISVGRTMTRLLT

SEQ ID NO: 37220 - DNA, 1296 bp, Muscodor strobelii
  misc_feature: SGI cDNA ID NO. 572914
  misc_feature: Encodes the peptide sequence at SEQ ID NO 37221
atggctttgcccttcgatccatccgaattctcgaaagtcgtgctagagccaaatagcatcgatgctgttttcggcgtgcctgactctagcctcagtggtctcctgagtttctttgccgccaccctgaaagcccctcgacatatagtcacggcgaacgagggaggtgcgatagcactggccgctggctatcatctagctaccaagaaagttgcgctatgctatctccagaactcaggattgtccaacgccttgtccccgcttcagtcattagcaagcaatgctgtagccggggtacctgtgcttctcatgatcggatggcggggaaagcctggcatcaaagacgaaccccagcatgcactcattggccctcaactcttagagaatctcaatgccaacaagattccctacgcccatatcccggagaacctggaccaagtctgtaccgtcgtctctgacctcatcacaagggctcttacggagaaaacaccagttgcccttgttgtcccaccgggaaccttcaagccttataatgcttcaacgccagagaagccagagaggccagagaagctgtttgcttgcctagagctttgtgatcacattaacgtcagcaagggaccaacaatctggttgacaaaatatccgaaccaatcattgcctctaaaacgagaagatgtggttcgaagcgttattcagcgacgtcggagcgacgatatcatagtctcgtccctaggtgggaccagccgcgagatatatatggttctggaggagcgaaaagagccaatctcacgcatcttctttgttctaggagcaatgggtcatgcatacggcgtagcatctgggatccgcttagggcagagcgcgaaacaaaccccccttgtatattgcattgagggcgacgggtcgttcctgatgcacattggcaatagtgccgttttagcggactgtgggccgagaggcatggtgcatgtcgtgatctataacggtgtgcatagctccacaggagatcagcccttgtcgatcgggatacagggctatctgagccttgcaaaaggtctctcctacatgcgtatattctttgtggacacgctgcaggccttagatgaagcattgggtttggccgctatggctgcaagcccccaggtccccgccagggaatgcgggggagttggtgatgcgcccgcggcgaatattttggttgtcgtgctggtgggacctggtcaatctcccgccttgccgagaccagccgagacggcggcacacttgaaggaattgttcatgcagagtcttgatcgctga

SEQ ID NO: 37221 - protein, 431 aa, Muscodor strobelii
  misc_feature: SGI Peptide ID NO. 572914
  misc_feature (5)..(187): Pfam Id: PF02776 Pfam Desc: Thiamine pyrophosphate enzyme, N-terminal TPP binding domain
  misc_feature (1)..(429): NCBI GI: 242790777 Blast Desc: phosphonopyruvate decarboxylase, [Talaromyces stipitatus ATCC 10500] gi|218718211|gb|EED17631.1| phosphonopyruvate decarboxylase, [Talaromyces stipitatus ATCC
  misc_feature (18)..(429): NCBI GI: 167762794 Blast Desc: BACSTE_01152 [Bacteroides stercoris ATCC 43183] gi|167699134|gb|EDS15713.1| BACSTE_01152 [Bacteroides stercoris ATCC 43183]
  misc_feature (9)..(430): NCBI GI: 150019149 Blast Desc: thiamine pyrophosphate binding domain-containing protein [Clostridium beijerinckii NCIMB 8052] gi|149905614|gb|ABR36447.1| thiamine pyrophosphate protein domain
  misc_feature (18)..(429): NCBI GI: 29347129 Blast Desc: sulfopyruvate decarboxylase subunit beta [Bacteroides thetaiotaomicron VPI-5482] gi|253571867|ref|ZP_04849272.1| sulfopyruvate decarboxylase subunit beta [Bacteroides sp. 1_1_6]
  misc_feature (9)..(431): NCBI GI: 160890526 Blast Desc: BACUNI_02968 [Bacteroides uniformis ATCC 8492] gi|156860258|gb|EDO53689.1| BACUNI_02968 [Bacteroides uniformis ATCC 8492]
  misc_feature (6)..(429): NCBI GI: 118384383 Blast Desc: TTHERM_01287980 [Tetrahymena thermophila] gi|89307107|gb|EAS05095.1| TTHERM_01287980 [Tetrahymena thermophila SB210]
  misc_feature (5)..(431): NCBI GI: 225175793 Blast Desc: phosphonopyruvate decarboxylase [Dethiobacter alkaliphilus AHT 1] gi|225168717|gb|EEG77518.1| phosphonopyruvate decarboxylase [Dethiobacter alkaliphilus AHT 1]
  misc_feature (9)..(370): NCBI GI: 254481073 Blast Desc: phosphonopyruvate decarboxylase [marine gamma proteobacterium HTCC2148] gi|214038868|gb|EEB79529.1| phosphonopyruvate decarboxylase [marine gamma proteobacterium
  misc_feature (6)..(429): NCBI GI: 145550728 Blast Desc: [Paramecium tetraurelia strain d4-2] gi|124428874|emb|CAK93646.1| protein product [Paramecium tetraurelia]
  misc_feature (18)..(429): NCBI GI: 53713122 Blast Desc: phosphoenolpyruvate decarboxylase [Bacteroides fragilis YCH46] gi|60681388|ref|YP_211532.1| LPS biosynthesis related phosphoenolpyruvate decarboxylase [Bacteroides fragilis
  misc_feature (43)..(381): SWISSPROT Homolog: EC 4.1.1.82 Phosphonopyruvate decarboxylase
MALPFDPSEFSKVVLEPNSIDAVFGVPDSSLSGLLSFFAATLKAPRHIVTANEGGAIALAAGYHLATKKVALCYLQNSGLSNALSPLQSLASNAVAGVPVLLMIGWRGKPGIKDEPQHALIGPQLLENLNANKIPYAHIPENLDQVCTVVSDLITRALTEKTPVALVVPPGTFKPYNASTPEKPERPEKLFACLELCDHINVSKGPTIWLTKYPNQSLPLKREDVVRSVIQRRRSDDIIVSSLGGTSREIYMVLEERKEPISRIFFVLGAMGHAYGVASGIRLGQSAKQTPLVYCIEGDGSFLMHIGNSAVLADCGPRGMVHVVIYNGVHSSTGDQPLSIGIQGYLSLAKGLSYMRIFFVDTLQALDEALGLAAMAASPQVPARECGGVGDAPAANILVVVLVGPGQSPALPRPAETAAHLKELFMQSLDR

SEQ ID NO: 37222 - DNA, 1745 bp, Muscodor strobelii
  misc_feature: SGI EST ID NO. CUFF.89008.0
  misc_feature: Variant of the nucleotide sequence at SEQ ID NO 37220
cctcgctatctgaagatgacaatgatattccaagggtcatagtagctaaggggtggctttgcgtgctccgcttgataaggaaaatggtctcgtgacgagctctggggccaaacgggaggccaagtacaattttttctgcactgctaacggtacataggatcatttatccacatgcactcaatcttacctgcagctcacacatgtgtgatctctgcagcttcgttccgcgacttcgatgagtgaggtcaacgtgcatcactacactacgggaacgtgaatcagcagcgagtcatatcaaattaggaataaagtcacgagcaccaccctggaggcaagtacacttccccttacgtgcagacgtcgagattacattgcacgaaagcttgagatcatcaaggtgtcgggtgatcgccgacgatattagtctgcaatcctcttccgtaacatagaacagtgaggtttatattacaacatcgaagcctctcactccgagaagccataagcttcgaacatagttcatccactccgatcaaaaatctgttgacctgccctcttcaaacccatgcccattatccagaccatggctttgcccttcgatccatccgaattctcgaaagtcgtgctagagccaaatagcatcgatgctgttttcggcgtgcctgactctagcctcagtggtctcctgagtttctttgccgccaccctgaaagcccctcgacatatagtcacggcgaacgagggaggtgcgatagcactggccgctggctatcatctagctaccaagaaagttgcgctatgctatctccagaactcaggattgtccaacgccttgtccccgcttcagtcattagcaagcaatgctgtagccggggtacctgtgcttctcatgatcggatggcggggaaagcctggcatcaaagacgaaccccagcatgcactcattggccctcaactcttagagaatctcaatgccaacaagattccctacgcccatatcccggagaacctggaccaagtctgtaccgtcgtctctgacctcatcacaagggctcttacggagaaaacaccagttgcccttgttgtcccaccgggaaccttcaagccttataatgcttcaacgccagagaagccagagaggccagagaagctgtttgcttgcctagagctttgtgatcacattaacgtcagcaagggaccaacaatctggttgacaaaatatccgaaccaatcattgcctctaaaacgagaagatgtggttcgaagcgttattcagcgacgtcggagcgacgatatcatagtctcgtccctaggtgggaccagccgcgagatatatatggttctggaggagcgaaaagagccaatctcacgcatcttctttgttctaggagcaatgggtcatgcatacggcgtagcatctgggatccgcttagggcagagcgcgaaacaaaccccccttgtatattgcattgagggcgacgggtcgttcctgatgcacattggcaatagtgccgttttagcggactgtgggccgagaggcatggtgcatgtcgtgatctataacggtgtgcatagctccacaggagatcagcccttgtcgatcgggatacagggctatctgagccttgcaaaaggtctctcctacatgcgtatattctttgtggacacgctgcaggccttagatgaagcattgggtttggccgctatggctgcaagcccccaggtccccgccagggaatgcgggggag

SEQ ID NO: 37223 - DNA, 1662 bp, Muscodor strobelii
  misc_feature: SGI cDNA ID NO. 572915
  misc_feature: Encodes the peptide sequence at SEQ ID NO 37224
atgaccctcggagacttagtttggcgctcaccgcatgcgtctctgaaaattggcactcacaagccaaaaattgccaatgacaagatggaaaaaccacctctacaacagtctgagtgtggtacgccaacagcgatgcatcatgcatcaagtattgagaagggcatatcgtctaaagagcaggatgacaaaatcgcagacgatccaaacccacccttctcaatcttttcattagcacaaaagagattgattgtattcatcgtagctttgacaactttactcccacccttaactgcaagcattttctatcctgttattcctttactggcaagggagttccatgtctctatcacggacatcaacttgacaatcaccatatatctgatagtccaaggcatagccccgtcgctcgttggtaacttatccgacgagactggtcggaggccagccctcttgatagctctacttatctatatcgtgggctcaataggggcggcaattcgcaatgactacggcgtgctatttggcatgcgcgtccttcaaagcgcgggtggcagtggtaccatcgcgctgtcactcgccattgtgtcggacatcgtgacatcggccgaacgaggaacttacacatcttacgtacagatgggctggatgctaggcccatctctcgcacccgtcattggcggcctcctggctcaattcattaactggcacgcaatcttttggtttttgaccgcgtatgctggttttgtgtggactatatcgttcgtttttttgccagagactagccgagggatagtcggaaacggatctattccgcctcgctggtggaatatgacactctatgcccatatgcggcgcgttgtggcaccccaccacaatgccaatctgtctgttaagccagaatccagagccgcgtcgaaaagaaaaagcataaatccacttaattcgctgaagctttttcgagagaaggagacttgtcttttgctgatatatagtggtctcgtctacgcaagctcatacttggtgttgtcgacactttcagatcagctacaagagaaatatgaatttgacaccttacgcgtcagtctcagttttctagcatctggattcggtactgtaacctcggttctcttaacggggcggatactagactggaactttaggcgccacgcccgtctggtagggctggaaatctccaagcagaaacaacaagacctgtcaaagtttccggtcgagctcgctcgtcttcaaagcagcattcctactctcgtgcttgccagcgtcagcctcattgcctatgggtggacgatgcagagcaagacaaatctggctgcaccgctaatcttcttgtttctccaatcttttggcagcgccagtgcattttccgggctgaacaacttgataatggaccttaaccgcgagaaggcagggacggcgtcagcagcgatgaaccttacgcgttgttggttcggcgctggcggaacagcattcgcaagcccattggtaaagagagccggcattgggtggctcggagtggtcatccccggcatctggctactattcagcccaatactgtatatagtgattcgacacgggccaaggtggagggaggaaaagagaacaaaaggtttgaaagatgctcatccgaccccgcataggtcataa

SEQ ID NO: 37224 - protein, 553 aa, Muscodor strobelii
  misc_feature: SGI Peptide ID NO. 572915
  misc_feature (87)..(494): Pfam Id: PF07690 Pfam Desc: Major Facilitator Superfamily
  misc_feature (136)..(262): Pfam Id: PF00083 Pfam Desc: Sugar (and other) transporter
  misc_feature (49)..(541): NCBI GI: 238492945 Blast Desc: MFS transporter, [Aspergillus flavus NRRL3357] gi|220696203|gb|EED52545.1| MFS transporter, [Aspergillus flavus NRRL3357]
  misc_feature (70)..(553): NCBI GI: 119499245 Blast Desc: MFS transporter, [Neosartorya fischeri NRRL 181] gi|119414544|gb|EAW24483.1| MFS transporter, [Neosartorya fischeri NRRL 181]
  misc_feature (49)..(541): NCBI GI: 169783186 Blast Desc: [Aspergillus oryzae RIB40] gi|83774799|dbj|BAE64922.1| protein product [Aspergillus oryzae]
  misc_feature (46)..(541): NCBI GI: 115398660 Blast Desc: conserved [Aspergillus terreus NIH2624] gi|114191802|gb|EAU33502.1| conserved [Aspergillus terreus NIH2624]
  misc_feature (70)..(553): NCBI GI: 159125888 Blast Desc: MFS transporter, [Aspergillus fumigatus A1163]
  misc_feature (27)..(547): NCBI GI: 171676988 Blast Desc: protein product [Podospora anserina] gi|170936561|emb|CAP61221.1| protein product [Podospora anserina]
  misc_feature (70)..(553): NCBI GI: 70985368 Blast Desc: MFS transporter [Aspergillus fumigatus Af293] gi|66845818|gb|EAL86152.1| MFS transporter, [Aspergillus fumigatus Af293]
  misc_feature (45)..(541): NCBI GI: 255950382 Blast Desc: Pc22g20580 [Penicillium chrysogenum Wisconsin 54-1255] gi|211592975|emb|CAP99346.1| Pc22g20580 [Penicillium chrysogenum Wisconsin 54-1255]
  misc_feature (5)..(553): NCBI GI: 154312766 Blast Desc: BC1G_05084 [Botryotinia fuckeliana B05.10] gi|150849786|gb|EDN24979.1| BC1G_05084 [Botryotinia fuckeliana B05.10]
  misc_feature (56)..(541): NCBI GI: 46111151 Blast Desc: FG02457.1 [Gibberella zeae PH-1]
MTLGDLVWRSPHASLKIGTHKPKIANDKMEKPPLQQSECGTPTAMHHASSIEKGISSKEQDDKIADDPNPPFSIFSLAQKRLIVFIVALTTLLPPLTASIFYPVIPLLAREFHVSITDINLTITIYLIVQGIAPSLVGNLSDETGRRPALLIALLIYIVGSIGAAIRNDYGVLFGMRVLQSAGGSGTIALSLAIVSDIVTSAERGTYTSYVQMGWMLGPSLAPVIGGLLAQFINWHAIFWFLTAYAGFVWTISFVFLPETSRGIVGNGSIPPRWWNMTLYAHMRRVVAPHHNANLSVKPESRAASKRKSINPLNSLKLFREKETCLLLIYSGLVYASSYLVLSTLSDQLQEKYEFDTLRVSLSFLASGFGTVTSVLLTGRILDWNFRRHARLVGLEISKQKQQDLSKFPVELARLQSSIPTLVLASVSLIAYGWTMQSKTNLAAPLIFLFLQSFGSASAFSGLNNLIMDLNREKAGTASAAMNLTRCWFGAGGTAFASPLVKRAGIGWLGVVIPGIWLLFSPILYIVIRHGPRWREEKRTKGLKDAHPTPHRS

SEQ ID NO: 37225 - DNA, 675 bp, Muscodor strobelii
  misc_feature: SGI EST ID NO. CUFF.89024.0
  misc_feature: Variant of the nucleotide sequence at SEQ ID NO 37223
cggcgtattaccctagtcgcacagtgccgttctatatcaacactctcgactgcagcccacacgcgcatatgtgctatgaccctcggagacttagtttggcggtaagcgtcgacggctcggggcattgccgatgtgctagggtctccccaccatatcgggcaacaacactgtagatcatctcggaacgccgccggtgaagctggtatgtgcttcacagtacgtacctgaataagaaacatcggaatggcgattcctaactcgaaaacacaaacagctcaccgcatgcgtctctgaaaattggcactcacaagccaaaaattgccaatgacaagatggaaaaaccacctctacaacagtctgagtgtggtacgccaacagcgatgcatcatgcatcaagtattgagaagggcatatcgtctaaagagcaggatgacaaaatcgcagacgatccaaacccacccttctcaatcttttcattagcacaaaagagattgattgtattcatcgtagctttgacaactttactcccacccttaactgcaagcattttctatcctgttattcctttactggcaagggagttccatgtctctatcacggacatcaacttgacaatcaccatatatctgatagtccaaggcatagccccgtcgctcgttggtaacttatccgacg

SEQ ID NO: 37226 - DNA, 1542 bp, Muscodor strobelii
  misc_feature: SGI cDNA ID NO. 572916
  misc_feature: Encodes the peptide sequence at SEQ ID NO 37227
atgcttgtgagcccagctccaagattcagtgctcctttacagaaagttcctggaaatctgtttccggccaatgaaagtgtctctgatgatctccaacctaccaccacagacgcgatcccaaatcaaagtgcaggagtgcaacttgtgatcgatctggagtccaatccagctagtgttcccggaattcggctccaccatgcgtcctctgtccagccagaacgttcgcaagatcttgtctctcgcggtgtcatcaccatcgaaaatgcccgcacgtatcaacgtctttatcaggagcggctagatcgtttcctgtacggcatcttgggagatcacagcaatgcgacatttgaacacatccgtcaaaaatcacgtatcctcagcacagttgtctgcgctatcggcgctttacacctggcccaccccgactatgacacactttacaaagaattcgttgccttgagtgcagcgatgagtttctctaaagaaaacacaaccctcgacatccaagcgctctgcattggcgctttttggatgaccgatcttgcatcgtcgctagtctcgatcgcggtgcgcatggccactgaactacaactgttcaggagtttcttcaaggccttacatggtgatcgcgaacagtatttatgtgcgcgtctctattacctagtctatgcttgtgatcaccatctgtccatcccgcacggcagaccacccattacgcgaaactgcgaagccataaagaatgcacgccaatttcttgaatgcaagtatgcgaatgagaatgacgcgagattggttagccatgtacttcgttggcaagtctgcacggacattttcgataccatgggtgtcaatgtcgatcggcctctcaccaatgacgaattgctcaaagtcaagcgcttcagcattgctctcgacagtctccgactagaatggggcgataggtttcaccctgacagtcatattggtaattatccctctaagggtgtcggtattcaacaccatttcgctaaacttttcctcttttcccacgccttccgcggtttgagctcaggaattacccaaaaagcaacatgcgaggttgagttggagatctacgaggtagctggctctgcgatactttcagctatatcaattgtgcggacagtgagctcggatcccgaagtccaatcttaccttaacggcctgccaacgtatttccacgtcatgatcgctttcgccgttgttttcttgctcaaggtttcaacgcgcttctcaagtttcggtgaagtggacccccacgaaatacatcggctgatgggcaagttaatagtcgtgctgaaagaagtatcaaaagcgatgcatccacgacacctcctcgtcacaattacaaactcagccgaagacgccttacagcagacccaatctgttccaatcgatgccacgagcggatatagatcatatcataccacccatgaagatcagacaaacactgagaacgtcttcacacatgaagtagtaaaccaattctttaatgattatgacttctttatggaccactattaa

SEQ ID NO: 37227 - protein, 513 aa, Muscodor strobelii
  misc_feature: SGI Peptide ID NO. 572916
  misc_feature (23)..(513): NCBI GI: 242786774 Blast Desc: conserved [Talaromyces stipitatus ATCC 10500] gi|218721018|gb|EED20437.1| conserved [Talaromyces stipitatus ATCC 10500]
  misc_feature (47)..(513): NCBI GI: 242792406 Blast Desc: conserved [Talaromyces stipitatus ATCC 10500] gi|218718534|gb|EED17954.1| conserved [Talaromyces stipitatus ATCC 10500]
  misc_feature (40)..(513): NCBI GI: 255942821 Blast Desc: Pc18g03410 [Penicillium chrysogenum Wisconsin 54-1255] gi|211586912|emb|CAP94565.1| Pc18g03410 [Penicillium chrysogenum Wisconsin 54-1255]
  misc_feature (221)..(476): NCBI GI: 238503994 Blast Desc: conserved [Aspergillus flavus NRRL3357] gi|220690700|gb|EED47049.1| conserved [Aspergillus flavus NRRL3357]
  misc_feature (156)..(467): NCBI GI: 212535208 Blast Desc: conserved [Penicillium marneffei ATCC 18224] gi|210070159|gb|EEA24249.1| conserved [Penicillium marneffei ATCC 18224]
  misc_feature (51)..(476): NCBI GI: 145233275 Blast Desc: An02g08760 [Aspergillus niger] gi|134056938|emb|CAK44285.1| protein product [Aspergillus niger]
  misc_feature (51)..(468): NCBI GI: 115391583 Blast Desc: conserved [Aspergillus terreus NIH2624] gi|114194220|gb|EAU35920.1| conserved [Aspergillus terreus NIH2624]
  misc_feature (76)..(451): NCBI GI: 238489747 Blast Desc: C6 transcription factor, [Aspergillus flavus NRRL3357] gi|220698499|gb|EED54839.1| C6 transcription factor, [Aspergillus flavus NRRL3357]
  misc_feature (10)..(468): NCBI GI: 121706020 Blast Desc: C6 transcription factor, [Aspergillus clavatus NRRL 1] gi|119399419|gb|EAW09847.1| C6 transcription factor, [Aspergillus clavatus NRRL 1]
  misc_feature (51)..(468): NCBI GI: 70999243 Blast Desc: C6 transcription factor [Aspergillus fumigatus Af293] gi|66851980|gb|EAL92305.1| C6 transcription factor, [Aspergillus fumigatus Af293]
MLVSPAPRFSAPLQKVPGNLFPANESVSDDLQPTTTDAIPNQSAGVQLVIDLESNPASVPGIRLHHASSVQPERSQDLVSRGVITIENARTYQRLYQERLDRFLYGILGDHSNATFEHIRQKSRILSTVVCAIGALHLAHPDYDTLYKEFVALSAAMSFSKENTTLDIQALCIGAFWMTDLASSLVSIAVRMATELQLFRSFFKALHGDREQYLCARLYYLVYACDHHLSIPHGRPPITRNCEAIKNARQFLECKYANENDARLVSHVLRWQVCTDIFDTMGVNVDRPLTNDELLKVKRFSIALDSLRLEWGDRFHPDSHIGNYPSKGVGIQHHFAKLFLFSHAFRGLSSGITQKATCEVELEIYEVAGSAILSAISIVRTVSSDPEVQSYLNGLPTYFHVMIAFAVVFLLKVSTRFSSFGEVDPHEIHRLMGKLIVVLKEVSKAMHPRHLLVTITNSAEDALQQTQSVPIDATSGYRSYHTTHEDQTNTENVFTHEVVNQFFNDYDFFMDHY

SEQ ID NO: 37228 - DNA, 652 bp, Muscodor strobelii
  misc_feature: SGI EST ID NO. CUFF.89029.0
  misc_feature: Variant of the nucleotide sequence at SEQ ID NO 37226
ggagtgcaacttgtgatcgatctggagtccaatccagctagtgttcccggaattcggctccaccatgcgtcctctgtccagccagaacgttcgcaagatcttgtctctcgcggtgtcatcaccatcgaaaatgcccgcacgtatcaacgtctttatcaggagcggctagatcgtttcctgtacggcatcttgggagatcacagcaatgcgacatttgaacacatccgtcaaaaatcacgtatcctcagcacagttgtctgcgctatcggcgctttacacctggcccaccccgactatgacacactttacaaagaattcgttgccttgagtgcagcgatgagtttctctaaagaaaacacaaccctcgacatccaagcgctctgcattggcgctttttggatgaccgatcttgcatcgtcgctagtctcgatcgcggtgcgcatggccactgaactacaactgttcaggagtttcttcaaggccttacatggtgatcgcgaacagtatttatgtgcgcgtctctattacctagtctatgcttgtgatcaccatctgtccatcccgcacggcagaccacccattacgcgaaactgcgaagccataaagaatgcacgccaatttcttgaatgcaagtatgcgaatgagaatgacg

SEQ ID NO: 37229 - DNA, 327 bp, Muscodor strobelii
  misc_feature: SGI cDNA ID NO. 572917
  misc_feature: Encodes the peptide sequence at SEQ ID NO 37230
atggatggcacgtcccggggatcaacaaaagagatgagtggaccggtactctgcgggattgattttgcggctcagtccgtggaggcctcgacgtctgccggacagtcctggggatcgaccttcgacgtggtcgaattcggtgatatcaacaactcggccaattgctacctaagcgacgatgcagactcctcgctgcaagataacaacgcaaccgccttcactctttcttttggagttatgtcgccgttctctgaggacaaggagtccgcgatccgacgtttgtctatcggtgatagtattgggagtaacgactgtggcacgttctaa

SEQ ID NO: 37230 - protein, 108 aa, Muscodor strobelii
  misc_feature: SGI Peptide ID NO. 572917
MDGTSRGSTKEMSGPVLCGIDFAAQSVEASTSAGQSWGSTFDVVEFGDINNSANCYLSDDADSSLQDNNATAFTLSFGVMSPFSEDKESAIRRLSIGDSIGSNDCGTF

SEQ ID NO: 37231 - DNA, 674 bp, Muscodor strobelii
  misc_feature: SGI EST ID NO. CUFF.89048.0
  misc_feature: Variant of the nucleotide sequence at SEQ ID NO 37229
cggtactctacgctcgaactgcagggcacacgaactgtcggccgggctcaatactgagatccggcatcttgggacatggacgccaagtagaataagctcgaagcgagactcggaggagaagcctccacgaggtatttgggcttcgggctgacgactaggactttcactttacgtatatggggcgcgatattgacagccgggattcctggaaacttggtttcggggacagtagctcaccgttacggacgccaatttctatcttacgataggcgggattgattttgcggctcagtccgtggaggcctcgacgtctgccggacagtcctggggatcgaccttcgacgtggtcgaattcggtgatatcaacaactcggccaattgctacctaagcgacgatgcagactcctcgctgcaagataacaacgcaaccgccttcactctttcttttggagttatgtcgccgttctctgaggacaaggagtccgcgatccgacgtttgtctatcggtgatagtattgggagtaacgactgtggcacgttctaaattctcgaggaaaattgttgttttacttggttcttttatttattctagcatgcctttgccaccacgcttgaagaaaccttatgttgtggtgatcttccatgttggtaatttccgctggcttatgccttgt

SEQ ID NO: 37232 - DNA, 1125 bp, Muscodor strobelii
  misc_feature: SGI cDNA ID NO. 572918
  misc_feature: Encodes the peptide sequence at SEQ ID NO 37233
atgcagatcataaagcttagctccgtagtcctcgccctcgcggctgacgtccttgcgacaaccagctcacagtctacccttacctgtatcaccagctatggtttattgcctcacgttggacatatccccaccaacaccaggtcctcgaagaagacggccacatatatcagcacttcgatacaacccggcagcactattacgagaacttccgcggccaagacagtaaccacgaccatcacctctagcatcgcaaccaccaccaccgctgtcaccaatactgatactgcaaccattacgtccacatccacatcagtcagtactgcgacaacaacagagacggacaccagcatctcaacagctaccacgactacaaccgtcacgactcagagtacgattgccgctccggccggtttcactccggtggccgaggaggcaggcttcgtacccaaaaacaagcgggatgttagcgccaaaccagctcgcaaagttcttggtgccgtgaacaatctcttcccggagtgcgttgaatgcacccgctacagcaccacgaccgttactaaaaaggtcacaacgacggccaagcctaccactacgaccattcccggcaccaccaagacagtgaccatagtggtgagcaaaaccaccacttccactatcttccctccccacgttacgagcaccgtgacttcaattgttcccacaacatccactaccactaccaccacgacatccaccacgatatcgacgacgacgacgacggcgcagcaaaccgtctacgctggaaccccatattatgccgcctgtgcacccaacaacattgtcagttcagcgaatgggggtaccgccattgacacatttaactacggcttcgctggttattcaactacctataccaatgatgcttacggctgttgcgttgcctgtttccaatcctcaacgccctgcttcgcggccgtctggtatggcgagtgtgacctcgttactagctcgacagctacatgcgcccctggagtacagtacggcggttcttttcaaaccgaccccgacgaacacgatagctacggattcgtggtgattaatggcccatgcggcgctctccgcgacggaggtgctcaaggttcttaa

SEQ ID NO: 37233 - protein, 374 aa, Muscodor strobelii
  misc_feature: SGI Peptide ID NO. 572918
  misc_feature (3)..(374): NCBI GI: 46127671 Blast Desc: FG08213.1 [Gibberella zeae PH-1]
  misc_feature (9)..(373): NCBI GI: 46124179 Blast Desc: FG06467.1 [Gibberella zeae PH-1]
  misc_feature (137)..(370): NCBI GI: 46119309 Blast Desc: FG04763.1 [Gibberella zeae PH-1]
  misc_feature (265)..(372): NCBI GI: 256725262 Blast Desc: [Nectria haematococca mpVI 77-13-4]
MQIIKLSSVVLALAADVLATTSSQSTLTCITSYGLLPHVGHIPTNTRSSKKTATYISTSIQPGSTITRTSAAKTVTTTITSSIATTTTAVTNTDTATITSTSTSVSTATTTETDTSISTATTTTTVTTQSTIAAPAGFTPVAEEAGFVPKNKRDVSAKPARKVLGAVNNLFPECVECTRYSTTTVTKKVTTTAKPTTTTIPGTTKTVTIVVSKTTTSTIFPPHVTSTVTSIVPTTSTTTTTTTSTTISTTTTTAQQTVYAGTPYYAACAPNNIVSSANGGTAIDTFNYGFAGYSTTYTNDAYGCCVACFQSSTPCFAAVWYGECDLVTSSTATCAPGVQYGGSFQTDPDEHDSYGFVVINGPCGALRDGGAQGS

SEQ ID NO: 37234 - DNA, 1025 bp, Muscodor strobelii
  misc_feature: SGI EST ID NO. CUFF.89054.0
  misc_feature: Variant of the nucleotide sequence at SEQ ID NO 37232
cacttgagtccatataatgcagatcataaagcttagctccgtagtcctcgccctcgcggctgacgtccttgcgacaaccagctcacagtctacccttacctgtatcaccagctatggtttattgcctcacgttggacatatccccaccaacaccaggtcctcgaagaagacggccacatatatcagcacttcgatacaacccggcagcactattacgagaacttccgcggccaagacagtaaccacgaccatcacctctagcatcgcaaccaccaccaccgctgtcaccaatactgatactgcaaccattacgtccacatccacatcagtcagtactgcgacaacaacagagacggacaccagcatctcaacagctaccacgactacaaccgtcacgactcagagtacgattgccgctccggccggtttcactccggtggccgaggaggcaggcttcgtacccaaaaacaagcgggatgttagcgccaaaccagctcgcaaagttcttggtgccgtgaacaatctcttcccggagtgcgttgaatgcacccgctacagcaccacgaccgttactaaaaaggtcacaacgacggccaagcctaccactacgaccattcccggcaccaccaagacagtgaccatagtggtgagcaaaaccaccacttccactatcttccctccccacgttacgagcaccgtgacttcaattgttcccacaacatccactaccactaccaccacgacatccaccacgatatcgacgacgacgacgacggcgcagcaaaccgtctacgctggaaccccatattatgccgcctgtgcacccaacaacattgtcagttcagcgaatgggggtaccgccattgacacatttaactacggcttcgctggttattcaactacctataccaatgatgcttacggctgttgcgttgcctgtttccaatcctcaacgccctgcttcgcggccgtctggtatggcgagtgtgacctcgttactagctcgacagctacatgcgcccctg

SEQ ID NO: 37235 - DNA, 1431 bp, Muscodor strobelii
  misc_feature: SGI cDNA ID NO. 572919
  misc_feature: Encodes the peptide sequence at SEQ ID NO 37236
atggaatctcataaagaagctgtcgaagtcatatcaaagcaactgcaagaattctacgcccgaaaagaaccgttccgagtctatcatgggtccacaaacactacgcgagctgtccgacgcgacaagattgtcgatacgagccagcttgacaatgttctgtcaataaacacgactagaaaaaccgccctcgtcgagccaaatgtctccatggacagattagtcgaggcggctctcaaagtgtcgttagttccgcttgtcgtgatggaattccctggtatcacggttggtggaggtttctcgggcagcgccggggagagcagttccggccgacatggtccatttgactcaacagtcaattcgattgagattgtgttggcgaatggagacgtcatgcaggcttccaaaacggacaattgcgacctattctggggtgctgcctctgctttcggcactatcggtatcgtcacattgttagaagttcaactccaggatgccacacgctacgtacaactgacgcactaccctttacagagtttcgaagagacatctaagaagcttcaggaagtagtctcagatgagtccatggaatttgtagatgggattgttttttcgcctagtgaagcagtagtttgtgctggccgtcttgtggatgcactaccaacgggaagcaaaccaagatgctatctgggccgctccgatccatggttctatattgatgtccagaaaagagccatgaaagcatcagagcctgtcatagactatgtcccacttgtcgattatctctttcgctgggatagaggtggcttctggatacctttatggcatgcccgtgtcatgtaccacgcattacacaaatccggccttagcgattcatacatcatacaagatgtcggcgtacctttcgattccgcagaggctttctacgaatggctacacgagaagctaaacatatatcctctatggctatgccccattcgcgttcggcgctactctcctgatgccgcgcacggtctacatgctcatttcgccgagccaagcaagactccagaagtcatgctcaactttggcatttgggggcccggcccctcgtcgtatgaaaagctgaagcagctgaaccgcatgattgagcacaaagtccatgaacttcatggcaacaaaacactctatgcgcaaagcttctatacagagcaggaattttggcaaagttacaaccgccctgcttacgaccgagttcgagataaatatcacgctgcccatttgcctagtgtctacgacaaagtgaaggtcgatgaaaatgctaagagcacagcgaagaatcattcgagattaccaaatgtattacatcatacatggcctttccaaggcctctacggagtctataaagcttggcgcggtggcgattacttgttgccgaaaaagtctaggtcatga

SEQ ID NO: 37236 - protein, 476 aa, Muscodor strobelii
  misc_feature: SGI Peptide ID NO. 572919
  misc_feature (7)..(134): Pfam Id: PF01565 Pfam Desc: FAD binding domain
  misc_feature (43)..(134): Pfam Id: PF01565 Pfam Desc: FAD binding domain
  misc_feature (1)..(474): NCBI GI: 46123087 Blast Desc: FG05921.1 [Gibberella zeae PH-1]
  misc_feature (1)..(474): NCBI GI: 256731147 Blast Desc: [Nectria haematococca mpVI 77-13-4]
  misc_feature (1)..(475): NCBI GI: 39940580 Blast Desc: MGG_04950 [Magnaporthe grisea 70-15] gi|145010815|gb|EDJ95471.1| MGG_04950 [Magnaporthe grisea 70-15]
  misc_feature (1)..(476): NCBI GI: 119473305 Blast Desc: FAD binding domain protein [Neosartorya fischeri NRRL 181] gi|119406711|gb|EAW16662.1| FAD binding domain protein [Neosartorya fischeri NRRL 181]
  misc_feature (1)..(476): NCBI GI: 70992911 Blast Desc: FAD binding domain protein [Aspergillus fumigatus Af293] gi|66848937|gb|EAL89266.1| FAD binding domain protein [Aspergillus fumigatus Af293] gi|159130242|gb|EDP55355.1| FAD
  misc_feature (1)..(475): NCBI GI: 238507646 Blast Desc: FAD binding domain protein [Aspergillus flavus NRRL3357] gi|220688543|gb|EED44895.1| FAD binding domain protein [Aspergillus flavus NRRL3357]
  misc_feature (1)..(475): NCBI GI: 169785106 Blast Desc: [Aspergillus oryzae RIB40] gi|83775761|dbj|BAE65881.1| protein product [Aspergillus oryzae]
  misc_feature (4)..(473): NCBI GI: 255946622 Blast Desc: Pc22g00330 [Penicillium chrysogenum Wisconsin 54-1255] gi|211591095|emb|CAP97321.1| Pc22g00330 [Penicillium chrysogenum Wisconsin 54-1255]
  misc_feature (1)..(473): NCBI GI: 240107084 Blast Desc: FAD binding domain containing protein [Coccidioides posadasii C735 delta SOWgp]
  misc_feature (1)..(410): NCBI GI: 156061493 Blast Desc: SS1G_02891 [Sclerotinia sclerotiorum 1980] gi|154700293|gb|EDO00032.1| SS1G_02891 [Sclerotinia sclerotiorum 1980]
MESHKEAVEVISKQLQEFYARKEPFRVYHGSTNTTRAVRRDKIVDTSQLDNVLSINTTRKTALVEPNVSMDRLVEAALKVSLVPLVVMEFPGITVGGGFSGSAGESSSGRHGPFDSTVNSIEIVLANGDVMQASKTDNCDLFWGAASAFGTIGIVTLLEVQLQDATRYVQLTHYPLQSFEETSKKLQEVVSDESMEFVDGIVFSPSEAVVCAGRLVDALPTGSKPRCYLGRSDPWFYIDVQKRAMKASEPVIDYVPLVDYLFRWDRGGFWIPLWHARVMYHALHKSGLSDSYIIQDVGVPFDSAEAFYEWLHEKLNIYPLWLCPIRVRRYSPDAAHGLHAHFAEPSKTPEVMLNFGIWGPGPSSYEKLKQLNRMIEHKVHELHGNKTLYAQSFYTEQEFWQSYNRPAYDRVRDKYHAAHLPSVYDKVKVDENAKSTAKNHSRLPNVLHHTWPFQGLYGVYKAWRGGDYLLPKKSRS

SEQ ID NO: 37237 - DNA, 1434 bp, Muscodor strobelii
  misc_feature: SGI cDNA ID NO. 572920
  misc_feature: Elevated expression when VOC is produced
  misc_feature: Encodes the peptide sequence at SEQ ID NO 37238
atgaagagtgctgtacagtttcttgctcttacgagcctctcatggctggccgcagctaaggagatggctcctaatgaggagctggcgaagtccatttacgactctggtctcagacatgaggagatcatgagccacaagatgtctttctgggccagccgaagagagcaaggcctgtttgactcttcacaatacaaaagcatggctgccgacgtagatgtcgtcccttgcactgacggtcttgccgaattggttgccggcgacccattgtacaccttcaactgcagtgggctggacttgtatgatttccaatcccacgtagaccttggatcccctactggtgagggtgccggatcgtggggctggactagcgacgacggtcgtgagtttgcagcagttgctcaatccgacggtgccgccttcgttgagatcagtgaggcaggtaagatgatctaccttggtcgtctgccacaatatagcgctgcccagccctcgctatggcgagagattaagggtatcaggagtttgatcgtcatcggaagcgaggctacaaatcatggtatccaggtctttgacatgaagaagttgctcgacatcgacccttcttcgcctgtaactttcactgacgccgatgcctaccacttcgccgatctgcctactggccgttctcacaccgtgcagaccaacgaagagaaaaattatgctgtcgcttctggagcacagccccgaactgacaagtgcaaatctggtctcatcttcatcgatctagatgaccttgagaacctcacttctcctggctgtgctgccgttgacggatacgtgcatgatgctcaatgtgttgtctaccgcggccccgatgagaagtacgtcggaacggacatctgctacggttacaacgaggataccttgaccatatacaacgtcactgacaaagctgccgctactatcatctcgcgcacttcgtacgaaggtgctgcatacacccatcaaggttggttgctggacactgagtggcagcaattccttgtcctcgacgacgagtacgatgagtacgacaaggttgggcctggagctaagggctatcccatcacctacatctgggatatcagctcccttgaagcccctaagcaaacaggttactacagcgccaaggtcaagggcattgaccacaaccagttcatcaacggtgactttgcctaccagagtaactacggtggtggtctccacatcttggacatctcttccatccccagtgaccccactggtgccggtgtcttcgaggttgcccatttcgacatttaccctgaggatgacgaggacgagggcggtggcgagatcgatttcgtggggacatggagtcattatccgtacttcaagagcggctacatcctcatcaacacgattgagcgtggtgcctacatagtcaagcgctcgtaa

SEQ ID NO: 37238 - protein, 477 aa, Muscodor strobelii
  misc_feature: SGI Peptide ID NO. 572920
  misc_feature (32)..(475): NCBI GI: 145604815 Blast Desc: MGG_13912 [Magnaporthe grisea 70-15] gi|145012737|gb|EDJ97391.1| MGG_13912 [Magnaporthe grisea 70-15]
  misc_feature (17)..(477): NCBI GI: 171676304 Blast Desc: protein product [Podospora anserina] gi|170936218|emb|CAP60877.1| protein product [Podospora anserina]
  misc_feature (1)..(475): NCBI GI: 145610426 Blast Desc: MGG_12679 [Magnaporthe grisea 70-15] gi|149209435|ref|XP_001522092.1| MGCH7_ch7g207 [Magnaporthe grisea 70-15] gi|86196162|gb|EAQ70800.1| MGCH7_ch7g207 grisea
  misc_feature (20)..(475): NCBI GI: 169611334 Blast Desc: SNOG_08777 [Phaeosphaeria nodorum SN15] gi|111062825|gb|EAT83945.1| SNOG_08777 [Phaeosphaeria nodorum SN15]
  misc_feature (10)..(477): NCBI GI: 116200907 Blast Desc: CHGG_08338 [Chaetomium globosum CBS 148.51] gi|88176856|gb|EAQ84324.1| CHGG_08338 [Chaetomium globosum CBS 148.51]
  misc_feature (20)..(475): NCBI GI: 189206033 Blast Desc: conserved [Pyrenophora tritici-repentis Pt-1C-BFP] gi|187975444|gb|EDU42070.1| conserved [Pyrenophora tritici-repentis Pt-1C-BFP]
  misc_feature (1)..(475): NCBI GI: 256730658 Blast Desc: [Nectria haematococca mpVI 77-13-4]
  misc_feature (1)..(475): NCBI GI: 46124183 Blast Desc: FG06469.1 [Gibberella zeae PH-1]
  misc_feature (20)..(477): NCBI GI: 171677284 Blast Desc: protein product [Podospora anserina] gi|170936710|emb|CAP61368.1| protein product [Podospora anserina]
  misc_feature (1)..(476): NCBI GI: 261359159 Blast Desc: conserved [Verticillium albo-atrum VaMs.102]
  misc_feature: Useful for introducing or modulating the production of volatile compounds
MKSAVQFLALTSLSWLAAAKEMAPNEELAKSIYDSGLRHEEIMSHKMSFWASRREQGLFDSSQYKSMAADVDVVPCTDGLAELVAGDPLYTFNCSGLDLYDFQSHVDLGSPTGEGAGSWGWTSDDGREFAAVAQSDGAAFVEISEAGKMIYLGRLPQYSAAQPSLWREIKGIRSLIVIGSEATNHGIQVFDMKKLLDIDPSSPVTFTDADAYHFADLPTGRSHTVQTNEEKNYAVASGAQPRTDKCKSGLIFIDLDDLENLTSPGCAAVDGYVHDAQCVVYRGPDEKYVGTDICYGYNEDTLTIYNVTDKAAATIISRTSYEGAAYTHQGWLLDTEWQQFLVLDDEYDEYDKVGPGAKGYPITYIWDISSLEAPKQTGYYSAKVKGIDHNQFINGDFAYQSNYGGGLHILDISSIPSDPTGAGVFEVAHFDIYPEDDEDEGGGEIDFVGTWSHYPYFKSGYILINTIERGAYIVKRS

SEQ ID NO: 37239 - DNA, 2410 bp, Muscodor strobelii
  misc_feature: SGI EST ID NO. CUFF.89110.0
  misc_feature: Variant of the nucleotide sequence at SEQ ID NO 37237
gaacgcttgtaccgcgagtgataccatattgtgtgcttgatggaaggtcgttatcagatacccataatatgtctgggcgaatagcactcgaattgtttataaaagcgcgatctgccctttgatgttcgcaatatgtgtagcaagcagtcaagtcgaaaacctcactccttggtccctgtcgatctcggcccaaaatgaagagtgctgtacagtttcttgctcttacgagcctctcatggctggccgcagctaaggagatggctcctaatgaggagctggcgaagtccatttacgactctggtctcagacatgaggagatcatgagccacaagatgtctttctgggccagccgaagagagcaaggcctgtttgactcttcacaatacaaaagcatggctgccgacgtagatgtcgtcccttgcactgacggtcttgccgaattggttgccggcgacccattgtacaccttcaactgcagtgggctggacttgtatgatttccaatcccacgtagaccttggatcccctactggtgagggtgccggatcgtggggctggactagcgacgacggtcgtgagtttgcagcagttgctcaatccgacggtgccgccttcgttgagatcagtgaggcaggtaagatgatctaccttggtcgtctgccacaatatagcgctgcccagccctcgctatggcgagagattaagggtatcaggagtttgatcgtcatcggaagcgaggctacaaatcatggtatccaggtctttgacatgaagaagttgctcgacatcgacccttcttcgcctgtaactttcactgacgccgatgcctaccacttcgccgatctgcctactggccgttctcacaccgtgcagaccaacgaagagaaaaattatgctgtcgcttctggagcacagccccgaactgacaagtgcaaatctggtctcatcttcatcgatctagatgaccttgagaacctcacttctcctggctgtgctgccgttgacggatacgtgcatgatgctcaatgtgttgtctaccgcggccccgatgagaagtacgtcggaacggacatctgctacggttacaacgaggataccttgaccatatacaacgtcactgacaaagctgccgctactatcatctcgcgcacttcgtacgaaggtgctgcatacacccatcaaggttggttgctggacactgagtggcagcaattccttgtcctcgacgacgagtacgatgagtacgacaaggttgggcctggagctaagggctatcccatcacctacatctgggatatcagctcccttgaagcccctaagcaaacaggttactacagcgccaaggtcaagggcattgaccacaaccagttcatcaacggtgactttgcctaccagagtaactacggtggtggtctccacatcttggacatctcttccatccccagtgaccccactggtgccggtgtcttcgaggttgcccatttcgacatttaccctgaggatgacgaggacgagggcggtggcgagatcgatttcgtggggacatggagtcattatccgtacttcaagagcggctacatcctcatcaacacgattgagcgtggtgcctacatagtcaagcgctcgtaaaggctttttagagatacccaacatgagcatagcgaggacaaagtagtctattatttatatgaatgggccctgcggcacattagaaattattacaatcagtctatcgtaacacggtgctctcttcgtggtgatatgataaagagacatgatgtgccagagaggccctcagtcttcatcatgacctagactttttcggcaacaagtaatcgccaccgcgccaagctttatagactccgtagaggccttggaaaggccatgtatgatgtaatacatttggtaatctcgaatgattcttcgctgtgctcttagcattttcatcgaccttcactttgtcgtagacactaggcaaatgggcagcgtgatatttatctcgaactcggtcgtaagcagggcggttgtaactttgccaaaattcctgctctgtatagaagctttgcgcatagagtgttttgttgccatgaagttcatggactttgtgctcaatcatgcggttcagctgcttcagcttttcatacgacgaggggccgggcccccaaatgccaaagttgagcatgacttctggagtcttgcttggctcggcgaaatgagcatgtagaccgtgcgcggcatcaggagagtagcgccgaacgcgaatggggcatagccatagaggatatatgtttagcttctcgtgtagccattcgtagaaagcctctgcggaatcgaaaggtacgccgacatcttgtatgatgtatgaatcgctaaggccggatttgtgtaatgcgtggtacatgacacgggca

SEQ ID NO: 37240 - DNA, 492 bp, Muscodor strobelii
  misc_feature: SGI cDNA ID NO. 572921
  misc_feature: Reduced expression when VOC is produced
  misc_feature: Encodes the peptide sequence at SEQ ID NO 37241
atgacaggaggagtaggcgtccgggatgtttccgcccagaagttcattgagacttatgccagctttctcgtaagtgatctaacctgtcacctatcagaaactagcccttcacagggaaagctccccgtgcctggatgggttgacacggttaagactggagtctcccgagaattgccgccgcagaacgcggactggttctatgtcagagccgcagcagtcgctcgccatgtctacctccgcaagactgtaggagttggtcgccttcgcaaggcccacggtaccgccaagaaccgtggtgtccgtcccagccaccacgtcgatggctctggctctgtcgaccgcaagattctccaggctctggagaagattggtgtggttgagcaagacgaggagaagggaggacgcagaattactcagtcaggccagcgtgatctcgaccgtatcgctcagacctgcgctgaggctgacgaggaggacgaggatgacgagtaa

SEQ ID NO: 37241 - protein, 163 aa, Muscodor strobelii
  misc_feature: SGI Peptide ID NO. 572921
  misc_feature (5)..(157): Pfam Id: PF01090 Pfam Desc: Ribosomal protein S19e
  misc_feature (38)..(157): Pfam Id: PF01090 Pfam Desc: Ribosomal protein S19e
  misc_feature (5)..(23): Pfam Id: PF01090 Pfam Desc: Ribosomal protein S19e
  misc_feature (1)..(161): NCBI GI: 85109500 Blast Desc: 40S ribosomal protein S19 [Neurospora crassa OR74A] gi|28924592|gb|EAA33711.1| 40S ribosomal protein S19 [Neurospora crassa OR74A]
  misc_feature (1)..(152): NCBI GI: 261351913 Blast Desc: 40S ribosomal protein S19 [Verticillium albo-atrum VaMs.102]
  misc_feature (3)..(160): NCBI GI: 115389538 Blast Desc: 40S ribosomal protein S19 [Aspergillus terreus NIH2624] gi|114194670|gb|EAU36370.1| 40S ribosomal protein S19 [Aspergillus terreus NIH2624]
  misc_feature (1)..(152): NCBI GI: 256725765 Blast Desc: [Nectria haematococca mpVI 77-13-4]
  misc_feature (1)..(152): NCBI GI: 39940428 Blast Desc: 40S ribosomal protein S19 [Magnaporthe grisea 70-15] gi|145010728|gb|EDJ95384.1| 40S ribosomal protein S19 [Magnaporthe grisea 70-15]
  misc_feature (3)..(160): NCBI GI: 238843399 Blast Desc: 40S ribosomal protein S19 [Microsporum canis CBS 113480]
  misc_feature (1)..(156): NCBI GI: 116191621 Blast Desc: conserved [Chaetomium globosum CBS 148.51] gi|88181441|gb|EAQ88909.1| conserved [Chaetomium globosum CBS 148.51]
  misc_feature (1)..(150): NCBI GI: 46111413 Blast Desc: RS19_EMENI 40S RIBOSOMAL PROTEIN S19 (S16) [Gibberella zeae PH-1]
  misc_feature (3)..(152): NCBI GI: 67527363 Blast Desc: RS19_EMENI 40S RIBOSOMAL PROTEIN S19 (S16) [Aspergillus nidulans FGSC A4] gi|133844|sp|P27073.1|RS19_EMENI RecName: Full=40S ribosomal protein S19; AltName: Full=S16 S16
  misc_feature (3)..(158): NCBI GI: 225677976 Blast Desc: 40S ribosomal protein S19-B [Paracoccidioides brasiliensis Pb03]
  misc_feature: Useful for introducing or modulating the production of volatile compounds
MTGGVGVRDVSAQKFIETYASFLVSDLTCHLSETSPSQGKLPVPGWVDTVKTGVSRELPPQNADWFYVRAAAVARHVYLRKTVGVGRLRKAHGTAKNRGVRPSHHVDGSGSVDRKILQALEKIGVVEQDEEKGGRRITQSGQRDLDRIAQTCAEADEEDEDDE

SEQ ID NO: 37242 - DNA, 789 bp, Muscodor strobelii
  misc_feature: SGI EST ID NO. CUFF.89369.1
  misc_feature: Variant of the nucleotide sequence at SEQ ID NO 37240
cagaaaagacagggaaagctccccgtgcctggatgggttgacacggttaagactggagtctcccgagaattgccgccgcagaacgcggactggttctatgtcagagccgcagcagtcgctcgccatgtctacctccgcaagactgtaggagttggtcgccttcgcaaggcccacggtaccgccaagaaccgtggtgtccgtcccagccaccacgtcgatggctctggctctgtcgaccgcaagattctccaggctctggagaagattggtgtggttgagcaagacgaggagaagggaggacgcagaattactcagtcaggccagcgtgatctcgaccgtatcgctcagacctgcgctgaggctgacgaggaggacgaggatgacgagtaacagtccaatatgcacagaatgaatcgggaaatgcgggacaattagcatgaggcatggcgtccaaaagggcgcagatcaactgatggcgaatttgtgttcgcatttttgacgattatcacgaaagctcacgctgtgcggtccacgtctgtcatcaacactcgccagcttgtgcaagaaagaaataatgaataccctcatgaagaaaattttacccatttctcagcgtgataagaatagacgtgcattaaacggatacattgtaaatataagctcggttggttgggccggccactggtaaccaatttgaagattgagcatggctggtttgtcccgtttttagaaatctctcctggactgctcctcactgtagcacagagttattaatccattcatgatcac

SEQ ID NO: 37243 - DNA, 852 bp, Muscodor strobelii
  misc_feature: SGI cDNA ID NO. 572922
  misc_feature: Encodes the peptide sequence at SEQ ID NO 37244
atggctcaacctcaagtatggctaatcaccggcgcatctcgcggcctcgggtacgacatgtctaagtttgctctcgcagcagggcacaaggtcctagcagtctaccgaagcaagccctcagacaccaccaaatgggatgaactggagaaccttggcggtatctggacacaactcgacgtgtccgcgaacgataccgaggaaaaagtcaaggccctcgtagcccagtatggcaagatagatgttctgatcaacaatgctggctacgctcttttgagtagtgttgaagaccttcctatgagtgaagtacagaatatcttcaacgccaacctttttggtactattcgtactatcaagggtgttctcccttctatgcgcgagcagaaatccggcaccatcgtgaacgtcagtagttccaatgcgtttcaagtcgtcccagccctaggtatttactcggccactaaatgggctatggaggcatacactgagacgctccaaatggaagtcgcagcattcggcatccgcgttctaatcgctgagcctggcgccacatataccgagtttgcctccgagacaggcacaggcgtccgcatttcaccctccgagccttaccaggaaggtatcgtcaagcagctacatttgtacctgacctctgaccagtactatgcaactatgacgccgtctgctccagttgcggagcggattgtacaagcaattgataggaccggtcatatggctgggaaggagatcaagctccgcttacctcttggtaaggacacgggtgcttctcttgcacagcgggctgctgcgtcgaacgaactagctagtctacaggacgtttggggtagtgtataa

SEQ ID NO: 37244 - protein, 283 aa, Muscodor strobelii
  misc_feature: SGI Peptide ID NO. 572922
  misc_feature (5)..(169): Pfam Id: PF00106 Pfam Desc: short chain dehydrogenase
  misc_feature (1)..(259): NCBI GI: 119497429 Blast Desc: short chain oxidoreductase/dehydrogenase, [Neosartorya fischeri NRRL 181] gi|119413635|gb|EAW23576.1| short chain oxidoreductase/dehydrogenase, [Neosartorya fischeri NRRL 181]
  misc_feature (1)..(259): NCBI GI: 70990156 Blast Desc: short chain oxidoreductase/dehydrogenase [Aspergillus fumigatus Af293] gi|66847559|gb|EAL87889.1| short chain oxidoreductase/dehydrogenase, [Aspergillus fumigatus Af293]
  misc_feature (1)..(259): NCBI GI: 159130409 Blast Desc: short chain oxidoreductase/dehydrogenase, [Aspergillus fumigatus A1163]
  misc_feature (1)..(259): NCBI GI: 121703399 Blast Desc: short chain oxidoreductase/dehydrogenase, [Aspergillus clavatus NRRL 1] gi|119398107|gb|EAW08538.1| short chain oxidoreductase/dehydrogenase, [Aspergillus clavatus NRRL 1]
  misc_feature (1)..(275): NCBI GI: 225558147 Blast Desc: short-chain dehydrogenase/reductase SDR [Ajellomyces capsulatus G186AR]
  misc_feature (7)..(259): NCBI GI: 242800438 Blast Desc: short chain oxidoreductase/dehydrogenase, [Talaromyces stipitatus ATCC 10500] gi|218716933|gb|EED16354.1| short chain oxidoreductase/dehydrogenase, [Talaromyces stipitatus ATCC 10500]
  misc_feature (1)..(275): NCBI GI: 240273390 Blast Desc: dehydrogenase [Ajellomyces capsulatus H143]
  misc_feature (5)..(259): NCBI GI: 212530208 Blast Desc: short chain oxidoreductase/dehydrogenase, [Penicillium marneffei ATCC 18224] gi|210074659|gb|EEA28746.1| short chain oxidoreductase/dehydrogenase, [Penicillium marneffei ATCC 18224]
  misc_feature (5)..(189): NCBI GI: 145233649 Blast Desc: An02g10680 [Aspergillus niger] gi|134057129|emb|CAK44417.1| protein product [Aspergillus niger]
  misc_feature (1)..(259): NCBI GI: 239609820 Blast Desc: short chain oxidoreductase/dehydrogenase [Ajellomyces dermatitidis ER-3]
  misc_feature (6)..(222): SWISSPROT Homolog: EC 1.1.1.62 Estradiol 17-beta-dehydrogenase
MAQPQVWLITGASRGLGYDMSKFALAAGHKVLAVYRSKPSDTTKWDELENLGGIWTQLDVSANDTEEKVKALVAQYGKIDVLINNAGYALLSSVEDLPMSEVQNIFNANLFGTIRTIKGVLPSMREQKSGTIVNVSSSNAFQVVPALGIYSATKWAMEAYTETLQMEVAAFGIRVLIAEPGATYTEFASETGTGVRISPSEPYQEGIVKQLHLYLTSDQYYATMTPSAPVAERIVQAIDRTGHMAGKEIKLRLPLGKDTGASLAQRAAASNELASLQDVWGSV

SEQ ID NO: 37245 - DNA, 4559 bp, Muscodor strobelii
  misc_feature: SGI EST ID NO. CUFF.89095.0
  misc_feature: Variant of the nucleotide sequence at SEQ ID NO 37243
aggaatcagaatctttgcattgcaccaatcaatacactaatacagcatcaaatatacagccctaaagtcattgcaaggtgttcatccttggcgacatcagaaaaaggtggtcgcagatatagcttgcttgctagctgagctgacttaagacatatcgtttcgatattatcattgctttgctaacaaaaatagctgtgatttagatttccaacccactaagtccgtcccatgcctttttccactagtgagttggcggtgtagtattctctttggagtgagtcttgtgcagagagctgtagaactgcactcatccgacatgtctatcaccatcgttgtcctcgatgatccctactccatctaaagcgttacattgtctaacaacacacgcgtgggacctcaatcgcatgggcgaagtgtaacacaattgtgttggctagttgcgcaacaccatgcaagcaaccttgtcgcgtggctactgtgaactatacttctgcggtcgtaatgcatgatgctgagtggcacatatacgtaactgcaaactcgacacggtgctgacaccattaaccgcgtctagctctggtgattggcttcgtccaaggcccgtggtatgtatggtgtgtggctaggcttctcgctagctattgtcggagattttccgatcataagcgacggttggatttggccatcaaggttgcaaatgtctagctggttgaaatccgtaattggaattcattccgttcaagcactccagaccttaccatgctgctggctgaacgggagatcaaagtttaagtaaactattcgctagatcatgcagcctaggtggattagaccgtgtgatagttgatattgagacctcctttgagatctgattaggacattgctccgatcacgaggagaattggacctccagaccgagagtacgaaacggcgagtccggtctacgcagatcaataccgctacccaagctgaaaagtagcgacttgaccctgccctcccagactaatccgatgcgccagtgttggtcgagacgtgctttcaagacccctgaatattcatccgtatcttcctcgctttcttgattctggcgccagtctaacttcgctcgaaacgtgcgttcaagcttttttggttgcaggatcacgttgctttttgtgtttgttgacggatccgagggactggaagaaagaggaggatcgtctgatctccactccattttagcttggaagcttcgttgtggaataccatctcgtctcatctccgagccctgatcctgagcaggctcgacggtccaagctccctgtttcctgaagagttccatgcctacggaccaatcgctttcatagctgtatacattgaagtccattttcgtggcaagcgagagacgtctgccagccatgacggcgtagctccagctgagcgtacccatcaaaggatttacggtcagtgtggccgtaagaggcgttcccttgtgagaaggaagtgtggcgaatcgcgcgccaagactcatacccccggatttattaagagttccgtagtatagctcgccgccagcactgaagcgcccgtagatgcgctccttttccgatgcaggtgagatgtttgctttatcagacaagcggcccggcttacttaggctaggggtgtcgcccccaaaattgtaaagcccacggacgcccatcaaccctccatccgttgaggcaagaccttctatcccgtatcgaccctcgtcgtactgtatcatacccaatacagttccaccattgcgtaatgtctgatccgacactgcgcttatttgtagttgcagattcggggacagcctctttatcatgagagcctcaagcgttgacatgggcagatataatcttccatatgcgagggtatctttggcgacccccttaacgcggccggggcgagagatatcggccaaggggacatagctctttaaaagctcaggtaggggtaccttctcgctctgcgcaactgcatggtaattgagagggacggtagagtagaggtaggaaatggagccgtcgacgacaccaacagtgccgagttggtaggctgaggcaaagtgcggcgtggcaagcgaagcaagggtcagttttagacctcgtggagttggaaaatgcagcaacgagctggatgttgcattgagggtcgagtaggaattgtcgcgactccaacctgtcgcaccgtagaaggcgctttgaatgtagtccatgaactcgcgcatcgtgcggttggcggcaccggctgctaccggttgagcatctgcgctcctcgttatcggcggtccaatggttcgaatgtgttgttcgtcgccgtgtgcctagagatggtagtaaaacttgattcgttcgacggggtcatcatcaaaacaggtcaatgttgtagcggttcaatgcgccggtattgcaccagaaaacacatcaggggggcagaatcgactagagtagagccttggcccagtctccaggtacgtttcgaaatacccgaagattcaccggtatttccattgcacttctcagagatacccaacgaacacagtttatatcaagcactgaaagtaatcatcaaaatatcaagaaagggcgtctgaattagtgcgaagtccaatcatattgcccgtgtaatgcgcaagttcactttgaagatgttcctcacgtaacaaatgtccccacttccattgcaactggcacaatgtagattcggcaacttccgaagcgaacggatggatactagtggtcgcgatgcagactcgacagagattctatcgcaacattctgcctccttcataagtgaggtcaaaataatttgtggcgacgaagatctcgacgtcttatgaaatgtcatcatataggtaggtaagtgttctatttcgatttctagcttacgtagcagacaccgagtcgaaggcagaatgcgagagagtcagtggccattcccaactaggtctagcaatcggtggcacggccgtgagatctcgcttcatctctccgtcaccggaatgggattcctccgcttcactaccatcgtcacatctcatgactgaacgtcaagtttttgcgagagaaaacggacaatatgaaaaatgcgctttctcgtgatgtggacgattgctggctattcctgtcaacactatccagggttaagctaaccaaaccacggatcactaatctcaggtcgaaaacttgtcacctcattggctttgtttttaacacaggcagatgatctgctgtaggtgatttgaagtaagctgcgtgtttctaaacgccgcggtgtctcggaatcattcgacggcggctcaactgagattccacggccgggtccaagccctggccttgagcctcaatgcctcgcataggaagagcatcagcgtggttcatgaatgtacgataatgagaacattacaagtagactgaatatataaatgaatatgccatacgtagacatacaatcccctttgcaacaagacataggctactcatcaacagtcgagcttcttttatcctctcattctcactatacacaaacaagacttcagtatggctcaacctcaagtatggctaatcaccggcgcatctcgcggcctcgggtacgacatgtctaagtttgctctcgcagcagggcacaaggtcctagcagtctaccgaagcaagccctcagacaccaccaaatgggatgaactggagaaccttggcggtatctggacacaactcgacgtgtccgcgaacgataccgaggaaaaagtcaaggccctcgtagcccagtatggcaagatagatgttctgatcaacaatgctggctacgctcttttgagtagtgttgaagaccttcctatgagtgaagtacagaatatcttcaacgccaacctttttggtactattcgtactatcaagggtgttctcccttctatgcgcgagcagaaatccggcaccatcgtgaacgtcagtagttccaatgcgtttcaagtcgtcccagccctaggtatttactcggccactaaatgggctatggaggcatacactgagacgctccaaatggaagtcgcagcattcggcatccgcgttctaatcgctgagcctggcgccacatataccgagtttgcctccgagacaggcacaggcgtccgcatttcaccctccgagccttaccaggaaggtatcgtcaagcagctacatttgtacctgacctctgaccagtactatgcaactatgacgccgtctgctccagttgcggagcggattgtacaagcaattgataggaccggtcatatggctgggaaggagatcaagctccgcttacctcttggtaaggacacgggtgcttctcttgcacagcgggctgctgcgtcgaacgaactagctagtctacaggacgtttggggtagtgtataagatgtcagatggtggcagcggttggcctggctcttcaatgtgaatatctcaactcgacctctttttcctcgtttcaagctagaatgcctacatagagatcgttttaagcatcagactcaaatcattatccagattgccttctaattgctatcatcaaag

SEQ ID NO: 37246 - DNA, 357 bp, Muscodor strobelii
  misc_feature: SGI cDNA ID NO. 572923
  misc_feature: Encodes the peptide sequence at SEQ ID NO 37247
atggaagtcgcagcattcggcatccgcgttctaatcgctgagcctggcgccacatataccgagtttgcctccgagacaggcacaggcgtccgcatttcaccctccgagccttaccaggaaggtatcgtcaagcagctacatttgtacctgacctctgaccagtactatgcaactatgacgccgtctgctccagttgcggagcggattgtacaagcaattgataggaccggtcatatggctgggaaggagatcaagctccgcttacctcttggtaaggacacgggtgcttctcttgcacagcgggctgctgcgtcgaacgaactagctagtctacaggacgtttggggtagtgtataa

SEQ ID NO: 37247 - protein, 118 aa, Muscodor strobelii
  misc_feature: SGI Peptide ID NO. 572923
  misc_feature (2)..(117): NCBI GI: 67902952 Blast Desc: AN8463.2 [Aspergillus nidulans FGSC A4] gi|40747929|gb|EAA67085.1| AN8463.2 [Aspergillus nidulans FGSC A4] gi|259484409|tpe|CBF80604.1| TPA: conserved [Aspergillus FGSC
  misc_feature (2)..(94): NCBI GI: 70990156 Blast Desc: short chain oxidoreductase/dehydrogenase [Aspergillus fumigatus Af293] gi|66847559|gb|EAL87889.1| short chain oxidoreductase/dehydrogenase, [Aspergillus fumigatus Af293]
  misc_feature (2)..(94): NCBI GI: 119497429 Blast Desc: short chain oxidoreductase/dehydrogenase, [Neosartorya fischeri NRRL 181] gi|119413635|gb|EAW23576.1| short chain oxidoreductase/dehydrogenase, [Neosartorya fischeri NRRL 181]
  misc_feature (2)..(94): NCBI GI: 159130409 Blast Desc: short chain oxidoreductase/dehydrogenase, [Aspergillus fumigatus A1163]
  misc_feature (2)..(93): NCBI GI: 115396350 Blast Desc: [Aspergillus terreus NIH2624] gi|114193383|gb|EAU35083.1| [Aspergillus terreus NIH2624]
  misc_feature (2)..(94): NCBI GI: 242819311 Blast Desc: short-chain dehydrogenase, [Talaromyces stipitatus ATCC 10500] gi|218713757|gb|EED13181.1| short-chain dehydrogenase, [Talaromyces stipitatus ATCC 10500]
  misc_feature (1)..(94): NCBI GI: 242800438 Blast Desc: short chain oxidoreductase/dehydrogenase, [Talaromyces stipitatus ATCC 10500] gi|218716933|gb|EED16354.1| short chain oxidoreductase/dehydrogenase, [Talaromyces stipitatus ATCC 10500]
  misc_feature (2)..(94): NCBI GI: 121703399 Blast Desc: short chain oxidoreductase/dehydrogenase, [Aspergillus clavatus NRRL 1] gi|119398107|gb|EAW08538.1| short chain oxidoreductase/dehydrogenase, [Aspergillus clavatus NRRL 1]
  misc_feature (2)..(114): NCBI GI: 284086832 Blast Desc: [Naegleria gruberi]
  misc_feature (2)..(117): NCBI GI: 256731610 Blast Desc: NECHADRAFT_49045 [Nectria haematococca mpVI 77-13-4]
MEVAAFGIRVLIAEPGATYTEFASETGTGVRISPSEPYQEGIVKQLHLYLTSDQYYATMTPSAPVAERIVQAIDRTGHMAGKEIKLRLPLGKDTGASLAQRAAASNELASLQDVWGSV

SEQ ID NO: 37248 - DNA, 4559 bp, Muscodor strobelii; identical to SEQ ID NO: 37245
  misc_feature: SGI EST ID NO. CUFF.89095.0
  misc_feature: Variant of the nucleotide sequence at SEQ ID NO 37246

SEQ ID NO: 37249 - DNA, 1347 bp, Muscodor strobelii
  misc_feature: SGI cDNA ID NO. 572924
  misc_feature: Encodes the peptide sequence at SEQ ID NO 37250
atgcgcgagttcatggactacattcaaagcgccttctacggtgcgacaggttggagtcgcgacaattcctactcgaccctcaatgcaacatccagctcgttgctgcattttccaactccacgaggtctaaaactgacccttgcttcgcttgccacgccgcactttgcctcagcctaccaactcggcactgttggtgtcgtcgacggctccatttcctacctctactctaccgtccctctcaattaccatgcagttgcgcagagcgagaaggtacccctacctgagcttttaaagagctatgtccccttggccgatatctctcgccccggccgcgttaagggggtcgccaaagataccctcgcatatggaagattatatctgcccatgtcaacgcttgaggctctcatgataaagaggctgtccccgaatctgcaactacaaataagcgcagtgtcggatcagacattacgcaatggtggaactgtattgggtatgatacagtacgacgagggtcgatacgggatagaaggtcttgcctcaacggatggagggttgatgggcgtccgtgggctttacaattttgggggcgacacccctagcctaagtaagccgggccgcttgtctgataaagcaaacatctcacctgcatcggaaaaggagcgcatctacgggcgcttcagtgctggcggcgagctatactacggaactcttaataaatccgggggtatgagtcttggcgcgcgattcgccacacttccttctcacaagggaacgcctcttacggccacactgaccgtaaatcctttgatgggtacgctcagctggagctacgccgtcatggctggcagacgtctctcgcttgccacgaaaatggacttcaatgtatacagctatgaaagcgattggtccgtaggcatggaactcttcaggaaacagggagcttggaccgtcgagcctgctcaggatcagggctcggagatgagacgagatggtattccacaacgaagcttccaagctaaaatggagtggagatcagacgatcctcctctttcttccagtccctcggatccgtcaacaaacacaaaaagcaacgtgatcctgcaaccaaaaaagcttgaacgcacgtttcgagcgaagttagactggcgccagaatcaagaaagcgaggaagatacggatgaatattcaggggtcttgaaagcacgtctcgaccaacactggcgcatcggattagtctgggagggcagggtcaagtcgctacttttcagcttgggtagcggtattgatctgcgtagaccggactcgccgtttcgtactctcggtctggaggtccaattctcctcgtga

SEQ ID NO: 37250 - protein, 448 aa, Muscodor strobelii
  misc_feature: SGI Peptide ID NO. 572924
  misc_feature (5)..(448): NCBI GI: 261351911 Blast Desc: mitochondrial inheritance component MDM10 [Verticillium albo-atrum VaMs.102]
  misc_feature (1)..(448): NCBI GI: 46111417 Blast Desc: FG02590.1 [Gibberella zeae PH-1]
  misc_feature (1)..(448): NCBI GI: 259495210 Blast Desc: FG02590.1 [Gibberella zeae PH-1]
  misc_feature (1)..(427): NCBI GI: 259495207 Blast Desc: FG02590.1 [Gibberella zeae PH-1]
  misc_feature (1)..(448): NCBI GI: 171687180 Blast Desc: protein product [Podospora anserina] gi|74581857|sp|O13498.1|MDM10_PODAN RecName: Full=Mitochondrial distribution and morphology protein 10; AltName: inheritance
  misc_feature (1)..(448): NCBI GI: 39940366 Blast Desc: MGG_05057 [Magnaporthe grisea 70-15] gi|259495200|sp|A4QTI8.1|MDM10_MAGGR RecName: Full=Mitochondrial distribution and morphology protein 10; AltName: inheritance
  misc_feature (1)..(448): NCBI GI: 156040918 Blast Desc: SS1G_11437 [Sclerotinia sclerotiorum 1980] gi|259495350|sp|A7F1G7.1|MDM10_SCLS1 RecName: Full=Mitochondrial distribution and morphology protein 10; AltName: inheritance
  misc_feature (1)..(427): NCBI GI: 116191615 Blast Desc: CHGG_05525 [Chaetomium globosum CBS 148.51] gi|88181438|gb|EAQ88906.1| CHGG_05525 [Chaetomium globosum CBS 148.51]
  misc_feature (1)..(448): NCBI GI: 169625501 Blast Desc: SNOG_16024 [Phaeosphaeria nodorum SN15] gi|121743905|sp|Q0TWV0.1|MDM10_PHANO RecName: Full=Mitochondrial distribution and morphology protein 10; AltName: inheritance
  misc_feature (1)..(345): NCBI GI: 164424184 Blast Desc: NCU07824 [Neurospora crassa OR74A] gi|157070409|gb|EAA33709.2| NCU07824 [Neurospora crassa OR74A]
MREFMDYIQSAFYGATGWSRDNSYSTLNATSSSLLHFPTPRGLKLTLASLATPHFASAYQLGTVGVVDGSISYLYSTVPLNYHAVAQSEKVPLPELLKSYVPLADISRPGRVKGVAKDTLAYGRLYLPMSTLEALMIKRLSPNLQLQISAVSDQTLRNGGTVLGMIQYDEGRYGIEGLASTDGGLMGVRGLYNFGGDTPSLSKPGRLSDKANISPASEKERIYGRFSAGGELYYGTLNKSGGMSLGARFATLPSHKGTPLTATLTVNPLMGTLSWSYAVMAGRRLSLATKMDFNVYSYESDWSVGMELFRKQGAWTVEPAQDQGSEMRRDGIPQRSFQAKMEWRSDDPPLSSSPSDPSTNTKSNVILQPKKLERTFRAKLDWRQNQESEEDTDEYSGVLKARLDQHWRIGLVWEGRVKSLLFSLGSGIDLRRPDSPFRTLGLEVQFSS

SEQ ID NO: 37251 - DNA, 1206 bp, Muscodor strobelii
  misc_feature: SGI cDNA ID NO. 572925
  misc_feature: Elevated expression when VOC is produced
  misc_feature: Encodes the peptide sequence at SEQ ID NO 37252
atggctctcgcatcagtagccatcgacgctgtcctcacggcacgggaagaagaccctgtacctgatcttggacctggttacgctgtcgtggtatgtgacaatggcaatggttacgatgggcgacttggactccgcatctcttcgattttcgtcatcttcatcggctcccttcttggtgccgtcgttccgattatactcgcgcggcattctaagatgaaagtgaatggtacagccttcttcattgccaaatactttggctcaggcgtcatcattgcaacagcgtttcttcatcttctcgctcccgcctttgaggccttgggcagcgaatgtcttcccgatgggccgattaagaactattcctgggcccccttcattgcacttctgtctgtgctgtctatattcacggtagagctcatcgtcagtcgcctagacatcttcggccatgatcacgatgacagccacggcgcccacgaaccatcaaattctggaagaaaggggtcgccggcctccacagttgcagaccagcaggcacagcatgtcgatattgaagccaatgcagacgcgattgggagcggaaaggagttgcccgccaacgccgaaagcaagagtggattccaggctcctgggctgccaaatgacgtgagctatccacctggtggacaagatcattttggccatgctcggtcccacgaggatgacaatagccacactgccctctcagctcagatgacagctatctttatcctcgaatttggtgttatcttccattccgtcttcatcggtctcacgcttgccgttgctggttctgaatttgtcatcctttacattgtcctggtatttcaccaaacatttgagggtttgggtctcggctcccgtctagcgactgtacaatggccaaggaataaacaatggttgccttatgttctgggtaccagctatgcgtttagtacacccctctccatcgccattggccttggcatccgattcgctttacaacctggcagcccgaatgccacactcatcaacggcatcttcgactccatctccgcgggcatccttatttatacaggacttgtcgagctgctcgcccacgagttcatgtttaacgcacatatgagaaaggcgggtctcaaaactcaactttacgcccttgcatgcgtcctgcttggcgtggcgcttatggctctcctcgccatttgggcataa

SEQ ID NO: 37252 - protein, 401 aa, Muscodor strobelii
  misc_feature: SGI Peptide ID NO. 572925
  misc_feature (42)..(398): Pfam Id: PF02535 Pfam Desc: ZIP Zinc transporter
  misc_feature (30)..(401): NCBI GI: 156040920 Blast Desc: SS1G_11438 [Sclerotinia sclerotiorum 1980] gi|154695822|gb|EDN95560.1| SS1G_11438 [Sclerotinia sclerotiorum 1980]
  misc_feature (30)..(401): NCBI GI: 154305185 Blast Desc: BC1G_08887 [Botryotinia fuckeliana B05.10] gi|150853629|gb|EDN28821.1| BC1G_08887 [Botryotinia fuckeliana B05.10]
  misc_feature (11)..(401): NCBI GI: 116191617 Blast Desc: CHGG_05526 [Chaetomium globosum CBS 148.51] gi|88181439|gb|EAQ88907.1| CHGG_05526 [Chaetomium globosum CBS 148.51]
  misc_feature (31)..(401): NCBI GI: 212537785 Blast Desc: plasma membrane low affinity zinc ion transporter, [Penicillium marneffei ATCC 18224] gi|210068790|gb|EEA22881.1| plasma membrane low affinity zinc ion transporter, [Penicillium
  misc_feature (31)..(401): NCBI GI: 242808234 Blast Desc: plasma membrane low affinity zinc ion transporter, [Talaromyces stipitatus ATCC 10500] gi|218715746|gb|EED15168.1| plasma membrane low affinity zinc ion transporter, [Talaromyces
  misc_feature (12)..(384): NCBI GI: 169767916 Blast Desc: [Aspergillus oryzae RIB40] gi|238484843|ref|XP_002373660.1| plasma membrane low affinity zinc ion transporter, [Aspergillus flavus NRRL3357] protein low
  misc_feature (12)..(401): NCBI GI: 115442626 Blast Desc: zinc-regulated transporter 2 [Aspergillus terreus NIH2624] gi|114187989|gb|EAU29689.1| zinc-regulated transporter 2 [Aspergillus terreus NIH2624]
  misc_feature (12)..(401): NCBI GI: 171687178 Blast Desc: protein product [Podospora anserina] gi|170943550|emb|CAP69203.1| protein product [Podospora anserina]
  misc_feature (32)..(401): NCBI GI: 70989337 Blast Desc: plasma membrane low affinity zinc ion transporter [Aspergillus fumigatus Af293] gi|66847149|gb|EAL87480.1| plasma membrane low affinity zinc ion transporter, [Aspergillus Af293]
  misc_feature (32)..(401): NCBI GI: 159128929 Blast Desc: plasma membrane low affinity zinc ion transporter, [Aspergillus fumigatus A1163]
  misc_feature: Useful for introducing or modulating the production of volatile compounds
MALASVAIDAVLTAREEDPVPDLGPGYAVVVCDNGNGYDGRLGLRISSIFVIFIGSLLGAVVPIILARHSKMKVNGTAFFIAKYFGSGVIIATAFLHLLAPAFEALGSECLPDGPIKNYSWAPFIALLSVLSIFTVELIVSRLDIFGHDHDDSHGAHEPSNSGRKGSPASTVADQQAQHVDIEANADAIGSGKELPANAESKSGFQAPGLPNDVSYPPGGQDHFGHARSHEDDNSHTALSAQMTAIFILEFGVIFHSVFIGLTLAVAGSEFVILYIVLVFHQTFEGLGLGSRLATVQWPRNKQWLPYVLGTSYAFSTPLSIAIGLGIRFALQPGSPNATLINGIFDSISAGILIYTGLVELLAHEFMFNAHMRKAGLKTQLYALACVLLGVALMALLAIWA

SEQ ID NO: 37253 - DNA, 2974 bp, Muscodor strobelii
  misc_feature: SGI EST ID NO. CUFF.89127.0
  misc_feature: Variant of the nucleotide sequence at SEQ ID NO 37251
ccgtcttcggtgctcgcgcaactacaggtcatagtagtggtcgttgcatcatatttcgctctttgcgcggcgacggcggacatcttcgcccagcactcaagctacactgaggttatacttcgtctttcatcatcaatgttctcaagtttcttttaactagggtgttttgatagatgttataaatctccttataccgtgtccacctctctccacctctctcaatcagatcagggaaagaaactactcaactctactgttattcgtctatcacagatactggaatattcatacgacctgttgaatttggaagatcgacacttctggatcattacaagcgcagtgtgatctcgtcactcactagagttcccattttgacggcgcatatcttgattaaaatctggcagggcgtcgtcgggcgtggaaacttaattttggaaagggtgtgcagacaaccacgacaacattaaggtacgtaaaggaacttttcgtctttctccccattttttacgcgacagaaactattggcaggcttgatattacaaaaacttgggtattctcaagttgatagtgtcgtattcttgtcacctcttcggctgaagctagtcatgtttagcaatgtgatagcctttgatccttggtcagcccgcaaggtccttgatctcgctctttgcgcttgtttccctttgattgaacaatagctttgattccaagtggactaagaaaggcgggccttggatccaaagaaagcattgtggtagcatcctatcattttacatatgattattggcttttaagcccattcccatcacatcagcttctcttcctacatggataccttgatggccgagatttgactttttctctcctttccaaactacttcttctcgcatttaaactttgccttctctgcgccttttactaacgttattagaagccaagatcaggtatcttattccagcacacgttcgtctggtagtgacatctgttgttttctcttcgcaaattgcatgacggtcacgcaaggatcgtcactttgttagatttgcgctactcgcagtcctatctccccggagagaagtgaacgacgtgcgacgcaagtttcgagattggtcagttctgcgaggagacatcagtatcatcaacaccaccgccgccgtcgccaccagcctttgagggccccctttcgccacgtaaattcgtctctgcatttgcaagcaatcttgtaattgttatcgtcacatactcttcacaacatggctctcgcatcagtagccatcgacgctgtcctcacggcacgggaagaagaccctgtacctgatcttggacctggttacgctgtcgtggtatgtgacaatggcaatggttacgatgggcgacttggactccgcatctcttcgattttcgtcatcttcatcggctcccttcttggtgccgtcgttccgattatactcgcgcggcattctaagatgaaagtgaatggtacagccttcttcattgccaaatactttggctcaggcgtcatcattgcaacagcgtttcttcatcttctcgctcccgcctttgaggccttgggcagcgaatgtcttcccgatgggccgattaagaactattcctgggcccccttcattgcacttctgtctgtgctgtctatattcacggtagagctcatcgtcagtcgcctagacatcttcggccatgatcacgatgacagccacggcgcccacgaaccatcaaattctggaagaaaggggtcgccggcctccacagttgcagaccagcaggcacagcatgtcgatattgaagccaatgcagacgcgattgggagcggaaaggagttgcccgccaacgccgaaagcaagagtggattccaggctcctgggctgccaaatgacgtgagctatccacctggtggacaagatcattttggccatgctcggtcccacgaggatgacaatagccacactgccctctcagctcagatgacagctatctttatcctcgaatttggtgttatcttccattccgtcttcatcggtctcacgcttgccgttgctggttctgaatttgtcatcctttacattgtcctggtatttcaccaaacatttgagggtttgggtctcggctcccgtctagcgactgtacaatggccaaggaataaacaatggttgccttatgttctgggtaccagctatgcgtttagtacacccctctccatcgccattggccttggcatccgattcgctttacaacctggcagcccgaatgccacactcatcaacggcatcttcgactccatctccgcgggcatccttatttatacaggacttgtcgagctgctcgcccacgagttcatgtttaacgcacatatgagaaaggcgggtctcaaaactcaactttacgcccttgcatgcgtcctgcttggcgtggcgcttatggctctcctcgccatttgggcataaaagtcaaggttgatgcccatacactttacatttctctcccaacgtgtcgcatatagattccctcatgtcttccatacccagcataggcggagttggcggtacatctgatttcaaagcaactcccatccttcatgttttgcttggcccgcttgaaccatgcttgcatattatggatttacgtaaaaatgcgttatccatcgcgtcattcgcaacgtttaagcagccacatcaagcatttctacgacctcacattgtcaccaagtcgaatttgaccttacgggagagccctgtctcgagcagcatagcattactaagttagacaaagaatagattagtaatagtagtagttgttgtcggctaatgtgttatgatcatactctaagctgtgaaatcatgtgattatgatggcccagtctcgttctgatcatctctattgtcatctccattaacgtggtatggatgaaactaggggaattcaaaaatagaacgtgactgatttggtagcgaaagtcgta

SEQ ID NO: 37254 - DNA, 1824 bp, Muscodor strobelii
  misc_feature: SGI cDNA ID NO. 572926
  misc_feature: Encodes the peptide sequence at SEQ ID NO 37255
atggaggaagactacgttgtcgttgaacacgatgggatggggcatgagcccgatcagcagctccaggaggccagtaccgaccttctcttgcagagtttggtgcctagcaatgttgggcaattctgcttcaaactgggtaagaaaggcccaaagatccaaatatatgccttgatcgaagagatcaacactggagttcctttgaacccttctaagacgctcgggattattacttcccaggcagagccgacaaagctactcatgagtgcacagtctggctggtccaccggaccccacagaagcgaccattgccttgacacccacgagttcaacggtctagcattgaatcatcttgccgggatcctcaagtttcatttccccggcaatcaacgcgacaatgcgtcacagaaggcagtcgatgaatttagaggtcgtgctcatgccggacacgttgaggtcctgctcgcaacttggtatgctatcaagatggcgcgcgaaaccctaggcctgcaagatgagagcaacgtccaggtgatttcccgcctgaagaaactgaaggaccagaacctcggcagcaaacagactgccttcatcacgattgatagtcacccttgccgaacttgtcttctctttctttactcaattagccagcacacgaacctcattttcgttgttcgtggagggaatggaatcggcccgatcgtagttcgtgttgatggaggccggagggatgatagagtcgaggacgtcttctctgattcaggagatgagggcgacggtttacctccagtacagacgacaccgcctccgaaaccactgccgaacccagctccacaagatattgttgaacctcagcagcaagacccggagccaacttccagcgcgacctccaacgcccgttttgtgcctcggcgcccaccgtcaagttggcctaaacctcgtcccacagaatggaaggcccctaatgatgatctggtatcaggttaccgaaagggtacaccagttcactacttcccagggtatcctcccgtgacgcctcccgctgctccagttttgtcaccagagcccaatgatagcagtgctagtcaacaagcgaaggaccgtgattacataaccattccatctgactcggaagacgagtacgaaacggtgacagaggacgagacaccaaagattgaggacgacctcgacgcttcaatgactcagtcccgctttttcgtcgagccaaacgaacctgcttaccagtgtgagactcgccaggaaagtgatgagtatactccagttacaaacgtcgcagtcgcaggcacaggcgcaggctccagaagagaatcgattcgctcaatggcggaacagcgcgggcaagctattgaggatcgtcttcgaaaggcccatcaggaaaaaatggcaagtgaagagtggccactccctctacccatccgagcaacgactaccaccacggcccccagaatcgaacaagctcctcttccctctgccgagacacccgcccaagatatgtcggatctgtatgcgcgtgcagccttcgaggtagtacgcggtcgcacaaaccaccgaaccccaaatgccagaccaaccgtgccttcaccttcaatcggagcacaggaacgtcgtatgacgcaacgtcgacatattaaacgcaagccctcgcgccgaccgcgtccatcaatttttggcccggtcccggaaaacactcacggtctcgaccgatttaggaaccctgctccgcaggacccagccgataactccattctagctcgtcgttatggcgtacttgagaaaccagagaacggcccgaaccgttggttctaa

SEQ ID NO: 37255 - protein, 607 aa, Muscodor strobelii
  misc_feature: SGI Peptide ID NO. 572926
  misc_feature (12)..(205): NCBI GI: 171687176 Blast Desc: protein product [Podospora anserina] gi|170943549|emb|CAP69202.1| protein product [Podospora anserina]
MEEDYVVVEHDGMGHEPDQQLQEASTDLLLQSLVPSNVGQFCFKLGKKGPKIQIYALIEEINTGVPLNPSKTLGIITSQAEPTKLLMSAQSGWSTGPHRSDHCLDTHEFNGLALNHLAGILKFHFPGNQRDNASQKAVDEFRGRAHAGHVEVLLATWYAIKMARETLGLQDESNVQVISRLKKLKDQNLGSKQTAFITIDSHPCRTCLLFLYSISQHTNLIFVVRGGNGIGPIVVRVDGGRRDDRVEDVFSDSGDEGDGLPPVQTTPPPKPLPNPAPQDIVEPQQQDPEPTSSATSNARFVPRRPPSSWPKPRPTEWKAPNDDLVSGYRKGTPVHYFPGYPPVTPPAAPVLSPEPNDSSASQQAKDRDYITIPSDSEDEYETVTEDETPKIEDDLDASMTQSRFFVEPNEPAYQCETRQESDEYTPVTNVAVAGTGAGSRRESIRSMAEQRGQAIEDRLRKAHQEKMASEEWPLPLPIRATTTTTAPRIEQAPLPSAETPAQDMSDLYARAAFEVVRGRTNHRTPNARPTVPSPSIGAQERRMTQRRHIKRKPSRRPRPSIFGPVPENTHGLDRFRNPAPQDPADNSILARRYGVLEKPENGPNRWF

SEQ ID NO: 37256 - DNA, 297 bp, Muscodor strobelii
  misc_feature: SGI cDNA ID NO. 572927
  misc_feature: Elevated expression when VOC is produced
  misc_feature: Encodes the peptide sequence at SEQ ID NO 37257
atggctgatgtagagcagccaacggctgcgggctctgtgtccgagcctctggaccttgtacgcctcttacttgatgaggtagtcttcgtcaaactgcgtggtgatcgggagcttaaaggtcgactctacgcttatgacagtcacatgaacttggtgctcggtgacgtggtggagacgatatatatcgtggacgaggacgatgatgaggaagctattcggactaccacaaaaaaatcagaaatgctgtttgtccgaggcgatagtgtcgtcttgctctcgccgcaaaattcgtcgtga

SEQ ID NO: 37257 - protein, 98 aa, Muscodor strobelii
  misc_feature: SGI Peptide ID NO. 572927
  misc_feature (18)..(94): Pfam Id: PF01423 Pfam Desc: LSM domain
  misc_feature (1)..(95): NCBI GI: 259489765 Blast Desc: TPA: U6 small nuclear ribonucleoprotein (Lsm3), (AFU_orthologue; AFUA_5G12570) [Aspergillus nidulans FGSC A4]
  misc_feature (1)..(95): NCBI GI: 145249892 Blast Desc: An14g06620 [Aspergillus niger] gi|134081970|emb|CAK46655.1| protein product [Aspergillus niger]
  misc_feature (9)..(98): NCBI GI: 226284901 Blast Desc: conserved [Paracoccidioides brasiliensis Pb01]
  misc_feature (14)..(98): NCBI GI: 225561720 Blast Desc: U6 snRNP-associated protein Lsm3 [Ajellomyces capsulatus G186AR] gi|240275325|gb|EER38839.1| U6 snRNP-associated protein Lsm3 [Ajellomyces capsulatus H143]
  misc_feature (14)..(98): NCBI GI: 154283195 Blast Desc: [Ajellomyces capsulatus NAm1] gi|150410573|gb|EDN05961.1| [Ajellomyces capsulatus NAm1]
  misc_feature (1)..(96): NCBI GI: 171680906 Blast Desc: protein product [Podospora anserina] gi|170940411|emb|CAP65637.1| protein product [Podospora anserina]
  misc_feature (1)..(95): NCBI GI: 115387369 Blast Desc: conserved [Aspergillus terreus NIH2624] gi|114195274|gb|EAU36974.1| conserved [Aspergillus terreus NIH2624]
  misc_feature (1)..(97): NCBI GI: 242777144 Blast Desc: U6 small nuclear ribonucleoprotein (Lsm3), [Talaromyces stipitatus ATCC 10500] gi|218722593|gb|EED22011.1| U6 small nuclear ribonucleoprotein (Lsm3), [Talaromyces ATCC
  misc_feature (1)..(98): NCBI GI: 261189603 Blast Desc: LSM domain-containing protein [Ajellomyces dermatitidis SLH14081] gi|239591448|gb|EEQ74029.1| LSM domain-containing protein [Ajellomyces dermatitidis SLH14081] LSM
  misc_feature (1)..(93): NCBI GI: 67515531 Blast Desc: AN0047.2 [Aspergillus nidulans FGSC A4] gi|40746210|gb|EAA65366.1| AN0047.2 [Aspergillus nidulans FGSC A4]
  misc_feature: Useful for introducing or modulating the production of volatile compounds
MADVEQPTAAGSVSEPLDLVRLLLDEVVFVKLRGDRELKGRLYAYDSHMNLVLGDVVETIYIVDEDDDEEAIRTTTKKSEMLFVRGDSVVLLSPQNSS

SEQ ID NO: 37258 - DNA, 908 bp, Muscodor strobelii
  misc_feature: SGI EST ID NO. CUFF.89104.0
  misc_feature: Variant of the nucleotide sequence at SEQ ID NO 37256
ccccaccacactagacgtgaaagttgagccacactcaccagtcaacgcggcaaaccaccacgaagtttccgtgaaaccagacggttttcagactacgagatcaatcaaccacgaccaggatacactcgattatactgctttaagcaaagcaaagaaaggcgatggctgatgtagagcagccaacggctgcgggctctgtgtccgagcctctggaccttgtacgcctcttacttgatgaggtagtcttcgtcaaactgcgtggtgatcgggagcttaaaggtcgactctacgcttatgacagtcacatgaacttggtgctcggtgacgtggtggagacgatatatatcgtggacgaggacgatgatgaggaagctattcggactaccacaaaaaaatcagaaatgctgtttgtccgaggcgatagtgtcgtcttgctctcgccgcaaaattcgtcgtgagggcgtgatgctgtagcattctaatgagactccttacacttcagcacatcgcaatggttcgtcatgaggtgttgggtgcccgcgacccagctaagggcaccttcaacggcagagagcattctcaggcttctgagcatgagggcaagtagtcatacaaatgtgcatcctcatagtgcccaaacatgtgctcgcctctacacaattcgtttgtgtcccataaatggagctagatatgactgccatcaagctattacctgctatcaaataattacgatagctaggtagaacacacacggctcgaaagcagaagctaggaccaaggttcatcttcgtgtaagcagacatataatacagtagtatattgcctcacatcgcgacttccatgcttgttgaaagcagttgtctattatgtagatcgcggtatatacctaagcattaagccaagttccc

SEQ ID NO: 37259 - DNA, 2019 bp, Muscodor strobelii
  misc_feature: SGI cDNA ID NO. 572928
  misc_feature: Encodes the peptide sequence at SEQ ID NO 37260
atggaccatctcgtccgtctccccgggttcacaccacatctgcgggccagacgcgttggtgtcacgccagcggatccacacaccccgtcaaagaatgctcgtgccgctcagtatgcttcaccttcgaagcggccgccagatgaagttctcaccacccccaggactcgcaatgaaactcctaatgccttccgaagggcattgtctgcagtgcgagatagagatacgcgccgtctcttaatcaacctgaaggcgattgaaaacatgagccaatgggagaagcacaggattgctaagaccattccgaggacgacgttcaccgaatttttccgttcacttgatcctttcttggttgacaatgactgcgatcctaccagtggtgtcccaatcacttatggcatgttcatgatgctccaaatggaatctaccattgacgactggggggtcaggaaactgtactcggggctcttgcggacggtgcttagtatgatgagtatgcttaaggcagaaggttacgaattacagcatgacgaatacatgatattgttgcgctgcgccggagctgccaccgacgttgtgggtgctaagaccatatggagagatttcatcactgggccagcctcccagtggagaggtagtactgcttacaccgagtacataaaggcacggtttttaactgaacctttgtataccgggtactcgaagacaaggagaatggtcactccgagagctctacatagatctcgtttactattgtcccggggacacgtgaaacaattggatatcctgcgcgtcaaggctcgagcccgtcagctgcggtttggcttaaataaggatgcaaaatctcgcatagaagaccagtccagactacttcggtgtccgccatctgtggggaagctgcatggacgtttggttcgtatgggctttctcatggacgtggaacttgtttgtgccattttagtggcagcgggccgtacaggctctcttgactacataaatacaaatattctccccgagtatttccacattagtatcacaggatcaatggccgaaaatgatattgagatacgtaaggtatcatacgatggagctacccgcagaatcggattcgggctcccagtgaccccgcgtgttttacgagccattacggaagcatatggttccaatggggagatcgggactgctctacagctccttgaatatgtatctcgaacagagcgactgacaattccttccgatgtctggcgagacttgttggagtggacatacataatgagcacgccgccagcatctacagcatgggaggctgttggatttcatgagcgggttccggcccccagagcggtcgagatgcttttcaatgccatggtatcacctccttataatcagaagcctacctttgagcactaccatccgctcatacacagtctcatccggggtcttggcgaaacccgtgatcacggccaggctttaatacgtatgcgggaagccgtccagcagtaccatgaacaatgccaagcatacgaagacgctgtattcacatacacccaagctctccgaaacggagtggtaacaagcgaaacaacgttccgtctcgaacgcacccgattcgaaaagcagaagatgtggaatcatctccgactatggtgtcaatcgatgctcaaggagtggaatccagccgatggcccgtctatccacgagatcatagacgagttccgaccttttctggaaaatccaataacctatcagacgaaaaacggctatgttgagctcgtcgaccccatgatcgagaaactcgacaccgtggctacgggcggagtcaaacatgttgcatattatccggaagatggagaggatgtcggccacgaaatcagccaggtcaaagtcatggttcagtcgagccactcgctggcccccctcaagccatctcataacccactggatctacttgcacctgtgcgacatggatttttggggccgagacggtctagaggtcgacgctttacgaagctgcttgcttga

SEQ ID NO: 37260 - protein, 672 aa, Muscodor strobelii
  misc_feature: SGI Peptide ID NO. 572928
  misc_feature (100)..(554): NCBI GI: 85090625 Blast Desc: NCU09511 [Neurospora crassa OR74A] gi|28919875|gb|EAA29270.1| NCU09511 [Neurospora crassa OR74A]
  misc_feature (100)..(588): NCBI GI: 256726120 Blast Desc: NECHADRAFT_70244 [Nectria haematococca mpVI 77-13-4]
  misc_feature (94)..(590): NCBI GI: 46111707 Blast Desc: FG02735.1 [Gibberella zeae PH-1]
  misc_feature (67)..(324): NCBI GI: 261359227 Blast Desc: [Verticillium albo-atrum VaMs.102]
  misc_feature (62)..(590): NCBI GI: 156042125 Blast Desc: SS1G_11613 [Sclerotinia sclerotiorum 1980] gi|154695996|gb|EDN95734.1| SS1G_11613 [Sclerotinia sclerotiorum 1980]
  misc_feature (170)..(518): NCBI GI: 226284900 Blast Desc: conserved [Paracoccidioides brasiliensis Pb01]
  misc_feature (170)..(473): NCBI GI: 225684509 Blast Desc: conserved [Paracoccidioides brasiliensis Pb03]
  misc_feature (170)..(473): NCBI GI: 226294168 Blast Desc: conserved [Paracoccidioides brasiliensis Pb18]
  misc_feature (61)..(514): NCBI GI: 154299442 Blast Desc: BC1G_10983 [Botryotinia fuckeliana B05.10] gi|150857325|gb|EDN32517.1| BC1G_10983 [Botryotinia fuckeliana B05.10]
  misc_feature (167)..(502): NCBI GI: 261189601 Blast Desc: conserved [Ajellomyces dermatitidis SLH14081] gi|239591447|gb|EEQ74028.1| conserved [Ajellomyces dermatitidis SLH14081]
MDHLVRLPGFTPHLRARRVGVTPADPHTPSKNARAAQYASPSKRPPDEVLTTPRTRNETPNAFRRALSAVRDRDTRRLLINLKAIENMSQWEKHRIAKTIPRTTFTEFFRSLDPFLVDNDCDPTSGVPITYGMFMMLQMESTIDDWGVRKLYSGLLRTVLSMMSMLKAEGYELQHDEYMILLRCAGAATDVVGAKTIWRDFITGPASQWRGSTAYTEYIKARFLTEPLYTGYSKTRRMVTPRALHRSRLLLSRGHVKQLDILRVKARARQLRFGLNKDAKSRIEDQSRLLRCPPSVGKLHGRLVRMGFLMDVELVCAILVAAGRTGSLDYINTNILPEYFHISITGSMAENDIEIRKVSYDGATRRIGFGLPVTPRVLRAITEAYGSNGEIGTALQLLEYVSRTERLTIPSDVWRDLLEWTYIMSTPPASTAWEAVGFHERVPAPRAVEMLFNAMVSPPYNQKPTFEHYHPLIHSLIRGLGETRDHGQALIRMREAVQQYHEQCQAYEDAVFTYTQALRNGVVTSETTFRLERTRFEKQKMWNHLRLWCQSMLKEWNPADGPSIHEIIDEFRPFLENPITYQTKNGYVELVDPMIEKLDTVATGGVKHVAYYPEDGEDVGHEISQVKVMVQSSHSLAPLKPSHNPLDLLAPVRHGFLGPRRSRGRRFTKLLA

SEQ ID NO: 37261 - DNA, 4364 bp, Muscodor strobelii
  misc_feature: SGI EST ID NO. CUFF.89176.0
  misc_feature: Variant of the nucleotide sequence at SEQ ID NO 37259
tgctcacctgcatgattatgagctttgaagtctcgcgttgtctacgaagcgattcgtcggcatgtcgcctcctacactttattctttcactacgtttcatgaagagagtagtctgtaattccattcttgtttcctttctctagtctgccgcttcgtccaattcatcacttctcacgtggtcaagagcaagcgaattggatttggatttcaatgctgccgtcaattcatgtggccgagcacaacggctgccgcgcgctcatgagatgtgccccgagaggaacaccctcgagaattatcagtcttagattgcgccgcccagtccaccatcaacatggaccatctcgtccgtctccccgggttcacaccacatctgcgggccagacgcgtgttatagaaacccgtattggcgacatacgatgtgcgactacccaatcctcatcggcttctctcacccaagatgctgtggccctggttcattctctgctccaaagtggtgtcacgccagcggatccacacaccccgtcaaagaatgctcgtgccgctcagtatgcttcaccttcgaagcggccgccagatgaagttctcaccacccccaggactcgcaatgaaactcctaatgccttccgaagggcattgtctgcagtgcgagatagagatacgcgccgtctcttaatcaacctgaaggcgattgaaaacatgagccaatgggagaagcacaggattgctaagaccattccgaggacgacgttcaccgaatttttccgttcacttgatcctttcttggttgacaatgactgcgatcctaccagtggtgtcccaatcacttatggcatgttcatgatgctccaaatggaatctaccattgacgactggggggtcaggaaactgtactcggggctcttgcggacggtgcttagtatgatgagtatgcttaaggcagaaggttacgaattacagcatgacgaatacatgatattgttgcgctgcgccggagctgccaccgacgttgtgggtgctaagaccatatggagagatttcatcactgggccagcctcccagtggagaggtagtactgcttacaccgagtacataaaggcacggtttttaactgaacctttgtataccgggtactcgaagacaaggagaatggtcactccgagagctctacatagatctcgtttactattgtcccggggacacgtgaaacaattggatatcctgcgcgtcaaggctcgagcccgtcagctgcggtttggcttaaataaggatgcaaaatctcgcatagaagaccagtccagactacttcggtgtccgccatctgtggggaagctgcatggacgtttggttcgtatgggctttctcatggacgtggaacttgtttgtgccattttagtggcagcgggccgtacaggctctcttgactacataaatacaaatattctccccgagtatttccacattagtatcacaggatcaatggccgaaaatgatattgagatacgtaaggtatcatacgatggagctacccgcagaatcggattcgggctcccagtgaccccgcgtgttttacgagccattacggaagcatatggttccaatggggagatcgggactgctctacagctccttgaatatgtatctcgaacagagcgactgacaattccttccgatgtctggcgagacttgttggagtggacatacataatgagcacgccgccagcatctacagcatgggaggctgttggatttcatgagcgggttccggcccccagagcggtcgagatgcttttcaatgccatggtatcacctccttataatcagaagcctacctttgagcactaccatccgctcatacacagtctcatccggggtcttggcgaaacccgtgatcacggccaggctttaatacgtatgcgggaagccgtccagcagtaccatgaacaatgccaagcatacgaagacgctgtattcacatacacccaagctctccgaaacggagtggtaacaagcgaaacaacgttccgtctcgaacgcacccgattcgaaaagcagaagatgtggaatcatctccgactatggtgtcaatcgatgctcaaggagtggaatccagccgatggcccgtctatccacgagatcatagacgagttccgaccttttctggaaaatccaataacctatcagacgaaaaacggctatgttgagctcgtcgaccccatgatcgagaaactcgacaccgtggctacgggcggagtcaaacatgttgcatattatccggaagatggagaggatgtcggccacgaaatcagccaggtcaaagtcatggttcagtcgagccactcgctggcccccctcaagccatctcataacccactggatctacttgcacctgtgcgacatggatttttggggccgagacggtctagaggtcgacgctttacgaagctgcttgcttgatatatcagaattgattgtgtctgtctctagattcaaatttttaagtgttctcaaatgaattgtatatatgtctttgaaggctagactggatctacatagagcaatgatagctgggatgatgagacaaatgtttgtacataggggtattataattttggcatcaagcttttacacgctcaagctgtagatcattgatcaccatataccgactgagtaatatccagccccagcgaaaccaaaccatctggctcttatgcgcatccgtcatggctttccgggccgaagtataactctctcttccgccaaatccactgaaacttacgatactcggtggattccccttgtcacttttagtcttgtcaccagctatcaacatgaacattgtgcttaaggaatcaaggaatgagacgtatttccggggcatggagacagatgttagggtatatagatcgatgggtgaggcccatccgggtttgccttttagaagggattggatgaacgcgcgagagccgtggtagagagatttgtgatttggatgggaggatacgccggtctcgtcgaaggttattaggatgtctatcaaggcggatgggggctcgtctggagaggaggggagacgggggccaaaggcggaacggaggaggttggatatcttgtctgcgggccaggttgttgtcattgagtctgggaagtcactgacattattggtcattattggtgtcgagttgtagatggcgaggagatattattgtacttacggactatcaataacgaacacatcgtcctcgtcccgcagaccgagtagcattgcgctcttgaccaattctttcttacgggtttcgcccaacccatctgcattccccgtgctcagacacaggattttgacatggttgcccaagtcgggccgtgtgagtgccaggatgctgggcgcgaagaacatggcttcatcgtctgggtgggcgatgagaagacatatcttcttgttgctcagggttggaaatcgtgccatggcagtcgagcttgtgtaggtatagagcatgggaaggacgaggaagaggatgattgggaccgtcgcaagagttatggtgtccatgttgaccgtcggctttgcgctttgctgagactgttcgtggttggctgttgccctcttctttgtgaagtgatgcagatgacccctcttcacgccacgatgtctgttgcactcttcgccttttcttcaattggtacagtccacagggagagcaattgaagattcagcacataaatcaaagtattaaaaagctaattggcagactcgaacgggtcgaaaacagcgatccgggctcgtacccattctcacgatatcctcatgtaagtggtacgacgcacgcgagcagactgaataatctcaatgatgccaccttgcgattacagtttatgactagactggcgcaacgggacaaggaccagcccctggcaatcttgaaccagaatggaagggaatctggggaaaagcgcatttgaacagacggattcccaattacggaaaaggccaatttccggaataaatgcaaacctcatttatcgtgcaaatgagatgcagaatgacgatggagcttagccttgctgttggcttcgcgctctgattggttctatagactcagacgcggtcgtatggagtctgcaggggtcatgcttttgtgcttccagagctccagcggggcagttaggtgagtttcattcgcgggacaatgagagatcagacaaactgacaattacccacccccctacacctgacacttactccactaaaacgtcgcccgacacttaccacgccacaacttcagtacttctatgccacatctacgtcaaccacgccacacttaagccacattttttattatttcaaaacagctggttagtgattaggg

SEQ ID NO: 37262 - DNA, 870 bp, Muscodor strobelii
  misc_feature: SGI cDNA ID NO. 572929
  misc_feature: Reduced expression when VOC is produced
  misc_feature: Encodes the peptide sequence at SEQ ID NO 37263
atggacaccataactcttgcgacggtcccaatcatcctcttcctcgtccttcccatgctctatacctacacaagctcgactgccatggcacgatttccaaccctgagcaacaagaagatatgtcttctcatcgcccacccagacgatgaagccatgttcttcgcgcccagcatcctggcactcacacggcccgacttgggcaaccatgtcaaaatcctgtgtctgagcacggggaatgcagatgggttgggcgaaacccgtaagaaagaattggtcaagagcgcaatgctactcggtctgcgggacgaggacgatgtgttcgttattgatagtcctgacttcccagactcaatgacaacaacctggcccgcagacaagatatccaacctcctccgttccgcctttggcccccgtctcccctcctctccagacgagcccccatccgccttgatagacatcctaataaccttcgacgagaccggcgtatcctcccatccaaatcacaaatctctctaccacggctctcgcgcgttcatccaatcccttctaaaaggcaaacccggatgggcctcacccatcgatctatataccctaacatctgtctccatgccccggaaatacgtctcattccttgattccttaagcacaatgttcatgttgatagctggtgacaagactaaaagtgacaaggggaatccaccgagtatcgtaagtttcagtggatttggcggaagagagagttatacttcggcccggaaagccatgacggatgcgcataagagccagatggtttggtttcgctggggctggatattactcagtcggtatatggtgatcaatgatctacagcttgagcgtgtaaaagcttga

SEQ ID NO: 37263 - protein, 289 aa, Muscodor strobelii
  misc_feature: SGI Peptide ID NO. 572929
  misc_feature (41)..(179): Pfam Id: PF02585 Pfam Desc: GlcNAc-PI de-N-acetylase
  misc_feature (4)..(288): NCBI GI: 171680908 Blast Desc: protein product [Podospora anserina] gi|170940412|emb|CAP65638.1| protein product [Podospora anserina]
  misc_feature (1)..(287): NCBI GI: 156042111 Blast Desc: SS1G_11606 [Sclerotinia sclerotiorum 1980] gi|154695989|gb|EDN95727.1| SS1G_11606 [Sclerotinia sclerotiorum 1980]
  misc_feature (8)..(287): NCBI GI: 154299444 Blast Desc: BC1G_10984 [Botryotinia fuckeliana B05.10] gi|150857326|gb|EDN32518.1| BC1G_10984 [Botryotinia fuckeliana B05.10]
  misc_feature (12)..(289): NCBI GI: 116191553 Blast Desc: CHGG_05494 [Chaetomium globosum CBS 148.51] gi|88181407|gb|EAQ88875.1| CHGG_05494 [Chaetomium globosum CBS 148.51]
  misc_feature (2)..(288): NCBI GI: 256725723 Blast Desc: NECHADRAFT_94458 [Nectria haematococca mpVI 77-13-4]
  misc_feature (18)..(289): NCBI GI: 39940440 Blast Desc: MGG_05020 [Magnaporthe grisea 70-15] gi|145010734|gb|EDJ95390.1| MGG_05020 [Magnaporthe grisea 70-15]
  misc_feature (33)..(287): NCBI GI: 242777154 Blast Desc: N-acetylglucosaminyl-phosphatidylinositol deacetylase, [Talaromyces stipitatus ATCC 10500] gi|218722595|gb|EED22013.1| N-acetylglucosaminyl-phosphatidylinositol deacetylase, stipitatus
  misc_feature (13)..(289): NCBI GI: 46116508 Blast Desc: FG04096.1 [Gibberella zeae PH-1]
  misc_feature (33)..(287): NCBI GI: 212533027 Blast Desc: N-acetylglucosaminyl-phosphatidylinositol deacetylase, [Penicillium marneffei ATCC 18224] gi|212533029|ref|XP_002146671.1| deacetylase, [Penicillium ATCC
  misc_feature (4)..(285): NCBI GI: 154283199 Blast Desc: conserved [Ajellomyces capsulatus NAm1] gi|150410575|gb|EDN05963.1| conserved [Ajellomyces capsulatus NAm1]
  misc_feature (14)..(283): SWISSPROT Homolog: EC 3.5.1.89 N-acetylglucosaminylphosphatidylinositol deacetylase
  misc_feature: Useful for introducing or modulating the production of volatile compounds
MDTITLATVPIILFLVLPMLYTYTSSTAMARFPTLSNKKICLLIAHPDDEAMFFAPSILALTRPDLGNHVKILCLSTGNADGLGETRKKELVKSAMLLGLRDEDDVFVIDSPDFPDSMTTTWPADKISNLLRSAFGPRLPSSPDEPPSALIDILITFDETGVSSHPNHKSLYHGSRAFIQSLLKGKPGWASPIDLYTLTSVSMPRKYVSFLDSLSTMFMLIAGDKTKSDKGNPPSIVSFSGFGGRESYTSARKAMTDAHKSQMVWFRWGWILLSRYMVINDLQLERVKA

SEQ ID NO: 37264 - DNA, 4453 bp, Muscodor strobelii
  misc_feature: SGI EST ID NO. CUFF.89177.1
  misc_feature: Variant of the nucleotide sequence at SEQ ID NO 37262
ccctaatcactaaccagctgttttgaaataataaaaaatgtggcttaagtgtggcgtggttgacgtagatgtggcatagaagtactgaagttgtggcgtggtaagtgtcgggcgacgttttagtggagtaagtgtcaggtgtaggggggtgggtaattgtcagtttgtctgatctctcattgtcccgcgaatgaaactcacctaactgccccgctggagctctggaagcacaaaagcatgacccctgcagactccatacgaccgcgtctgagtctatagaaccaatcagagcgcgaagccaacagcaaggctaagctccatcgtcattctgcatctcatttgcacgataaatgaggtttgcatttattccggaaattggccttttccgtaattgggaatccgtctgttcaaatgcgcttttccccagattcccttccattctggttcaagattgccaggggctggtccttgtcccgttgcgccagtctagtcataaactgtaatcgcaaggtggcatcattgagattattcagtctgctcgcgtgcgtcgtaccacttacatgaggatatcgtgagaatgggtacgagcccggatcgctgttttcgacccgttcgagtctgccaattagctttttaatactttgatttatgtgctgaatcttcaattgctctccctgtggactgtaccaattgaagaaaaggcgaagagtgcaacagacatcgtggcgtgaagaggggtcatctgcatcacttcacaaagaagagggcaacagccaaccacgaacagtctcagcaaagcgcaaagccgacggtcaacatggacaccataactcttgcgacggtcccaatcatcctcttcctcgtccttcccatgctctatacctacacaagctcgactgccatggcacgatttccaaccctgagcaacaagaagatatgtcttctcatcgcccacccagacgatgaagccatgttcttcgcgcccagcatcctggcactcacacggcccgacttgggcaaccatgtcaaaatcctgtgtctgagcacggggaatgcagatgggttgggcgaaacccgtaagaaagaattggtcaagagcgcaatgctactcggtctgcgggacgaggacgatgtgttcgttattgatagtcctgacttcccagactcaatgacaacaacctggcccgcagacaagatatccaacctcctccgttccgcctttggcccccgtctcccctcctctccagacgagcccccatccgccttgatagacatcctaataaccttcgacgagaccggcgtatcctcccatccaaatcacaaatctctctaccacggctctcgcgcgttcatccaatcccttctaaaaggcaaacccggatgggcctcacccatcgatctatataccctaacatctgtctccatgccccggaaatacgtctcattccttgattccttaagcacaatgttcatgttgatagctggtgacaagactaaaagtgacaaggggaatccaccgagtatcgtaagtttcagtggatttggcggaagagagagttatacttcggcccggaaagccatgacggatgcgcataagagccagatggtttggtttcgctggggctggatattactcagtcggtatatggtgatcaatgatctacagcttgagcgtgtaaaagcttgatgccaaaattataatacccctatgtacaaacatttgtctcatcatcccagctatcattgctctatgtagatccagtctagccttcaaagacatatatacaattcatttgagaacacttaaaaatttgaatctagagacagacacaatcaattctgatatatcaagcaagcagcttcgtaaagcgtcgacctctagaccgtctcggccccaaaaatccatgtcgcacaggtgcaagtagatccagtgggttatgagatggcttgaggggggccagcgagtggctcgactgaaccatgactttgacctggctgatttcgtggccgacatcctctccatcttccggataatatgcaacatgtttgactccgcccgtagccacggtgtcgagtttctcgatcatggggtcgacgagctcaacatagccgtttttcgtctgataggttattggattttccagaaaaggtcggaactcgtctatgatctcgtggatagacgggccatcggctggattccactccttgagcatcgattgacaccatagtcggagatgattccacatcttctgcttttcgaatcgggtgcgttcgagacggaacgttgtttcgcttgttaccactccgtttcggagagcttgggtgtatgtgaatacagcgtcttcgtatgcttggcattgttcatggtactgctggacggcttcccgcatacgtattaaagcctggccgtgatcacgggtttcgccaagaccccggatgagactgtgtatgagcggatggtagtgctcaaaggtaggcttctgattataaggaggtgataccactacaacatttgggattagcaattctcatgctgaatattaccttgtgattcactcactggcattgaaaagcatctcgaccgctctgggggccggaacccgctcatgaaatccaacagcctcccatgctgtagatgctggcggcgtgctcattatgtatgtccactccaacaagtctcgccagacatcggaaggaattgtcagtcgctctgttcgagatacatattcaaggagctgtagagcagtcccgatctccccattggaaccatatgcttccgtaatggctcgtaaaacacgcggggtcactgggagcccgaatccgattctgcgggtagctccatcgtatgataccttacgtatctcaatatcattttcggccattgatcctgtgatactaatgtggaaatactcggggagaatatttgtatctgtagcttgaattttagcacgacagatcgttaatgatacatcccatcgagcgcaaggtcgttttcagacaattttagatagggaaggcacgcacttatgtagtcaagagagcctgtacggcccgctgccactaaaatggcacaaacaagttccacgtccatgagaaagcccatacgaaccaaacgtccatgcagcttccccacagatggcggacaccgaagtagtctggactggtcttctatgcgagattttgcatccttatttaagccaaaccgcagctgacgggctcgagccttgacgcgcaggatatccaattgtttcacgtgtccccgggacaatagtaaacgagatctatgtagagctctcggagtgaccattctccttgtcttcgagtacccggtatacaaaggttcagttaaaaaccgtgcctttatgtactcggtgtaagcagtactacctctccactgggaggctggcccagtgatgaaatctctccatatggtcttagcacccacaacgtcggtggcagctccggcgcagcgcaacaatatcatgtattcgtcatgctgtaattcgtaaccttctgccttaagcatactcatcatactaagcaccgtccgcaagagccccgagtacagtttcctgaccccccagtcgtcaatggtagattccatttggagcatcatgaacatgccataagtgattgggacaccactggtaggatcgcagtcattgtcaaccaagaaaggatcaagtgaacggaaaaattcggtgaacgtcgtcctcggaatggtcttagcaatcctgtgcttctcccattggctcatgttttcaatcgccttcaggttgattaagagacggcgcgtatctctatctcgcactgcagacaatgcccttcggaaggcattaggagtttcattgcgagtcctgggggtggtgagaacttcatctggcggccgcttcgaaggtgaagcatactgagcggcacgagcattctttgacggggtgtgtggatccgctggcgtgacaccactttggagcagagaatgaaccagggccacagcatcttgggtgagagaagccgatgaggattgggtagtcgcacatcgtatgtcgccaatacgggtttctataacacgcgtctggcccgcagatgtggtgtgaacccggggagacggacgagatggtccatgttgatggtggactgggcggcgcaatctaagactgataattctcgagggtgttcctctcggggcacatctcatgagcgcgcggcagccgttgtgctcggccacatgaattgacggcagcattgaaatccaaatccaattcgcttgctcttgaccacgtgagaagtgatgaattggacgaagcggcagactagagaaaggaaacaagaatggaattacagactactctcttcatgaaacgtagtgaaagaataaagtgtaggaggcgacatgccgacgaatcgcttcgtagacaacgcgagacttcaaagctcataatcatgcaggtgagca

SEQ ID NO: 37265 - DNA, 1026 bp, Muscodor strobelii
  misc_feature: SGI cDNA ID NO. 572930
  misc_feature: Encodes the peptide sequence at SEQ ID NO 37266
atgacttctcccgcgcctctccatcggcatcaatcatctctcgagggcttcatcaacttctcggccgcactacctttatcagatggccagcgtgcctccgcgacacagaggttctaccacatcgccgaccacttcgaggccaataatggcaaccacgatggccagtatagcccgccccgactcgtgcgactcacgtacgagcatgcgctttcagaacaatctcgcgataacttcctcagagccttctttgaggcgatggcgctatctatagaagggccagaggtcgatgaccgcgaggacttgcgctcgcccttctttgcttttgcagactatctgctggacaacttctttctaccattgaaagcatccacgagaagaaccccgcagccctcgcctgcatttcattcagctgtcgagcgagtgcaggctggaggcgtgcaaggcttcaccgggacgccagaccgcgtgtctgctctccggggcgcatgtctcatccgcgaccgccatcgctgtgtgatttcgcgtagctttgacttggctgaggcgactaatcgtattcgcatagctggcggtaacggcgcccgggatgatgatgggaatccctttcgggaagacgattcccttgtcgctctggaggtggcccacattctcccgcactcgttgatgaaaactgatgcagaatctgagctgagtccctctaagcaagcggcactcgctattctcaacatgttcgacgacggcgttgtacacttaatagaaggcaccgacatcgaccggccacgcaacgctcttactcttacgcattcgatgcacttgttctttgatcccccatcgccccgacttctcgcccttcaccgcgccatcgcttacatactgcatctttctgccgcgggagaatacattgacaagttgcttcgcgacatggatggacaggccgttttggcggacggttctactgagctggaccgcctggtgaggctcggattgagaggatggtcagacaatcaagtgacccgcgcattctaa

SEQ ID NO: 37266 - protein, 341 aa, Muscodor strobelii
  misc_feature: SGI Peptide ID NO. 572930
  misc_feature (1)..(332): NCBI GI: 240110934 Blast Desc: CPC735_037960 [Coccidioides posadasii C735 delta SOWgp]
  misc_feature (8)..(338): NCBI GI: 119196283 Blast Desc: CIMG_02516 [Coccidioides immitis RS]
  misc_feature (1)..(337): NCBI GI: 240107750 Blast Desc: CPC735_043730 [Coccidioides posadasii C735 delta SOWgp]
  misc_feature (1)..(335): NCBI GI: 119177157 Blast Desc: CIMG_07559 [Coccidioides immitis RS]
  misc_feature (8)..(338): NCBI GI: 238839034 Blast Desc: conserved [Microsporum canis CBS 113480]
  misc_feature (8)..(338): NCBI GI: 240106703 Blast Desc: CPC735_014880 [Coccidioides posadasii C735 delta SOWgp]
  misc_feature (8)..(337): NCBI GI: 240111365 Blast Desc: CPC735_072000 [Coccidioides posadasii C735 delta SOWgp]
  misc_feature (6)..(337): NCBI GI: 240273104 Blast Desc: conserved [Ajellomyces capsulatus H143]
  misc_feature (6)..(338): NCBI GI: 256722270 Blast Desc: NECHADRAFT_54350 [Nectria haematococca mpVI 77-13-4]
  misc_feature (8)..(334): NCBI GI: 225680687 Blast Desc: conserved [Paracoccidioides brasiliensis Pb03]
MTSPAPLHRHQSSLEGFINFSAALPLSDGQRASATQRFYHIADHFEANNGNHDGQYSPPRLVRLTYEHALSEQSRDNFLRAFFEAMALSIEGPEVDDREDLRSPFFAFADYLLDNFFLPLKASTRRTPQPSPAFHSAVERVQAGGVQGFTGTPDRVSALRGACLIRDRHRCVISRSFDLAEATNRIRIAGGNGARDDDGNPFREDDSLVALEVAHILPHSLMKTDAESELSPSKQAALAILNMFDDGVVHLIEGTDIDRPRNALTLTHSMHLFFDPPSPRLLALHRAIAYILHLSAAGEYIDKLLRDMDGQAVLADGSTELDRLVRLGLRGWSDNQVTRAF

SEQ ID NO: 37267 - DNA, 1641 bp, Muscodor strobelii
  misc_feature: SGI EST ID NO. CUFF.89116.0
  misc_feature: Variant of the nucleotide sequence at SEQ ID NO 37265
tttaaatctatatttgacctattctacttatcaagtcatatggttctaaagagttgagttttgggtgggggttgcaccagtctttatgttcagggattatacctaggcgttcgcgacgtgtcaactggcattcggcgaggtgcaaacgttcaacctcattggtgtcgccggagtttgagcaatgacttctcccgcgcctctccatcggcatcaatcatctctcgagggcttcatcaacttctcggccgcactacctttatcagatggccagcgtgcctccgcgacacagaggttctaccacatcgccgaccacttcgaggccaataatggcaaccacgatggccagtatagcccgccccgactcgtgcgactcacgtacgagcatgcgctttcagaacaatctcgcgataacttcctcagagccttctttgaggcgatggcgctatctatagaagggccagaggtcgatgaccgcgaggacttgcgctcgcccttctttgcttttgcagactatctgctggacaacttctttctaccattgaaagcatccacgagaagaaccccgcagccctcgcctgcatttcattcagctgtcgagcgagtgcaggctggaggcgtgcaaggcttcaccgggacgccagaccgcgtgtctgctctccggggcgcatgtctcatccgcgaccgccatcgctgtgtgatttcgcgtagctttgacttggctgaggcgactaatcgtattcgcatagctggcggtaacggcgcccgggatgatgatgggaatccctttcgggaagacgattcccttgtcgctctggaggtggcccacattctcccgcactcgttgatgaaaactgatgcagaatctgagctgagtccctctaagcaagcggcactcgctattctcaacatgttcgacgacggcgttgtacacttaatagaaggcaccgacatcgaccggccacgcaacgctcttactcttacgcattcgatgcacttgttctttggtgatttccaggtttttttgagcctgtttcccacgtggatgcgcatacctaccgaatcggctcattcctgcctggtttcgtgcagcgaaaccagggcttgcctgttacgcggacgctctatcttagccataaccgaaccatagatcccccatcgccccgacttctcgcccttcaccgcgccatcgcttacatactgcatctttctgccgcgggagaatacattgacaagttgcttcgcgacatggatggacaggccgttttggcggacggttctactgagctggaccgcctggtgaggctcggattgagaggatggtcagacaatcaagtgacccgcgcattctaatataaaacaatatgccccgggccaatccgttaatacctatctccagagtctatgtatctcgtgcctgcataatgttatatccgttcgtagcgaagacgccgatagcttccgcaaatgggtcctcagaggctttgatctcgtcaaccttgaatggcttcaacagccgagaatgtatctgaacgatatgatgggacatgatatagtttcttcgggttgtttcaattttctcgacggttatttctacgggctttcgaatcagtctctctctgatattgataacccagacttcac

SEQ ID NO: 37268 - DNA, 1095 bp, Muscodor strobelii
  misc_feature: SGI cDNA ID NO. 572931
  misc_feature: Encodes the peptide sequence at SEQ ID NO 37269
atgacttctcccgcgcctctccatcggcatcaatcatctctcgagggcttcatcaacttctcggccgcactacctttatcagatggccagcgtgcctccgcgacacagaggttctaccacatcgccgaccacttcgaggccaataatggcaaccacgatggccagtatagcccgccccgactcgtgcgactcacgtacgagcatgcgctttcagaacaatctcgcgataacttcctcagagccttctttgaggcgatggcgctatctatagaagggccagaggtcgatgaccgcgaggacttgcgctcgcccttctttgcttttgcagactatctgctggacaacttctttctaccattgaaagcatccacgagaagaaccccgcagccctcgcctgcatttcattcagctgtcgagcgagtgcaggctggaggcgtgcaaggcttcaccgggacgccagaccgcgtgtctgctctccggggcgcatgtctcatccgcgaccgccatcgctgtgtgatttcgcgtagctttgacttggctgaggcgactaatcgtattcgcatagctggcggtaacggcgcccgggatgatgatgggaatccctttcgggaagacgattcccttgtcgctctggaggtggcccacattctcccgcactcgttgatgaaaactgatgcagaatctgagctgagtccctctaagcaagcggcactcgctattctcaacatgttcgacgacggcgttgtacacttaatagaaggcaccgacatcgaccggccacgcaacgctcttactcttacgcattcgatgcacttgttctttggtgatttccagcgaaaccagggcttgcctgttacgcggacgctctatcttagccataaccgaaccatagatcccccatcgccccgacttctcgcccttcaccgcgccatcgcttacatactgcatctttctgccgcgggagaatacattgacaagttgcttcgcgacatggatggacaggccgttttggcggacggttctactgagctggaccgcctggtgaggctcggattgagaggatggtcagacaatcaagtgacccgcgcattctaa

SEQ ID NO: 37269 - protein, 364 aa, Muscodor strobelii
  misc_feature: SGI Peptide ID NO. 572931
  misc_feature (8)..(361): NCBI GI: 119196283 Blast Desc: CIMG_02516 [Coccidioides immitis RS]
  misc_feature (1)..(360): NCBI GI: 240107750 Blast Desc: CPC735_043730 [Coccidioides posadasii C735 delta SOWgp]
  misc_feature (1)..(358): NCBI GI: 119177157 Blast Desc: CIMG_07559 [Coccidioides immitis RS]
  misc_feature (8)..(361): NCBI GI: 238839034 Blast Desc: conserved [Microsporum canis CBS 113480]
  misc_feature (1)..(355): NCBI GI: 240110934 Blast Desc: CPC735_037960 [Coccidioides posadasii C735 delta SOWgp]
  misc_feature (6)..(360): NCBI GI: 240273104 Blast Desc: conserved [Ajellomyces capsulatus H143]
  misc_feature (8)..(361): NCBI GI: 240106703 Blast Desc: CPC735_014880 [Coccidioides posadasii C735 delta SOWgp]
  misc_feature (8)..(360): NCBI GI: 240111365 Blast Desc: CPC735_072000 [Coccidioides posadasii C735 delta SOWgp]
  misc_feature (8)..(357): NCBI GI: 225680687 Blast Desc: conserved [Paracoccidioides brasiliensis Pb03]
  misc_feature (6)..(361): NCBI GI: 256722270 Blast Desc: NECHADRAFT_54350 [Nectria haematococca mpVI 77-13-4]
MTSPAPLHRHQSSLEGFINFSAALPLSDGQRASATQRFYHIADHFEANNGNHDGQYSPPRLVRLTYEHALSEQSRDNFLRAFFEAMALSIEGPEVDDREDLRSPFFAFADYLLDNFFLPLKASTRRTPQPSPAFHSAVERVQAGGVQGFTGTPDRVSALRGACLIRDRHRCVISRSFDLAEATNRIRIAGGNGARDDDGNPFREDDSLVALEVAHILPHSLMKTDAESELSPSKQAALAILNMFDDGVVHLIEGTDIDRPRNALTLTHSMHLFFGDFQRNQGLPVTRTLYLSHNRTIDPPSPRLLALHRAIAYILHLSAAGEYIDKLLRDMDGQAVLADGSTELDRLVRLGLRGWSDNQVTRAF

SEQ ID NO: 37270 - DNA, 1641 bp, Muscodor strobelii; identical to SEQ ID NO: 37267
  misc_feature: SGI EST ID NO. CUFF.89116.0
  misc_feature: Variant of the nucleotide sequence at SEQ ID NO 37268

SEQ ID NO: 37271 - DNA, 459 bp, Muscodor strobelii
  misc_feature: SGI cDNA ID NO. 572932
  misc_feature: Elevated expression when VOC is produced
  misc_feature: Encodes the peptide sequence at SEQ ID NO 37272
atgttccctcaagcttctaccacctccaccgacgagaacagagtcactatctgcacttgcatcgatggcttcatgtgcatacgcataacatcggagcatgagaagagcccgtacgttcgcgaggagggacccatagagcagatcaaagtcaagcacagcggcagggacatcgactacatcttattgaaagacatgacggtcgagatggctttattatttgtagacgggatgggcgcggaagtttttgagatgattcgagacagctcgcacccgagcgaaacgcaatggtcttaccctcaacttgttggaatccaagcggcggagctgctctaccacctgaatatccggcacgaaaagcacgaccctggcaacacaagaagtctagaagacgatcgacttggagtgatacaagaactcatccgcgtcgttgagaatgatgctgtgtatcctaatgagtag

SEQ ID NO: 37272 - protein, 152 aa, Muscodor strobelii
  misc_feature: SGI Peptide ID NO. 572932
  misc_feature: Useful for introducing or modulating the production of volatile compounds
MFPQASTTSTDENRVTICTCIDGFMCIRITSEHEKSPYVREEGPIEQIKVKHSGRDIDYILLKDMTVEMALLFVDGMGAEVFEMIRDSSHPSETQWSYPQLVGIQAAELLYHLNIRHEKHDPGNTRSLEDDRLGVIQELIRVVENDAVYPNE

SEQ ID NO: 37273 - DNA, 581 bp, Muscodor strobelii
  misc_feature: SGI EST ID NO. CUFF.89124.0
  misc_feature: Variant of the nucleotide sequence at SEQ ID NO 37271
tcacgattactaaatattagccttttcacatgatgttccctcaagcttctaccacctccaccgacgagaacagagtcactatctgcacttgcatcgatggcttcatgtgcatacgcataacatcggagcatgagaagagcccgtacgttcgcgaggagggacccatagagcagatcaaagtcaagcacagcggcagggacatcgactacatcttattgaaagacatgacggtcgagatggctttattatttgtagacgggatgggcgcggaagtttttgagatgattcgagacagctcgcacccgagcgaaacgcaatggtcttaccctcaacttgttggaatccaagcggcggagctgctctaccacctgaatatccggcacgaaaagcacgaccctggcaacacaagaagtctagaagacgatcgacttggagtgatacaagaactcatccgcgtcgttgagaatgatgctgtgtatcctaatgagtaggctcgatatggccatatgctggtagacactactttatatcggtttgttcaccaagaacacgtaatcaaggatagaattgcgattttcttc

SEQ ID NO: 37274 - DNA, 708 bp, Muscodor strobelii
  misc_feature: SGI cDNA ID NO. 572933
  misc_feature: Elevated expression when VOC is produced
  misc_feature: Encodes the peptide sequence at SEQ ID NO 37275
atgagacagccaacgccgagaccacagccatatctagaggaaacaaaaggcgatccacagcccacgcctcatgtcagaccccgcacgtacggccaaagtataggtaattggattccgacagatatcacgcagggtacgacagagtcaaacaatacgactgcatggagtaactaccctcccgagtcgccagtaacccctagctttgccgtcctcgctgacatctggaaccatgtctactatgccctcgccgccattgagtccacacctcaacgaaaacctacctcttctttccaatacaccccgttagtctacaggaccagcagtattgtcaactcatgcgagatgtgcgatcgcatggacaaggtgctccgagatgaactaggcgttatgtacgtcgacattccagatgtctacgaagtcttctttaacgacatctcaaacctcgacgcagcatcagaggacatcttccagaactgtacagatggggaacagcctctctttctagggggaagaccactggacggctcggttggcaagcgtaagctcgatgtcggctttgtagacatccccgatgcccggacgaacaccaagtacccctggtcgcacatcctggtccctggcgagttgaagagcatccccgacgatgataagacgtccaaagcccggctcgacttggcaagatatgtgaaagaagtctttactacctag

SEQ ID NO: 37275 - protein, 235 aa, Muscodor strobelii
  misc_feature: SGI Peptide ID NO. 572933
  misc_feature (64)..(235): NCBI GI: 261361614 Blast Desc: conserved [Verticillium albo-atrum VaMs.102]
  misc_feature (83)..(235): NCBI GI: 189197961 Blast Desc: conserved [Pyrenophora tritici-repentis Pt-1C-BFP] gi|187981266|gb|EDU47892.1| conserved [Pyrenophora tritici-repentis Pt-1C-BFP]
  misc_feature (74)..(235): NCBI GI: 256725210 Blast Desc: NECHADRAFT_102251 [Nectria haematococca mpVI 77-13-4]
  misc_feature (74)..(235): NCBI GI: 159125639 Blast Desc: AFUB_070970 [Aspergillus fumigatus A1163]
  misc_feature (73)..(235): NCBI GI: 119186153 Blast Desc: CIMG_03124 [Coccidioides immitis RS]
  misc_feature (72)..(233): NCBI GI: 145239239 Blast Desc: An08g01470 [Aspergillus niger] gi|134076772|emb|CAK39827.1| [Aspergillus niger]
  misc_feature (54)..(235): NCBI GI: 258562959 Blast Desc: conserved [Uncinocarpus reesii 1704] gi|237908646|gb|EEP83047.1| conserved [Uncinocarpus reesii 1704]
  misc_feature (58)..(235): NCBI GI: 225677824 Blast Desc: conserved [Paracoccidioides brasiliensis Pb03]
  misc_feature (73)..(235): NCBI GI: 154282629 Blast Desc: [Ajellomyces capsulatus NAm1] gi|150410290|gb|EDN05678.1| [Ajellomyces capsulatus NAm1]
  misc_feature (54)..(235): NCBI GI: 238842024 Blast Desc: conserved [Microsporum canis CBS 113480]
  misc_feature: Useful for introducing or modulating the production of volatile compounds
MRQPTPRPQPYLEETKGDPQPTPHVRPRTYGQSIGNWIPTDITQGTTESNNTTAWSNYPPESPVTPSFAVLADIWNHVYYALAAIESTPQRKPTSSFQYTPLVYRTSSIVNSCEMCDRMDKVLRDELGVMYVDIPDVYEVFFNDISNLDAASEDIFQNCTDGEQPLFLGGRPLDGSVGKRKLDVGFVDIPDARTNTKYPWSHILVPGELKSIPDDDKTSKARLDLARYVKEVFTT

SEQ ID NO: 37276 - DNA, 2227 bp, Muscodor strobelii
  misc_feature: SGI EST ID NO. CUFF.89187.0
  misc_feature: Variant of the nucleotide sequence at SEQ ID NO 37274
ctccagcggattcaattatgcgcttcgttcatgtcattgaaaccgctcttgcgatctttcagcattgcttcacatatagaattagcgggcttttttgtcaaatactaccgcacctctgattcgaggttgactggcggcacgatagcaagaatgtcctccccgaatgcatctttgccacatcgtggttcaactatagacttgtcacagcatacctatgtgcctagctgcgcgccgctgtcgagctccttcatggagagacctccccagcaaccaatctattccataccaccccttccagctcaaatttcagctcctttccttccacctgcaacgcccttgggcccggccgttttcacatccctggccaagcgacgagaatcgaatcccaaagccttgaaattcggaagatcccactcgacccctactgacaggccacaggtgatgaaggatcccgactgtggtagtcgacgtatggctggagataagagaagaaataggcttggatatgcgagatcgaacatggcatgcggaaactgtcggaaaaggaagatcagatgtcaggcaatcaaaaatgatgatcgttgctatcaatgcatcagattaaagaagccatgcgcgtactatgctgtagaccaaggaccaacagatccgtcgatcattgaacatataaaaagctccgatactagagcagtgcacgcgtcaacattaacatcaccttcagcagtatcaaatcgtctggcagatgtgcgagcagcccagcctttccaaaaatcatcgatacccgcgggtcaagtcatgagacagccaacgccgagaccacagccatatctagaggaaacaaaaggcgatccacagcccacgcctcatgtcagaccccgcacgtacggccaaagtataggtaattggattccgacagatatcacgcagggtacgacagagtcaaacaatacgactgcatggagtaactaccctcccgagtcgccagtaacccctagctttggtcagtatacaattccacggctccaggcaagcacggcatggctgtagtgccaaatgtggaagtagtttcgccgcctcccaccatctcccttcccccactggccatggcagccttcgccacgaccttttgcgactcatatctccgccgcggcctccggccccgttcacctggccccaaccaggcgtctcttggcagccgtcctcgctgacatctggaaccatgtctactatgccctcgccgccattgagtccacacctcaacgaaaacctacctcttctttccaatacaccccgttagtctacaggaccagcagtattgtcaactcatgcgagatgtgcgatcgcatggacaaggtgctccgagatgaactaggcgttatgtacgtcgacattccagatgtctacgaagtcttctttaacgacatctcaaacctcgacgcagcatcagaggacatcttccagaactgtacagatggggaacagcctctctttctaggggggtcgactgggtggcccgagaccgtcaacaaaaccgccgtgctggcctggctttccgaccttatcgaacggcttgcataatgggcacaagactacaaaccgacagtccgtagacctttaatccagcctagaagaccactggacggctcggttggcaagcgtaagctcgatgtcggctttgtagacatccccgatgcccggacgaacaccaagtacccctggtcgcacatcctggtccctggcgagttgaagagcatccccgacgatgataagacgtccaaagcccggctcgacttggcaagatatgtgaaagaagtctttactacctagcccacgcgccgctttgttctaggctttaccctatgtggcgcttagatgcagctttagaagaatttgaatgtctcatcctgaagatcgcttctgggagcgctgggctttgtttatgatcttgtgcgtttctttcgcctttttatatttcacacagaccttggagactacaaatctaaaagcacgtctcccgcaaccgtgacccagcacaatattggaaaagcaacagcgcaagatatacacgatgttaatgaacagaaagccactccatctctctacctaaccacgtgcttcttagtgtgcactcggccaggtgattgtacgtaagtgtaggtacatggtagagttgtctgataggagggccaaaactggcccagtacatcaaccaccaaagccgtacgag

SEQ ID NO: 37277 - DNA, 1023 bp, Muscodor strobelii
  misc_feature: SGI cDNA ID NO. 572934
  misc_feature: Encodes the peptide sequence at SEQ ID NO 37278
atggcggcagcacttcctagaaccatgcgcgcagtcgtctgcactgcgactggcccaatcgatgttatgaaaatccaggaggtgccgcttcctgttccccagccagaccaagtcttaattcgaattttggggttcggaatcaacagggcggagatgttcacccgccagggacattcgccgggcgtagtattcccgaggatcgtaggcattgagtgcatcggtgtcatcgcaggctatcattcgtcagattcgccaatgacaaactcggcaccaattggaacccgggtggcaacctgcatgggcggtctcggacgtcaaatccccggctcgtacgccgaatatacctgtgccttcgaggtcaacattcggcctattccacccacttcactctccattgggaccctggcagcgctccctgagatgcttcagacgacctggggctcattggtcacgggattggacctccagtcgggcgagagcttgctcgttcgaggcgcgaccagctccatcgggttatgcgcattgcaactagctcgcaagcttggcgcaagccggatcggagccacgactcgcagcgcatcacgcaagcagatgctgctcgatagcggtgccgatgaagtcttcattgacaacggcgacgtcgcgagccatgtggcacgtaccgacaaaggtgggttcaacaaggtgctcgagctcgtaggcacaacttccatcttggactcgatgaagtgcgtggcaacgagaggaacagtatgcatgacgggtattcaaggaggccaatgggaactcgaccattttacacccatggccgacctaccaaatcgcgcaaggctctgcgcatacggaggtggccctgcagatttcttggccatgccgttcgacgagcttgttcaagatgtcgaacgtgggactgtctcggtgcctataaaagaattcaaattggatgaaatccataatgtacatgaaattctcgaatcgggaggcggtggcgccaaattagtggtgatcgtagcaaatgagtga

SEQ ID NO: 37278 - protein, 340 aa, Muscodor strobelii
  misc_feature: SGI Peptide ID NO. 572934
  misc_feature (35)..(125): Pfam Id: PF08240 Pfam Desc: Alcohol dehydrogenase GroES-like domain
  misc_feature (157)..(302): Pfam Id: PF00107 Pfam Desc: Zinc-binding dehydrogenase
  misc_feature (35)..(77): Pfam Id: PF08240 Pfam Desc: Alcohol dehydrogenase GroES-like domain
  misc_feature (157)..(256): Pfam Id: PF00107 Pfam Desc: Zinc-binding dehydrogenase
  misc_feature (8)..(336): NCBI GI: 238502869 Blast Desc: zinc-binding oxidoreductase, [Aspergillus flavus NRRL3357] gi|220691478|gb|EED47826.1| zinc-binding oxidoreductase, [Aspergillus flavus NRRL3357]
  misc_feature (8)..(336): NCBI GI: 169776179 Blast Desc: [Aspergillus oryzae RIB40] gi|83771291|dbj|BAE61423.1| protein product [Aspergillus oryzae]
  misc_feature (4)..(336): NCBI GI: 212534900 Blast Desc: zinc-binding oxidoreductase, [Penicillium marneffei ATCC 18224] gi|210070005|gb|EEA24095.1| zinc-binding oxidoreductase, [Penicillium marneffei ATCC 18224]
  misc_feature (9)..(337): NCBI GI: 256724726 Blast Desc: NECHADRAFT_95913 [Nectria haematococca mpVI 77-13-4]
  misc_feature (9)..(337): NCBI GI: 153876114 Blast Desc: Zinc-containing alcohol dehydrogenase superfamily [Beggiatoa sp. PS] gi|152067422|gb|EDN66401.1| Zinc-containing alcohol dehydrogenase superfamily [Beggiatoa sp. PS]
  misc_feature (8)..(337): NCBI GI: 121704200 Blast Desc: zinc-binding oxidoreductase, [Aspergillus clavatus NRRL 1] gi|119398508|gb|EAW08938.1| zinc-binding oxidoreductase, [Aspergillus clavatus NRRL 1]
  misc_feature (4)..(336): NCBI GI: 242791467 Blast Desc: zinc-binding oxidoreductase, [Talaromyces stipitatus ATCC 10500] gi|218718351|gb|EED17771.1| zinc-binding oxidoreductase, [Talaromyces stipitatus ATCC 10500]
  misc_feature (9)..(335): NCBI GI: 149278583 Blast Desc: oxidoreductase [Pedobacter sp. BAL39] gi|149230578|gb|EDM35961.1| oxidoreductase [Pedobacter sp. BAL39]
  misc_feature (9)..(336): NCBI GI: 256423440 Blast Desc: Alcohol dehydrogenase zinc-binding domain protein [Chitinophaga pinensis DSM 2588] gi|256038348|gb|ACU61892.1| Alcohol dehydrogenase zinc-binding domain protein [Chitinophaga
  misc_feature (8)..(337): NCBI GI: 229493148 Blast Desc: zinc-containing alcohol dehydrogenase family protein [Rhodococcus erythropolis SK121] gi|229319879|gb|EEN85708.1| zinc-containing alcohol dehydrogenase family protein [Rhodococcus
  misc_feature (7)..(337): SWISSPROT Homolog: EC 1.6.5.5 NADPH:quinone reductase
MAAALPRTMRAVVCTATGPIDVMKIQEVPLPVPQPDQVLIRILGFGINRAEMFTRQGHSPGVVFPRIVGIECIGVIAGYHSSDSPMTNSAPIGTRVATCMGGLGRQIPGSYAEYTCAFEVNIRPIPPTSLSIGTLAALPEMLQTTWGSLVTGLDLQSGESLLVRGATSSIGLCALQLARKLGASRIGATTRSASRKQMLLDSGADEVFIDNGDVASHVARTDKGGFNKVLELVGTTSILDSMKCVATRGTVCMTGIQGGQWELDHFTPMADLPNRARLCAYGGGPADFLAMPFDELVQDVERGTVSVPIKEFKLDEIHNVHEILESGGGGAKLVVIVANE

SEQ ID NO: 37279 - DNA, 2782 bp, Muscodor strobelii
  misc_feature: SGI EST ID NO. CUFF.89137.0
  misc_feature: Variant of the nucleotide sequence at SEQ ID NO 37277
gtgatcggccccgtgatctgcgccgccgtcatcccgccccctgccgctgctgtcgggccaaggggcgtgtggtggttgaagttgaggctgttgttgttgtcgtggctgctggcgccgggcgagtcgtgcgactgtctggtcgacgacccgggcgtcaccgccgccgtcgacggcgtgttgggcgttgacacattcatcgcggtggcgcacgcccagctgactgctctccgcgttgaggggtgaagccgtccaggaaagaagtagttaagaaactaagaaatcaagaaattcaggtccagcacactccggcagcaggcgagctggcacagtggaggcacccaacaaggagtggcacggatgtgcttgccgcaacaggagagaggggcgtccaccctcagaaggcactctcttgtctcgaggtgtcggggaaaatagggctgaaggttctgagccgccggcgatcccgactgctgtctacccgtctgttccgttctgcccacttctccgtacgggcttcttcaaattgccacgctctgcttcgcgggggaagacgtcaatggccgtcgctccttgtctgtctcaccgaggggttccagcccgtcgtctatgtagtaggtatccttcccacctctcacgacatgcggccctgttcgcccgggttgcactaggcctgtgccaagccgtcgaagtgcaagtaagcttttgccgtcccttttcgccccagtcgagtctccgctttaattgtctcgcaaggaccgtctgtagaggatgagcatgacagaggatgaagggatacgtaggagaggaatggtcaattgatgtttccgacagggcgcatagtgctgcagcgttatgactcaggcggcaggcctcggtatcctcattgaggtagtcccagagcgagtcggtcataggcctgtctgcatgtttgtgtcataggtcatcctcacgattggcgactgcgcggattcgacgtcgacgaacagggggcctttgctcgtcgtatctccgaccatccccaccgacgatctcgggcattagttttacttgacgtcaaatgccaccccccgcctacccctccatcgtacacgagaccgctatccatgctcaactgtcgtctatcccagctgcgtcccgcccttccccgagtccatacctatcatctattggtgatttgatcccttaccaagatggttattattgctactagtcaaggattataggcttcgttggggaggcattgtatattgcgcgatagaaatagaactctagatcattcatggcatgcttacccctggctctttgccctgactcgagtgaaaacgatgtcgtcagactaattgctaatatcacatcaactaatacatatactacgttctgacagtgtcaatatacaaagttgcgtccgtaaagagggatcgagtcgcctagggcagatccctaggttgggtagaccatgcatcccaccggcgagctagatgccatgccccggatacacaaccgttcgctgacatatagatctgtgccgcctttggtaagcacacgtactcaccatggtatataacgccttggcatgaattggtcacatcaacagccactccctctgcggtgtcatctacctttgatgccttggcattgatcgttgtacggggacgtcggcggtccacgcaggttcacaccatggcggcagcacttcctagaaccatgcgcgcagtcgtctgcactgcgactggcccaatcgatgttatgaaaatccaggaggtgccgcttcctgttccccagccagaccaagtcttaattcgaattttggggttcggaatcaacagggcggagatgttcacccgccagggacattcgccgggcgtagtattcccgaggatcgtaggcattgagtgcatcggtgtcatcgcaggctatcattcgtcagattcgccaatgacaaactcggcaccaattggaacccgggtggcaacctgcatgggcggtctcggacgtcaaatccccggctcgtacgccgaatatacctgtgccttcgaggtcaacattcggcctattccacccacttcactctccattgggaccctggcagcgctccctgagatgcttcagacgacctggggctcattggtcacgggattggacctccagtcgggcgagagcttgctcgttcgaggcgcgaccagctccatcgggttatgcgcattgcaactagctcgcaagcttggcgcaagccggatcggagccacgactcgcagcgcatcacgcaagcagatgctgctcgatagcggtgccgatgaagtcttcattgacaacggcgacgtcgcgagccatgtggcacgtaccgacaaaggtgggttcaacaaggtgctcgagctcgtaggcacaacttccatcttggactcgatgaagtgcgtggcaacgagaggaacagtatgcatgacgggtattcaaggaggccaatgggaactcgaccattttacacccatggccgacctaccaaatcgcgcaaggctctgcgcatacggaggtggccctgcagatttcttggccatgccgttcgacgagcttgttcaagatgtcgaacgtgggactgtctcggtgcctataaaagaattcaaattggatgaaatccataatgtacatgaaattctcgaatcgggaggcggtggcgccaaattagtggtgatcgtagcaaatgagtgaagtaataggcataagaccaccttcgtagttctacgtagccatcttgatttacatttattagctctgttgtgtagaggct

SEQ ID NO: 37280 - DNA, 957 bp, Muscodor strobelii
  misc_feature: SGI cDNA ID NO. 572935
  misc_feature: Encodes the peptide sequence at SEQ ID NO 37281
atgcgtttctcgaaaaccgttgctctgggtgccgcggccagcgtggtcaaggctcaacgccccgacaatacctcgatctgtgactactacacgacggcgctgctgaagaacaacactgctgagaaccaagctactcttttgacgctggttgtcaacaccgtcgtcattggaaactatacaatgcccaatgttgggattagtgtgcctggtatcctcgccgcgggcaagtataatggcactgatgtcaacctcctcccttacttcactggggacctcgcctcgagcaaccgcggtggtagctctggagtatcgatcaacttcctggatgatggtggtgccaagcctctgcagaacaacaagcctgccaacacagagagctcaaaccaatacttcctcctcactcatctttaccaatttttcggctctttgctgggatgctctgagcaaggaatgcctggttttgatgcctataccggccatgcctcgatgtacgaggtacataaattcatggatttggatgtaaacgaagtatcctatttcatcactcaggttggacttgctgctgcctcttttggtgtagcagactccgacgtcgcgattgttggctctgcccttcaatcactctttggctaccgttgttcacctcctaccaccgtcatcgaggcacagggccccgagctgcaggctatctgcatcgcagacaactgccccgtagccaccgccagcgccgtgtgtgaccagtatgcacccgccagcgagcctgcatcggccaccccaacaatgtcgatgtcatctaacggcacataccctactcccacgcccacgggctccggatctgctacgacaaccacgggttcatctaccgtgtctcctacatccgtgcctaccgctggtgccgctgtcaacggtcttgggctcgctgccctcgctggaggaattgctgctttcgtcttgtaa

SEQ ID NO: 37281 - protein, 318 aa, Muscodor strobelii
  misc_feature: SGI Peptide ID NO. 572935
  misc_feature (19)..(318): NCBI GI: 261361104 Blast Desc: conserved [Verticillium albo-atrum VaMs.102]
  misc_feature (1)..(290): NCBI GI: 116205671 Blast Desc: [Chaetomium globosum CBS 148.51] gi|88176847|gb|EAQ84315.1| [Chaetomium globosum CBS 148.51]
  misc_feature (1)..(310): NCBI GI: 169609314 Blast Desc: SNOG_07745 [Phaeosphaeria nodorum SN15] gi|111064091|gb|EAT85211.1| SNOG_07745 [Phaeosphaeria nodorum SN15]
  misc_feature (1)..(269): NCBI GI: 156048636 Blast Desc: [Sclerotinia sclerotiorum 1980] gi|154693446|gb|EDN93184.1| [Sclerotinia sclerotiorum 1980]
  misc_feature (18)..(237): NCBI GI: 212526246 Blast Desc: conserved [Penicillium marneffei ATCC 18224] gi|210072678|gb|EEA26765.1| conserved [Penicillium marneffei ATCC 18224]
  misc_feature (5)..(224): NCBI GI: 154297467 Blast Desc: [Botryotinia fuckeliana B05.10] gi|150858526|gb|EDN33718.1| [Botryotinia fuckeliana B05.10]
  misc_feature (9)..(248): NCBI GI: 169620600 Blast Desc: SNOG_13502 [Phaeosphaeria nodorum SN15] gi|111057829|gb|EAT78949.1| SNOG_13502 [Phaeosphaeria nodorum SN15]
  misc_feature (150)..(268): NCBI GI: 242790970 Blast Desc: TSTA_114800 [Talaromyces stipitatus ATCC 10500] gi|218718253|gb|EED17673.1| TSTA_114800 [Talaromyces stipitatus ATCC 10500]
MRFSKTVALGAAASVVKAQRPDNTSICDYYTTALLKNNTAENQATLLTLVVNTVVIGNYTMPNVGISVPGILAAGKYNGTDVNLLPYFTGDLASSNRGGSSGVSINFLDDGGAKPLQNNKPANTESSNQYFLLTHLYQFFGSLLGCSEQGMPGFDAYTGHASMYEVHKFMDLDVNEVSYFITQVGLAAASFGVADSDVAIVGSALQSLFGYRCSPPTTVIEAQGPELQAICIADNCPVATASAVCDQYAPASEPASATPTMSMSSNGTYPTPTPTGSGSATTTTGSSTVSPTSVPTAGAAVNGLGLAALAGGIAAFVL

SEQ ID NO: 37282 - DNA, 153 bp, Muscodor strobelii
  misc_feature: SGI EST ID NO. CUFF.89154.0
  misc_feature: Variant of the nucleotide sequence at SEQ ID NO 37280
agagctcaaaccaatacttcctcctcactcatctttaccaatttttcggctctttgctgggatgctctgagcaaggaatgcctggttttgatgcctataccggccatgcctcgatgtacgaggtacataaattcatggatttggatgtaaacg

SEQ ID NO: 37283 - DNA, 705 bp, Muscodor strobelii
  misc_feature: SGI cDNA ID NO. 572936
  misc_feature: Elevated expression when VOC is produced
  misc_feature: Encodes the peptide sequence at SEQ ID NO 37284
atgcatcgcaatcgcgcatcgacggcgttgattggtttgatctatgccgcctcgacggtgtctcattccatccatgctgttacttgcccaagcctccaaaccgtcgtctactggggccagaacggcggagatactgtcgagaatgatctttccacgtattgtacacccacatccggcatagatattattgtgctagccttcttgtaccagttcggcggcgatatcctcatcccctccggtgccgttggccagtcgtgctcaatcagcacttcgggccagggccaggattgcgacggggtcgcttccgccattgtcatgtgtcaggcccacggcgtcaagatcattctatcgctgggcggtgcagtcggctcgtactctttacagtcggcatctcatgctacaacaattggaaactacctctgggacgcctatggtaacgcgagtaacgaagcggtgggccgtccgttcgggaagacggtcgtcgacggattcgactttaacatagagcaaaatgacggtaatcagttctaccaagacatgatctcaacgctacggagtaagttcaagtcggatccgtccaaggagtattacatcaccggcgcgccacaatgcccaatccccgagccaaacatgggtgttgtcatcaatggatctcagttcgactacttatggccgcagttttacaataataataattacacgtga

SEQ ID NO: 37284 - protein, 234 aa, Muscodor strobelii
  misc_feature: SGI Peptide ID NO. 572936
  misc_feature (32)..(228): Pfam Id: PF00704 Pfam Desc: Glycosyl hydrolases family 18
  misc_feature (7)..(230): NCBI GI: 212544236 Blast Desc: endochitinase precursor, [Penicillium marneffei ATCC 18224] gi|210065241|gb|EEA19335.1| endochitinase precursor, [Penicillium marneffei ATCC 18224]
  misc_feature (5)..(230): NCBI GI: 242761205 Blast Desc: chitinase 3 precursor, [Talaromyces stipitatus ATCC 10500] gi|218723331|gb|EED22748.1| chitinase 3 precursor, [Talaromyces stipitatus ATCC 10500]
  misc_feature (3)..(234): NCBI GI: 9971103 Blast Desc: endochitinase CHI2 [Metarhizium anisopliae var. acridum]
  misc_feature (5)..(230): NCBI GI: 242811823 Blast Desc: class III chitinase ChiA2 [Talaromyces stipitatus ATCC 10500] gi|218714169|gb|EED13592.1| class III chitinase ChiA2 [Talaromyces stipitatus ATCC 10500]
  misc_feature (1)..(234): NCBI GI: 63148160 Blast Desc: chitinase [Metarhizium anisopliae]
  misc_feature (7)..(230): NCBI GI: 242825896 Blast Desc: endochitinase precursor, [Talaromyces stipitatus ATCC 10500] gi|218712351|gb|EED11777.1| endochitinase precursor, [Talaromyces stipitatus ATCC 10500]
  misc_feature (33)..(230): NCBI GI: 212531861 Blast Desc: class III chitinase ChiA2 [Penicillium marneffei ATCC 18224] gi|210071451|gb|EEA25540.1| class III chitinase ChiA2 [Penicillium marneffei ATCC 18224]
  misc_feature (1)..(230): NCBI GI: 119483574 Blast Desc: class III chitinase ChiA2 [Neosartorya fischeri NRRL 181] gi|119409846|gb|EAW19793.1| class III chitinase ChiA2 [Neosartorya fischeri NRRL 181]
  misc_feature (35)..(234): NCBI GI: 255709231 Blast Desc: chitinase [Metarhizium anisopliae]
  misc_feature (7)..(232): NCBI GI: 242825060 Blast Desc: endochitinase precursor, [Talaromyces stipitatus ATCC 10500] gi|218712180|gb|EED11606.1| endochitinase precursor, [Talaromyces stipitatus ATCC 10500]
  misc_feature (36)..(230): SWISSPROT Homolog: EC 3.2.1.14 Chitinase
  misc_feature: Useful for introducing or modulating the production of volatile compounds
MHRNRASTALIGLIYAASTVSHSIHAVTCPSLQTVVYWGQNGGDTVENDLSTYCTPTSGIDIIVLAFLYQFGGDILIPSGAVGQSCSISTSGQGQDCDGVASAIVMCQAHGVKIILSLGGAVGSYSLQSASHATTIGNYLWDAYGNASNEAVGRPFGKTVVDGFDFNIEQNDGNQFYQDMISTLRSKFKSDPSKEYYITGAPQCPIPEPNMGVVINGSQFDYLWPQFYNNNNYT

SEQ ID NO: 37285 - DNA, 860 bp, Muscodor strobelii
  misc_feature: SGI EST ID NO. CUFF.89189.1
  misc_feature: Variant of the nucleotide sequence at SEQ ID NO 37283
tatttatctggtgcttcgcatacatatgtacatatatatgtacagcctgttacataacacctctttttacctcaactagatgatacgatgcatcgcaatcgcgcatcgacggcgttgattggtttgatctatgccgcctcgacggtgtctcattccatccatgctgttacttgcccaagcctccaaaccgtcgtctactggggccagaacggcggagatactgtcgagaatgatctttccacgtattgtacacccacatccggcatagatattattgtgctagccttcttgtaccagttcggcggcgatatcctcatcccctccggtgccgttggccagtcgtgctcaatcagcacttcgggccagggccaggattgcgacggggtcgcttccgccattgtcatgtgtcaggcccacggcgtcaagatcattctatcgctgggcggtgcagtcggctcgtactctttacagtcggcatctcatgctacaacaattggaaactacctctgggacgcctatggtaacgcgagtaacgaagcggtgggccgtccgttcgggaagacggtcgtcgacggattcgactttaacatagagcaaaatgacggtaatcagttctaccaagacatgatctcaacgctacggagtaagttcaagtcggatccgtccaaggagtattacatcaccggcgcgccacaatgcccaatccccgagccaaacatgggtgttgtcatcaatggatctcagttcgactacttatggccgcagttttacaataataataattacacttttccatgcgctctgcctatcaacggcaatgcgccttttaactacgatcaatggatttcgtatacggctgg

SEQ ID NO: 37286 - DNA, 210 bp, Muscodor strobelii
  misc_feature: SGI cDNA ID NO. 572937
  misc_feature: Encodes the peptide sequence at SEQ ID NO 37287
atggcgccgtatgatagcgaatactccggaggcgaagatgatgatttcactgagaccgacgttctcctaggctatgcctcaaaagacgcagatggcgatcagacaagcagattaggaggcgagcccgaatggctcgatccctcgacaccaccctcagcagcattcgcgcgctgcaaaatatgcaaagacctcatggttctcctcctctag

SEQ ID NO: 37287 - protein, 69 aa, Muscodor strobelii
  misc_feature: SGI Peptide ID NO. 572937
  misc_feature (1)..(69): NCBI GI: 154300350 Blast Desc: BC1G_11364 [Botryotinia fuckeliana B05.10] gi|150856687|gb|EDN31879.1| BC1G_11364 [Botryotinia fuckeliana B05.10]
  misc_feature (1)..(69): NCBI GI: 156042402 Blast Desc: SS1G_10998 [Sclerotinia sclerotiorum 1980] gi|154695385|gb|EDN95123.1| SS1G_10998 [Sclerotinia sclerotiorum 1980]
  misc_feature (1)..(69): NCBI GI: 171678605 Blast Desc: protein product [Podospora anserina] gi|170937372|emb|CAP62030.1| protein product [Podospora anserina]
  misc_feature (1)..(69): NCBI GI: 85091531 Blast Desc: NCU09708 [Neurospora crassa OR74A] gi|28920340|gb|EAA29711.1| conserved [Neurospora crassa OR74A]
  misc_feature (1)..(69): NCBI GI: 256732468 Blast Desc: NECHADRAFT_38692 [Nectria haematococca mpVI 77-13-4]
  misc_feature (1)..(69): NCBI GI: 46123873 Blast Desc: FG06314.1 [Gibberella zeae PH-1]
  misc_feature (1)..(69): NCBI GI: 169767538 Blast Desc: [Aspergillus oryzae RIB40] gi|238484439|ref|XP_002373458.1| PDCD2_C domain protein, [Aspergillus flavus NRRL3357] gi|83766095|dbj|BAE56238.1| protein
  misc_feature (16)..(69): NCBI GI: 261354540 Blast Desc: conserved [Verticillium albo-atrum VaMs.102]
  misc_feature (1)..(69): NCBI GI: 238840907 Blast Desc: conserved [Microsporum canis CBS 113480]
  misc_feature (1)..(69): NCBI GI: 116204125 Blast Desc: CHGG_09946 [Chaetomium globosum CBS 148.51] gi|88176074|gb|EAQ83542.1| CHGG_09946 [Chaetomium globosum CBS 148.51]
MAPYDSEYSGGEDDDFTETDVLLGYASKDADGDQTSRLGGEPEWLDPSTPPSAAFARCKICKDLMVLLL

SEQ ID NO: 37288 - DNA, 399 bp, Muscodor strobelii
  misc_feature: SGI cDNA ID NO. 572938
  misc_feature: Encodes the peptide sequence at SEQ ID NO 37289
atgaccttcaattcaagccagcttcctattcccgacctggcagaaactcccaagcctacacccttggccaccggtaacacagcctcatcgcgaagtcaagagcaatcgccaagtcgtgccgaagactgcagcgaggaaagcgatctcaatcatggccattgcaccccgcctgagaatatcctggctacgtcgtccgaggtggagaagcagaccgcagcgccatctttcgcgactccagctcggcgcgtccccatgaaagaactactcgaatcgcgaacagtggaaaggaaatggtcgtggacaccaaatgcgaccccttgcactgatgatcaactttactctacaccaatggacccagtgacaccgtccacctatgtcggcagcaccacgtcgatttag

SEQ ID NO: 37289 - protein, 132 aa, Muscodor strobelii
  misc_feature: SGI Peptide ID NO. 572938
MTFNSSQLPIPDLAETPKPTPLATGNTASSRSQEQSPSRAEDCSEESDLNHGHCTPPENILATSSEVEKQTAAPSFATPARRVPMKELLESRTVERKWSWTPNATPCTDDQLYSTPMDPVTPSTYVGSTTSI

SEQ ID NO: 37290 - DNA, 1418 bp, Muscodor strobelii
  misc_feature: SGI EST ID NO. CUFF.89174.0
  misc_feature: Variant of the nucleotide sequence at SEQ ID NO 37288
gcgaatttcaaattttcctctcggacgaccgagcgaaacacggcaggaaagggtatgcagtcggacaaggtctcgactgaccagttaccgctctcaccatgaccttcaattcaagccagcttcctattcccgacctggcagaaactcccaagcctacacccttggccaccggtaacacagcctcatcgcgaagtcaagagcaatcgccaagtcgtgccgaagactgcagcgaggaaaggtatgcatcacccatatccgtcttcgtgtctcgtcacccatgccgccactcgagatcacaagcaatataatggatttgacaagtgctcatgtacatcaacagcgatctcaatcatggccattgcaccccgcctgagaatatcctggctacgtcgtccgaggtggagaagcagaccgcagcgccatctttcgcgactccagctcggcgcgtccccatgaaagaactactcgaatcgcgaacagtggaaaggaaatggtcgtggacaccaaatgcgaccccttgcactgatgatcaactttactctacaccaatggacccagtgacaccgtccaaacttaacaagtcggaaatactcagacctatgtcggcagcaccacgtcgatttagaactctgccacgcccggaaagctcacatccaacacaagaccacacagacgagacaacacacaggtcaatatctccgactccaaccattcctgcgcttgttaggggaacatcacccgtgcccggcgttaacaatgtgacttaagcctctcaagttatgagactcatctttaggtccatgtcaaccatcctgatgctggcaaaagagagctcccagagaacactgtgtccgagcttttttggccaatgcttaagctgagacctccgagctctcaacagccatagcacacctacgtagctccaaagacaccgaagagatatatatttcctgctcacgcgagcgtatgagtgggcagtggccgagataaggggttggagcaagcaggaagagacaggccatattactactgtacaacctgggttctacgcattccaatccttctatggggacttctctcagagaaagctctttattgattcaacatcgttcgttgattcgagaaagttgattgattcgagaaggaacataataaggtgctcgagaatggcgcagccagtgtacgagaactccgagaaaatgcccatacaagtgcctaatcaagatgaggttgtcgtcgtgaagtaagtcgtgaccaacaacaacgcccttgcagtaacatctcatatgcaacacgcaagccaaaatttcattcactgcatgattgaccttctagctagggtccaaacatcatatataccactatacactactttgatccatgatgctatcagacgaatgacatgacacagcagaacc

SEQ ID NO: 37291 - DNA, 1542 bp, Muscodor strobelii
  misc_feature: SGI cDNA ID NO. 572939
  misc_feature: Elevated expression when VOC is produced
  misc_feature: Encodes the peptide sequence at SEQ ID NO 37292
atgaatatctcgacctggttagaaggcattgacgacgcgaccgtcgaggatcgtccagcccaaaaacgcaaacgtcaacactccattgagattgacgatactttcacccacccgttcaacgccctgcccaatacgcctcccttcaccgccatgtcgtctgcatccggtctcggcaccgcgcagaaacgaagcgcgggcgaaagatgcaatagcgatgacgattccctcgatgacgcgacagtttcgaaagattcgagacgatcctccccgaagcgacgatcccgctccaacagtccaacgaagaactcatggggcaacttagcacaattcgaaaaaccagtacttatgcaagacatcgacgaaggggccaccaatctccctgttgatgtgcagggtttatacgatcaactatgtctagcgattgataagcaacgcgtgattccttttgaagtacaggatcaagtcattgcaatagtaggcaatcgagcagcgcgcgactctctctatcgagagaaggcgacgacagaagcggagagcctacataagtatttgcgaaacattctgcacgaagccaaggtcgctgccaagaatgaataccacgaaacgggctggaaccacgctgtgcacacccctttgatcaaactcgcctactcctcgactgagcctgaagagggcttcactttgccaccacaagtcccatcttcgtcgtttagttcggaccggtcagccagtgctcgtgtcgtctacaccatgtccgctaccatccacagagaatacacaccgaggaagcgtatactgccaacagccaggttcgtcacgcgcaagcttccgatctccacgccctccgccaccacctcctcccctgtacctccactgaccatccctccaccacacacgcatgcttccattggggtcgctggttcgatatctgggtctgtgctctctgccacggcaagatcagagattgaagtagatggtgtcacctacaatcgtagcgatagtaagagagtcgactacgcattggtggtggacattaaggataatgcccctttgcgcaaggtcttgaactttgtgtggaatgaatgcctctaccgaaatgtactgccgcacatcaatcagtctttttatctccctttgcagctcagtccaattgcctgctccattgagacaaaaagggagctgaatctcgcgaaccctttggtacaactcggtacctgggtggcggcttggcataaacggatgcgcattctgcgcaaatatctccttgataccgtcgacgagctgagcagtcagagatcgaccgagaatgcacgccttccgactaccctcctgatcaaagtggtaaaccatgattggaggctgtattttgtctgtgacaggggcaactgtatcgatgtctgcggccctgttgagatcggctccacgtccaacttgatgaacatctatatcctgcttaccacactcgaagcgatcaaggattggattgagacgacatttcgccagggcctcgaggaatggttcatgtgcgagaatcttcaatga

SEQ ID NO: 37292 - protein, 513 aa, Muscodor strobelii
  misc_feature: SGI Peptide ID NO. 572939
  misc_feature (92)..(501): NCBI GI: 256719922 Blast Desc: NECHADRAFT_4538 [Nectria haematococca mpVI 77-13-4]
  misc_feature (332)..(503): NCBI GI: 145605890 Blast Desc: [Magnaporthe grisea 70-15] gi|145013650|gb|EDJ98291.1| [Magnaporthe grisea 70-15]
  misc_feature (371)..(510): NCBI GI: 116194203 Blast Desc: CHGG_06819 [Chaetomium globosum CBS 148.51] gi|88182732|gb|EAQ90200.1| CHGG_06819 [Chaetomium globosum CBS 148.51]
  misc_feature (370)..(500): NCBI GI: 116194328 Blast Desc: CHGG_03762 [Chaetomium globosum CBS 148.51] gi|88179675|gb|EAQ87143.1| CHGG_03762 [Chaetomium globosum CBS 148.51]
  misc_feature (371)..(508): NCBI GI: 256722137 Blast Desc: NECHADRAFT_55546 [Nectria haematococca mpVI 77-13-4]
  misc_feature (334)..(507): NCBI GI: 149209015 Blast Desc: MGCH7_ch7g3 [Magnaporthe grisea 70-15] gi|86195958|gb|EAQ70596.1| MGCH7_ch7g3 [Magnaporthe grisea 70-15]
  misc_feature (376)..(503): NCBI GI: 39963832 Blast Desc: [Magnaporthe grisea 70-15] gi|145015428|gb|EDJ99964.1| [Magnaporthe grisea 70-15]
  misc_feature (371)..(486): NCBI GI: 116197324 Blast Desc: CHGG_05260 [Chaetomium globosum CBS 148.51] gi|88181173|gb|EAQ88641.1| CHGG_05260 [Chaetomium globosum CBS 148.51]
  misc_feature (294)..(499): NCBI GI: 256721214 Blast Desc: NECHADRAFT_82331 [Nectria haematococca mpVI 77-13-4]
  misc_feature (334)..(464): NCBI GI: 145604607 Blast Desc: MGG_07826 [Magnaporthe grisea 70-15] gi|145012600|gb|EDJ97254.1| MGG_07826 [Magnaporthe grisea 70-15]
  misc_feature: Useful for introducing or modulating the production of volatile compounds
MNISTWLEGIDDATVEDRPAQKRKRQHSIEIDDTFTHPFNALPNTPPFTAMSSASGLGTAQKRSAGERCNSDDDSLDDATVSKDSRRSSPKRRSRSNSPTKNSWGNLAQFEKPVLMQDIDEGATNLPVDVQGLYDQLCLAIDKQRVIPFEVQDQVIAIVGNRAARDSLYREKATTEAESLHKYLRNILHEAKVAAKNEYHETGWNHAVHTPLIKLAYSSTEPEEGFTLPPQVPSSSFSSDRSASARVVYTMSATIHREYTPRKRILPTARFVTRKLPISTPSATTSSPVPPLTIPPPHTHASIGVAGSISGSVLSATARSEIEVDGVTYNRSDSKRVDYALVVDIKDNAPLRKVLNFVWNECLYRNVLPHINQSFYLPLQLSPIACSIETKRELNLANPLVQLGTWVAAWHKRMRILRKYLLDTVDELSSQRSTENARLPTTLLIKVVNHDWRLYFVCDRGNCIDVCGPVEIGSTSNLMNIYILLTTLEAIKDWIETTFRQGLEEWFMCENLQ

SEQ ID NO: 37293 - DNA, 2545 bp, Muscodor strobelii
  misc_feature: SGI EST ID NO. CUFF.89192.1
  misc_feature: Variant of the nucleotide sequence at SEQ ID NO 37291
cgatgagatacatacatagtcaaagagcagagaactcaatcccaatggtttctaggcctctctctccagataggaaatcttacattttgcatgtcttcatttccctaggcctcttctctagcaaagaccagcgacgtagcaagccagaacggaccaacatgagccccaccacacagctccctctgcgaatccagaaccagccgttttttgctcaggacccaaatcactattcatcagacaccatggtcgaaaactggtcatgtcctgtattcagtcactaggtggttaaaagaatgatctaaaacacacttgttaatggcgcgacaacagaagtggaactagtccattattgaatcctgtctcgactcacaggtttatcacgttatgtatgtacatcaaaagccatcactaggctgatctagaagtggagcttccaccacggagatgtcggggattactaacgccgatgcttctggttgtcctgccagcaccccgcgaaaacaataacatcgcaactttgacgacaacatcatattgcaaacctgtcttgactgcatcgacagcacccctccgcattcgccttcatctcgtgatactaccccgtcgcatcttggtcatcgactacgtacgccgatgaatatctcgacctggttagaaggcattgacgacgcgaccgtcgaggatcgtccagcccaaaaacgcaaacgtcaacactccattgagattgacgatactttcacccacccgttcaacgccctgcccaatacgcctcccttcaccgccatgtcgtctgcatccggtctcggcaccgcgcagaaacgaagcgcgggcgaaagatgcaatagcgatgacgattccctcgatgacgcgacagtttcgaaagattcgagacgatcctccccgaagcgacgatcccgctccaacagtccaacgaagaactcatggggcaacttagcacaattcgaaaaaccagtacttatgcaagacatcgacgaaggggccaccaatctccctgttgatgtgcagggtttatacgatcaactatgtctagcgattgataagcaacgcgtgattccttttgaagtacaggatcaagtcattgcaatagtaggcaatcgagcagcgcgcgactctctctatcgagagaaggcgacgacagaagcggagagcctacataagtatttgcgaaacattctgcacgaagccaaggtcgctgccaagaatgaataccacgaaacgggctggaaccacgctgtgcacacccctttgatcaaactcgcctactcctcgactgagcctgaagagggcttcactttgccaccacaagtcccatcttcgtcgtttagttcggaccggtcagccagtgctcgtgtcgtctacaccatgtccgctaccatccacagagaatacacaccgaggaagcgtatactgccaacagccaggttcgtcacgcgcaagcttccgatctccacgccctccgccaccacctcctcccctgtacctccactgaccatccctccaccacacacgcatgcttccattggggtcgctggttcgatatctgggtctgtgctctctgccacggcaagatcagagattgaagtagatggtgtcacctacaatcgtagcgatagtaagagagtcgactacgcattggtggtggacattaaggataatgcccctttgcgcaaggtcttgaactttgtgtggaatgaatgcctctaccgaaatgtactgccgcacatcaatcagtctttttatctccctttgcagctcagtccaattgcctgctccattgagacaaaaagggagctgaatctcgcgaaccctttggtacaactcggtacctgggtggcggcttggcataaacggatgcgcattctgcgcaaatatctccttgataccgtcgacgagctgagcagtcagagatcgaccgagaatgcacgccttccgactaccctcctgatcaaagtggtaaaccatgattggaggctgtattttgtctgtgacaggggcaactgtatcgatgtctgcggccctgttgagatcggctccacgtccaacttgatgaacatctatatcctgcttaccacactcgaagcgatcaaggattggattgagacgacatttcgccagggcctcgaggaatggttcatgtgcgagaatcttcaatgatgagcgcaccccgtccacttgcaactaggatagctgattgagaagtagcgtccttttctcaagtctgcttactgcagtatgtatctacctaaatgtaaatgtacctaccttcaatgttagcgttgtcatggttgacttcatgcgcaaccgcaaccgcgaggggttgcccaatccgaggaggcaatcactcgcggtattgttgcagtgtattacctcccaggccctcccatgactctctgtgacttcccctatgataacaatgccacctagaagaacctgtctaccgtcgtgtcctcgtcattcgagggctcgatgtcctgtctgcgctaaaaatctgatgagccattaatgaattgattcattgcattcg

SEQ ID NO: 37294 - DNA, 636 bp, Muscodor strobelii
  misc_feature: SGI cDNA ID NO. 572940
  misc_feature: Elevated expression when VOC is produced
  misc_feature: Encodes the peptide sequence at SEQ ID NO 37295
atgtatctgtcacttctgaaccacgagatcgcacgcctcgttcacatagatccgaacgcgtccaaagccgagctcatcgtagggcttcaagtacttcagatctacgccactctgaccgcgatagacagcgatgcgtctcggacgaaccaagcccccgagatcccagatgaatactctttctatataatggcttataatcatcagctgttcatgtctgacaactatagtgctttcgatatcgatagcatcggccatgacaacgagacgtgggaagatttcatatacgcagaaacacgacgaaggacagcattgttctggtttctacaaagccgagtcctaaacatcaaccgggggttcatatgccctccgataatggggtatcgcggtctggcactcccctcaccaaagtccctctgggctgcaaggacaaggaaggaatgggaagatgcgcacgcacgaatacgcacacaagggggacggcacggaccttacgggacgagcatgcacacgctcggagacctcatcgacgcgcaatcagcaccgccgcactcgtattactccgaacagagacgacaatggcttgcgaatgcagggcaagaaggagtcctcctcttgatcggagcgagcatgatctga

SEQ ID NO: 37295 - protein, 211 aa, Muscodor strobelii
  misc_feature: SGI Peptide ID NO. 572940
  misc_feature (21)..(211): NCBI GI: 242783875 Blast Desc: conserved [Talaromyces stipitatus ATCC 10500] gi|218720421|gb|EED19840.1| conserved [Talaromyces stipitatus ATCC 10500]
  misc_feature (21)..(211): NCBI GI: 212545625 Blast Desc: conserved [Penicillium marneffei ATCC 18224] gi|210064486|gb|EEA18581.1| conserved [Penicillium marneffei ATCC 18224]
  misc_feature (21)..(210): NCBI GI: 212527562 Blast Desc: C6 finger domain protein, [Penicillium marneffei ATCC 18224] gi|210073336|gb|EEA27423.1| C6 finger domain protein, [Penicillium marneffei ATCC 18224]
  misc_feature (87)..(148): NCBI GI: 46115252 Blast Desc: FG03468.1 [Gibberella zeae PH-1]
  misc_feature (1)..(153): NCBI GI: 115387607 Blast Desc: [Aspergillus terreus NIH2624] gi|114195393|gb|EAU37093.1| [Aspergillus terreus NIH2624]
  misc_feature (90)..(148): NCBI GI: 67532272 Blast Desc: AN4485.2 [Aspergillus nidulans FGSC A4] gi|40741638|gb|EAA60828.1| AN4485.2 [Aspergillus nidulans FGSC A4] gi|259482692|tpe|CBF77412.1| TPA: C6 finger domain protein,
  misc_feature (90)..(148): NCBI GI: 145246258 Blast Desc: An12g02990 [Aspergillus niger] gi|134080092|emb|CAK41138.1| protein product [Aspergillus niger]
  misc_feature: Useful for introducing or modulating the production of volatile compounds
MYLSLLNHEIARLVHIDPNASKAELIVGLQVLQIYATLTAIDSDASRTNQAPEIPDEYSFYIMAYNHQLFMSDNYSAFDIDSIGHDNETWEDFIYAETRRRTALFWFLQSRVLNINRGFICPPIMGYRGLALPSPKSLWAARTRKEWEDAHARIRTQGGRHGPYGTSMHTLGDLIDAQSAPPHSYYSEQRRQWLANAGQEGVLLLIGASMI

SEQ ID NO: 37296 - DNA, 2855 bp, Muscodor strobelii
  misc_feature: SGI EST ID NO. CUFF.89199.0
  misc_feature: Variant of the nucleotide sequence at SEQ ID NO 37294
gtcgaacgatcatcagtcaaggttaagctgggagttacgcgacagccaacttaagcctctgaaaaatttggaaacgttctagacaccataatgtcgacgaccacaaaagacaacgatggcgatagtatacgcttctgcaaactgtgcaataagccgataatgagtgaaagcgcttacaaacgtcacgtcaactactgtcgccgcacattgtccaagcccaagaaacgcaagcgctcttgtaagagctgtcacatcgctaaatccaagtgctcctttgaatcaccatgcactcgttgtgtttcgaagagcctgctctgcgagtatgagaggccgcaagcatcaacaccgggcaatgaatcgtccaacaaacctcaagatacggccgtgtcagaaggctccgaaggtagcgcggacagcagcgcaggtgaatgcatggtcgaagggccattattgtcggagcggtatactcctactatacagccaccgcggacagcaacggaacttcgcgaagacgttacccaacaagctagcatgaaaatattacttgaagtcatgcaaaggctcccggtaatgatgagtagcatagagatgtttccctttttctttcacggaccgagcacggagtacgccataccagagcctgttatcaaatgcatgcaaatatcacagctatttctgcaccgcaacgcgagccctcatgaccaagcgatgtatctgtcacttctgaaccacgagatcgcacgcctcgttcacatagatccgaacgcgtccaaagccgagctcatcgtagggcttcaagtacttcagatctacgccactctgaccgcgatagacagcgatgcgtctcggacgaaccaagcccccgagatcccagatgaatactctttctatataatggcttataatcatcagctgttcatgtctgacaactatagtgctttcgatatcgatagcatcggccatgacaacgagacgtgggaagatttcatatacgcagaaacacgacgaaggacagcattgttctggtttctacaaagccgagtcctaaacatcaaccgggggttcatatgccctccgataatggggtatcgcggtctggcactcccctcaccaaagtccctctgggctgcaaggacaaggaaggaatgggaagatgcgcacgcacgaatacgcacacaagggggacggcacggaccttacgggacgagcatgcacacgctcggagacctcatcgacgcgcaatcagcaccgccgcactcgtattactccgaacagagacgacaatggcttgcgaatgcagggcaagaaggagtcctcctcttgatcggagcgagcatgatctgacttggcttacatttatcctctaagtcacatactgtcagaccgttctatacccactcagtaggctgagtatatattgggaacagctcgtttactatcgctacctcattcacaagcaggctatgtatgagtatattcgcgctatttatctgttctgtctgttctagattctaattaccagacacgacgcactggcgttttattgacgccgtatagatctagaaaatttaaagcctgccgaataatttccattgttctaaattgattcaaaaattcgggatgtcatgtttagaaacttaaatgcgatggctgaatcaggcatctatcatcacttagatcaaatagacaaaaataccacaggttataaaagaccatattctggtatgaccgaaattaccgccagacggacaagaccttgaagcaactccttcttatgattcccttgcaatagttcgtgctacgccgtgtgagaggatgatcatatcggggaagcaggagtaaatcaactccacgcacctgtaacaagctcgatattgaatttgcagactgcaacgttttataaaaagcaaggccactcgacgttgtcttccatcggctatgcgcactgataacttggtccgattcagtcttgtacatgagttgcagcgtgatccgccctagatctctcatcatgttggcatcggtgctttcgcctgccgcgttctgtttaaactcgtggaccactgaactcgtcatttagtattgtatcttcctggggtatttataaggatacttatcgtactcagtttgacgtcgccactaagatttagcacaacctggttgcaatcgaggccaccgcaatttaggccttgcgcgtcgagatatagcagaccatcgaccatctataaaatcatcaaacttcgatcgggctatcggcggagaaaaatgacttacttgtctaagaacggcaccaagttggtcttcatcgggataggccggacaggctacaaggcagccgagatgagtgatcatgtcctcgaacacaacatgcaatgtatcgtccgtcgagaaggtctccagcgccgtgatgatgttgctgtgcctgacgcgtcggcaccagtagagcacctcttctgccttctttagagggaagctcttgatgacgacacaagcgaatggtcgcgtcttctgcaccgcaaaggtggcggacccggcaaattccacgcggtacgacatgttgtatcgctcgtgcggagccccccattgtctcctcagaagtgcggacgagttttccatgttggttgtcttctcggacgatgttttgttatcgtctcttgggaatggtcgcttcaataatcttttaggaggcgggcctatttcggtacggccgaccttctcagcgcgggcgagcggcgcaacagaaggcgccttggtcccatagcccaacagatcgatttgagtatgccgaccgagagctttctccatggtaccacaagtatgatgataattttgcgtaagctgtgctgaccttgtgc

SEQ ID NO: 37297 - DNA, 933 bp, Muscodor strobelii
  misc_feature: SGI cDNA ID NO. 572941
  misc_feature: Elevated expression when VOC is produced
  misc_feature: Encodes the peptide sequence at SEQ ID NO 37298
atggagaaagctctcggtcggcatactcaaatcgatctgttgggctatgggaccaaggcgccttctgttgcgccgctcgcccgcgctgagaaggtcggccgtaccgaaataggcccgcctcctaaaagattattgaagcgaccattcccaagagacgataacaaaacatcgtccgagaagacaaccaacatggaaaactcgtccgcacttctgaggagacaatggggggctccgcacgagcgatacaacatgtcgtaccgcgtggaatttgccgggtccgccacctttgcggtgcagaagacgcgaccattcgcttgtgtcgtcatcaagagcttccctctaaagaaggcagaagaggtgctctactggtgccgacgcgtcaggcacagcaacatcatcacggcgctggagaccttctcgacggacgatacattgcatgttgtgttcgaggacatgatcactcatctcggctgccttgtagcctgtccggcctatcccgatgaagaccaacttggtgccgttcttagacaaatggtcgatggtctgctatatctcgacgcgcaaggcctaaattgcggtggcctcgattgcaaccaggttgtgctaaatcttagtggcgacgtcaaactgatggtccacgagtttaaacagaacgcggcaggcgaaagcaccgatgccaacatgatgagagatctagggcggatcacgctgcaactcatgtacaagactgaatcggaccaagttatcagtgcgcatagccgatggaagacaacgtcgagtggccttgctttttataaaacgttgcagtctgcaaattcaatatcgagcttgttacagcacgaactattgcaagggaatcataagaaggagttgcttcaaggtcttgtccgtctggcggtaatttcggtcataccagaatatggtcttttataa

SEQ ID NO: 37298 - protein, 310 aa, Muscodor strobelii
  misc_feature: SGI Peptide ID NO. 572941
  misc_feature (64)..(307): NCBI GI: 156050909 Blast Desc: SS1G_08042 [Sclerotinia sclerotiorum 1980] gi|154692442|gb|EDN92180.1| SS1G_08042 [Sclerotinia sclerotiorum 1980]
  misc_feature (7)..(302): NCBI GI: 154278106 Blast Desc: [Ajellomyces capsulatus NAm1] gi|150413461|gb|EDN08844.1| [Ajellomyces capsulatus NAm1]
  misc_feature (69)..(303): NCBI GI: 242763421 Blast Desc: conserved [Talaromyces stipitatus ATCC 10500] gi|218723767|gb|EED23184.1| conserved [Talaromyces stipitatus ATCC 10500]
  misc_feature (69)..(302): NCBI GI: 242797852 Blast Desc: conserved [Talaromyces stipitatus ATCC 10500] gi|218716392|gb|EED15813.1| conserved [Talaromyces stipitatus ATCC 10500]
  misc_feature (17)..(277): NCBI GI: 238492567 Blast Desc: conserved [Aspergillus flavus NRRL3357] gi|220696014|gb|EED52356.1| conserved [Aspergillus flavus NRRL3357]
  misc_feature (90)..(302): NCBI GI: 226292434 Blast Desc: conserved [Paracoccidioides brasiliensis Pb18]
  misc_feature (62)..(302): NCBI GI: 159124388 Blast Desc: AFUB_075350 [Aspergillus fumigatus A1163]
  misc_feature (64)..(302): NCBI GI: 255942022 Blast Desc: Pc16g14830 [Penicillium chrysogenum Wisconsin 54-1255] gi|211586403|emb|CAP94153.1| Pc16g14830 [Penicillium chrysogenum Wisconsin 54-1255]
  misc_feature (64)..(302): NCBI GI: 255952745 Blast Desc: Pc21g00510 [Penicillium chrysogenum Wisconsin 54-1255] gi|211588836|emb|CAP94948.1| Pc21g00510 [Penicillium chrysogenum Wisconsin 54-1255]
  misc_feature (64)..(302): NCBI GI: 255951751 Blast Desc: Pc23g00830 [Penicillium chrysogenum Wisconsin 54-1255] gi|211904263|emb|CAP79577.1| Pc23g00830 [Penicillium chrysogenum Wisconsin 54-1255]
  misc_feature: Useful for introducing or modulating the production of volatile compounds
MEKALGRHTQIDLLGYGTKAPSVAPLARAEKVGRTEIGPPPKRLLKRPFPRDDNKTSSEKTTNMENSSALLRRQWGAPHERYNMSYRVEFAGSATFAVQKTRPFACVVIKSFPLKKAEEVLYWCRRVRHSNIITALETFSTDDTLHVVFEDMITHLGCLVACPAYPDEDQLGAVLRQMVDGLLYLDAQGLNCGGLDCNQVVLNLSGDVKLMVHEFKQNAAGESTDANMMRDLGRITLQLMYKTESDQVISAHSRWKTTSSGLAFYKTLQSANSISSLLQHELLQGNHKKELLQGLVRLAVISVIPEYGLL

SEQ ID NO: 37299 - DNA, 1800 bp, Muscodor strobelii
  misc_feature: SGI EST ID NO. CUFF.89200.1
  misc_feature: Variant of the nucleotide sequence at SEQ ID NO 37297
gcacaaggtcagcacagcttacgcaaaattatcatcatacttgtggtaccatggagaaagctctcggtcggcatactcaaatcgatctgttgggctatgggaccaaggcgccttctgttgcgccgctcgcccgcgctgagaaggtcggccgtaccgaaataggcccgcctcctaaaagattattgaagcgaccattcccaagagacgataacaaaacatcgtccgagaagacaaccaacatggaaaactcgtccgcacttctgaggagacaatggggggctccgcacgagcgatacaacatgtcgtaccgcgtggaatttgccgggtccgccacctttgcggtgcagaagacgcgaccattcgcttgtgtcgtcatcaagagcttccctctaaagaaggcagaagaggtgctctactggtgccgacgcgtcaggcacagcaacatcatcacggcgctggagaccttctcgacggacgatacattgcatgttgtgttcgaggacatgatcactcatctcggctgccttgtagcctgtccggcctatcccgatgaagaccaacttggtgccgttcttagacaaatggtcgatggtctgctatatctcgacgcgcaaggcctaaattgcggtggcctcgattgcaaccaggttgtgctaaatcttagtggcgacgtcaaactgatggtccacgagtttaaacagaacgcggcaggcgaaagcaccgatgccaacatgatgagagatctagggcggatcacgctgcaactcatgtacaagactgaatcggaccaagttatcagtgcgcatagccgatggaagacaacgtcgagtggccttgctttttataaaacgttgcagtctgcaaattcaatatcgagcttgttacaggtgcgtggagttgatttactcctgcttccccgatatgatcatcctctcacacggcgtagcacgaactattgcaagggaatcataagaaggagttgcttcaaggtcttgtccgtctggcggtaatttcggtcataccagaatatggtcttttataacctgtggtatttttgtctatttgatctaagtgatgatagatgcctgattcagccatcgcatttaagtttctaaacatgacatcccgaatttttgaatcaatttagaacaatggaaattattcggcaggctttaaattttctagatctatacggcgtcaataaaacgccagtgcgtcgtgtctggtaattagaatctagaacagacagaacagataaatagcgcgaatatactcatacatagcctgcttgtgaatgaggtagcgatagtaaacgagctgttcccaatatatactcagcctactgagtgggtatagaacggtctgacagtatgtgacttagaggataaatgtaagccaagtcagatcatgctcgctccgatcaagaggaggactccttcttgccctgcattcgcaagccattgtcgtctctgttcggagtaatacgagtgcggcggtgctgattgcgcgtcgatgaggtctccgagcgtgtgcatgctcgtcccgtaaggtccgtgccgtcccccttgtgtgcgtattcgtgcgtgcgcatcttcccattccttccttgtccttgcagcccagagggactttggtgaggggagtgccagaccgcgataccccattatcggagggcatatgaacccccggttgatgtttaggactcggctttgtagaaaccagaacaatgctgtcctatagacccgtgagataatgaacgttttgggaacgaaacatgaatcgagactcaccttcgtcgtg

SEQ ID NO: 37300 - DNA, 1821 bp, Muscodor strobelii
  misc_feature: SGI cDNA ID NO. 572942
  misc_feature: Reduced expression when VOC is produced
  misc_feature: Encodes the peptide sequence at SEQ ID NO 37301
atggaggtgctggtaactgttgactggtgggtgcgcgccttcacaccactgacatcagcatcatacgaggagtctcccagactacaaagtctaccatacgaactcgttgcctacgtcgtgagagacttggatatcgaagacgtcttcaattggtcgctatgcagcaagcactttcagtacatcattcgagaagaccgcttctgcaagccagtggtcatggctaaagccccaagtacgctggaggccgaagaagcacgggcgacagggcatttcgcaagggcccttcggcgcttggcaaagcgacgctacgctctgtcgcacgcgtccccctatgttctggggattgttggtcttgctgactcctacgagtttatcgatggcaagatatgctacattattgaatctctgccgaagcgatggctcagaattctcgacgtcaacagatcgaccgactgggaaattgtggtggacattccggcgcttgtcggcattgccgtacctcgggcggcaaatagttgcaagtataaattcaaggtgctctaccaagcagcggatatcgtcagctgccttttttcttatgcaacagaataccacctgataatattcaatccgaaggagcacgcactattgaaaacatatcaccttgattccgctcaccgcattttcgttaggaataatgacaagttcctatatgtcggcactcacactggagagggcgccgatggcttccgcaaatgggttcttaaaggcttggatctcggcagtctcgaatggcttcaacaaccgagaatgcatttaaatgatatgtcgggatacgacataggatcatctgtctgctttgagatctttgacgggtatttctacgggctttcgaaccagtctctgtttgaaattgacgacccaggctggacttctcactattactgctttcgcttccccctcgacgagccttcgcgcgagacaacccaagtcatgcacaaagatgacagttggcgacggcaccatgtggaaggcccaattgacgatagatggggctttcttaagtttgagagagacgaagcttcaggtagcatctctatcatagaatgccgtagagagtggctgaagggccgagctggcagtcaacgcacttactacaccactaaagtggactttcgccgagaacatttgccagcagcagatcagcagccggcaatgaacatcaccgcgggcagatgcaacgactctgtcccttttgatgatgttgtaccacggcgatcggttcatcaagtacatgaaggtgacaatagctcggtaccatcaatgctaccgtaccacgtcaatgagatctctatgtggccacctgaagaggttccattgcgcctcaaaccgtccttagacaggattcaagacgtcctgcaccctgaaggcaaccaaggctgcattgaagcaattggagacgagcgatctgttatctattcaaccagtgacggctctaaagacggagtcaaagtcttgatcattctctccttcgaccccgcaatcaagttcgagggaatggagtttggcggggatattgtgggccaaagaatcgagacgtgcagcgagcgagaagtttcacagcagccaacacatagcatttcaatgggggctgaaagaagttcgcgctccttgttggcgcaaccagttgatacgacggtattcaaaagcgttgcggctgcgcgatcagcagatcagtttcttccacctagaatcgcccctcctcaggacaccaagtcctgggcttatgtttccagagccatgcatcatgggatgggacaaaagttcttcttcagtttgtga

SEQ ID NO: 37301 - protein, 606 aa, Muscodor strobelii
  misc_feature: SGI Peptide ID NO. 572942
  misc_feature (26)..(73): Pfam Id: PF00646 Pfam Desc: F-box domain
  misc_feature (27)..(390): NCBI GI: 156065869 Blast Desc: SS1G_00945 [Sclerotinia sclerotiorum 1980] gi|154691804|gb|EDN91542.1| SS1G_00945 [Sclerotinia sclerotiorum 1980]
  misc_feature (28)..(494): NCBI GI: 171691779 Blast Desc: protein product [Podospora anserina] gi|170945838|emb|CAP72639.1| protein product [Podospora anserina]
  misc_feature (28)..(385): NCBI GI: 145610965 Blast Desc: MGG_00768 [Magnaporthe grisea 70-15] gi|145018297|gb|EDK02576.1| MGG_00768 [Magnaporthe grisea 70-15]
  misc_feature (28)..(604): NCBI GI: 116179846 Blast Desc: CHGG_00551 [Chaetomium globosum CBS 148.51] gi|88184848|gb|EAQ92316.1| CHGG_00551 [Chaetomium globosum CBS 148.51]
  misc_feature (31)..(513): NCBI GI: 256732063 Blast Desc: NECHADRAFT_93516 [Nectria haematococca mpVI 77-13-4]
  misc_feature (28)..(522): NCBI GI: 46137063 Blast Desc: FG10047.1 [Gibberella zeae PH-1]
  misc_feature (28)..(370): NCBI GI: 85090973 Blast Desc: NCU04576 [Neurospora crassa OR74A] gi|28920054|gb|EAA29439.1| [Neurospora crassa OR74A]
  misc_feature (28)..(370): NCBI GI: 28950016 Blast Desc: [Neurospora crassa]
  misc_feature (58)..(385): NCBI GI: 154301733 Blast Desc: BC1G_10018 [Botryotinia fuckeliana B05.10] gi|150855680|gb|EDN30872.1| BC1G_10018 [Botryotinia fuckeliana B05.10]
  misc_feature (28)..(379): NCBI GI: 225685312 Blast Desc: F-box domain-containing protein [Paracoccidioides brasiliensis Pb03]
  misc_feature: Useful for introducing or modulating the production of volatile compounds
MEVLVTVDWWVRAFTPLTSASYEESPRLQSLPYELVAYVVRDLDIEDVFNWSLCSKHFQYIIREDRFCKPVVMAKAPSTLEAEEARATGHFARALRRLAKRRYALSHASPYVLGIVGLADSYEFIDGKICYIIESLPKRWLRILDVNRSTDWEIVVDIPALVGIAVPRAANSCKYKFKVLYQAADIVSCLFSYATEYHLIIFNPKEHALLKTYHLDSAHRIFVRNNDKFLYVGTHTGEGADGFRKWVLKGLDLGSLEWLQQPRMHLNDMSGYDIGSSVCFEIFDGYFYGLSNQSLFEIDDPGWTSHYYCFRFPLDEPSRETTQVMHKDDSWRRHHVEGPIDDRWGFLKFERDEASGSISIIECRREWLKGRAGSQRTYYTTKVDFRREHLPAADQQPAMNITAGRCNDSVPFDDVVPRRSVHQVHEGDNSSVPSMLPYHVNEISMWPPEEVPLRLKPSLDRIQDVLHPEGNQGCIEAIGDERSVIYSTSDGSKDGVKVLIILSFDPAIKFEGMEFGGDIVGQRIETCSEREVSQQPTHSISMGAERSSRSLLAQPVDTTVFKSVAAARSADQFLPPRIAPPQDTKSWAYVSRAMHHGMGQKFFFSL

SEQ ID NO: 37302 - DNA, 3225 bp, Muscodor strobelii
  misc_feature: SGI EST ID NO. CUFF.89229.1
  misc_feature: Variant of the nucleotide sequence at SEQ ID NO 37300
ccgggacctaataaaatacattcttagcaatagctcgtatattttggcacccggtcttacgaacttggaggctctgtaacgtgagcagagccgcaacatggacgccacttaaagcctagacaagtgctgcaagccctacacgccatggaggtgctggtaactgttgactggtgggtgcgcgccttcacaccactgacatcagcatcatacgaggagtgaatggcccgcctgctttggacggcaaggggttaacatcaggcacatgacgaatggctctgttcaggtctcccagactacaaagtctaccatacgaactcgttgcctacgtcgtgagagacttggatatcgaagacgtcttcaattggtcgctatgcagcaagcactttcagtacatcattcgagaagaccgcttctgcaagccagtggtcatggctaaagccccaagtacgctggaggccgaagaagcacgggcgacagggcatttcgcaagggcccttcggcgcttggcaaagcgacgctacgctctgtcgcacgcgtccccctatgttctggggattgttggtcttgctgactcctacgagtttatcgatggcaagatatgctacattattgaatctctgccgaagcgatggctcagaattctcgacgtcaacagatcgaccgactgggaaattgtggtggacattccggcgcttgtcggcattgccgtacctcgggcggcaaatagttgcaagtataaattcaaggtgctctaccaagcagcggatatcgtcagctgccttttttcttatgcaacagaataccacctgataatattcaatccgaaggagcacgcactattgaaaacatatcaccttgattccgctcaccgcattttcgttaggaataatgacaagttcctatatgtcggcactcacactggagagggcgccgatggcttccgcaaatgggttcttaaaggcttggatctcggcagtctcgaatggcttcaacaaccgagaatgcatttaaatgatatgtcgggatacgacataggatcatctgtctgctttgagatctttgacgggtatttctacgggctttcgaaccagtctctgtttgaaattgacgacccaggctggacttctcactattactgctttcgcttccccctcgacgagccttcgcgcgagacaacccaagtcatgcacaaagatgacagttggcgacggcaccatgtggaaggcccaattgacgatagatggggctttcttaagtttgagagagacgaagcttcaggtagcatctctatcatagaatgccgtagagagtggctgaagggccgagctggcagtcaacgcacttactacaccactaaagtggactttcgccgagaacatttgccagcagcagatcagcagccggcaatgaacatcaccgcgggcagatgcaacgactctgtcccttttgatgatgttgtaccacggcgatcggttcatcaagtacatgaaggtgacaatagctcggtaccatcaatgctagtgcggagcaaaactcatcactgctcttatttccgttcgtgtcaagccttcatcgatcttcttgacgatacttcactcaaaaacgatgacaaacaatgtatacgactcagggccggatgtaggcgttcaaagccgactacgagcgtcgcatcaaattgctgcacatctgactccccgcgccaacctaccgatgtggatacccaacagccgtaccacgtcaatgagatctctatgtggccacctgaagaggttccattgcgcctcaaaccgtccttagacaggattcaagacgtcctgcaccctgaaggcaaccaaggctgcattgaagcaattggagacgagcgatctgttatctattcaaccagtgacggctctaaagacggagtcaaagtcttgatcattctctccttcgaccccgcaatcaagttcgagggaatggagtttggcggggatattgtgggccaaagaatcgagacgtgcagcgagcgagaagtttcacagcagccaacacatagcatttcaatgggggctgaaagaagttcgcgctccttgttggcgcaaccagttgatacgacggtattcaaaagcgttgcggctgcgcgatcagcagatcagtttcttccacctagaatcgcccctcctcaggacaccaagtcctgggcttatgtttccagagccatgcatcatgggatgggacaaaagttcttcttcagtttgtgatctcgcaaaactttttaattgactgagaaaacggaggattgcaacgtactatccaagcacgactgcagtgttggcatggcatgttgcaatgaattgcttctatgcagcgcccgtcgagaaggaactcatacaggctctcgtaatagaccctggagccaaatactttacgcgttgaagaaagtacttgcgaaatattagataagcatgcggaccgatcatcgaagttaaaaattagagttatggagtttgtacacttttcggctaaagagcaagcaagaatcatagttctaaaaattagggtctgtgactgattggtactgtacagctacggaagtatcatgatgtttatacttgcatattgcctccagtgctgaggagccatgatatcgaacgtaattggtatataactcctgatcgtagaggttacgaaacaattcgcatgagcgagacagtgccgttaggtcttttggctgccaaagattggcaatctcgcgatgaagactagagacattgtatggctggtcagacagctgattgaggagcgcaaagagccgggcagagacagagcggccgaaatggatggccaacagcacggtaatctgacgtagaagccacatcaaggtgaatcaaagtctgaatactcattatcgttttctcatacatacgagcgtgaactctacagtacacggagaggaagccgcccacccggaacatgatccctctgtatcgcaatgttcacctagcatatatgtagggaagtcttttagtactgtagtataatgatacataatggctgaacatgatatcttgtgcatctacctagagtcgccatgtactgatatgtaaaggatacgagctggtaaaaatccaattactggattgaagattaataaaagccctggaatttcacccttagcaccgacgtagcccctcttaagcacggaatagggcgtccaagacgtattcttttaaggcgacagtcctt

SEQ ID NO: 37303 - DNA, 1617 bp, Muscodor strobelii
  misc_feature: SGI cDNA ID NO. 572943
  misc_feature: Encodes the peptide sequence at SEQ ID NO 37304
atgacgtcgacgacagcaacggaagacacgccgttgctaagctcatgcgccgagagtcccacgctgtccggtgtgagctcggagatctatcgtaatgatacggccataagtcaagagcagcaagtagatttggatacgccgaaccagaaagtctcacagaaacgcggtgtcgctatcatcttgagtgtctatgtgctcatcttcttgcttggtccaatatcagacgaagcagctgcttacctacccatcttagcgatgaatatgagcggcataaccatggcgcaatccaccattgccgaggacctagatgcctacgagtatgcaatgtggttcacgacgtctttcctggtcgccatgtcatccatgtcgccgctcgtcggcaagctagcgactatcttcccaccgaggatcatgctgttagtctctgcggctgagtttgcattggggagtgtaattacctcgcaagcaagaacttttgcgggtttcatccttggccgcgtgatcacgggggctggtggaggtggtatcatggttctctcctttgttcttgtgctcgagctcacgacgaagagaaataggggactttttatcgggcttttgaataccggcctcacatcgggtgtctcgcttggagccgttgtttttggcgcattgcttacaacggtcggttggtgcatgaccgttgtactgttccttttcggactgtcgaacaacgtggagccaatcccaatgggcttgtctctcgtttcgcttgttgtgtttgtttgcattgagaagttcggcgcagttgatccaattatcccattgactgtccttcagagccgtggtgcgttgctctcgtgtgtgtctcaacttggcttcatggccgctcggtgggcagtcttgttttatacacccattactgctctcgctatcttcggcttcagccctgccgccagtggtagtctcctcgttcccaccaatctcggatttgcacttggcggcattctcgttggggctttccacgtccgccgcccaggaagcttctggtttcccgccttgctctgctacgcactcttcggtctcagtcttctagccctctccatatccacaactgaggagacacccacctcgctttatattgtcattgtcttcatcaatggtctattcactggcggtgggttgaactacactttggctcatcttctgcacctcacattgccggagacacattacgtcgctacgagtctccttggaacttttagagggtttgcgggtagttttggctctgcgatcggcggggggatattcgcaaggactctgcgtgggactcttgaggagggactcaaggccattgacggaagtgaacagctcagaaaaggtaggcaggaactgatcaggaagctgattggaagcccggcactggtgtacaacggcgggttgacagcagaagaacacacagttgctgttcaagggtatactgacgcggtgaaagtactgttccgggctggtgtcgcgttgactgcgatcgtactggtgcttcaagctggcaccggatggaaggggccagcggacacagtgaaagatgatccggaggtcgtaagagacggagatggaatgcagagcgaaagggcgtag

SEQ ID NO: 37304 - protein, 538 aa, Muscodor strobelii
  misc_feature: SGI Peptide ID NO. 572943
  misc_feature (76)..(423): Pfam Id: PF07690 Pfam Desc: Major Facilitator Superfamily
  misc_feature (47)..(518): NCBI GI: 145612605 Blast Desc: MGG_12385 [Magnaporthe grisea 70-15] gi|145019745|gb|EDK03973.1| MGG_12385 [Magnaporthe grisea 70-15]
  misc_feature (12)..(536): NCBI GI: 261351926 Blast Desc: conserved [Verticillium albo-atrum VaMs.102]
  misc_feature (48)..(523): NCBI GI: 156056034 Blast Desc: SS1G_05369 [Sclerotinia sclerotiorum 1980] gi|154703153|gb|EDO02892.1| SS1G_05369 [Sclerotinia sclerotiorum 1980]
  misc_feature (33)..(474): NCBI GI: 154310411 Blast Desc: BC1G_07125 [Botryotinia fuckeliana B05.10] gi|150851457|gb|EDN26650.1| BC1G_07125 [Botryotinia fuckeliana B05.10]
  misc_feature (43)..(533): NCBI GI: 189197573 Blast Desc: conserved [Pyrenophora tritici-repentis Pt-1C-BFP] gi|187981072|gb|EDU47698.1| conserved [Pyrenophora tritici-repentis Pt-1C-BFP]
  misc_feature (6)..(531): NCBI GI: 256732029 Blast Desc: NECHADRAFT_40720 [Nectria haematococca mpVI 77-13-4]
  misc_feature (37)..(523): NCBI GI: 46137027 Blast Desc: FG10029.1 [Gibberella zeae PH-1]
  misc_feature (2)..(514): NCBI GI: 116197747 Blast Desc: CHGG_07029 [Chaetomium globosum CBS 148.51] gi|88178308|gb|EAQ85776.1| CHGG_07029 [Chaetomium globosum CBS 148.51]
  misc_feature (26)..(531): NCBI GI: 169777835 Blast Desc: [Aspergillus oryzae RIB40] gi|83772120|dbj|BAE62250.1| protein product [Aspergillus oryzae]
  misc_feature (119)..(524): NCBI GI: 169616320 Blast Desc: SNOG_11331 [Phaeosphaeria nodorum SN15] gi|160703154|gb|EAT81039.2| SNOG_11331 [Phaeosphaeria nodorum SN15]
MTSTTATEDTPLLSSCAESPTLSGVSSEIYRNDTAISQEQQVDLDTPNQKVSQKRGVAIILSVYVLIFLLGPISDEAAAYLPILAMNMSGITMAQSTIAEDLDAYEYAMWFTTSFLVAMSSMSPLVGKLATIFPPRIMLLVSAAEFALGSVITSQARTFAGFILGRVITGAGGGGIMVLSFVLVLELTTKRNRGLFIGLLNTGLTSGVSLGAVVFGALLTTVGWCMTVVLFLFGLSNNVEPIPMGLSLVSLVVFVCIEKFGAVDPIIPLTVLQSRGALLSCVSQLGFMAARWAVLFYTPITALAIFGFSPAASGSLLVPTNLGFALGGILVGAFHVRRPGSFWFPALLCYALFGLSLLALSISTTEETPTSLYIVIVFINGLFTGGGLNYTLAHLLHLTLPETHYVATSLLGTFRGFAGSFGSAIGGGIFARTLRGTLEEGLKAIDGSEQLRKGRQELIRKLIGSPALVYNGGLTAEEHTVAVQGYTDAVKVLFRAGVALTAIVLVLQAGTGWKGPADTVKDDPEVVRDGDGMQSERA

SEQ ID NO: 37305 - DNA, 2471 bp, Muscodor strobelii
  misc_feature: SGI EST ID NO. CUFF.89207.0
  misc_feature: Variant of the nucleotide sequence at SEQ ID NO 37303
ccagcatgtagcaggggacgttatccggtagcatcagcttaccaatccggcgatgatagcgtcgtagattgatgatcaagatcattttatttatgaaacctagcagattgtagtcttttggtctatttctgctctctgtctcaggcaataatgatagtttctttctccccccctcatttcttcccttgttagcacgcggatctcggtatcagtcacctgctatgatcgcaattagtggatgtctctaatgcgaaggaacctgtgtctggattccctagtctcggtcggataaagaaaggcaactcatgtcgagtcggagactgtgatattatcatacccgaaaattgcttcgtcggaggactttaggctacaattgtcgggtcattcaagggccaaatggagtccaacaaccgcgaatcgccgttcggagacgacatgacgtcgacgacagcaacggaagacacgccgttgctaagctcatgcgccgagagtcccacgctgtccggtgtgagctcggagatctatcgtaatgatacggccataagtcaagagcagcaagtagatttggatacgccgaaccagaaagtctcacagaaacgcggtgtcgctatcatcttgagtgtctatgtgctcatcttcttgcttgcgatgaatatgagcggcataaccatggcgcaatccaccattgccgaggacctagatgcctacgagtatgcaatgtggttcacgacgtctttcctggtcgccatgtcatccatgtcgccgctcgtcggcaagctagcgactatcttcccaccgaggatcatgctgttagtctctgcggctgagtttgcattggggagtgtaattacctcgcaagcaagaacttttgcgggtttcatccttggccgcgtgatcacgggggctggtggaggtggtatcatggttctctcctttgttcttgtgctcgagctcacgacgaagagaaataggggactttttatcgggcttttgaataccggcctcacatcgggtgtctcgcttggagccgttgtttttggcgcattgcttacaacggtcggttggcgagccctgttctggatacaggcccccgtaggattactgtccgggtgcgctattttcttcagcatacctcgcacgatgtcgtccaatctttccaaaagaggcgacaatatgtcaataggagataaacttaggcgtatagactattttggtgctatattcttgtgcatgaccgttgtactgttccttttcggactgtcgaacaacgtggagccaatcccaatgggcttgtctctcgtttcgcttgttgtgtttgtttgcattgagaagttcggcgcagttgatccaattatcccattgactgtccttcagagccgtggtgcgttgctctcgtgtgtgtctcaacttggcttcatggccgctcggtgggcagtcttgttttatacacccattactgctctcgctatcttcggcttcagccctgccgccagtggtagtctcctcgttcccaccaatctcggatttgcacttggcggcattctcgttggggctttccacgtccgccgcccaggaagcttctggtttcccgccttgctctgctacgcactcttcggtctcagtcttctagccctctccatatccacaactgaggagacacccacctcgctttatattgtcattgtcttcatcaatggtctattcactggcggtgggttgaactacactttggctcatcttctgcacctcacattgccggagacacattacgtcgctacgagtctccttggaacttttagagggtttgcgggtagttttggctctgcgatcggcggggggatattcgcaaggactctgcgtgggactcttgaggagggactcaaggccattgacggaagtgaacagctcagaaaaggtaggcaggaactgatcaggaagctgattggaagcccggcactggtgtacaacggcgggttgacagcagaagaacacacagttgctgttcaagggtatactgacgcggtgaaagtactgttccgggctggtgtcgcgttgactgcgatcgtactggtgcttcaagctggcaccggatggaaggggccagcggacacagtgaaagatgatccggaggtcgtaagagacggagatggaatgcagagcgaaagggcgtagacgaacgattgcttttgtttcttgcagctattgcagagcggaatgtgacatagaaccattctgtgattatcgcctccggatgttgcatataaaataagcagatagacatagaatcgcttcggggcctgagatccatacccacatgtctcatgtgaagatatccttaccatttgccacgttctaactagtacaacatttcaaagagcgatttctttcgccttccaggagagggatctgctgccatcatagtggatatggtcccctttcccatcatcggccatgactagtgtagcgtaatt

SEQ ID NO: 37306 - DNA, 2712 bp, Muscodor strobelii
  misc_feature: SGI cDNA ID NO. 572944
  misc_feature: Encodes the peptide sequence at SEQ ID NO 37307
atgaccacactggctgccagtttggtccatgaatacgcggatcgtggtcctgcggtgttcgtagtaactaccgcgactcttgtattggccaccgtcttcgttgcggcgaggttggtttgtcgcgttttcatcgtgcgccacgttagttgggatgactatttcataatcattgcatggcttttggcatttggccttagctttgcaatcgattatggcacaactaagggtctgggtcgacacgatgcagacatcagcagtggggattggaactctcttaggcgctcggaatatacctttactgtcctctataatcctgctttgatggctttcaagacctccatcttgatattctaccttcgtctttccaaaaacactcaaaaggtccttcggttagcatcttggacagtcttggttatcgtcaacctgtctggtacggtattgaccttgctcaacatcttccaatgcagtccagtggagtctgcgttcaatctcgtcaaccctccaggaagatgcctcccgcttttgaccgagttcatctgctccgctccgatcaacattgttaccgaccttgccatccttgctctgcctctgcccgtgctcactggcatgagacttcctccgaggcagaagatcatcttgatcatgacctttgctctggcctcgtttggagactcgcccgagtttgcctggaatgcatcgctatcgcttttgtggtctgcagtcgaagtaaatgtcggcattgcctgcgcctgtatcccaacactcaaacccttgatcatacgcattctccccgccatgcttgttgatccagatggtagtactcgcagagggtccgacacggctgaaaagtctactaacatgtcgtcacgcctacgccaaggttctgacaacgaacatatgctgccagcaccagcaatggtaagagaagatcactctgatcattcgccaaacttggcatacaatgacaattttgatgccccactgtcagctatggaattcctcactacacctggcatgactcttgaagcagggatggatcgcacacgtaccgccgtcaccaatgccacagcgacggaagcctctggtgtctattttggatttgtcaatatgcgcaaaccaaagagcatgattcgaacgtccgtccgagactcgttcagatattgcaccattgtgaccattctatttgtgctgtggggattttcgtatggtcttcttaccacattggctagtgttgtagcccaaatttccaacatgacggttgcagagactctcggcctgaatgctatttacttcggagccggttatttctttggtcccttactagttggcgaatggatattgcgacgcgatgaacatcaacgactggaaaagaaacaaaagaaccttgtggatgacagcattggtggtttcaaagcaacatttatgatcggattgtgtatatacggcatcggcactatcatattctggcctagcgctgtgcttacttccttcgccggattcttgatctctaattttgttgttggatttggcctcgccgttctcgaaacagccgcgaacccattcctcgcactttgtggtcctatggactacgccgagatgcggctcttattggcacaaggcgtacaagctactgccaccgttatcagcgggctgctcgctcaaaaggtgttctttataaacctgagtaccaaaggatatcaaggatcatctacgcttatcgatgtccaatggacgttcttggctataacactattttgtgttgcgctggccttatttttctactacgccccactgccagaagtgagcgatgcggaaatggagaactcgacgagatatttaccagtggatcccaaaaaacgaagcttttttggtctccaattgagatcgtggagcttaggtcttgccgttgccgctcagtggacatacgtcgctggccaagaaaccatgagcatttttttccaaaatatcttgttcccggcgaatgacgacccatctagcagcttggccttaagtgccaatgactatctcctcgtggcgcacagcgcattcgctgcgtcccgcttcttcgcggcataccttgcttacttatccccaactcatcccaaagtgccacaaccccggactatcctcaatatctgcacgggattcagtattctcactggcgtcttggtctccgccatccgccctaaaaatccgaacttgttattcattccgatggtgttgttcttcttcttcgaaggtccgatgtggccgctaatatacgccttgggacttcgtgggcaaggcaaacgtacgaaacgagcggctgcgtatatcaccatgggcgcttccggacctgctttctggccctttgtcgtatacgccatccatcaaagaggcgcaacataccaaactgcatttatcttagtacccgctcttctcgtcatctccgggttcttctccgttttccttgatctcaagcacgatgcaagagcattggtagatgcccgggttgggcctgaacagcaaagaaagatccaagatcgtgcgaatcgcgaaatggatctagacaggatcatatctaccaggagacgaatgtcaatgagtgcgaccctgtctgactacgacaaaattaacttcgtgaagaggctgtcgattgccttcggtaaacgccgagattcagaaccgcctactgctgaacaccgagaatctaagagttgtagcccgggttga

SEQ ID NO: 37307 - protein, 903 aa, Muscodor strobelii
  misc_feature: SGI Peptide ID NO. 572944
  misc_feature (14)..(828): NCBI GI: 46137025 Blast Desc: FG10028.1 [Gibberella zeae PH-1]
  misc_feature (10)..(898): NCBI GI: 85100411 Blast Desc: NCU04310 [Neurospora crassa OR74A] gi|28922490|gb|EAA31720.1| conserved [Neurospora crassa OR74A]
  misc_feature (11)..(828): NCBI GI: 171693765 Blast Desc: protein product [Podospora anserina] gi|170946831|emb|CAP73635.1| protein product [Podospora anserina]
  misc_feature (10)..(898): NCBI GI: 28950171 Blast Desc: related to L-fucose permease [Neurospora crassa]
  misc_feature (14)..(863): NCBI GI: 145613201 Blast Desc: MGG_01811 [Magnaporthe grisea 70-15] gi|145020330|gb|EDK04459.1| MGG_01811 [Magnaporthe grisea 70-15]
  misc_feature (12)..(710): NCBI GI: 116197749 Blast Desc: CHGG_07030 [Chaetomium globosum CBS 148.51] gi|88178309|gb|EAQ85777.1| CHGG_07030 [Chaetomium globosum CBS 148.51]
  misc_feature (9)..(898): NCBI GI: 156054996 Blast Desc: SS1G_04849 [Sclerotinia sclerotiorum 1980] gi|154702634|gb|EDO02373.1| SS1G_04849 [Sclerotinia sclerotiorum 1980]
  misc_feature (60)..(898): NCBI GI: 154304401 Blast Desc: BC1G_09076 [Botryotinia fuckeliana B05.10] gi|150854056|gb|EDN29248.1| BC1G_09076 [Botryotinia fuckeliana B05.10]
  misc_feature (13)..(828): NCBI GI: 121706580 Blast Desc: MFS transporter, [Aspergillus clavatus NRRL 1] gi|119399700|gb|EAW10126.1| MFS transporter, [Aspergillus clavatus NRRL 1]
  misc_feature (13)..(828): NCBI GI: 119501204 Blast Desc: MFS transporter, [Neosartorya fischeri NRRL 181] gi|119415524|gb|EAW25462.1| MFS transporter, [Neosartorya fischeri NRRL 181]
MTTLAASLVHEYADRGPAVFVVTTATLVLATVFVAARLVCRVFIVRHVSWDDYFIIIAWLLAFGLSFAIDYGTTKGLGRHDADISSGDWNSLRRSEYTFTVLYNPALMAFKTSILIFYLRLSKNTQKVLRLASWTVLVIVNLSGTVLTLLNIFQCSPVESAFNLVNPPGRCLPLLTEFICSAPINIVTDLAILALPLPVLTGMRLPPRQKIILIMTFALASFGDSPEFAWNASLSLLWSAVEVNVGIACACIPTLKPLIIRILPAMLVDPDGSTRRGSDTAEKSTNMSSRLRQGSDNEHMLPAPAMVREDHSDHSPNLAYNDNFDAPLSAMEFLTTPGMTLEAGMDRTRTAVTNATATEASGVYFGFVNMRKPKSMIRTSVRDSFRYCTIVTILFVLWGFSYGLLTTLASVVAQISNMTVAETLGLNAIYFGAGYFFGPLLVGEWILRRDEHQRLEKKQKNLVDDSIGGFKATFMIGLCIYGIGTIIFWPSAVLTSFAGFLISNFVVGFGLAVLETAANPFLALCGPMDYAEMRLLLAQGVQATATVISGLLAQKVFFINLSTKGYQGSSTLIDVQWTFLAITLFCVALALFFYYAPLPEVSDAEMENSTRYLPVDPKKRSFFGLQLRSWSLGLAVAAQWTYVAGQETMSIFFQNILFPANDDPSSSLALSANDYLLVAHSAFAASRFFAAYLAYLSPTHPKVPQPRTILNICTGFSILTGVLVSAIRPKNPNLLFIPMVLFFFFEGPMWPLIYALGLRGQGKRTKRAAAYITMGASGPAFWPFVVYAIHQRGATYQTAFILVPALLVISGFFSVFLDLKHDARALVDARVGPEQQRKIQDRANREMDLDRIISTRRRMSMSATLSDYDKINFVKRLSIAFGKRRDSEPPTAEHRESKSCSPG

SEQ ID NO: 37308 - DNA, 2574 bp, Muscodor strobelii
  misc_feature: SGI EST ID NO. CUFF.89210.0
  misc_feature: Variant of the nucleotide sequence at SEQ ID NO 37306
ctcgtttggagactcgcccgagtttgcctggaatgcatcgctatcgcttttgtggtctgcagtcgaagtaaatgtcggcattgcctgcgcctgtatcccaacactcaaacccttgatcatacgcattctccccgccatgcttgttgatccagatggtagtactcgcagagggtccgacacggctgaaaagtctactaacatgtcgtcacgcctacgccaaggttctgacaacgaacatatgctgccagcaccagcaatggtaagagaagatcactctgatcattcgccaaacttggcatacaatgacaattttgatgccccactgtcagctatggaattcctcactacacctggcatgactcttgaagcagggatggatcgcacacgtaccgccgtcaccaatgccacagcgacggaagcctctggtgtctattttggatttgtcaatatgcgcaaaccaaagagcatgattcgaacgtccgtccgagactcgttcagatattgcaccattgtgaccattctatttgtgctgtggggattttcgtatggtcttcttaccacattggctagtgttgtagcccaaatttccaacatgacggttgcagagactctcggcctgaatgctatttacttcggagccggttatttctttggtcccttactagttggcgaatggatattgcgacgcgatgaacatcaacgactggaaaagaaacaaaagaaccttgtggatgacagcattggtggtttcaaagcaacatttatgatcggattgtgtatatacggcatcggcactatcatattctggcctagcgctgtgcttacttccttcgccggattcttgatctctaattttgttgttggatttggcctcgccgttctcgaaacagccgcgaacccattcctcgcactttgtggtcctatggactacgccgagatgcggctcttattggcacaaggcgtacaagctactgccaccgttatcagcgggctgctcgctcaaaaggtgttctttataaacctgagtaccaaaggatatcaaggatcatctacgcttatcgatgtccaatggacgttcttggctataacactattttgtgttgcgctggccttatttttctactacgccccactgccagaagtgagcgatgcggaaatggagaactcgacgagatatttaccagtggatcccaaaaaacgaagcttttttggtctccaattgagatcgtggagcttaggtcttgccgttgccgctcagtggacatacgtcgctggccaagaaaccatgagcatttttttccaaaatatcttgttcccggcgaatgacgacccatctagcagcttggccttaagtgccaatgactatctcctcgtggcgcacagcgcattcgctgcgtcccgcttcttcgcggcataccttgcttacttatccccaactcatcccaaagtgccacaaccccggactatcctcaatatctgcacgggattcagtattctcactggcgtcttggtctccgccatccgccctaaaaatccgaacttgttattcattccgatggtgttgttcttcttcttcgaaggtccgatgtggccgctaatatacgccttgggacttcgtgggcaaggcaaacgtacgaaacgagcggctgcgtatatcaccatgggcgcttccggacctgctttctggccctttgtcgtatacgccatccatcaaagaggcgcaacataccaaactgcatttatcttagtacccgctcttctcgtcatctccgggttcttctccgttttccttgatctcaagcacgatgcaagagcattggtagatgcccgggttgggcctgaacagcaaagaaagatccaagatcgtgcgaatcgcgaaatggatctagacaggatcatatctaccaggagacgaatgtcaatgagtgcgaccctgtctgactacgacaaaattaacttcgtgaagaggctgtcgattgccttcggtaaacgccgagattcagaaccgcctactgctgaacaccgagaatctaagagttgtagcccgggttgaaagcggatgcctaggttccataaaaacgcgatgcctctgatcattcaagcatcaagagtatttgctggattgtggcgattgacctcgatcaagcgcttttgcaacccatccagctagggaatgctgtgacgtcctgcgactgggttgcttctctttactgcatgatctcggaagccatcaaagcgacaactggctagaattcgaagattgcgtcaagagatcaacaatagcactgcatcaacaatagttctgaatatctttagcatgaactattgagcagtcaacgaagacgaagaagagatcttcccaccgagatctagtaatccggatgagggaaaggggcttgtctaaccaagcagaatgatattctgcatacctgagctatgcagatgattcaacgttccgtgcgtctctatgcgaaaatagagctctagatagcgaaatggccatttggtgtgctaaaaaggagtagatgattacgtatttatgatacccaattaaacgatttatgacaattccat

SEQ ID NO: 37309 - DNA, 648 bp, Muscodor strobelii
  misc_feature: SGI cDNA ID NO. 572945
  misc_feature: Reduced expression when VOC is produced
  misc_feature: Encodes the peptide sequence at SEQ ID NO 37310
atgagcacaaagatgctgtccccttcgcggagggtggccaccttggctttgagagctcgcccgtccgcccgcgtcgcccccgcccgcatcgcgcctctgcagtccatccagtccatccagtccaccgccgccatctcgacgacgtccaagaaggatgccacctcggtcacgccgcacgccccgacgggcctcgcccacccgcgcaaggaggtgccgctcgccagccaggagcccaagaagggcgtgatgcagtacgccctcaccacgctcgaccaggtcgccaactgggcccgccagtcgtcgctgtggcccatgacgttcggcctcgcgtgctgcgccgtcgagatgatgcacctatcgaccccgcgctacgaccaggaccgcctcggcatcatcttccgcgcctcgccgcgccagtcggacgtcatgatcgtcgccggcaccctcaccaacaagatggcccccgccctgcgccaggtctacgaccagatgcccgagccgcgctgggtcgtcagcatgggcagctgcgccaacggcggcggctactaccactactcctactccgtcgtccgcggctgcgaccgcatcgtccccctgcagcgcaagatgcgcaacacccgcatcacccgcatgtggtacagaaagtaa

SEQ ID NO: 37310 - protein, 215 aa, Muscodor strobelii
  misc_feature: SGI Peptide ID NO. 572945
  misc_feature (114)..(213): Pfam Id: PF01058 Pfam Desc: NADH ubiquinone oxidoreductase, 20 Kd subunit
  misc_feature (114)..(198): Pfam Id: PF01058 Pfam Desc: NADH ubiquinone oxidoreductase, 20 Kd subunit
  misc_feature (5)..(215): NCBI GI: 256731666 Blast Desc: NECHADRAFT_60986 [Nectria haematococca mpVI 77-13-4]
  misc_feature (5)..(215): NCBI GI: 116201555 Blast Desc: CHGG_08662 [Chaetomium globosum CBS 148.51] gi|88177180|gb|EAQ84648.1| CHGG_08662 [Chaetomium globosum CBS 148.51]
  misc_feature (5)..(215): NCBI GI: 46137521 Blast Desc: FG10276.1 [Gibberella zeae PH-1]
  misc_feature (5)..(215): NCBI GI: 145612619 Blast Desc: mitochondrial NADH-ubiquinone oxidoreductase 20 kD subunit [Magnaporthe grisea 70-15] gi|145019756|gb|EDK03984.1| mitochondrial NADH-ubiquinone oxidoreductase 20 kD subunit grisea
  misc_feature (5)..(215): NCBI GI: 171677913 Blast Desc: protein product [Podospora anserina] gi|170937025|emb|CAP61683.1| protein product [Podospora anserina]
  misc_feature (5)..(215): NCBI GI: 169604652 Blast Desc: SNOG_05340 [Phaeosphaeria nodorum SN15] gi|160706616|gb|EAT87731.2| SNOG_05340 [Phaeosphaeria nodorum SN15]
  misc_feature (5)..(215): NCBI GI: 85085876 Blast Desc: NADH:ubiquinone oxidoreductase 19.3kD subunit [Neurospora crassa OR74A] gi|6647651|sp|O47950.1|NDUS7_NEUCR RecName: Full=NADH-ubiquinone oxidoreductase 19.3 kDa subunit, of
  misc_feature (36)..(215): NCBI GI: 115400845 Blast Desc: NADH-ubiquinone oxidoreductase 19.3 kDa subunit, mitochondrial precursor [Aspergillus terreus NIH2624] gi|114191677|gb|EAU33377.1| NADH-ubiquinone oxidoreductase 19.3
  misc_feature (5)..(215): NCBI GI: 119501352 Blast Desc: NADH-ubiquinone oxidoreductase subunit B, [Neosartorya fischeri NRRL 181] gi|119415598|gb|EAW25536.1| NADH-ubiquinone oxidoreductase subunit B, [Neosartorya fischeri NRRL 181]
  misc_feature (15)..(215): NCBI GI: 169774064 Blast Desc: [Aspergillus oryzae RIB40] gi|238508860|ref|XP_002385611.1| NADH-ubiquinone oxidoreductase subunit B, [Aspergillus flavus NRRL3357] protein product oryzae]
  misc_feature (50)..(215): SWISSPROT Homolog: EC 1.6.5.3 NADH dehydrogenase (ubiquinone)
  misc_feature (50)..(215): SWISSPROT Homolog: EC 1.6.99.3 NADH dehydrogenase
  misc_feature: Useful for introducing or modulating the production of volatile compounds
MSTKMLSPSRRVATLALRARPSARVAPARIAPLQSIQSIQSTAAISTTSKKDATSVTPHAPTGLAHPRKEVPLASQEPKKGVMQYALTTLDQVANWARQSSLWPMTFGLACCAVEMMHLSTPRYDQDRLGIIFRASPRQSDVMIVAGTLTNKMAPALRQVYDQMPEPRWVVSMGSCANGGGYYHYSYSVVRGCDRIVPLQRKMRNTRITRMWYRK

SEQ ID NO: 37311 - DNA, 1493 bp, Muscodor strobelii
  misc_feature: SGI EST ID NO. CUFF.89441.1
  misc_feature: Variant of the nucleotide sequence at SEQ ID NO 37309
ggagagtgtcggaacaacagatattgcagggctcgatcgggccagtcacagcagggcatttggtgcttagcgaagcggcgaaaagtagctcgggtcgtcaacgtcaatcgagcgggaggacaagctctggactctggacgagactccgccattgcccattgcgaggcgaattgcgagagacaacacagcaagagcgactccccgagagcatcgcatcgatcacaccttcacacgttgtcgacaacgccggccgacgaccatctccgctctcatctcagctgcatccatccatccatccattgccccgtatcgtcgtcctcggccgaccgacacagtcccaccgtcaatacctacctacctaggtacctttctgtcgtcccctttctcgtccacaccctcatccacatccgcccgggctttcccaggatgagcacaaagatgctgtccccttcgcggagggtggccaccttggctttgagagctcgcccgtccgcccgcgtcgcccccgcccgcatcgcgcctctgcagtccatccagtccatccagtccaccgccgccatctcgacgacgtccaagaaggatgccacctcggtcacgccgcacgccccgacgggcctcgcccacccgcgcaaggaggtgccgctcgccagccaggagcccaagaagggcgtgatgcagtacgccctcaccacgctcgaccaggtcgccaactgggcccgccagtcgtcgctgtggcccatgacgttcggcctcgcgtgctgcgccgtcgagatgatgcacctatcgaccccgcgctacgaccaggaccgcctcggcatcatcttccgcgcctcgccgcgccagtcggacgtcatgatcgtcgccggcaccctcaccaacaagatggcccccgccctgcgccaggtctacgaccagatgcccgagccgcgctgggtcgtcagcatgggcagctgcgccaacggcggcggctactaccactactcctactccgtcgtccgcggctgcgaccgcatcgtccccgtcgacgtctacgtccccggctgcccccccgacctccgaggccctcatgtacggcatcttccagctgcagcgcaagatgcgcaacacccgcatcacccgcatgtggtacagaaagtaaatcagaaagaaggagggaaataccattgcaacctttttcattttgtcatgacagagagggggggagacagggggagagagggagagagagagggaaaaacaacgacgcctttgtacataccaacccacacggggacacacggacacacacacccccccatcacggctccaacgtgtacattgtattgctaccagagctgcccaaccagatcatcaaacagatagacaaaacattaactactattgctatgggcgccggtgcatgcattgtcacagatatgttttgaggatgagcttacaagatgttacaagcatatatctatatgtatgtatatgcatacatagacatacacata

SEQ ID NO: 37312 - DNA, 624 bp, Muscodor strobelii
  misc_feature: SGI cDNA ID NO. 572946
  misc_feature: Encodes the peptide sequence at SEQ ID NO 37313
atgaagactactctgatctctgccgccgcctttgccgccgccgtttctgccggtaaagagggcgaaagcagcggcaccatggtcgctgctaccgctaccgctactgcgtccgccgtctctagcggtagcacctgcgcggctcagggcatcctagacgcctgcatcagcaccacgcagggctacattgcgctctgcggctctcaagattggggatgcctctgcgacaagtacacttctcagatgacgtgcttcaacaactgccctaatgatagccggtcttatgggtgcagccagcagcaacagctttattgcatgaacgccagtgcctatggcagcaagaccaccagcatcaccaagtcaaccgagtcggcctctagccaggcgtctgagaccgccaaatcgacggaggttgcgcccaccgttgagtccattagtcccgaggctacatctgagggtgcaaccaaagcaggcggcgcgggtggtactgcgaccgctgagaccgcgagtggtgccaagcccaccgagacggccaagccatccgttgaagtcgcaggtgctgccgcgctcgactccggtgccgctgctatggccgctgtcgccggtatcgttgctgccctcctatga

SEQ ID NO: 37313 - protein, 207 aa, Muscodor strobelii
  misc_feature: SGI Peptide ID NO. 572946
  misc_feature (27)..(111): NCBI GI: 212528092 Blast Desc: GPI anchored serine-threonine rich protein [Penicillium marneffei ATCC 18224] gi|210073601|gb|EEA27688.1| GPI anchored serine-threonine rich protein [Penicillium marneffei
  misc_feature (24)..(126): NCBI GI: 119496081 Blast Desc: GPI anchored serine-threonine rich protein [Neosartorya fischeri NRRL 181] gi|119412976|gb|EAW22917.1| GPI anchored serine-threonine rich protein [Neosartorya fischeri NRRL
  misc_feature (41)..(95): NCBI GI: 154275404 Blast Desc: [Ajellomyces capsulatus NAm1] gi|150414993|gb|EDN10355.1| [Ajellomyces capsulatus NAm1]
  misc_feature (41)..(95): NCBI GI: 240281791 Blast Desc: HCDG_00873 [Ajellomyces capsulatus H143]
  misc_feature (41)..(95): NCBI GI: 225558868 Blast Desc: [Ajellomyces capsulatus G186AR]
  misc_feature (26)..(104): NCBI GI: 242767338 Blast Desc: GPI anchored serine-threonine rich protein [Talaromyces stipitatus ATCC 10500] gi|218724546|gb|EED23963.1| GPI anchored serine-threonine rich protein [Talaromyces ATCC
  misc_feature (41)..(95): NCBI GI: 226291489 Blast Desc: PADG_03015 [Paracoccidioides brasiliensis Pb18]
  misc_feature (31)..(113): NCBI GI: 256732106 Blast Desc: NECHADRAFT_100528 [Nectria haematococca mpVI 77-13-4]
  misc_feature (41)..(95): NCBI GI: 225679738 Blast Desc: [Paracoccidioides brasiliensis Pb03]
  misc_feature (26)..(110): NCBI GI: 70995104 Blast Desc: GPI anchored serine-threonine rich protein [Aspergillus fumigatus Af293] gi|66849953|gb|EAL90280.1| GPI anchored serine-threonine rich protein [Aspergillus fumigatus
MKTTLISAAAFAAAVSAGKEGESSGTMVAATATATASAVSSGSTCAAQGILDACISTTQGYIALCGSQDWGCLCDKYTSQMTCFNNCPNDSRSYGCSQQQQLYCMNASAYGSKTTSITKSTESASSQASETAKSTEVAPTVESISPEATSEGATKAGGAGGTATAETASGAKPTETAKPSVEVAGAAALDSGAAAMAAVAGIVAALL

SEQ ID NO: 37314 - DNA, 180 bp, Muscodor strobelii
  misc_feature: SGI EST ID NO. CUFF.89242.0
  misc_feature: Variant of the nucleotide sequence at SEQ ID NO 37312
cttcaacaactgccctaatgatagccggtcttatgggtgcagccagcagcaacagctttattgcatgaacgccagtgcctatggcagcaagaccaccagcatcaccaagtcaaccgagtcggcctctagccaggcgtctgagaccgccaaatcgacggaggttgcgcccaccgttgagtc

SEQ ID NO: 37315 - DNA, 597 bp, Muscodor strobelii
  misc_feature: SGI cDNA ID NO. 572947
  misc_feature: Elevated expression when VOC is produced
  misc_feature: Encodes the peptide sequence at SEQ ID NO 37316
atgcggagaaaagggttcctgacaactttgctcgcagaacattcatccgatcgcagtgatcaagccgaaccgagtcatgctgacacgagcacctatatccaacacgcccgaaggatcacgcagaaattctttgcatcgcctgcgcggcactggaccattttgacattgatcgttctcgatgtagctggtatattgaccgacatcttcattgccctgatcacctgcgagctaaaacgagaggacgagccatgggtcacgccgacccgtgatgccttgacaactttctccttagtgatgagttgcatattcatggttgagttgacattatcaatatttgccgatgggctcgagttctttagtaattggtttcactgtttagacgctttcgtaattgtaggtagcttcgctgtcgatttgctggaacatggagtagcagaagagatcgcctcattgattgtcgtcttgcggttgtggcggttcatcaagatcatacaggagttttctgttgagcaatctgaacagaccgaggcgctatacaagcgcatagaagatctcgagaagcagttgtctgatcttgcagcgcagggagaaccctaa

SEQ ID NO: 37316 - protein, 198 aa, Muscodor strobelii
  misc_feature: SGI Peptide ID NO. 572947
  misc_feature (95)..(165): Pfam Id: PF00520 Pfam Desc: Ion transport protein
  misc_feature (26)..(192): NCBI GI: 242764232 Blast Desc: conserved [Talaromyces stipitatus ATCC 10500] gi|218723924|gb|EED23341.1| conserved [Talaromyces stipitatus ATCC 10500]
  misc_feature (20)..(188): NCBI GI: 145234953 Blast Desc: An03g02270 [Aspergillus niger] gi|134057801|emb|CAK38196.1| protein product [Aspergillus niger]
  misc_feature (10)..(188): NCBI GI: 238500644 Blast Desc: conserved [Aspergillus flavus NRRL3357] gi|220691793|gb|EED48140.1| conserved [Aspergillus flavus NRRL3357]
  misc_feature (10)..(188): NCBI GI: 169782205 Blast Desc: [Aspergillus oryzae RIB40] gi|83774308|dbj|BAE64432.1| protein product [Aspergillus oryzae]
  misc_feature (24)..(195): NCBI GI: 212529182 Blast Desc: conserved [Penicillium marneffei ATCC 18224] gi|210074146|gb|EEA28233.1| conserved [Penicillium marneffei ATCC 18224]
  misc_feature (117)..(174): NCBI GI: 261351931 Blast Desc: [Verticillium albo-atrum VaMs.102]
  misc_feature (51)..(196): NCBI GI: 156364735 Blast Desc: [Nematostella vectensis] gi|156213379|gb|EDO34401.1| [Nematostella vectensis]
  misc_feature (26)..(137): NCBI GI: 154310274 Blast Desc: [Botryotinia fuckeliana B05.10] gi|150851618|gb|EDN26811.1| [Botryotinia fuckeliana B05.10]
  misc_feature (15)..(176): NCBI GI: 170088260 Blast Desc: [Laccaria bicolor S238N-H82] gi|164650553|gb|EDR14794.1| [Laccaria bicolor S238N-H82]
  misc_feature (57)..(189): NCBI GI: 169853324 Blast Desc: [Coprinopsis cinerea okayama7#130] gi|116505721|gb|EAU88616.1| [Coprinopsis cinerea okayama7#130]
  misc_feature: Useful for introducing or modulating the production of volatile compounds
MRRKGFLTTLLAEHSSDRSDQAEPSHADTSTYIQHARRITQKFFASPARHWTILTLIVLDVAGILTDIFIALITCELKREDEPWVTPTRDALTTFSLVMSCIFMVELTLSIFADGLEFFSNWFHCLDAFVIVGSFAVDLLEHGVAEEIASLIVVLRLWRFIKIIQEFSVEQSEQTEALYKRIEDLEKQLSDLAAQGEP

SEQ ID NO: 37317 - DNA, 1290 bp, Muscodor strobelii
  misc_feature: SGI EST ID NO. CUFF.89276.0
  misc_feature: Variant of the nucleotide sequence at SEQ ID NO 37315
tccgggattcaatacgctcaattttagtttactattctcgaagcctcattatactgtcatctccaaatccaaacctaaaacctcaaataaccactttacgggtcattcaattacgggtctttgtctcgttctcttcagaccgcctagaatggttcggaaatagcattcaagacatgagtgactatgcaccgttactagaacattcatccgatcgcagtgatcaagccgaaccgagtcatgctgacacgagcacctatatccaacacgcccgaaggatcacgcagaaattctttgcatcgcctgcgcggcactggaccattttgacattgatcgttctcgatgtagctggtatattgaccgacatcttcattgccctgatcacctgcgagctaaaacgagaggacgagccatgggtcacgccgacccgtgatgccttgacaactttctccttagtgatgagttgcatattcatggttctttagtaattggtttcactgtttagacgctttcgtaattgtaggtagcttcgctgtcgatttgctggaacatggagtagcagaagagatcgcctcattgattgtcgtcttgcggttgtggcggttcatcaagatcatacaggagttttctgttgagcaatctgaacagaccgaggcgctatacaagcgcatagaagatctcgagaagcagttgtctgatcttgcagcgcagggagaaccctaattgcgtgtgtcattttcaatgtatccggcgtatctggagacgccttcaccttgccatggggactgtcagtcttcacattaatctgtcatctcatcgcgtttagcatagctcaggcatatcaaatttgtttctccagctgaccgggcgatgcacccacgttgaaacctggccgtcccaaaccccaaacctaatttttctccaacctaaaacttgactgtttccagcccatccacgcactctttaacctagagggttcatccgaagcagtcaaggaattatgtatccatatttgacacgatactgaggaagagttcaagaagatgaagaggctgcgatgtcataactcagtaaaggtctcggcgtcgatctcacgatgcgagatatgtgagtacatttctctatagcttgttgagatccagatctcgctagaagctagaagcttggagagatatgtggcagagtcatcgcacatagcctggcgcgaaaggtctatggagattggaaattgcagcaacctcaaaatgccaacccaaccggactggatttcaacctgttcgtggtatccacttg

SEQ ID NO: 37318 - DNA, 3963 bp, Muscodor strobelii
  misc_feature: SGI cDNA ID NO. 572948
  misc_feature: Encodes the peptide sequence at SEQ ID NO 37319
atgccttctgaaacaatccctcccgtcgacacggctttggccaatgcttcgttgatgggtcttgccaccatgtcacggccaagtcgctctcgagctcagagcatctcgagcgacaaaccctccaccattggtctttccaacctgatgtcgccgcccctatcggtagaacccgaagcggccttcattgctgcttcggctgcctcacaaatcgtcacgagcgaccacgatggccactcggaaacctggtacgaccaggtcggtatcgattcctcgggagagactgcctttgtcaccgacaaagctctccaacttgccaacagtttcgtcgaccaactgttgtttaatatcctctccgtagccaaatcgaccgcccttccttcgcttcggtctgcggtcgtcgacgtgctgaaaccaaaacttgcgaaagatgcaatcaatgcagcagatgaggaactgagagaatatatcggtggaggtgaaatagaagacctcgcccggtccaccccacaagagtctaggagagactgggatctcgaattggtatggaagaggacacgacttcgatgcatggtgtactcttctcttggagatatggaagaagaagacgaggattattggttggaacaagagcatctcaacggggaaaacgatgacattctcgcggaggcggtgtctcccgccgtcgccatcttcctgacttccatccttgaatttacaggtgaacaggttctagttgtcgccggtcaggccgccttcaatcgcttgcgcggaaagtgcgagaaggatttgaaagatggcctgccagcatctggctatgttgccgatcgcatcattgtcgaagaactagatatggaacgggttgcactagacagaacttttggtagactctggcgtgcttggaaaaagaggatacgatccccaatggagcccaatttttcgagacctttctcccggagttcgactagtggttctggtatgtctcctggtgcgtcacagtcaagacatgaaagcgcaaatacggatcaccgaggcctcatcccgtctcacgatttggccactacgccggaatatcaagaaagccagacagtgggtgttcacacccaggcaagccacgacgatgtccccgatgaggcaacagccgtcgacccttccgtgataccgttccccgatactgatgatgaggccacttacagtgatgaagtggatactgacgatgaagagccttgcgcgccacgcccaaaaagctggattgttaccaatcagtccatggatagggatgcgcttttcttcccagcttctctacgacgtgctctctcacttccaccccgtaaacggcgtcgatttagtctaggccttgcgcagaatgactcggaattgggcaacaaggtcgagcagtctgacaatgctcaggagttggacccttcatctgtgcaactgcagacaaatgccgaattggctgcttacgcagctcagcaaaacgcaaaggacacttctgcgagcgagtctgatccatggcatgagcctgagagggcagaggacgctgaagaagcttcgaatggacttcttgagaaggttgctttgagtgcggcagctgtgggagctgctgctgttgctgggttgactgttcttgcgactggtgtcgccccccaaaccgaaattgaggatgagaccaaagagaacggcgaatatgacgaagcaaatgatgagatcgaggacttcgccgaagagccggaaattttgacatcttcacgcgtatccatgggcggaagaagttctcccgcagtgtctgaccaaggaagaccgccttcgatcgtgcatactcgatcgagcagtgtacgctccgtgcgggtgattgatgtgcagagccctcgaagccccgtcgccagatcacgaccagtatctttggaagtagatcccgtcaatatcatataccgttctgcgagcatctcaagggaggggagccaatcgagaactccgcccattgttgaggagaatgactctcgcgcgattccttccgtcacgattactaatacgaaacctatctctcggatcgcatcgtcgtcatcgtcgtctgatgacactggagatgtgagagctacactcgcgccgtcgccacggaaccgatctccccccaaacgaacatattccccagtggcccctattacgtcgggctcaagtaggactaccggtttgaacagcacgatcaacgtggcacaagaagatcgcccagaacgccatgatagcctctcgcggtcgtctagtggtttcagaaatccgccacttcccacattaccagagcggagtgccagtaggcctctgtatgtagcgacgtcacctgtgggacgaacatcacctgagtcgcccaagttgccacgccccatcgcgagcgaatcgccctcatcggcaagatttaaaccagttcggacatcagaagataataactccatccgccctgcagatgttgcgcgtaatttcgaggagcttatccagagtaatgagacattgcaatacacgctaacaccggaaaatatgcggaagattgattctcccacttctctcacccatggcattgcccatgggagtccgagacccagccacaaaagcgccaaaagcgaagaccataaagtgggagaacgctcacgatcttcttctatcaagagatccatatccatcaataagtcaactgggttacactcgcatcctcccgttgaaatggcgggcaatgagaagtatgcccccgccaactcgaaagcccatccgccagtgtctttgcgcaatcgtgccggccctgcacccatggccagagacgcgagagtgccgagggaatccatacaagattttgccgagttcatccggtcgacgggacctccgggtgccaatggccagtttgtcaatggcccacgcttgaaccgagccaataccggcgaatcggcttacggggcagcgaatgtgcgtccccccacaaagccgtcgagtatggacgtccgccgtggccctcggctgcaagccagggatgccattgtcaatacatccaacgagagctctgagttgattgacttcatccgccgcggccctccagccgcaaatagctccatgccgcggatccctcgcaccgtcgcaccctttcgaaacacgcaggactccgaatacatgtctagcgccgtgggtggtagagccgtggacgccaccattcctaatgtcagaaatagccaggcctccacaaacgtgacggaatcatcggcaccgtcctcgatgaactcacagagtgccctgctcaatggccggaacaagccccaaccgctgtactcggccaccagctttgatgacgatgacatgatgccgaagcgaacgcagagacgggttcgtgatccctacgctatcgattttagtgatgatgagcaggaggacgaagagttggacgtgaccccaaagcccaagccgccggcgaagaaggaggaaagcctgatggatttcctgaacaattacccgccacctgctgtgccggagccggcgccgtttgttctaccgaagaagaaaagcgcgcccaatttgatcgcacggctgcgttccggctcgtcttcgggctttggcggttcgggccatctacgaaaaggatctggtctcaccggcatgtccgagagcagaagtctgaatagtcgtcaaggcgcgaagccgtcgcacactcccatcgtcttgcctgctgctacgaatgatcgtttcggcacacagaccaactcactatcgtcgtcgcgcgctccccagtatgggcgtagctctacgaacggcaaacgcttcgagccacgaggatcatcttcttcaagtccccagacggccgatttggctagttttctgcgcgaatcgggacccccaccgtccatgatggccgctcctcccctcgaggacaggtccagcagcggtttctcacggatgtttgagcgccgtaaaaagtcgacagcttattaa

SEQ ID NO: 37319 - protein, 1320 aa, Muscodor strobelii
  misc_feature: SGI Peptide ID NO. 572948
  misc_feature (27)..(1316): NCBI GI: 116179760 Blast Desc: CHGG_00508 [Chaetomium globosum CBS 148.51] gi|88184805|gb|EAQ92273.1| CHGG_00508 [Chaetomium globosum CBS 148.51]
  misc_feature (23)..(1296): NCBI GI: 85092054 Blast Desc: NCU04661 [Neurospora crassa OR74A] gi|28920606|gb|EAA29968.1| [Neurospora crassa OR74A]
  misc_feature (23)..(1296): NCBI GI: 28950052 Blast Desc: [Neurospora crassa]
  misc_feature (7)..(672): NCBI GI: 39958464 Blast Desc: MGG_09259 [Magnaporthe grisea 70-15] gi|145013292|gb|EDJ97933.1| MGG_09259 [Magnaporthe grisea 70-15]
  misc_feature (28)..(325): NCBI GI: 171691673 Blast Desc: protein product [Podospora anserina] gi|170945785|emb|CAP72585.1| protein product [Podospora anserina]
  misc_feature (22)..(320): NCBI GI: 261351743 Blast Desc: conserved [Verticillium albo-atrum VaMs.102]
  misc_feature (24)..(322): NCBI GI: 256732066 Blast Desc: NECHADRAFT_80308 [Nectria haematococca mpVI 77-13-4]
  misc_feature (27)..(690): NCBI GI: 154305496 Blast Desc: BC1G_08517 [Botryotinia fuckeliana B05.10] gi|150853304|gb|EDN28496.1| BC1G_08517 [Botryotinia fuckeliana B05.10]
  misc_feature (26)..(320): NCBI GI: 46137061 Blast Desc: FG10046.1 [Gibberella zeae PH-1]
  misc_feature (38)..(306): NCBI GI: 156044188 Blast Desc: SS1G_10197 [Sclerotinia sclerotiorum 1980] gi|154694586|gb|EDN94324.1| SS1G_10197 [Sclerotinia sclerotiorum 1980]
MPSETIPPVDTALANASLMGLATMSRPSRSRAQSISSDKPSTIGLSNLMSPPLSVEPEAAFIAASAASQIVTSDHDGHSETWYDQVGIDSSGETAFVTDKALQLANSFVDQLLFNILSVAKSTALPSLRSAVVDVLKPKLAKDAINAADEELREYIGGGEIEDLARSTPQESRRDWDLELVWKRTRLRCMVYSSLGDMEEEDEDYWLEQEHLNGENDDILAEAVSPAVAIFLTSILEFTGEQVLVVAGQAAFNRLRGKCEKDLKDGLPASGYVADRIIVEELDMERVALDRTFGRLWRAWKKRIRSPMEPNFSRPFSRSSTSGSGMSPGASQSRHESANTDHRGLIPSHDLATTPEYQESQTVGVHTQASHDDVPDEATAVDPSVIPFPDTDDEATYSDEVDTDDEEPCAPRPKSWIVTNQSMDRDALFFPASLRRALSLPPRKRRRFSLGLAQNDSELGNKVEQSDNAQELDPSSVQLQTNAELAAYAAQQNAKDTSASESDPWHEPERAEDAEEASNGLLEKVALSAAAVGAAAVAGLTVLATGVAPQTEIEDETKENGEYDEANDEIEDFAEEPEILTSSRVSMGGRSSPAVSDQGRPPSIVHTRSSSVRSVRVIDVQSPRSPVARSRPVSLEVDPVNIIYRSASISREGSQSRTPPIVEENDSRAIPSVTITNTKPISRIASSSSSSDDTGDVRATLAPSPRNRSPPKRTYSPVAPITSGSSRTTGLNSTINVAQEDRPERHDSLSRSSSGFRNPPLPTLPERSASRPLYVATSPVGRTSPESPKLPRPIASESPSSARFKPVRTSEDNNSIRPADVARNFEELIQSNETLQYTLTPENMRKIDSPTSLTHGIAHGSPRPSHKSAKSEDHKVGERSRSSSIKRSISINKSTGLHSHPPVEMAGNEKYAPANSKAHPPVSLRNRAGPAPMARDARVPRESIQDFAEFIRSTGPPGANGQFVNGPRLNRANTGESAYGAANVRPPTKPSSMDVRRGPRLQARDAIVNTSNESSELIDFIRRGPPAANSSMPRIPRTVAPFRNTQDSEYMSSAVGGRAVDATIPNVRNSQASTNVTESSAPSSMNSQSALLNGRNKPQPLYSATSFDDDDMMPKRTQRRVRDPYAIDFSDDEQEDEELDVTPKPKPPAKKEESLMDFLNNYPPPAVPEPAPFVLPKKKSAPNLIARLRSGSSSGFGGSGHLRKGSGLTGMSESRSLNSRQGAKPSHTPIVLPAATNDRFGTQTNSLSSSRAPQYGRSSTNGKRFEPRGSSSSSPQTADLASFLRESGPPPSMMAAPPLEDRSSSGFSRMFERRKKSTAY

SEQ ID NO: 37320 - DNA, 9276 bp, Muscodor strobelii
  misc_feature: SGI EST ID NO. CUFF.89617.1
  misc_feature: Variant of the nucleotide sequence at SEQ ID NO 37318
gcttgatccctgcctgggtcctcaaaactgtccggccccaatagtttttggtccagccatgcccgcgtcccatcttctgccctgtcccttgtctgcatgtactgcaggtagagtggaaatgcagagtatcctatcccaccacgatattggagctgggaatcttctcacattccaattactttcatcgtttctgtattttcttcttcttccatcttgaagctgaatgatcactgctcttcttttcttgtttcactttttgcacgcccccacggctggactcggcatcttgcttcgcctcccctttctgcacattatctttcgctatgcgaataaggtagcccctgagacgcctctcatctcccggcttgttgaatcaccactttcgcttacacccaaacctactgcgacgacgagacaagggcgcgttattatcttcggcgtcacaatccttagtcaaggatctaatctggacccaacatctacgaagtccacgccgctgcgggttgctctgcagcggacattcctccatcctgttcagtcctgtcgtcttacgcgacctagggcggccttcccgggtccgccatcacgacatcatatatgccttctgaaacaatccctcccgtcgacacggctttggccaatgcttcgttgatgggtcttgccaccatgtcacggccaagtcgctctcgagctcagagcatctcgagcgacaaaccctccaccattggtctttccaacctgatgtcgccgcccctatcggtagaacccgaagcggccttcattgctgcttcggctgcctcacaaatcgtcacgagcgaccacgatggccactcggaaacctggtacgaccaggtcggtatcgattcctcgggagagactgcctttgtcaccgacaaagctctccaacttgccaacagtttcgtcgaccaactgttgtttaatatcctctccgtagccaaatcgaccgcccttccttcgcttcggtctgcggtcgtcgacgtgctgaaaccaaaacttgcgaaagatgcaatcaatgcagcagatgaggaactgagagaatatatcggtggaggtgaaatagaagacctcgcccggtccaccccacaagagtctaggagagactgggatctcgaattggtatggaagaggacacgacttcgatgcatggtgtactcttctcttggagatatggaagaagaagacgaggattattggttggaacaagagcatctcaacggggaaaacgatgacattctcgcggaggcggtgtctcccgccgtcgccatcttcctgacttccatccttgaatttacaggtgaacaggttctagttgtcgccggtcaggccgccttcaatcgcttgcgcggaaagtgcgagaaggatttgaaagatggcctgccagcatctggctatgttgccgatcgcatcattgtcgaagaactagatatggaacgggttgcactagacagaacttttggtagactctggcgtgcttggaaaaagaggatacgatccccaatggagcccaatttttcgagacctttctcccggagttcgactagtggttctggtatgtctcctggtgcgtcacagtcaagacatgaaagcgcaaatacggatcaccgaggcctcatcccgtctcacgatttggccactacgccggaatatcaagaaagccagacagtgggtgttcacacccaggcaagccacgacgatgtccccgatgaggcaacagccgtcgacccttccgtgataccgttccccgatactgatgatgaggccacttacagtgatgaagtggatactgacgatgaagagccttgcgcgccacgcccaaaaagctggattgttaccaatcagtccatggatagggatgcgcttttcttcccagcttctctacgacgtgctctctcacttccaccccgtaaacggcgtcgatttagtctaggccttgcgcagaatgactcggaattgggcaacaaggtcgagcagtctgacaatgctcaggagttggacccttcatctgtgcaactgcagacaaatgccgaattggctgcttacgcagctcagcaaaacgcaaaggacacttctgcgagcgagtctgatccatggcatgagcctgagagggcagaggacgctgaagaagcttcgaatggacttcttgagaaggttgctttgagtgcggcagctgtgggagctgctgctgttgctgggttgactgttcttgcgactggtgtcgccccccaaaccgaaattgaggatgagaccaaagagaacggcgaatatgacgaagcaaatgatgagatcgaggacttcgccgaagagccggaaattttgacatcttcacgcgtatccatgggcggaagaagttctcccgcagtgtctgaccaaggaagaccgccttcgatcgtgcatactcgatcgagcagtgtacgctccgtgcgggtgattgatgtgcagagccctcgaagccccgtcgccagatcacgaccagtatctttggaagtagatcccgtcaatatcatataccgttctgcgagcatctcaagggaggggagccaatcgagaactccgcccattgttgaggagaatgactctcgcgcgattccttccgtcacgattactaatacgaaacctatctctcggatcgcatcgtcgtcatcgtcgtctgatgacactggagatgtgagagctacactcgcgccgtcgccacggaaccgatctccccccaaacgaacatattccccagtggcccctattacgtcgggctcaagtaggactaccggtttgaacagcacgatcaacgtggcacaagaagatcgcccagaacgccatgatagcctctcgcggtcgtctagtggtttcagaaatccgccacttcccacattaccagagcggagtgccagtaggcctctgtatgtagcgacgtcacctgtgggacgaacatcacctgagtcgcccaagttgccacgccccatcgcgagcgaatcgccctcatcggcaagatttaaaccagttcggacatcagaagataataactccatccgccctgcagatgttgcgcgtaatttcgaggagcttatccagagtaatgagacattgcaatacacgctaacaccggaaaatatgcggaagattgattctcccacttctctcacccatggcattgcccatgggagtccgagacccagccacaaaagcgccaaaagcgaagaccataaagtgggagaacgctcacgatcttcttctatcaagagatccatatccatcaataagtcaactgggttacactcgcatcctcccgttgaaatggcgggcaatgagaagtatgcccccgccaactcgaaagcccatccgccagtgtctttgcgcaatcgtgccggccctgcacccatggccagagacgcgagagtgccgagggaatccatacaagattttgccgagttcatccggtcgacgggacctccgggtgccaatggccagtttgtcaatggcccacgcttgaaccgagccaataccggcgaatcggcttacggggcagcgaatgtgcgtccccccacaaagccgtcgagtatggacgtccgccgtggccctcggctgcaagccagggatgccattgtcaatacatccaacgagagctctgagttgattgacttcatccgccgcggccctccagccgcaaatagctccatgccgcggatccctcgcaccgtcgcaccctttcgaaacacgcaggactccgaatacatgtctagcgccgtgggtggtagagccgtggacgccaccattcctaatgtcagaaatagccaggcctccacaaacgtgacggaatcatcggcaccgtcctcgatgaactcacagagtgccctgctcaatggccggaacaagccccaaccgctgtactcggccaccagctttgatgacgatgacatgatgccgaagcgaacgcagagacgggttcgtgatccctacgctatcgattttagtgatgatgagcaggaggacgaagagttggacgtgaccccaaagcccaagccgccggcgaagaaggaggaaagcctgatggatttcctgaacaattacccgccacctgctgtgccggagccggcgccgtttgttctaccgaagaagaaaagcgcgcccaatttgatcgcacggctgcgttccggctcgtcttcgggctttggcggttcgggccatctacgaaaaggatctggtctcaccggcatgtccgagagcagaagtctgaatagtcgtcaaggcgcgaagccgtcgcacactcccatcgtcttgcctgctgctacgaatgatcgtttcggcacacagaccaactcactatcgtcgtcgcgcgctccccagtatgggcgtagctctacgaacggcaaacgcttcgagccacgaggatcatcttcttcaagtccccagacggccgatttggctagttttctgcgcgaatcgggacccccaccgtccatgatggccgctcctcccctcgaggacaggtccagcagcggtttctcacggatgtttgagcgccgtaaaaagtcgacagcttattaacccactacgcatgcattcgttctactgtccattctttgtataaagttccatcgcttgcattcggcatggctaaatccatatgctgtggcttcggccctcggttcgatacccagaacattcattcacgaagacacgtagcgcggcgacactgttgtacatcagcatgtttcggtctcggctgcctctagcacggagcagccctgagagaagatatagcttagcagtcgccacccttttcattcggctgttgttttgattctctagaagagtttcgtcttaagagacggacgttgaaggtaggagacgctcactaccctaaactttgggagagaatggcaaaggggataatcttgcctcgtctcttgggatgaggacccaaatatctgttgaatgggaaagaagattcatatgaacgatgtttacggctgctacgatacggggaacatataccatttgacctgatcctgttgttttttgggcccttatttgagacgcacatggtcattgtcgaccaacgtgctactttgctgccttgggtcatgtagccttttggacgttttagtaccgatacctactttgcctttttctgctctggtgtgtaataacataggtagtttgaagataacacttggtgccacgagagaaatggatgtactttctaacgagcttattgtgcgagttggacgtaaattgtgttgatgtctgtcatcttggacatgtgccacttccgctctttgaacaggtcatctacgtctgaacccagttcaatcatctgcctaagataaatgcaactgctaatgctccgtcaacacatgacaccaaaacacaaaaattaccaaccccaaggtcgagcccaagatcaacaggcaggaagtgctttcgagtcacgatcatcaagtcatgtcttggtcataagtgagttcgtgggtaattttcaccgcgtagcatagcaaagttgtccatacaatgaactcatgatcttgtctatactgctcccatctttctctctatagtcctggttattctatatggtgtgatatatttccgtctaacaatacatgtaggtacagatatttatacaagaataggcagggggatatcatcaagaatcatggtttccgctgtagccctgccaggtatgcaacccaaaaccgttttgcccacccgatgctatgtagattatatatatataagtaaatgtgatgtttgtgatactataatcgtacgttcatctccatcatcttccaagtttctttctcttttccactctcatttgtttctttacagctcgagagcgatagaaccttggtccagtgggactcgaggtccagatctctccatctcgtctgctgatcatggtactgtggacatgcccgttcgcgtctcttatcttttttctccaaccgtgcaactggttcgcggcatttacccaatttgcgttctgtagaatcttttgccttccgtccatggataagttgcgtcatcagattcattcgctattacttttctctaatggaagagcagctcagctcgctctaactgttgtgggtaggctcttccttggccgatggactgctgctcctatctttctgggggccaggcgtctgattccccgagagctttcgatccttatcggtttttgggcctttgatgggcttctgagtctccgtgggtgtagcgaccctctgagtgactacaggcacgtgctcgccgtttacgatgaccggaacatagcctcgtggcgagcatgaggctggcttccgcgacggatggcctatgggcgtggtggatccgggcccgctagagatggtattctcttcattccgcaaagcccgtttcctggcgcggtgcagcgtcctttgatgtttgttctttctcgcccgcgcgatcttcctgttggcggcccagaccttgagctcatctgccagttctccgaccgactcggcgacatccgggcgtgggtgtgcaataggtacaggcccattgaagtgcgagaccacctgggccagtgatgtctccgctggcttgctggccgtgtgtagctccttggcggtatgcagcttcttgacgatcttctctctctgtacacgggggaattgccgcaaagcgctcgcaatctgcttgtcgttgatggacagccctgcatgttcaagggcctgtagagcctggagagcaccggccatgtgacccgcctgagcaaagatctggatcaggattgtccacgtgacgatgttggcccgtgggccggaccgacgactcagcatctcgatagtcgacagggcgctcctcacatctcggtggtttttgaagccgtttagtaagatggtccacgtgtggatggacggcggatggtgtaggatattgcggccgtgtgtctttttctcctcgctggctcggtccatcatgcgctgcatctcggtgagggcagacgattgggtctctcgaaactgcatcaggttgcgcaagaagatgtcgaagactcgcgagccttgttccttgagcatggcgatggcggtggggtccttagcttcgacgagcgtccagaacctctcgtaggccttggtgatgtgctggtgcgagcggtagacggagcgcatgtgcgatgccagcatgaggcacaaggtgttggtgtctggccgcatgagctggtcttcgcgtcgccggggaatggccatggtcagctgggtgacgtgcgtctcgtactctggccgcacgacccacgtcgtcagcaggttctcgagagggaagttgaccagcttctgcaggggcgcaaggtcgaagaacttgaagtagaggtcgaacaggggccgccaggaaggattcttcttcttgcgctgtctccgtctgtgttcgatctgcgcctcgttgtcgaggtagatgagctccaggagatcattgaccagccgcacactccaggcgccctcggcgtcgatgatggcgatgacgcgcttgaccgcgtggacgtccagccggcgctttgcaccgccgaggaagatggagtagacgtgcggatccaagcgtatgcggtactggtacatgagctcgatcactttccaggcgctgtccagacggccgtggaggcagaagtcctgcatcaaggccgtcagattcagcaagttgggacggagcccggcctcgaccaggaactggaagagcaggtcgggggcggcgttgtcttcgggcagcggctcgcctggcttcaaggcgagcagcgaggtgcacacgctcagggtcgcgggggcgttgatgtcgaagcccgggatggccatggcgcgatggaggacgtcggccgcgttgatcttggtggcgtgggacttggcgaagcggctggcaaagtgcagcaaggtgtccggggccagcgggtgttccctggccttgaggtggtcgtagatggcgaccagctgccgggcgctgtgggcggcgcagaggaaggccacgatgggctgctccagacgcaggtatcccgggggcgactttttgatcatgcctgcgcagagagtggcgagccgtgcgcctgcccttgcggtgtcatggttgtgaatggcagtagcagtagtggggtgggcgtcggagggcgtgtatcgttgggtctgctggtgccggtggcggcggtagagcacgtaggcggcatcctcggccatgtagctgggagaccaggaggggtcgaaggtggtgccgatgagcagcggcgcaaaggggtgcccgtcgccgagggcgttgaggacgatgtgcgaccagagcagcctcctgctgggctctggctctcgctccaggacggtgcgcacggcggccaagtcctgttccgtcttgacgctattgacgccgacttggacttgttggaccgcgacacgtgcatgcgcctggctgccgtcagcgatgcgaggatcgaacagaggcgagacccgggtcttccaggcgatgtactggtcgagctgggcggcggcgagctgcacgtcggacagcggccagagcagacgctcgagctgggagacgacatggcgggcctcggccggggagagggcgaggagcgaggcgatgtcgtggcgcagatagctgaagttgccgtgggcgctgaggatccgagccttgaggtcgcggatggtacgggccggctgaggcttgggaaccttgactgttctgaaagagccatcccacgaacctttatctggtttatctgctttaactgggttacttggttcagctggtctcaacggcgccgtcctcgacagggtctctgtctctgtctctgtcttgttctcgttctcggcgaaatgctccgagagtggttcggtcgaggattgtgcatgtcgttgttcttgctgctgcagcgtggacgagcgccggacgggacggagcggacgggcacgaggagtggccaggcgggcgatgcatcgtcggcagaggaaggaggtgggcatcgctcacggggcgctggtcatttcggaagtcgtaatgcctcaccctcacgcttgcgcttgccacgtccgcagtgccaatggaaccgaatttctcataatcaggagagccgcaaagtcatagcgggatggagtatgaggtagttattacaacccagttgtaagtggaggcaaatcatgtaaaggaagcgctctaaggtaggtacataggtagttatatcaagagcgcaatgtaaggctgagagatgcgtgtatgtacatctaagtacgacagaaacacactttatcgattgaccaagcg

SEQ ID NO: 37321 - DNA, 2883 bp, Muscodor strobelii
  misc_feature: SGI cDNA ID NO. 572949
  misc_feature: Reduced expression when VOC is produced
  misc_feature: Encodes the peptide sequence at SEQ ID NO 37322
atgcccacctccttcctctgccgacgatgcatcgcccgcctggccactcctcgtgcccgtccgctccgtcccgtccggcgctcgtccacgctgcagcagcaagaacaacgacatgcacaatcctcgaccgaaccactctcggagcatttcgccgagaacgagaacaagacagagacagagacagagaccctgtcgaggacggcgccgttgagaccagctgaaccaagtaacccagttaaagcagataaaccagataaaggttcgtgggatggctctttcagaacagtcaaggttcccaagcctcagccggcccgtaccatccgcgacctcaaggctcggatcctcagcgcccacggcaacttcagctatctgcgccacgacatcgcctcgctcctcgccctctccccggccgaggcccgccatgtcgtctcccagctcgagcgtctgctctggccgctgtccgacgtgcagctcgccgccgcccagctcgaccagtacatcgcctggaagacccgggtctcgcctctgttcgatcctcgcatcgctgacggcagccaggcgcatgcacgtgtcgcggtccaacaagtccaagtcggcgtcaatagcgtcaagacggaacaggacttggccgccgtgcgcaccgtcctggagcgagagccagagcccagcaggaggctgctctggtcgcacatcgtcctcaacgccctcggcgacgggcacccctttgcgccgctgctcatcggcaccaccttcgacccctcctggtctcccagctacatggccgaggatgccgcctacgtgctctaccgccgccaccggcaccagcagacccaacgatacacgccctccgacgcccaccccactactgctactgccattcacaaccatgacaccgcaagggcaggcgcacggctcgccactctctgcgcaggcatgatcaaaaagtcgcccccgggatacctgcgtctggagcagcccatcgtggccttcctctgcgccgcccacagcgcccggcagctggtcgccatctacgaccacctcaaggccagggaacacccgctggccccggacaccttgctgcactttgccagccgcttcgccaagtcccacgccaccaagatcaacgcggccgacgtcctccatcgcgccatggccatcccgggcttcgacatcaacgcccccgcgaccctgagcgtgtgcacctcgctgctcgccttgaagccaggcgagccgctgcccgaagacaacgccgcccccgacctgctcttccagttcctggtcgaggccgggctccgtcccaacttgctgaatctgacggccttgatgcaggacttctgcctccacggccgtctggacagcgcctggaaagtgatcgagctcatgtaccagtaccgcatacgcttggatccgcacgtctactccatcttcctcggcggtgcaaagcgccggctggacgtccacgcggtcaagcgcgtcatcgccatcatcgacgccgagggcgcctggagtgtgcggctggtcaatgatctcctggagctcatctacctcgacaacgaggcgcagatcgaacacagacggagacagcgcaagaagaagaatccttcctggcggcccctgttcgacctctacttcaagttcttcgaccttgcgcccctgcagaagctggtcaacttccctctcgagaacctgctgacgacgtgggtcgtgcggccagagtacgagacgcacgtcacccagctgaccatggccattccccggcgacgcgaagaccagctcatgcggccagacaccaacaccttgtgcctcatgctggcatcgcacatgcgctccgtctaccgctcgcaccagcacatcaccaaggcctacgagaggttctggacgctcgtcgaagctaaggaccccaccgccatcgccatgctcaaggaacaaggctcgcgagtcttcgacatcttcttgcgcaacctgatgcagtttcgagagacccaatcgtctgccctcaccgagatgcagcgcatgatggaccgagccagcgaggagaaaaagacacacggccgcaatatcctacaccatccgccgtccatccacacgtggaccatcttactaaacggcttcaaaaaccaccgagatgtgaggagcgccctgtcgactatcgagatgctgagtcgtcggtccggcccacgggccaacatcgtcacgtggacaatcctgatccagatctttgctcaggcgggtcacatggccggtgctctccaggctctacaggcccttgaacatgcagggctgtccatcaacgacaagcagattgcgagcgctttgcggcaattcccccgtgtacagagagagaagatcgtcaagaagctgcataccgccaaggagctacacacggccagcaagccagcggagacatcactggcccaggtggtctcgcacttcaatgggcctgtacctattgcacacccacgcccggatgtcgccgagtcggtcggagaactggcagatgagctcaaggtctgggccgccaacaggaagatcgcgcgggcgagaaagaacaaacatcaaaggacgctgcaccgcgccaggaaacgggctttgcggaatgaagagaataccatctctagcgggcccggatccaccacgcccataggccatccgtcgcggaagccagcctcatgctcgccacgaggctatgttccggtcatcgtaaacggcgagcacgtgcctgtagtcactcagagggtcgctacacccacggagactcagaagcccatcaaaggcccaaaaaccgataaggatcgaaagctctcggggaatcagacgcctggcccccagaaagataggagcagcagtccatcggccaaggaagagcctacccacaacagttag

SEQ ID NO: 37322 - protein, 960 aa, Muscodor strobelii
  misc_feature: SGI Peptide ID NO. 572949
  misc_feature (731)..(765): Pfam Id: PF01535 Pfam Desc: PPR repeat
  misc_feature (199)..(760): NCBI GI: 28950066 Blast Desc: conserved [Neurospora crassa]
  misc_feature (200)..(760): NCBI GI: 164426230 Blast Desc: NCU01015 [Neurospora crassa OR74A] gi|157071252|gb|EAA32391.2| [Neurospora crassa OR74A]
  misc_feature (223)..(761): NCBI GI: 256731736 Blast Desc: NECHADRAFT_93600 [Nectria haematococca mpVI 77-13-4]
  misc_feature (308)..(760): NCBI GI: 46137111 Blast Desc: FG10071.1 [Gibberella zeae PH-1]
  misc_feature (224)..(730): NCBI GI: 261355713 Blast Desc: conserved [Verticillium albo-atrum VaMs.102]
  misc_feature (188)..(820): NCBI GI: 156043633 Blast Desc: SS1G_10820 [Sclerotinia sclerotiorum 1980] gi|154695207|gb|EDN94945.1| SS1G_10820 [Sclerotinia sclerotiorum 1980]
  misc_feature (200)..(680): NCBI GI: 11359377 Blast Desc: SS1G_10820 [Sclerotinia sclerotiorum 1980] gi|154695207|gb|EDN94945.1| SS1G_10820 [Sclerotinia sclerotiorum 1980]
  misc_feature (320)..(785): NCBI GI: 145605285 Blast Desc: MGG_11707 [Magnaporthe grisea 70-15] gi|145013116|gb|EDJ97757.1| MGG_11707 [Magnaporthe grisea 70-15]
  misc_feature (304)..(634): NCBI GI: 116180060 Blast Desc: CHGG_00658 [Chaetomium globosum CBS 148.51] gi|88184955|gb|EAQ92423.1| CHGG_00658 [Chaetomium globosum CBS 148.51]
  misc_feature (201)..(773): NCBI GI: 242767324 Blast Desc: pentatricopeptide repeat protein [Talaromyces stipitatus ATCC 10500] gi|218724543|gb|EED23960.1| pentatricopeptide repeat protein [Talaromyces stipitatus ATCC
  misc_feature: Useful for introducing or modulating the production of volatile compounds
MPTSFLCRRCIARLATPRARPLRPVRRSSTLQQQEQRHAQSSTEPLSEHFAENENKTETETETLSRTAPLRPAEPSNPVKADKPDKGSWDGSFRTVKVPKPQPARTIRDLKARILSAHGNFSYLRHDIASLLALSPAEARHVVSQLERLLWPLSDVQLAAAQLDQYIAWKTRVSPLFDPRIADGSQAHARVAVQQVQVGVNSVKTEQDLAAVRTVLEREPEPSRRLLWSHIVLNALGDGHPFAPLLIGTTFDPSWSPSYMAEDAAYVLYRRHRHQQTQRYTPSDAHPTTATAIHNHDTARAGARLATLCAGMIKKSPPGYLRLEQPIVAFLCAAHSARQLVAIYDHLKAREHPLAPDTLLHFASRFAKSHATKINAADVLHRAMAIPGFDINAPATLSVCTSLLALKPGEPLPEDNAAPDLLFQFLVEAGLRPNLLNLTALMQDFCLHGRLDSAWKVIELMYQYRIRLDPHVYSIFLGGAKRRLDVHAVKRVIAIIDAEGAWSVRLVNDLLELIYLDNEAQIEHRRRQRKKKNPSWRPLFDLYFKFFDLAPLQKLVNFPLENLLTTWVVRPEYETHVTQLTMAIPRRREDQLMRPDTNTLCLMLASHMRSVYRSHQHITKAYERFWTLVEAKDPTAIAMLKEQGSRVFDIFLRNLMQFRETQSSALTEMQRMMDRASEEKKTHGRNILHHPPSIHTWTILLNGFKNHRDVRSALSTIEMLSRRSGPRANIVTWTILIQIFAQAGHMAGALQALQALEHAGLSINDKQIASALRQFPRVQREKIVKKLHTAKELHTASKPAETSLAQVVSHFNGPVPIAHPRPDVAESVGELADELKVWAANRKIARARKNKHQRTLHRARKRALRNEENTISSGPGSTTPIGHPSRKPASCSPRGYVPVIVNGEHVPVVTQRVATPTETQKPIKGPKTDKDRKLSGNQTPGPQKDRSSSPSAKEEPTHNS

SEQ ID NO: 37323 - DNA, 362 bp, Muscodor strobelii
  misc_feature: SGI cDNA ID NO. 572950
  misc_feature: Reduced expression when VOC is produced
  misc_feature: Encodes the peptide sequence at SEQ ID NO 37324
atgtcggcgtcgcaggccaccctcagcgccgcctcggacgaccgcaaagcccgcctcgccaagctcaagaccctcaagcgcaagcagcccgccgacgagatcgtcgccccccgacccgacgtcagcaggctgcacctgtccggccgcaactacgatgccgagaccagaggccccaagctcggcttcgaggcgcccccgaccctcgccatggacgggcccaccctcgaggagcaggccgcccaggtagagcacgacatccgccggagggccgccgaggacgccagcgaggaccaggccatcgacctgttcaagctgcagcccaagaagcccaactgggacctcaagcgcgacctcgccgccaa

SEQ ID NO: 37324 - protein, 120 aa, Muscodor strobelii
  misc_feature: SGI Peptide ID NO. 572950
  misc_feature (100)..(119): Pfam Id: PF08315 Pfam Desc: cwf18 pre-mRNA splicing factor
  misc_feature (1)..(118): NCBI GI: 156043631 Blast Desc: SS1G_10819 [Sclerotinia sclerotiorum 1980] gi|154695206|gb|EDN94944.1| SS1G_10819 [Sclerotinia sclerotiorum 1980]
  misc_feature (1)..(118): NCBI GI: 154316833 Blast Desc: BC1G_03834 [Botryotinia fuckeliana B05.10] gi|150845446|gb|EDN20639.1| BC1G_03834 [Botryotinia fuckeliana B05.10]
  misc_feature (1)..(118): NCBI GI: 256732122 Blast Desc: NECHADRAFT_80411 [Nectria haematococca mpVI 77-13-4]
  misc_feature (1)..(118): NCBI GI: 261355714 Blast Desc: conserved [Verticillium albo-atrum VaMs.102]
  misc_feature (13)..(118): NCBI GI: 46137113 Blast Desc: FG10072.1 [Gibberella zeae PH-1]
  misc_feature (3)..(119): NCBI GI: 116180062 Blast Desc: CHGG_00659 [Chaetomium globosum CBS 148.51] gi|88184956|gb|EAQ92424.1| CHGG_00659 [Chaetomium globosum CBS 148.51]
  misc_feature (3)..(118): NCBI GI: 145605287 Blast Desc: MGG_11708 [Magnaporthe grisea 70-15] gi|90103001|gb|ABD85369.1| Cwf18-like protein [Magnaporthe grisea] gi|145013117|gb|EDJ97758.1| MGG_11708 [Magnaporthe grisea
  misc_feature (3)..(120): NCBI GI: 171691935 Blast Desc: protein product [Podospora anserina] gi|170945916|emb|CAP72717.1| protein product [Podospora anserina]
  misc_feature (3)..(118): NCBI GI: 85103951 Blast Desc: NCU01016 [Neurospora crassa OR74A] gi|11544681|emb|CAB88522.2| [Neurospora crassa] gi|28923176|gb|EAA32392.1| conserved [Neurospora crassa OR74A]
  misc_feature (1)..(118): NCBI GI: 121702113 Blast Desc: conserved [Aspergillus clavatus NRRL 1] gi|119397464|gb|EAW07895.1| conserved [Aspergillus clavatus NRRL 1]
  misc_feature: Useful for introducing or modulating the production of volatile compounds
MSASQATLSAASDDRKARLAKLKTLKRKQPADEIVAPRPDVSRLHLSGRNYDAETRGPKLGFEAPPTLAMDGPTLEEQAAQVEHDIRRRAAEDASEDQAIDLFKLQPKKPNWDLKRDLAA

SEQ ID NO: 37325 - DNA, 1803 bp, Muscodor strobelii
  misc_feature: SGI cDNA ID NO. 572951
  misc_feature: Encodes the peptide sequence at SEQ ID NO 37326
atggcgtcgcgtacagaatacccaggtgccaccatcgatgctagtaagcgggagattcggctcttcgtactgcgaccaggcaaactcgatgacccaatatgtggtcgactcgaggtcgtctctctcgacgatgcaagctatgacgccttgtcgtacacttggggaaattcgatccatggccgctacctaagcattgaaattggtgctaaatctttattacataatcctattactgacaatctattcgatgccctccgtaggcttagattattagacaagtccagacagctttggatcgatgctctctgcatcaatcaacaagacctggaagaaaagaaagcccagattgcattgatgggctcgatctacagtcgagcaagccaggtatttgtgtggctcggcgagaacgcagagccagagactggtactttgataaagttggctgagagtcgtcaaacgcgggcgtccttaccggaccatcaatggcagctgagaacactgcgaaatttggtgtattcccgcagcgatttctggtggtctcgatcctggatcattcaagagtttgctctcgcacaacagatacctatcgcttgtatcaatcagtggcagatgacatgggacgatcttggagaactcatgatggatctgatggagggggatgagcaatggttctctagggcatatactccctggagaaatgtatgctcgatacgggacattacaggaactgaaggtctttccatgacgaaactggtgttgatggccggtacaagcaatgccaccgtggccaatgacaaagtgtactctttgctaggtcttatggagcaaatagacgcagtcgccgtggaacccaattatcacgacccgccagctacagcctttgctcaggcgacattggcatccatgcgcactcgtggaaatctcgagatactcaaagccgtgagtctggccgatcgaggagagcttacgcttccttcgtggtgtgtaaacttcgcgatgcgaagcaaaggacctggtggcagtttgaatcggatcgtggactacctgactccgagggaaggaatatatgactggctacctggtgaacacactccaagcatcccaggggctgacacgacgcgattgcatctagaaggcatcgttttggacgaggtggagctcatcgcttctcttcctggaccatacaaaaacccttctctggatgattttcttccaactatcttcaatatgatcgacaagctgcctctcaacatgccttaccgctccctcagtcaaggacaacgcaacatgattcaccgctgggcgagatcaaggaggataagcaagttcgataaatcacagtttggcactatagaccagtggcgaacggagctgttgtccgatcaacgcagacctggctcctggagtccttggggactgttgaaaatgttggctgtcaggtggagccaggctatcgggtcatatcacagcccggatctcattcacgaggacacctggaaattcaatgactacaccgaagtggtagcagggcattttgacatttttacgacccgacttggctttgtcggtgcggcgccagcaggcgtacgcaagggtgaccaggtcgtcttgctggcacgcagtaaggaaccggccatattgaggtcacagccgaatgagtctttcactttcgagggattggcgtacgtgccgggaatcatgtttggcgagttgcgacagccctatatcgcttcttgtctgaaagacggtggcggactattgtggttgaataaggatcgtgagtgcaccatcgacgcagaatga

SEQ ID NO: 37326 - protein, 600 aa, Muscodor strobelii
  misc_feature: SGI Peptide ID NO. 572951
  misc_feature (47)..(187): Pfam Id: PF06985 Pfam Desc: Heterokaryon incompatibility protein (HET)
  misc_feature (7)..(587): NCBI GI: 255945855 Blast Desc: Pc20g12090 [Penicillium chrysogenum Wisconsin 54-1255] gi|211588430|emb|CAP86538.1| Pc20g12090 [Penicillium chrysogenum Wisconsin 54-1255]
  misc_feature (12)..(565): NCBI GI: 169607951 Blast Desc: SNOG_07040 [Phaeosphaeria nodorum SN15] gi|111064571|gb|EAT85691.1| SNOG_07040 [Phaeosphaeria nodorum SN15]
  misc_feature (3)..(570): NCBI GI: 238487256 Blast Desc: conserved [Aspergillus flavus NRRL3357] gi|220699745|gb|EED56084.1| conserved [Aspergillus flavus NRRL3357]
  misc_feature (16)..(548): NCBI GI: 154312184 Blast Desc: BC1G_06125 [Botryotinia fuckeliana B05.10] gi|150850088|gb|EDN25281.1| BC1G_06125 [Botryotinia fuckeliana B05.10]
  misc_feature (3)..(327): NCBI GI: 169770345 Blast Desc: [Aspergillus oryzae RIB40] gi|83767501|dbj|BAE57640.1| protein product [Aspergillus oryzae]
  misc_feature (17)..(357): NCBI GI: 256724927 Blast Desc: NECHADRAFT_77119 [Nectria haematococca mpVI 77-13-4]
  misc_feature (15)..(570): NCBI GI: 240110131 Blast Desc: Heterokaryon incompatibility protein, [Coccidioides posadasii C735 delta SOWgp]
  misc_feature (15)..(570): NCBI GI: 119179507 Blast Desc: CIMG_08498 [Coccidioides immitis RS]
  misc_feature (14)..(327): NCBI GI: 256721799 Blast Desc: NECHADRAFT_53281 [Nectria haematococca mpVI 77-13-4]
  misc_feature (12)..(550): NCBI GI: 256724252 Blast Desc: NECHADRAFT_87550 [Nectria haematococca mpVI 77-13-4]
MASRTEYPGATIDASKREIRLFVLRPGKLDDPICGRLEVVSLDDASYDALSYTWGNSIHGRYLSIEIGAKSLLHNPITDNLFDALRRLRLLDKSRQLWIDALCINQQDLEEKKAQIALMGSIYSRASQVFVWLGENAEPETGTLIKLAESRQTRASLPDHQWQLRTLRNLVYSRSDFWWSRSWIIQEFALAQQIPIACINQWQMTWDDLGELMMDLMEGDEQWFSRAYTPWRNVCSIRDITGTEGLSMTKLVLMAGTSNATVANDKVYSLLGLMEQIDAVAVEPNYHDPPATAFAQATLASMRTRGNLEILKAVSLADRGELTLPSWCVNFAMRSKGPGGSLNRIVDYLTPREGIYDWLPGEHTPSIPGADTTRLHLEGIVLDEVELIASLPGPYKNPSLDDFLPTIFNMIDKLPLNMPYRSLSQGQRNMIHRWARSRRISKFDKSQFGTIDQWRTELLSDQRRPGSWSPWGLLKMLAVRWSQAIGSYHSPDLIHEDTWKFNDYTEVVAGHFDIFTTRLGFVGAAPAGVRKGDQVVLLARSKEPAILRSQPNESFTFEGLAYVPGIMFGELRQPYIASCLKDGGGLLWLNKDRECTIDAE

SEQ ID NO: 37327 - DNA, 1548 bp, Muscodor strobelii
  misc_feature: SGI EST ID NO. CUFF.89308.0
  misc_feature: Variant of the nucleotide sequence at SEQ ID NO 37325
gtttgctctcgcacaacagatacctatcgcttgtatcaatcagtggcagatgacatgggacgatcttggagaactcatgatggatctgatggagggggatgagcaatggttctctagggcatatactccctggagaaatgtatgctcgatacgggacattacaggaactgaaggtctttccatgacgaaactggtgttgatggccggtacaagcaatgccaccgtggccaatgacaaagtgtactctttgctaggtcttatggagcaaatagacgcagtcgccgtggaacccaattatcacgacccgccagctacagcctttgctcaggcgacattggcatccatgcgcactcgtggaaatctcgagatactcaaagccgtgagtctggccgatcgaggagagcttacgcttccttcgtggtgtgtaaacttcgcgatgcgaagcaaaggacctggtggcagtttgaatcggatcgtggactacctgactccgagggaaggaatatatgactggctacctggtgaacacactccaagcatcccaggggctgacacgacgcgattgcatctagaaggcatcgttttggacgaggtggagctcatcgcttctcttcctggaccatacaaaaacccttctctggatgattttcttccaactatcttcaatatgatcgacaagctgcctctcaacatgccttaccgctccctcagtcaaggacaacgcaacatgattcaccgctgggcgagatcaaggaggataagcaagttcgataaatcacagtttggcactatagaccagtggcgaacggagctgttgtccgatcaacgcagacctggctcctggagtccttggggactgttgaaaatgttggctgtcaggtggagccaggctatcgggtcatatcacagcccggatctcattcacgaggacacctggaaattcaatgactacaccgaagtggtagcagggcattttgacatttttacgacccgacttggctttgtcggtgcggcgccagcaggcgtacgcaagggtgaccaggtcgtcttgctggcacgcagtaaggaaccggccatattgaggtcacagccgaatgagtctttcactttcgagggattggcgtacgtgccgggaatcatgtttggcgagttgcgacagccctatatcgcttcttgtctgaaagacggtggcggactattgtggttgaataaggatcgtgagtgcaccatcgacgcagaatgatcatagcgttgcaacttctcttgggaagcgtggcgtgttatgcctacggcagccgtttcggtggtcgggtcaagtaggacagtgcatttcgaggtggcgtcggttaaggtcatcttcgtgtgaagactaattactactcgatctctcataactgatctaggcatagatatcttgtctctaggcccccgagatagtgaggaggtggttttttgaatctacatcattagatccgtgatatattcggtcattttggactcttggagttccgccaggacggtagtgttaaaacaataaatacagtgata

SEQ ID NO: 37328 - DNA, 444 bp, Muscodor strobelii
  misc_feature: SGI cDNA ID NO. 572952
  misc_feature: Encodes the peptide sequence at SEQ ID NO 37329
atgcactcatctactcttatctcccttttcgcggcgactcttgcctccgggatggccatgaaatccgaagtcctagaacgtgctccgcccagcacaaaccctatcatcaacacatgctggatcacaggcgaaaattggggagcccaaggggcgctggccatgaactacgccgcggaggcatgcaacgaagctttcgtcggcacgagcggctcgcgaacatggcaggccggcgacacaatcgagcgatgctacaatctggacagcggcaaaatggtcgatttcaccatcgtcaacaaaaacgacgatgccgctacccttaccagcgacgagtgctacaccttcctcaccaagcagatctccggctgtggacagggaggctaccagaaggattctggtttccagttcaaggcggaccccaactccggccagtgcgccaccaactaa

SEQ ID NO: 37329 - protein, 147 aa, Muscodor strobelii
  misc_feature: SGI Peptide ID NO. 572952
  misc_feature (1)..(144): NCBI GI: 226292240 Blast Desc: PADG_03744 [Paracoccidioides brasiliensis Pb18]
  misc_feature (1)..(144): NCBI GI: 225681061 Blast Desc: [Paracoccidioides brasiliensis Pb03]
  misc_feature (1)..(144): NCBI GI: 226282594 Blast Desc: PAAG_01081 [Paracoccidioides brasiliensis Pb01]
  misc_feature (69)..(145): NCBI GI: 171682124 Blast Desc: protein product [Podospora anserina] gi|170941021|emb|CAP66671.1| protein product [Podospora anserina]
  misc_feature (6)..(145): NCBI GI: 46102706 Blast Desc: FG00056.1 [Gibberella zeae PH-1]
  misc_feature (38)..(144): NCBI GI: 171693607 Blast Desc: protein product [Podospora anserina] gi|170946752|emb|CAP73556.1| protein product [Podospora anserina]
MHSSTLISLFAATLASGMAMKSEVLERAPPSTNPIINTCWITGENWGAQGALAMNYAAEACNEAFVGTSGSRTWQAGDTIERCYNLDSGKMVDFTIVNKNDDAATLTSDECYTFLTKQISGCGQGGYQKDSGFQFKADPNSGQCATN

SEQ ID NO: 37330 - DNA, 681 bp, Muscodor strobelii
  misc_feature: SGI cDNA ID NO. 572953
  misc_feature: Encodes the peptide sequence at SEQ ID NO 37331
atgcatttcatgctcttggtcctttcaatcttcgcaccactggccgctcgcgccaacctggatctgtccactacagcctcgctggaccgttatgtccctggttcagttcagaccctatcgcacacattggaaaccgttgagaacggagctttaatggtaagccctgacggcgtcatgcgcagcttctccgccaatggcacggtcatagattttcatcaggtaatccttctcagccatttctcgttccactcaagcgttctcaattttcgatatacggtcaccacgatacatttagctgactcatcgggcttccctcaacagctcgatccaacccagttacaagagtttgccgaaatccaacttcgtcagtggcagaacatgggcagggacattcctgcaacggttaggaatttggctcatggaccctacgctgacggacgcgaagtgttggacaaagacaagcttctcaacccccctgattcaccttatctgttgcgccatcttgttccacgtgtgttccattcgcttgcccagtttccactccatcatcttgacgagaggcaacaatgcattggctcaccctgtctcactttcggtcaatgtgcacgatataggcctactccgtgctaccaatgctactttcctggggggcccgagggtggtgcttgtctgctgaattag

SEQ ID NO: 37331 - protein, 226 aa, Muscodor strobelii
  misc_feature: SGI Peptide ID NO. 572953
  misc_feature (49)..(225): NCBI GI: 226292242 Blast Desc: PADG_03746 [Paracoccidioides brasiliensis Pb18]
  misc_feature (49)..(225): NCBI GI: 226282592 Blast Desc: PAAG_01079 [Paracoccidioides brasiliensis Pb01]
MHFMLLVLSIFAPLAARANLDLSTTASLDRYVPGSVQTLSHTLETVENGALMVSPDGVMRSFSANGTVIDFHQVILLSHFSFHSSVLNFRYTVTTIHLADSSGFPQQLDPTQLQEFAEIQLRQWQNMGRDIPATVRNLAHGPYADGREVLDKDKLLNPPDSPYLLRHLVPRVFHSLAQFPLHHLDERQQCIGSPCLTFGQCARYRPTPCYQCYFPGGPEGGACLLN

SEQ ID NO: 37332 - DNA, 1167 bp, Muscodor strobelii
  misc_feature: SGI cDNA ID NO. 572954
  misc_feature: Encodes the peptide sequence at SEQ ID NO 37333
atgccgccctcactcaaacccctcctacgaacgtccacgacacgctgtgttaatcctttcgctacgcagccttatgtgcgatctcttctcattaccacgcagaacaccaaacgccaccaaagcacgacgactgcgcaagatgccgctacccagcttctcgagcgttttcagggtcaaaagatcatccggcgtcaagttctcgatggtaatcaaatacagaaactcgccttgacactcaaccggcgagacattcacccggttttcgacataagggagcaacctccagcgatcgggaccccaatccctcacggatggcatcttgtgtacttcacgcccaatgggattgagcagcagaacgatctcggcgcagatggaagtgatataatattcaactcacctgagccattcacgagaaggatgtgggctggtggaaagatgacatggggacgtgcggatgaagacggaaccgggctcaaggttggtgatgaagtgacagagaccacggaactagtcagcgcagtaccaaagacaagtagtactggcgggggcgaaatggtgtttgtagaggtcaagaagacttactctactcggagaggacaggcgctcgaggataggcgatcctgggtctttcggacaaagaactcacagcgcgaaagaacgcaaccacccgagacgtacgacacgctatatgctgggccttcggagatgtgggatgaacctcccaaggaagatcaaggtgcctaccctatacgaaacctccgttggtcgccggtaggactattccgcttctcggctttgacgtttaatggtcacaagatccattatgaccgccaatgggcaaccgacatcgagggtcacccgttggctgtcgtccatggaccactgaatctcatttgcatgcttgactactggcgtgatacgatcgctagaggcgctaaggacactagtcgaaaactaagagagataacatatcgcgcgaaggcgccgctgtatgagggacagcattatacactcagcatgaaccaccatgtagcccccagtcaggctgctcttcatcttcacaacctcagcgttacaagagacggaactgtctgcatgagcgcaactatacaatccgattttaggattgagcgaaagtcaacccggtggagtccaaaggttggatga

SEQ ID NO: 37333 - protein, 388 aa, Muscodor strobelii
  misc_feature: SGI Peptide ID NO. 572954
  misc_feature (41)..(370): NCBI GI: 85090928 Blast Desc: NCU09886 [Neurospora crassa OR74A] gi|28920031|gb|EAA29417.1| conserved [Neurospora crassa OR74A]
  misc_feature (29)..(370): NCBI GI: 171684239 Blast Desc: protein product [Podospora anserina] gi|170942080|emb|CAP67732.1| protein product [Podospora anserina]
  misc_feature (31)..(371): NCBI GI: 115390765 Blast Desc: conserved [Aspergillus terreus NIH2624] gi|114193811|gb|EAU35511.1| conserved [Aspergillus terreus NIH2624]
  misc_feature (41)..(340): NCBI GI: 226279752 Blast Desc: conserved [Paracoccidioides brasiliensis Pb01]
  misc_feature (41)..(340): NCBI GI: 226289631 Blast Desc: conserved [Paracoccidioides brasiliensis Pb18]
  misc_feature (43)..(372): NCBI GI: 256728865 Blast Desc: NECHADRAFT_93232 [Nectria haematococca mpVI 77-13-4]
  misc_feature (41)..(340): NCBI GI: 225682257 Blast Desc: conserved [Paracoccidioides brasiliensis Pb03]
  misc_feature (12)..(340): NCBI GI: 145238698 Blast Desc: An07g09220 [Aspergillus niger] gi|134076491|emb|CAK39687.1| protein product [Aspergillus niger]
  misc_feature (44)..(372): NCBI GI: 46138867 Blast Desc: FG10948.1 [Gibberella zeae PH-1]
  misc_feature (31)..(372): NCBI GI: 169768028 Blast Desc: [Aspergillus oryzae RIB40] gi|238484971|ref|XP_002373724.1| conserved [Aspergillus flavus NRRL3357] gi|83766340|dbj|BAE56483.1| protein product oryzae]
MPPSLKPLLRTSTTRCVNPFATQPYVRSLLITTQNTKRHQSTTTAQDAATQLLERFQGQKIIRRQVLDGNQIQKLALTLNRRDIHPVFDIREQPPAIGTPIPHGWHLVYFTPNGIEQQNDLGADGSDIIFNSPEPFTRRMWAGGKMTWGRADEDGTGLKVGDEVTETTELVSAVPKTSSTGGGEMVFVEVKKTYSTRRGQALEDRRSWVFRTKNSQRERTQPPETYDTLYAGPSEMWDEPPKEDQGAYPIRNLRWSPVGLFRFSALTFNGHKIHYDRQWATDIEGHPLAVVHGPLNLICMLDYWRDTIARGAKDTSRKLREITYRAKAPLYEGQHYTLSMNHHVAPSQAALHLHNLSVTRDGTVCMSATIQSDFRIERKSTRWSPKVG

SEQ ID NO: 37334 - DNA, 4676 bp, Muscodor strobelii
  misc_feature: SGI EST ID NO. CUFF.89317.0
  misc_feature: Variant of the nucleotide sequence at SEQ ID NO 37332
caaatacatgaccatcggcgcgctgaagtcacccgtaaatggacatcgtgaaagctatctcatattttcaaacactgtcgatctgaagacatataacaggacacgttgctgcgtgattggcgcacgagaagaccatcgtgcacacagatttcctggcatcagctttcttacaattaaagctcactcattcgaccacgagcctgaagatgccgccctcactcaaacccctcctacgaacgtccacgacacgctgtgttaatcctttcgctacgcagccttatgtgcgatctcttctcattaccacgcagaacaccaaacgccaccaaagcacgacgactgcgcaagatgccgctacccagcttctcgagcgttttcagggtcaaaagatcatccggcgtcaagttctcgatggtaatcaaatacagaaactcgccttgacactcaaccggcgagacattcacccggttttcgacataagggagcaacctccagcgatcgggaccccaatccctcacggatggcatcttgtgtacttcacgcccaatgggattgagcagcagaacgatctcggcgcagatggaagtgatataatattcaactcacctgagccattcacgagaaggatgtgggctggtggaaagatgacatggggacgtgcggatgaagacggaaccgggctcaaggttggtgatgaagtgacagagaccacggaactagtcagcgcagtaccaaagacaagtagtactggcgggggcgaaatggtgtttgtagaggtcaagaagacttactctactcggagaggacaggcgctcgaggataggcgatcctgggtctttcggacaaagaactcacagcgcgaaagaacgcaaccacccgagacgtacgacacgctatatgctgggccttcggagatgtgggatgaacctcccaaggaagatcaaggtgcctaccctatacgaaacctccgttggtcgccggtaggactattccgcttctcggctttgacgtttaatggtcacaagatccattatgaccgccaatgggcaaccgacatcgagggtcacccgttggctgtcgtccatggaccactgaatctcatttgcatgcttgactactggcgtgatacgatcgctagaggcgctaaggacactagtcgaaaactaagagagataacatatcgcgcgaaggcgccgctgtatgagggacagcattatacactcagcatgaaccaccatgtagcccccagtcaggctgctcttcatcttcacaacctcagcgttacaagagacggaactgtctgcatgagcgcaactatacaatccgattttaggattgagcgaaagtcaacccggtggagtccaaaggttggatgatcaacatgccgagcgcaggaataagagttttatttcagaatctgagccgggttagaacagtataatcgattgtctggagatgaaatagaagttcaagatgcagaaatgaagaatcatttcgtcatcacttcgccaagcagtgaactcggccgcaggagttcctgggccgccgtaacaaggtctacaatcaggtatccatgctacaggtatgtgaaattatttacttgtctcgaatactaacagtgtgctctggttcgtctgtagcttagcccgaaagcgacctcttttcgcgacacaggtctatcgttgaacgtgaatgagacactttccacgcttcattccattcgagcaaccgttcattcagcgagtcatgacactatttgatgtgtcactccatcatttcgctctcgggcaaagaattagcaatattagatatcagatatcactctacccccgagaaccaacaccaggaacgtcaacaaaagcgactgttatcaattcacacctcggtatctggggcagctaagtaaagaaggactagcgcatatgcaggtgactacaatcacctaccgtttctggcgcaaccccaaattcggacagccaagggtagccaagaattaacggcagtggatgctagcggctccctccgtgtggtcatcccccactcccaaagctcttttgtgccgccatgcttgatcaaatgcccgaaaatgggtaacgtctgagtgctgctggtcggtgagaaacggtgatatgcgcggtgacgatgttgataatccgggcagataccgtccgtggctagcgaataggactatcgccgcacggtcgtgctggtggttgatcactaggttgccagtctacggacgagggaggggctgatgattatcttgcagtccatcatatatgaagtagagggaaacacttcatggaaaccattgcaaattcataacgcatgcatttatgtgacaacgttttcaccttttcgtcatgcactgcacagtccttctcaccgctgccagcgtccttgtaggagtggtctctgccatccctccaccttcggtccatgttcttcatgagaagcgtcatgccgctcccagaaaatgggtaaagcgagccaaagtcgacagaggaatgatcatgcctatgcgtattggtatggtgcagagcaatctcgatgtagcccacgacatgctcatggagatctctcatcccgcgtcgccgaaatatggacaatggtacaagcctgaggatatcgtcgaaatctttgctccgccgcagcactcagtcgatgctatccgcgattggcttcatgattcaggcatcgagtctcatcgtatcaccctctctgccaacaaacaatggcttcagtttgatgctccggttgatgaggtagaacgactgctgaataccgagtatcatatctacgatcacaaacttactggaagaagtcacgtcgcatgcgacgaatatgatctgccttatcatattcaaaaatatgtagattatgtcacccccggtctaagattggtggctggcggcaaaatgtctcgacccgatgacctggagaagcgtggatttaagacatcaagcacgaacttcaccagcccaagaatcatcgggactctcgcaaagaaccttgtatcgaatttgaccactgcggatatgctagacaactgtgataccatgatcacacccccttgtattgccgctatgtataacattacggagcctactaaggctgccgagggcaatgagctcggaattttcgaggagggtgatttctatgctgccgaggatttgatcgagttcttcaccttgtttacagacatccctccgcttaccacccccacgttagatagcatcgatggcggtaccgctcctggggtcgttgcgggcggagaatcagatcttgattttcaaatttcctaccccattatttaccctcagggcgagatcctctaccagacggacgatcttttctacgcaatgggtatcgaaggaggcggcggtttcttcaatacttttctcgatgctattgacggctcgtactgcaattactcggcctacggggagactggagactctgatattgaccctgtatatcctgacccaatcctacttggataccaaggagagcgacagtgcggcgtttacaaacccgctaatgtcatttccgtctcatatggcgaacaagaagatgatctcccaaccaactatcagcaaagacagtgtgctgagatcatgaagttgggcatgcaaggaactactgttgtgttcgcatctggagattctggcgtcgccgcacgtggtactgacgatgggaacgaggacgggtgtttgggcaatggcgaggtcttcaatcctgacttccccgcctcatgcccgtacataactgcagttggtgctaccgtgttgactggcgatcccacaaaagacgaggaagtcgcagtcactcggttcccctcgggaggtggcttttcgaatatctaccctcgcccttcatttcaggatagcgctgtgaacacatacttgacagatcacacgccagattacaagacgtacaatacttcaggcaccaataatccatcggaggacgtgaccaacggaggcctatacaacattggcgggcgcggctaccccgatgtttctgctgtcggtgataacgttttaatcattaataatggcctaccgactctcatcggcggtacttctgcttctgcgcccgtcttcgctgcgatcatcaaccgtgtcaacgaggagcgaattgccgttggtaagggtcctgttggattcatcaaccctaccttgtatgctcatcccgagatgttcaacgatattgtcgttggcaataactctggctgcaacacaccaggattctatgccgctaccggatgggatcctgttactggtcttggtacccctaattatccggccattcttgagcagttcatgagccttccgtaaccgagacttccggaggcgtgaaacttggtaacagtgttaagctttgcaatttcgttaggactcctactatttaggatctggtaacagtcatgtagatatgtgtttcaagcctggaggcgacggaacgatcgattcgcgtgggttagctcgatgttaaccatactaggggggacgacccattgtggccacaacatgcagtggtgcatcttagcgattgcgaaattggattgcgaatattcctatagctaggagtacatacattcttgaataatctaaactaatttacgccctttcgccgctttagtctcgtatcgatggcgaactctagctttgtttcat

SEQ ID NO: 37335 - DNA, 1977 bp, Muscodor strobelii
  misc_feature: SGI cDNA ID NO. 572955
  misc_feature: Elevated expression when VOC is produced
  misc_feature: Encodes the peptide sequence at SEQ ID NO 37336
atgcactgcacagtccttctcaccgctgccagcgtccttgtaggagtggtctctgccatccctccaccttcggtccatgttcttcatgagaagcgtcatgccgctcccagaaaatgggtaaagcgagccaaagtcgacagaggaatgatcatgcctatgcgtattggtatggtgcagagcaatctcgatgtagcccacgacatgctcatggagatctctcatcccgcgtcgccgaaatatggacaatggtacaagcctgaggatatcgtcgaaatctttgctccgccgcagcactcagtcgatgctatccgcgattggcttcatgattcaggcatcgagtctcatcgtatcaccctctctgccaacaaacaatggcttcagtttgatgctccggttgatgaggtagaacgactgctgaataccgagtatcatatctacgatcacaaacttactggaagaagtcacgtcgcatgcgacgaatatgatctgccttatcatattcaaaaatatgtagattatgtcacccccggtctaagattggtggctggcggcaaaatgtctcgacccgatgacctggagaagcgtggatttaagacatcaagcacgaacttcaccagcccaagaatcatcgggactctcgcaaagaaccttgtatcgaatttgaccactgcggatatgctagacaactgtgataccatgatcacacccccttgtattgccgctatgtataacattacggagcctactaaggctgccgagggcaatgagctcggaattttcgaggagggtgatttctatgctgccgaggatttgatcgagttcttcaccttgtttacagacatccctccgcttaccacccccacgttagatagcatcgatggcggtaccgctcctggggtcgttgcgggcggagaatcagatcttgattttcaaatttcctaccccattatttaccctcagggcgagatcctctaccagacggacgatcttttctacgcaatgggtatcgaaggaggcggcggtttcttcaatacttttctcgatgctattgacggctcgtactgcaattactcggcctacggggagactggagactctgatattgaccctgtatatcctgacccaatcctacttggataccaaggagagcgacagtgcggcgtttacaaacccgctaatgtcatttccgtctcatatggcgaacaagaagatgatctcccaaccaactatcagcaaagacagtgtgctgagatcatgaagttgggcatgcaaggaactactgttgtgttcgcatctggagattctggcgtcgccgcacgtggtactgacgatgggaacgaggacgggtgtttgggcaatggcgaggtcttcaatcctgacttccccgcctcatgcccgtacataactgcagttggtgctaccgtgttgactggcgatcccacaaaagacgaggaagtcgcagtcactcggttcccctcgggaggtggcttttcgaatatctaccctcgcccttcatttcaggatagcgctgtgaacacatacttgacagatcacacgccagattacaagacgtacaatacttcaggcaccaataatccatcggaggacgtgaccaacggaggcctatacaacattggcgggcgcggctaccccgatgtttctgctgtcggtgataacgttttaatcattaataatggcctaccgactctcatcggcggtacttctgcttctgcgcccgtcttcgctgcgatcatcaaccgtgtcaacgaggagcgaattgccgttggtaagggtcctgttggattcatcaaccctaccttgtatgctcatcccgagatgttcaacgatattgtcgttggcaataactctggctgcaacacaccaggattctatgccgctaccggatgggatcctgttactggtcttggtacccctaattatccggccattcttgagcagttcatgagccttccgtaa

SEQ ID NO: 37336 - protein, 658 aa, Muscodor strobelii
  misc_feature: SGI Peptide ID NO. 572955
  misc_feature (36)..(180): Pfam Id: PF09286 Pfam Desc: Pro-kumamolisin, activation domain
  misc_feature (26)..(655): NCBI GI: 212545945 Blast Desc: alkaline serine protease AorO, [Penicillium marneffei ATCC 18224] gi|210064646|gb|EEA18741.1| alkaline serine protease AorO, [Penicillium marneffei ATCC 18224]
  misc_feature (1)..(658): NCBI GI: 159124483 Blast Desc: alkaline serine protease AorO, [Aspergillus fumigatus A1163]
  misc_feature (1)..(658): NCBI GI: 70992131 Blast Desc: alkaline serine protease AorO [Aspergillus fumigatus Af293] gi|74628146|sp|Q70DX9.1|SED1_ASPFU RecName: Full=Tripeptidyl-peptidase sed1; AltName: Full=Sedolisin-A; AorO,
  misc_feature (21)..(658): NCBI GI: 119471296 Blast Desc: protease S8 tripeptidyl peptidase I (cln2) [Neosartorya fischeri NRRL 181] gi|119406297|gb|EAW16248.1| protease S8 tripeptidyl peptidase I (cln2) [Neosartorya fischeri
  misc_feature (26)..(655): NCBI GI: 242824804 Blast Desc: alkaline serine protease AorO, [Talaromyces stipitatus ATCC 10500] gi|218713253|gb|EED12678.1| alkaline serine protease AorO, [Talaromyces stipitatus ATCC 10500]
  misc_feature (1)..(657): NCBI GI: 169772733 Blast Desc: [Aspergillus oryzae RIB40] gi|83768696|dbj|BAE58833.1| protein product [Aspergillus oryzae]
  misc_feature (1)..(657): NCBI GI: 238490642 Blast Desc: alkaline serine protease AorO, [Aspergillus flavus NRRL3357] gi|220696971|gb|EED53312.1| alkaline serine protease AorO, [Aspergillus flavus NRRL3357]
  misc_feature (1)..(655): NCBI GI: 145243152 Blast Desc: An11g01110 [Aspergillus niger] gi|134078789|emb|CAK45848.1| protein product [Aspergillus niger]
  misc_feature (12)..(655): NCBI GI: 255946523 Blast Desc: Pc20g15570 [Penicillium chrysogenum Wisconsin 54-1255] gi|211588764|emb|CAP86886.1| Pc20g15570 [Penicillium chrysogenum Wisconsin 54-1255]
  misc_feature (27)..(658): NCBI GI: 238497265 Blast Desc: protease S8 tripeptidyl peptidase I, [Aspergillus flavus NRRL3357] gi|220694748|gb|EED51092.1| protease S8 tripeptidyl peptidase I, [Aspergillus flavus NRRL3357]
  misc_feature: Useful for introducing or modulating the production of volatile compounds
MHCTVLLTAASVLVGVVSAIPPPSVHVLHEKRHAAPRKWVKRAKVDRGMIMPMRIGMVQSNLDVAHDMLMEISHPASPKYGQWYKPEDIVEIFAPPQHSVDAIRDWLHDSGIESHRITLSANKQWLQFDAPVDEVERLLNTEYHIYDHKLTGRSHVACDEYDLPYHIQKYVDYVTPGLRLVAGGKMSRPDDLEKRGFKTSSTNFTSPRIIGTLAKNLVSNLTTADMLDNCDTMITPPCIAAMYNITEPTKAAEGNELGIFEEGDFYAAEDLIEFFTLFTDIPPLTTPTLDSIDGGTAPGVVAGGESDLDFQISYPIIYPQGEILYQTDDLFYAMGIEGGGGFFNTFLDAIDGSYCNYSAYGETGDSDIDPVYPDPILLGYQGERQCGVYKPANVISVSYGEQEDDLPTNYQQRQCAEIMKLGMQGTTVVFASGDSGVAARGTDDGNEDGCLGNGEVFNPDFPASCPYITAVGATVLTGDPTKDEEVAVTRFPSGGGFSNIYPRPSFQDSAVNTYLTDHTPDYKTYNTSGTNNPSEDVTNGGLYNIGGRGYPDVSAVGDNVLIINNGLPTLIGGTSASAPVFAAIINRVNEERIAVGKGPVGFINPTLYAHPEMFNDIVVGNNSGCNTPGFYAATGWDPVTGLGTPNYPAILEQFMSLP

SEQ ID NO: 37337 - DNA, 4676 bp, Muscodor strobelii; identical to SEQ ID NO: 37334
  misc_feature: SGI EST ID NO. CUFF.89317.0
  misc_feature: Variant of the nucleotide sequence at SEQ ID NO 37335

SEQ ID NO: 37338 - DNA, 1155 bp, Muscodor strobelii
  misc_feature: SGI cDNA ID NO. 572956
  misc_feature: Encodes the peptide sequence at SEQ ID NO 37339
atgcataccgtcatgaagctcccggcgcttggtctcgtggctcttgctcatgcaaaccctctctatcgtaactctacatatgctaagattaatggcactcagcagccctatatgacaaaccccacggccaacattactcaattacctcaaaatgggtcttcgatagagctaagctcttcaacctggccagaccctccggacccttgcactgttttcaactctgctaccgtctcgatgtatcacgagtatctaagtgatgcttgtcctcccctccactcattctcccggcaaaacccgttacaatgcgagtcagacaaccgctatcgctgtactaatgcattctgtcaagttcgcaccaaatacacttacgcccaagagatgccgatagtgggatcctactgcactggcccaatctcatgctctctgacgcatgacgatcggctaacggtggagaagcccaagtatccggatgttgcgcttgcgtcagccctgcgggcaggtgtcagtgggggattttctgacactggcaattctgcaaacactcgcgacgtggctcagagtgtaagacgccatgaatgtggctatttaacatttctcccgattttgaagacggtgtgtggtacatggtcccatgcggagtggaccaagaccggctgtaaggaggtagtaaacaggcaaaacgtttgcgagtctaagcttgtgccgcgccaagatggtagcctcgagggcgagacaatcttcgtcaagacacagtgcggtaccagacagcccctatccatggaccaacaaaaccccttatatcgacaagacggtgttgcgaaagacggcgctgaagtcgctcgcataaccaacgactggacgtacactgattgcaacgtgtggtataagggagtttttgaccatttcgagatacacgggaagaactgggcaaagagcaaacttgggtttgcaccggataaaagagtcgatgggtctaggatgaagtggtggatgggaagctgcggtgcaattactggctggcattttgagtatcatgacgacgatgactcttggtttgccaaaggacatcttcccattgggaccaggagttgcgttggaacgcagcttgtcgggctcggttcattgaccatgtcgaactgtgcagggccaggctag

SEQ ID NO: 37339 - protein, 384 aa, Muscodor strobelii
  misc_feature: SGI Peptide ID NO. 572956
MHTVMKLPALGLVALAHANPLYRNSTYAKINGTQQPYMTNPTANITQLPQNGSSIELSSSTWPDPPDPCTVFNSATVSMYHEYLSDACPPLHSFSRQNPLQCESDNRYRCTNAFCQVRTKYTYAQEMPIVGSYCTGPISCSLTHDDRLTVEKPKYPDVALASALRAGVSGGFSDTGNSANTRDVAQSVRRHECGYLTFLPILKTVCGTWSHAEWTKTGCKEVVNRQNVCESKLVPRQDGSLEGETIFVKTQCGTRQPLSMDQQNPLYRQDGVAKDGAEVARITNDWTYTDCNVWYKGVFDHFEIHGKNWAKSKLGFAPDKRVDGSRMKWWMGSCGAITGWHFEYHDDDDSWFAKGHLPIGTRSCVGTQLVGLGSLTMSNCAGPG

SEQ ID NO: 37340 - DNA, 924 bp, Muscodor strobelii
  misc_feature: SGI cDNA ID NO. 572957
  misc_feature: Encodes the peptide sequence at SEQ ID NO 37341
atgtgggatcccgtgaaggaaattggggatctcagagataaggtcattttaatcaccggaggaaccgccggcgttggcagacaatgtgtgctccaattggcaccgaagagagcaggtcatatttactttactggccgcgacgtggaacgtgggaatgctgtcatcaaggaggcagccgcaaaaggtagcgagacgcttctgacatttatcgagtgtgacctggctagtcttgcgtcctgccaggcggccgcaacgaagatcttgtcagaacagaatcgcctggacgttcttattgccaacgcgggggtcatgaacaagccaccaggtctcaccgttgatggctatgagctgcagttcgggaccaatttccttggtcatgcgctgctgatcaggaagttgttgccgcttatggagcgggtagccctcgaggttgagaacgccgacgtacgaatcgtgcaggtgacgagtgttgggttccgtaatacgccaacgggcggaatcagatttgatgacctgcggacagtgcaagatctacctggacgtggtggcatgctccgctatggacagagcaagctagctgccatcttatacgcacaggagctcgcgcgtcggcatcctagtattctctcgacaagcgtcacgccgggcatcgtcaacacagatctcgtcgcagaacagagcgcgattcaacggggtgtcatctggctcgcagcaaggatcttacagggcggcatgttcaccgctgagcagggtgctgccagtgagctttggtgtgctttcagttctaggaaggacattgtgcaaggcgcgtactatgagcctgttggtcaggtctcgaaaaacagcaccaagtattccagggaccaagagctcgcaaggacattgtgggactggacggatgaagaattgaagagctggctttga

SEQ ID NO: 37341 - protein, 307 aa, Muscodor strobelii
  misc_feature: SGI Peptide ID NO. 572957
  misc_feature (14)..(145): Pfam Id: PF00106 Pfam Desc: short chain dehydrogenase
  misc_feature (14)..(103): Pfam Id: PF00106 Pfam Desc: short chain dehydrogenase
  misc_feature (5)..(307): NCBI GI: 238839616 Blast Desc: oxidoreductase [Microsporum canis CBS 113480]
  misc_feature (10)..(307): NCBI GI: 70989477 Blast Desc: oxidoreductase, short-chain dehydrogenase/reductase family [Aspergillus fumigatus Af293] gi|66847219|gb|EAL87550.1| oxidoreductase, short-chain dehydrogenase/reductase family Af293]
  misc_feature (10)..(307): NCBI GI: 159128997 Blast Desc: oxidoreductase, short-chain dehydrogenase/reductase family [Aspergillus fumigatus A1163]
  misc_feature (7)..(307): NCBI GI: 119480111 Blast Desc: oxidoreductase, short-chain dehydrogenase/reductase family [Neosartorya fischeri NRRL 181] gi|119408238|gb|EAW18187.1| oxidoreductase, short-chain family
  misc_feature (2)..(307): NCBI GI: 169784686 Blast Desc: [Aspergillus oryzae RIB40] gi|83775551|dbj|BAE65671.1| protein product [Aspergillus oryzae]
  misc_feature (2)..(307): NCBI GI: 238508114 Blast Desc: oxidoreductase, short-chain dehydrogenase/reductase family [Aspergillus flavus NRRL3357] gi|220688777|gb|EED45129.1| oxidoreductase, short-chain dehydrogenase/reductase family flavus
  misc_feature (2)..(306): NCBI GI: 189200044 Blast Desc: retinol dehydrogenase 14 [Pyrenophora tritici-repentis Pt-1C-BFP] gi|187983458|gb|EDU48946.1| retinol dehydrogenase 14 [Pyrenophora tritici-repentis Pt-1C-BFP]
  misc_feature (2)..(307): NCBI GI: 115401672 Blast Desc: conserved [Aspergillus terreus NIH2624] gi|114190365|gb|EAU32065.1| conserved [Aspergillus terreus NIH2624]
  misc_feature (2)..(305): NCBI GI: 46126949 Blast Desc: FG07852.1 [Gibberella zeae PH-1]
  misc_feature (2)..(304): NCBI GI: 255950242 Blast Desc: Pc22g19860 [Penicillium chrysogenum Wisconsin 54-1255] gi|211592905|emb|CAP99274.1| Pc22g19860 [Penicillium chrysogenum Wisconsin 54-1255]
  misc_feature (17)..(300): SWISSPROT Homolog: EC 1.3.1.33 Protochlorophyllide reductase
MWDPVKEIGDLRDKVILITGGTAGVGRQCVLQLAPKRAGHIYFTGRDVERGNAVIKEAAAKGSETLLTFIECDLASLASCQAAATKILSEQNRLDVLIANAGVMNKPPGLTVDGYELQFGTNFLGHALLIRKLLPLMERVALEVENADVRIVQVTSVGFRNTPTGGIRFDDLRTVQDLPGRGGMLRYGQSKLAAILYAQELARRHPSILSTSVTPGIVNTDLVAEQSAIQRGVIWLAARILQGGMFTAEQGAASELWCAFSSRKDIVQGAYYEPVGQVSKNSTKYSRDQELARTLWDWTDEELKSWL

SEQ ID NO: 37342 - DNA, 2364 bp, Muscodor strobelii
  misc_feature: SGI cDNA ID NO. 572958
  misc_feature: Encodes the peptide sequence at SEQ ID NO 37343
atggacatggaacatatgagcgttcaggtggctgctgcagacacggcagcagaggttgccgccgaggccgccgctgctgaccctgccaaccgacccccgaagaagacgagccagacttgttccacctgccgactgcgcaaggtgcgttgcgacggacgccgagacacatgtcaaaactgtgaacgtttgggcttcagctgctcatttcaggacaccgggtcgccacaccccgacggcgacagtatcacggccttctctcttcctagacgccgggtgagattagcctgcaccaattgtcactcgcgaaaagcacgatgtactggagagacaccgaaatgtgcacgatgtcaatctcagggtatcgattgtatttataggcctacgaaacggtcaggtggtattaatggtactggtacgggcggacaacacggcaccaccgactccgagcatgagtccgtgacctcggaacctccagaaaagaggactatgacgcacagggaccaccacggctcccaccaccctcccaatggcaatccggatggttcaaatgtggactatccctctgggccatcatcgaaaagagacccgtatgcccaacgcccaagttctagatatgaggaactgactaacaacacgacaaacagcctcgttttccctgatgatgtgctcatacagcgcacatttagcaactatttccgtcacgtgcatcacgtgcccatgttctcattcctgcatcgcgcatcgcttatgcagcgattccatgcggggatgatggacaaggcgcttctacttgcattagtaggtgttacgtcacttctcacggacttgggtcccggcatgagagaatatggcgctaggtgtgtcgatgagtgccaaagtatggtattggcagatctagaaaacccttcgactatcaagatccaggcactagtgcttgttatgaaacatcgaatgctctctcggagatttacgagcgctttcatgctggctgcgaccgctgcacgttttgcatatgctttaagactgaattatgagaatccgaacttatgtttcctggcgagggaatcccggagaagattaatgtgggcattcctcacgctcgactccggcatcaatggcggccatgccgatttcacattattaccccctgattcattacatattcaacttccttgcaatgagcgcaactttgagtttgatttaccccagatcaccggtcacttacgcccgataccttcccaaccctttcccgatgatgtcggctctttagcactgcatgtgcgtctcctctggatgagaagccgtgtgtcatacagcacaaagaatctcctcatcatgcctgagtccgaagtggctcagttgcctcaattgactaaggttctctcgaaagaactcgacagtttcaacgatcatcttcccgcatctttcaagttttccgagagcaatcttcaactccgagcttactcgccgcgtctttgcgttttcatcatgattcatgtttggtggcggcagtgtcatagcgatctatatcgcattgtcatcgctggattaaaggaatccttaccacaatccagtattgcccgcctcgaaccccctttcgtagcatattgcaaacgccagtgttttgatcacgcgatagctatggccgaaattttcaggctcattcttgcattggatggcggccttcccgttactgatctcgatctaccttattgcgcctatcagtgtgctcgactgctctactttgcctaccaaactcaacaagccgaactacgcttatctgcggaacaagtcgtcgatcatgccaaccggtgtttactgattgctaaatctatgaaccacattccggctggtgctgcaattgtcgccgatcttgagaagctaattgctcgtggtctgaatccgaccaacgagagccggccaccaagcccggaggatataggttcctctggcgtaggacatcaagcaatgtcacgccaaaacatgaaccagcagatgcatctgctagacgaaggagaattatcagtcatgtcgtcgatgacaacgccatcgatgaacatgtcatctcctcacggcaatgccaatatggtccccatgcctacgcctttatcagcgagcactcctggtgcttcgcagcatcgccgcgacccgtccttctccgaattgaatgtcaatgatcccaacgcgccgaagatcaatatcgccccagttgttcctccggacgggctggataacaacaatgcctttgaaggtgcgatggacggctttgactttgctattgagtcttatggcaataccggagtggaatccgcatcttggttctcgaatgaatggttgaacgactttccaccgatgaccgtgtaa

SEQ ID NO: 37343 - protein, 787 aa, Muscodor strobelii
  misc_feature: SGI Peptide ID NO. 572958
  misc_feature (94)..(132): Pfam Id: PF00172 Pfam Desc: Fungal Zn(2)-Cys(6) binuclear cluster domain
  misc_feature (38)..(77): Pfam Id: PF00172 Pfam Desc: Fungal Zn(2)-Cys(6) binuclear cluster domain
  misc_feature (38)..(71): Pfam Id: PF00172 Pfam Desc: Fungal Zn(2)-Cys(6) binuclear cluster domain
  misc_feature (23)..(780): NCBI GI: 46123095 Blast Desc: FG05925.1 [Gibberella zeae PH-1]
  misc_feature (34)..(764): NCBI GI: 171676370 Blast Desc: protein product [Podospora anserina] gi|170936251|emb|CAP60910.1| protein product [Podospora anserina]
  misc_feature (34)..(633): NCBI GI: 116200486 Blast Desc: CHGG_10788 [Chaetomium globosum CBS 148.51] gi|88175502|gb|EAQ82970.1| CHGG_10788 [Chaetomium globosum CBS 148.51]
  misc_feature (220)..(780): NCBI GI: 145616504 Blast Desc: MGG_14300 [Magnaporthe grisea 70-15] gi|145010064|gb|EDJ94720.1| MGG_14300 [Magnaporthe grisea 70-15]
  misc_feature (24)..(647): NCBI GI: 85100519 Blast Desc: NCU08848 [Neurospora crassa OR74A] gi|18375971|emb|CAD21270.1| related to nitrate assimilation regulatory protein nirA [Neurospora crassa] [Neurospora crassa
  misc_feature (39)..(586): NCBI GI: 46127321 Blast Desc: FG08038.1 [Gibberella zeae PH-1]
  misc_feature (34)..(580): NCBI GI: 256721665 Blast Desc: NECHADRAFT_44807 [Nectria haematococca mpVI 77-13-4]
  misc_feature (80)..(600): NCBI GI: 156061071 Blast Desc: SS1G_02678 [Sclerotinia sclerotiorum 1980] gi|154700082|gb|EDN99820.1| SS1G_02678 [Sclerotinia sclerotiorum 1980]
  misc_feature (26)..(582): NCBI GI: 115388956 Blast Desc: conserved [Aspergillus terreus NIH2624] gi|114194379|gb|EAU36079.1| conserved [Aspergillus terreus NIH2624]
  misc_feature (28)..(629): NCBI GI: 212543717 Blast Desc: conserved [Penicillium marneffei ATCC 18224] gi|210066920|gb|EEA21013.1| conserved [Penicillium marneffei ATCC 18224]
MDMEHMSVQVAAADTAAEVAAEAAAADPANRPPKKTSQTCSTCRLRKVRCDGRRDTCQNCERLGFSCSFQDTGSPHPDGDSITAFSLPRRRVRLACTNCHSRKARCTGETPKCARCQSQGIDCIYRPTKRSGGINGTGTGGQHGTTDSEHESVTSEPPEKRTMTHRDHHGSHHPPNGNPDGSNVDYPSGPSSKRDPYAQRPSSRYEELTNNTTNSLVFPDDVLIQRTFSNYFRHVHHVPMFSFLHRASLMQRFHAGMMDKALLLALVGVTSLLTDLGPGMREYGARCVDECQSMVLADLENPSTIKIQALVLVMKHRMLSRRFTSAFMLAATAARFAYALRLNYENPNLCFLARESRRRLMWAFLTLDSGINGGHADFTLLPPDSLHIQLPCNERNFEFDLPQITGHLRPIPSQPFPDDVGSLALHVRLLWMRSRVSYSTKNLLIMPESEVAQLPQLTKVLSKELDSFNDHLPASFKFSESNLQLRAYSPRLCVFIMIHVWWRQCHSDLYRIVIAGLKESLPQSSIARLEPPFVAYCKRQCFDHAIAMAEIFRLILALDGGLPVTDLDLPYCAYQCARLLYFAYQTQQAELRLSAEQVVDHANRCLLIAKSMNHIPAGAAIVADLEKLIARGLNPTNESRPPSPEDIGSSGVGHQAMSRQNMNQQMHLLDEGELSVMSSMTTPSMNMSSPHGNANMVPMPTPLSASTPGASQHRRDPSFSELNVNDPNAPKINIAPVVPPDGLDNNNAFEGAMDGFDFAIESYGNTGVESASWFSNEWLNDFPPMTV

SEQ ID NO: 37344 - DNA, 5878 bp, Muscodor strobelii
  misc_feature: SGI EST ID NO. CUFF.89393.0
  misc_feature: Variant of the nucleotide sequence at SEQ ID NO 37342
gcgacgagtattcgttgtacatggcatgacgtgataaggcgctgacatgtagtcatttggcaaattgcgaaaactattcgacacgagagaatttgcttcatctacaccgctcctaccgcaattaataaggagtcacagccccctcgtcgcattcttttgcccgggagtgctgggatttggcggaatgcaggtcccaagcaacacgccgtatggctggcggcgagcgaggcatctccatgcaccacataacgtacgtcttagtctttcttaggtgtgacttggctctggtcaagtagtcatctcggcttgatggaagtgcggtgagtcgtaaaacaacgataagccaagcatgggcaattctcaacaataatgatgttattgaggttaacatggacttctgcattctgatgttgtgcgccgtgtaccgttgggtttgacaggcccagtgagagcggctggatgcatgatgtaatcactgcctgcaaagtctcgcttcttcgacggatcctgagccaccaaactcttctcttcaacttcaagtccttagtgttttgtttgcgcgttgtttctctagtcattgggacacattggagttattatacttcaccattgttgcagcgcgagtgaagtgcatccgatcgcgtcgggagagaatgccgagagcccaatcgccttggttggacgctgtacagactatctacaggcggtttagcgggctacggggcgccagtagtgggtgatagctcacctgacaggcaccgctcggcccccccaccgggccaaacccgcctgatcccgatagacggtgctgtctcccactcgttgccgtcgtcaattttgctcatctcccctgtcaccaccttcgtcgtcgtcaccgccacctctccactacgactgccgacgacacttcatccacacgacaaacaccacgctcgacgatagcgatgcgcacagttgcatgaccgacgacactgcctcttgcaccacgaacaacacgatctgatgccgcatatcgccacccaaacgatccctctgcgacgccgaccagctgcgataacagcccgatgcagcagctaacaagcacgactcgatcaaagggactatggacatggaacatatgagcgttcaggtggctgctgcagacacggcagcagaggttgccgccgaggccgccgctgctgaccctgccaaccgacccccgaagaagacgagccagacttgttccacctgccgactgcgcaaggtgcgttgcgacggacgccgagacacatgtcaaaactgtgaacgtttgggcttcagctgctcatttcaggacaccgggtcgccacaccccgacggcgacagtatcacggccttctctcttcctagacgccgggtgagattagcctgcaccaattgtcactcgcgaaaagcacgatgtactggagagacaccgaaatgtgcacgatgtcaatctcagggtatcgattgtatttataggcctacgaaacggtcaggtggtattaatggtactggtacgggcggacaacacggcaccaccgactccgagcatgagtccgtgacctcggaacctccagaaaagaggactatgacgcacagggaccaccacggctcccaccaccctcccaatggcaatccggatggttcaaatgtggactatccctctgggccatcatcgaaaagagacccgtatgcccaacgcccaagttctagatatgaggaactgactaacaacacgacaaacagcctcgttttccctgatgatgtgctcatacagcgcacatttagcaactatttccgtcacgtgcatcacgtgcccatgttctcattcctgcatcgcgcatcgcttatgcagcgattccatgcggggatgatggacaaggcgcttctacttgcattagtaggtgttacgtcacttctcacggacttgggtcccggcatgagagaatatggcgctaggtgtgtcgatgagtgccaaagtatggtattggcagatctagaaaacccttcgactatcaagatccaggcactagtgcttgttatgaaacatcgaatgctctctcggagatttacgagcgctttcatgctggctgcgaccgctgcacgttttgcatatgctttaagactgaattatgagaatccgaacttatgtttcctggcgagggaatcccggagaagattaatgtgggcattcctcacgctcgactccggcatcaatggcggccatgccgatttcacattattaccccctgattcattacatattcaacttccttgcaatgagcgcaactttgagtttgatttaccccagatcaccggtcacttacgcccgataccttcccaaccctttcccgatgatgtcggctctttagcactgcatgtgcgtctcctctggatgagaagccgtgtgtcatacagcacaaagaatctcctcatcatgcctgagtccgaagtggctcagttgcctcaattgactaaggttctctcgaaagaactcgacagtttcaacgatcatcttcccgcatctttcaagttttccgagagcaatcttcaactccgagcttactcgccgcgtctttgcgttttcatcatgattcatgtttggtggcggcagtgtcatagcgatctatatcgcattgtcatcgctggattaaaggaatccttaccacaatccagtattgcccgcctcgaaccccctttcgtagcatattgcaaacgccagtgttttgatcacgcgatagctatggccgaaattttcaggctcattcttgcattggatggcggccttcccgttactgatctcgatctaccttattgcgcctatcagtgtgctcgactgctctactttgcctaccaaactcaacaagccgaactacgcttatctgcggaacaagtcgtcgatcatgccaaccggtgtttactgattgctaaatctatgaaccacattccggctggtgctgcaattgtcgccgatcttgagaagctaattgctcgtggtctgaatccgaccaacgagagccggccaccaagcccggaggatataggttcctctggcgtaggacatcaagcaatgtcacgccaaaacatgaaccagcagatgcatctgctagacgaaggagaattatcagtcatgtcgtcgatgacaacgccatcgatgaacatgtcatctcctcacggcaatgccaatatggtccccatgcctacgcctttatcagcgagcactcctggtgcttcgcagcatcgccgcgacccgtccttctccgaattgaatgtcaatgatcccaacgcgccgaagatcaatatcgccccagttgttcctccggacgggctggataacaacaatgcctttgaaggtgcgatggacggctttgactttgctattgagtcttatggcaataccggagtggaatccgcatcttggttctcgaatgaatggttgaacgactttccaccgatgaccgtgtaaacgcttcgaacattcacggatgaggagacgatcgtcgacggagtaacgaagccagctgcaatgaaggcgcacggcagccgaggccgtatggaatccgtacccagccgcaaataatcgcagtctgcaactcacatcgtcaccatatggtttgccgtcggcgcaatatgtcatcgcaccgccatgcagcatagactcgccccggtgcgctgccggttgtgaacaaggattgcactgaaggtctaataggcggttatactccgccgacccttagtcgacgagacgaggtctctccgaacatttgcgtagatgcttttgccctgcagatgcttccgatataaaggtgtcagctgcgactcagatactctaggagtcagcggtgcgatgcaccttgacagtaagcttgtatgtgctagctacatgacagtcatcggcggctacaaatctgcagatcttacgttcacttgtgatgtgacgacgccccgtctatggccgaacgattaaaggcctgaacaggcagtctttgagatcaacacaacagttgatgggcttcaccgcctgcttcgcatctcataggctgatacagaagctaacgcatagtgcatagtgctttggagtattatattttggcagtctgtgaagacaggaaaggtcgcgcgatctatcatgacacaaaatgaagtgacgaacatacctacatatactaacgataccaaacgagataccatgatgctttttattctacatattgcattagcgacgaagggcgaacagaatgagattttgggcgttactacaccgtggaggggactggggtaggaactagagaaaatgcgggattggaatgaaaatgatgaactcattaccttcttgtccttcattcgttcctgcggtgattgttgtggctttaagtgcgttgccgcgcgcctattattcagcccactttatgtgcacaaaatgccgtgaaaggtgcgagtgttagaaccgagttgctgcgccccactggaattcgttcctgcccataactgacgccgccttgtgttcatcttacacattagacctcagcttgtgtaatgaccatcttgcagtatgaactcggattccctgttttgccacggccattttggatttcaattcagcgacgaccgcactctatcctcatcctcactcctcctcctatctctcgcattcttcctctatcaacacatcgcgaaatagtgatgggcactagcgacgataatcctgacgtggaggatctcattctgcttctccgtgcactcgaagacgagattcccgacaatgagattcccatattccgcatcttcgccgctacgctgcagtatccaacagacagcacgaccatggcagtaaagctagcaagtgacatcaacttcgtttgtaaggcggaggctgctagtgagaaaatcgaggatgtgattatgtatatttggatgcagctcattcaaattgtgcactgtgtgtcgccagatcatatgtggattgagtgtctagtgcagtgtattgagattttgaggagtcaggaggggcttgttcctgggatggtatgtcatgatgatggtggcgatgaataggtgtttgtagagttgaattgacgttacaaatagggaagcgcagggttttggagcaggctgccttatcttggtcaggtgatgcacgagaaattcgatttctactcccctgtaatagaccctaacgcaacagttcccaagagattcctaacgggatggaagacactgaacacatttgccatcaagctcacgaggaaccctatacaatggtttggattcccgcttcactctcttagatgggcgctagaggaaccgagagccaaggcagatgtgcagagctgtaggctctgggtgacttgtcaatgggtcattgcacacggagatgcaatgcatgaacatatggtagcgcgacgcgttgatgagggggcttcggcgagtgaatcgcttcgacctggagagctgtgtggggacggtgtttcgccttttggcgatgagaggtgggagtactggaggaagcagctacgagcacagatgagcgatgagagcttggacatcgatgaggagacgaaatggcttatgggagagactatcgagaaaattagtgccgtcttgagaaggaagtcatagatgagccatgtcggcttacgtatcacaacattacttcttgattgatagaataacgagaaaatttgggcgaggagaagaaaaagggagttatcctctaaagttcaagcctaatgtcggattcgagttgacgccaatttggcactccccaccttgactgtcagcttgaaagcatacagtagacagaaggtagatgcgctggatggtaggcggcgtccaaagttaggccgacagcgtcaattcaaagttctcgttcagtaac

SEQ ID NO: 37345 - DNA, 873 bp, Muscodor strobelii
  misc_feature: SGI cDNA ID NO. 572959
  misc_feature: Elevated expression when VOC is produced
  misc_feature: Encodes the peptide sequence at SEQ ID NO 37346
atgggcactagcgacgataatcctgacgtggaggatctcattctgcttctccgtgcactcgaagacgagattcccgacaatgagattcccatattccgcatcttcgccgctacgctgcagtatccaacagacagcacgaccatggcagtaaagctagcaagtgacatcaacttcgtttgtaaggcggaggctgctagtgagaaaatcgaggatgtgattatgtatatttggatgcagctcattcaaattgtgcactgtgtgtcgccagatcatatgtggattgagtgtctagtgcagtgtattgagattttgaggagtcaggaggggcttgttcctgggatgggaagcgcagggttttggagcaggctgccttatcttggtcaggtgatgcacgagaaattcgatttctactcccctgtaatagaccctaacgcaacagttcccaagagattcctaacgggatggaagacactgaacacatttgccatcaagctcacgaggaaccctatacaatggtttggattcccgcttcactctcttagatgggcgctagaggaaccgagagccaaggcagatgtgcagagctgtaggctctgggtgacttgtcaatgggtcattgcacacggagatgcaatgcatgaacatatggtagcgcgacgcgttgatgagggggcttcggcgagtgaatcgcttcgacctggagagctgtgtggggacggtgtttcgccttttggcgatgagaggtgggagtactggaggaagcagctacgagcacagatgagcgatgagagcttggacatcgatgaggagacgaaatggcttatgggagagactatcgagaaaattagtgccgtcttgagaaggaagtcatag

SEQ ID NO: 37346 - protein, 290 aa, Muscodor strobelii
  misc_feature: SGI Peptide ID NO. 572959
  misc_feature (31)..(282): NCBI GI: 256724127 Blast Desc: NECHADRAFT_86380 [Nectria haematococca mpVI 77-13-4]
  misc_feature (26)..(282): NCBI GI: 115401202 Blast Desc: [Aspergillus terreus NIH2624] gi|114190130|gb|EAU31830.1| [Aspergillus terreus NIH2624]
  misc_feature (34)..(287): NCBI GI: 145603087 Blast Desc: [Magnaporthe grisea 70-15] gi|145011411|gb|EDJ96067.1| [Magnaporthe grisea 70-15]
  misc_feature (21)..(193): NCBI GI: 171681245 Blast Desc: protein product [Podospora anserina] gi|170940581|emb|CAP65808.1| protein product [Podospora anserina]
  misc_feature (19)..(285): NCBI GI: 119479339 Blast Desc: NFIA_077350 [Neosartorya fischeri NRRL 181] gi|119407852|gb|EAW17801.1| conserved [Neosartorya fischeri NRRL 181]
  misc_feature (13)..(256): NCBI GI: 238497730 Blast Desc: conserved [Aspergillus flavus NRRL3357] gi|220693374|gb|EED49719.1| conserved [Aspergillus flavus NRRL3357]
  misc_feature (13)..(256): NCBI GI: 169768424 Blast Desc: [Aspergillus oryzae RIB40] gi|83766540|dbj|BAE56680.1| protein product [Aspergillus oryzae]
  misc_feature (45)..(284): NCBI GI: 121713380 Blast Desc: conserved [Aspergillus clavatus NRRL 1] gi|119402454|gb|EAW12875.1| conserved [Aspergillus clavatus NRRL 1]
  misc_feature (62)..(267): NCBI GI: 169786111 Blast Desc: [Aspergillus oryzae RIB40] gi|238507055|ref|XP_002384729.1| conserved [Aspergillus flavus NRRL3357] gi|83776264|dbj|BAE66383.1| protein product oryzae]
  misc_feature (28)..(285): NCBI GI: 70997830 Blast Desc: conserved [Aspergillus fumigatus Af293] gi|66851283|gb|EAL91609.1| conserved [Aspergillus fumigatus Af293] gi|159126620|gb|EDP51736.1| conserved [Aspergillus A1163]
  misc_feature: Useful for introducing or modulating the production of volatile compounds
MGTSDDNPDVEDLILLLRALEDEIPDNEIPIFRIFAATLQYPTDSTTMAVKLASDINFVCKAEAASEKIEDVIMYIWMQLIQIVHCVSPDHMWIECLVQCIEILRSQEGLVPGMGSAGFWSRLPYLGQVMHEKFDFYSPVIDPNATVPKRFLTGWKTLNTFAIKLTRNPIQWFGFPLHSLRWALEEPRAKADVQSCRLWVTCQWVIAHGDAMHEHMVARRVDEGASASESLRPGELCGDGVSPFGDERWEYWRKQLRAQMSDESLDIDEETKWLMGETIEKISAVLRRKS

SEQ ID NO: 37347 - DNA, 5878 bp, Muscodor strobelii; identical to SEQ ID NO: 37344
  misc_feature: SGI EST ID NO. CUFF.89393.0
  misc_feature: Variant of the nucleotide sequence at SEQ ID NO 37345

SEQ ID NO: 37348 - DNA, 876 bp, Muscodor strobelii
  misc_feature: SGI cDNA ID NO. 572960
  misc_feature: Encodes the peptide sequence at SEQ ID NO 37349
atggacaatagcgagactattcctacggaccgaattccccaagggtatcataagttctccgaattcatgactgataaatatcatgtcatcttcaaaaagttccgcgagcttgctgtcctcgacctcttgtatttgcaagcagagctttgtgaagttcaagatgaactgaagaagcaggccacgaaggatttaaatcatactgatgatcgacaatattatgatcgcaattggtggtatctacgacactcagaggagaagggattagggaatgagcaataccaactcacccttaatatgcgacaaaagctgcgagaatactataccgcaatacagctttaccgatcaatagatgtattaccccaaccctctgagcagcagcggaagggactctatgccttcgtgtatcaccaatctgcgggcggcttttgcgatttccttggcagagatcttgctgaccaccctgcacattggtccgttctcagcgctgagaatcggcaggatctcttcttccaaggggaggaccaatttgaagatgactggctctcgagattgctatcagatcctatatcacgggctttgggctggctcgccgggagacgcaagcccaccaatgcggacctagaatctgccaaagaggcgtctcagcctgcatcactgtactactattcagaccgccgtatccgcattgcgcttggcatgattggtgcggctctggcgtcaattataccaacaatctcaataattgctttgttcttcgttagcgccatgctggtcagacttggattagttatccttttcacctttggcttcgcccttgccatgtgtcttgcaaccaaagcgaagcggtatgagatattcgcagcaacagccgcgtga

SEQ ID NO: 37349 - protein, 291 aa, Muscodor strobelii
  misc_feature: SGI Peptide ID NO. 572960
  misc_feature (15)..(282): NCBI GI: 256723768 Blast Desc: NECHADRAFT_8348 [Nectria haematococca mpVI 77-13-4]
  misc_feature (15)..(291): NCBI GI: 67524323 Blast Desc: AN2619.2 [Aspergillus nidulans FGSC A4] gi|40743780|gb|EAA62966.1| [Aspergillus nidulans FGSC A4] gi|259486481|tpe|CBF84353.1| TPA: conserved [Aspergillus nidulans
  misc_feature (15)..(286): NCBI GI: 256734893 Blast Desc: NECHADRAFT_75615 [Nectria haematococca mpVI 77-13-4]
  misc_feature (14)..(291): NCBI GI: 67538634 Blast Desc: AN5487.2 [Aspergillus nidulans FGSC A4] gi|40743457|gb|EAA62647.1| [Aspergillus nidulans FGSC A4] gi|259485063|tpe|CBF81815.1| TPA: conserved [Aspergillus nidulans
  misc_feature (15)..(291): NCBI GI: 256726540 Blast Desc: NECHADRAFT_79592 [Nectria haematococca mpVI 77-13-4]
  misc_feature (1)..(291): NCBI GI: 46126473 Blast Desc: FG07614.1 [Gibberella zeae PH-1]
  misc_feature (126)..(291): NCBI GI: 156050485 Blast Desc: [Sclerotinia sclerotiorum 1980] gi|154692230|gb|EDN91968.1| [Sclerotinia sclerotiorum 1980]
  misc_feature (10)..(291): NCBI GI: 261358949 Blast Desc: VDBG_07487 [Verticillium albo-atrum VaMs.102]
  misc_feature (30)..(291): NCBI GI: 169604088 Blast Desc: SNOG_05053 [Phaeosphaeria nodorum SN15] gi|111066324|gb|EAT87444.1| SNOG_05053 [Phaeosphaeria nodorum SN15]
  misc_feature (10)..(291): NCBI GI: 169609999 Blast Desc: SNOG_08091 [Phaeosphaeria nodorum SN15] gi|111063247|gb|EAT84367.1| SNOG_08091 [Phaeosphaeria nodorum SN15]
MDNSETIPTDRIPQGYHKFSEFMTDKYHVIFKKFRELAVLDLLYLQAELCEVQDELKKQATKDLNHTDDRQYYDRNWWYLRHSEEKGLGNEQYQLTLNMRQKLREYYTAIQLYRSIDVLPQPSEQQRKGLYAFVYHQSAGGFCDFLGRDLADHPAHWSVLSAENRQDLFFQGEDQFEDDWLSRLLSDPISRALGWLAGRRKPTNADLESAKEASQPASLYYYSDRRIRIALGMIGAALASIIPTISIIALFFVSAMLVRLGLVILFTFGFALAMCLATKAKRYEIFAATAA

SEQ ID NO: 37350 - DNA, 1785 bp, Muscodor strobelii
  misc_feature: SGI cDNA ID NO. 572961
  misc_feature: Elevated expression when VOC is produced
  misc_feature: Encodes the peptide sequence at SEQ ID NO 37351
atgtcctttgcactgacatacggctccgtgggggacatcatagcgacgatccagctcgtgtaccgcctatcccaggctctcagcgaggtccatggatctgctcgtgagttggaggatcttatttttgagctcaggttactgcgtgctacactcgaacaaattaaagtgacattgtcgagcagaaaaccatgcccggaacttgacaaacttgccatgatactccgacccgcgatcgccgacagtcgagcagacatcgaaaatttcctcgagaaagccataaagaaatatggaaagagattgttacggccggcgggatcgcgcaacggtgtctgggacgccgtgaagatgatacagtggaatttgtgtgaaagtggaaagatcgataaactacgacttaaattgagtcggcgacaggagatcgtgcaaatggtccaactagacgcgaatagaattgagggagaacgagaactatctgctctccgtgagagcatcacggctctagccgaagccgagaagcaggctgatgcgaatctgactgagtggtttgccaacttgatggaacaagtggcaaagcaatctgcgacgctgtcgaggattgagactgttgttacctcctcgaacgttggcatccatgctatagaagccaacatgaagaacgttcagcagatgatgcaattcctaactatttctagccgggtgaatccatcatacgaaaacattatattcattgaagatgcacttggatggaccttcagagtgcatttggatatacgtccgtcttgggagactgttcattcaataatacgggaccagttcatgcacaatcgatcaaaaggtcttgagttggtaaattcaaggcgatatgttctccaagatagggcgactggacgagacgttcttcaagattacaggagagagaaacaagtatcgcagcttatggaattctggcaagctgttcgtcctggacagagtatcaacatgactatgatcttacctagcgagacaaataagcaagatatggacagtgcggttgatgatcttcaaaaaaacaattgtccggcgtgtggacaagtctaccttgtcgacgagccggaattggatataacctgcaagaatcctcggtgcgggctaatctttcgaagaataattgacatcacggattttgatgagaaacaattagatcaaatgccaagcggcgacgtgaatgagatagatgacggcttggacgaaggagaagacctacagcgtctcgtcgacttcaatacccaagacgacaattttttgcattacatgaacgagcttaatgttttcaaaagagttaggctcctaagtcgatgggaagaccaaattgagtcacgaggagaactgtatttccaaggaggaggaatcggcttctggagactatcccaaagtgctgcgtcggtttcagcatactcccaaatggtaattgcggttgcgactcagctcatgatcgatcgattatggggccgaaaagaagaagcgttctctgtatactccgtcggtttcgtcggacgcacagcagcgacgtcaatactattcattgcagtaatatcgcattcaaagacatatcgccagcgtcaggcacaaagcatcagaagtttggagtgggtgaagaagaactccaggattacggtgctacacttttcgccaacgcttataggattgagcgacgaagtattccaccaaccccacccgccggcacggaaagtactcataaaggaggcgaaaaggagagcgaaaaggataatagggagatacaaataa

SEQ ID NO: 37351 - protein, 594 aa, Muscodor strobelii
  misc_feature: SGI Peptide ID NO. 572961
  misc_feature (1)..(383): NCBI GI: 171684115 Blast Desc: protein product [Podospora anserina] gi|170942018|emb|CAP67670.1| protein product [Podospora anserina]
  misc_feature (1)..(355): NCBI GI: 46139163 Blast Desc: FG11096.1 [Gibberella zeae PH-1]
  misc_feature (1)..(465): NCBI GI: 116201235 Blast Desc: CHGG_08502 [Chaetomium globosum CBS 148.51] gi|88177020|gb|EAQ84488.1| CHGG_08502 [Chaetomium globosum CBS 148.51]
  misc_feature (5)..(296): NCBI GI: 169595362 Blast Desc: SNOG_00419 [Phaeosphaeria nodorum SN15] gi|111070794|gb|EAT91914.1| SNOG_00419 [Phaeosphaeria nodorum SN15]
  misc_feature (5)..(382): NCBI GI: 169621809 Blast Desc: SNOG_14117 [Phaeosphaeria nodorum SN15] gi|111057234|gb|EAT78354.1| SNOG_14117 [Phaeosphaeria nodorum SN15]
  misc_feature (3)..(382): NCBI GI: 119172594 Blast Desc: [Coccidioides immitis RS]
  misc_feature (1)..(134): NCBI GI: 116206132 Blast Desc: [Chaetomium globosum CBS 148.51] gi|88182956|gb|EAQ90424.1| [Chaetomium globosum CBS 148.51]
  misc_feature (9)..(385): NCBI GI: 238844501 Blast Desc: conserved [Microsporum canis CBS 113480]
  misc_feature: Useful for introducing or modulating the production of volatile compounds
MSFALTYGSVGDIIATIQLVYRLSQALSEVHGSARELEDLIFELRLLRATLEQIKVTLSSRKPCPELDKLAMILRPAIADSRADIENFLEKAIKKYGKRLLRPAGSRNGVWDAVKMIQWNLCESGKIDKLRLKLSRRQEIVQMVQLDANRIEGERELSALRESITALAEAEKQADANLTEWFANLMEQVAKQSATLSRIETVVTSSNVGIHAIEANMKNVQQMMQFLTISSRVNPSYENIIFIEDALGWTFRVHLDIRPSWETVHSIIRDQFMHNRSKGLELVNSRRYVLQDRATGRDVLQDYRREKQVSQLMEFWQAVRPGQSINMTMILPSETNKQDMDSAVDDLQKNNCPACGQVYLVDEPELDITCKNPRCGLIFRRIIDITDFDEKQLDQMPSGDVNEIDDGLDEGEDLQRLVDFNTQDDNFLHYMNELNVFKRVRLLSRWEDQIESRGELYFQGGGIGFWRLSQSAASVSAYSQMVIAVATQLMIDRLWGRKEEAFSVYSVGFVGRTAATSILFIAVISHSKTYRQRQAQSIRSLEWVKKNSRITVLHFSPTLIGLSDEVFHQPHPPARKVLIKEAKRRAKRIIGRYK

SEQ ID NO: 37352 - DNA, 1586 bp, Muscodor strobelii
  misc_feature: SGI EST ID NO. CUFF.89358.0
  misc_feature: Variant of the nucleotide sequence at SEQ ID NO 37350
acgagaactatctgctctccgtgagagcatcacggctctagccgaagccgagaagcaggctgatgcgaatctgactgagtggtttgccaacttgatggaacaagtggcaaagcaatctgcgacgctgtcgaggattgagactgttgttacctcctcgaacgttggcatccatgctatagaagccaacatgaagaacgttcagcagatgatgcaattcctaactatttctagccgggtgaatccatcatacgaaaacattatattcattgaagatgcacttggatggaccttcagagtgcatttggatatacgtccgtcttgggagactgttcattcaataatacgggaccagttcatgcacaatcgatcaaaaggtcttgagttggtaaattcaaggcgatatgttctccaagatagggcgactggacgagacgttcttcaagattacaggagagagaaacaagtatcgcagcttatggaattctggcaagctgttcgtcctggacagagtatcaacatgactatgatcttacctagcgagacaaataagcaagatatggacagtgcggttgatgatcttcaaaaaaacaattgtccggcgtgtggacaagtctaccttgtcgacgagccggaattggatataacctgcaagaatcctcggtgcgggctaatctttcgaagaataattgacatcacggattttgatgagaaacaattagatcaaatgccaagcggcgacgtgaatgagatagatgacggcttggacgaaggagaagacctacagcgtctcgtcgacttcaatacccaagacgacaattttttgcattacatgaacgagcttaatgttttcaaaagagttaggctcctaagtcgatgggaagaccaaattgagtcacgaggagaactgtatttccaaggaggaggaatcggcttctggagactatcccaaagtgctgcgtcggtttcagcatactcccaaatggtaattgcggttgcgactcagctcatgatcgatcgattatggggccgaaaagaagaagcgttctctgtatactccgtcggtttcgtcggacgcacagcagcgacgtcaatactattcattgcagtaatatcgcattcaaagacatatcgccagcgtcaggcacaaagcatcagaagtttggagtgggtgaagaagaactccaggattacggtgctacacttttcgccaacgcttataggattgagcgacgaagtattccaccaaccccacccgccggcacggaaagtactcataaaggaggcgaaaaggagagcgaaaaggataatagggagatacaaataatacagtgtctacaataatcatcatcctacgatgaaggcccgccaagaccagtgatagacgtatcactgtttggccatctttcggggttggagcaatctcctgaggtttgatccgcttcgtaaaacatttactagtaaatgaccgagccgttcattctgtagcagactattaattctcttcaactactcctagatttgggtcttagacgccgacgagaacgtgttatagatcactggccccttaaatatgttatacaaattgt

SEQ ID NO: 37353 - DNA, 1575 bp, Muscodor strobelii
  misc_feature: SGI cDNA ID NO. 572962
  misc_feature: Elevated expression when VOC is produced
  misc_feature: Encodes the peptide sequence at SEQ ID NO 37354
atgatgtttggcgttctgcagacccgtcactttatcgtcctgttcggacgaaacaaaagttttgtcggacgcgaatcgctcctcaaacagctgaccgacagcgttgtaccgaatgccgagacagacgactgccaaaagaccgttgtcaagggccttggaggcgtgggcaaaacccacgtagccatcgaagccgcctatcgtgtccgagaccaggatcccgcttgctccgttttctgggttccggcagtcgacctgaccagctttgagaacgcgtaccgcgagatcgggaaagtgctccggttgccaagtatcgaagacgacaaagcagacgtcaagacgctagtcaaaatcggcctcagccagaaaagcgctggcagctggctcttgatcatcgacaacgctggtgatgtcgacttgctgtttaccgatgcgcaactggctgagcacttgctttttagtttgcatgggtcgattctgttcacgacccgaaaccatcaagtcgcaatccggctcgatactccgcagaaaaacgtgatcacgatgcaagaaatgaatgatgctgacgctgccgctcttctgcaccaaaacctgaaagaaagccaaacacgcgacgccgagagcacgtcaggtctcctggagtacttggccaaccttccactggcgattaaacaggcatcggccttcatggcgtcgaaaacgaacgtgacgatatccgattatctcaacttgtgcaagtcaagtgacatcgacctaattcacttactaagtcgacaatttgaagaccgccaccgatacaaagcccatgccaaggaccaaaacccgattgccacgacctggttggtctcatttgagcatatttcccgacacatgccacaagcggcaggctaccttaaatttgcatgctttttggcgccgaaggacatccctttatccctcctcccaaatgactcaaagttggagatggcagaagcaattggtacgctaaaagcatacgcattcattaccgagcgagatataccggatgcatttgatattcatcgacttgtccgtcttgtcatgcggaattggctgcaaaagaaaggagactggaggggatggcatataaatgtggttcaacgactggctcccgaatatccatccccaaagcacgaaaatagacagtcgtggatccgatacttaccgcatgcacaaacggtgctggatatcataactacagtcccaatgaaagatgacgctgatctacgtgacaagacggctcgaagctattctatgcttggaaattataacgaggcagaacgtttatctcgccaggctttgaagctaaaagaggaggtactaggcacgaagcatccctccacactgactagcatggacaacctcgccttagtcctcgccagccaagggaaacacgaagaggcggaggaaatgcaccggcaggccttagaactgaaggaagaggtgctgggcacgaagcatcccgagacactgattagcatggacaaccccgcccgcatccttcgtaagcaagggaagcacgaggaacccgagaagatagcatgtttaaacgttatttag

SEQ ID NO: 37354 - protein, 524 aa, Muscodor strobelii
  misc_feature: SGI Peptide ID NO. 572962
  misc_feature (9)..(518): NCBI GI: 171693841 Blast Desc: protein product [Podospora anserina] gi|170946869|emb|CAP73673.1| protein product [Podospora anserina]
  misc_feature (35)..(518): NCBI GI: 171691590 Blast Desc: protein product [Podospora anserina] gi|170945743|emb|CAP71856.1| protein product [Podospora anserina]
  misc_feature (11)..(517): NCBI GI: 116206052 Blast Desc: CHGG_02319 [Chaetomium globosum CBS 148.51] gi|88182916|gb|EAQ90384.1| CHGG_02319 [Chaetomium globosum CBS 148.51]
  misc_feature (8)..(518): NCBI GI: 156034877 Blast Desc: SS1G_13374 [Sclerotinia sclerotiorum 1980] gi|154698777|gb|EDN98515.1| SS1G_13374 [Sclerotinia sclerotiorum 1980]
  misc_feature (19)..(518): NCBI GI: 189211982 Blast Desc: kinesin light chain [Pyrenophora tritici-repentis Pt-1C-BFP] gi|187979517|gb|EDU46143.1| kinesin light chain [Pyrenophora tritici-repentis Pt-1C-BFP]
  misc_feature (15)..(518): NCBI GI: 189197887 Blast Desc: kinesin light chain 1 [Pyrenophora tritici-repentis Pt-1C-BFP] gi|187981229|gb|EDU47855.1| kinesin light chain 1 [Pyrenophora tritici-repentis Pt-1C-BFP]
  misc_feature (9)..(518): NCBI GI: 242816776 Blast Desc: kinesin light chain, [Talaromyces stipitatus ATCC 10500] gi|218713279|gb|EED12703.1| kinesin light chain, [Talaromyces stipitatus ATCC 10500]
  misc_feature (11)..(518): NCBI GI: 115383824 Blast Desc: [Aspergillus terreus NIH2624] gi|114196151|gb|EAU37851.1| [Aspergillus terreus NIH2624]
  misc_feature (7)..(518): NCBI GI: 75858936 Blast Desc: AN9426.2 [Aspergillus nidulans FGSC A4] gi|40747678|gb|EAA66834.1| AN9426.2 [Aspergillus nidulans FGSC A4] gi|259486647|tpe|CBF84668.1| TPA: conserved [Aspergillus FGSC
  misc_feature (7)..(518): NCBI GI: 242816129 Blast Desc: kinesin light chain, [Talaromyces stipitatus ATCC 10500] gi|218715048|gb|EED14471.1| kinesin light chain, [Talaromyces stipitatus ATCC 10500]
  misc_feature: Useful for introducing or modulating the production of volatile compounds
MMFGVLQTRHFIVLFGRNKSFVGRESLLKQLTDSVVPNAETDDCQKTVVKGLGGVGKTHVAIEAAYRVRDQDPACSVFWVPAVDLTSFENAYREIGKVLRLPSIEDDKADVKTLVKIGLSQKSAGSWLLIIDNAGDVDLLFTDAQLAEHLLFSLHGSILFTTRNHQVAIRLDTPQKNVITMQEMNDADAAALLHQNLKESQTRDAESTSGLLEYLANLPLAIKQASAFMASKTNVTISDYLNLCKSSDIDLIHLLSRQFEDRHRYKAHAKDQNPIATTWLVSFEHISRHMPQAAGYLKFACFLAPKDIPLSLLPNDSKLEMAEAIGTLKAYAFITERDIPDAFDIHRLVRLVMRNWLQKKGDWRGWHINVVQRLAPEYPSPKHENRQSWIRYLPHAQTVLDIITTVPMKDDADLRDKTARSYSMLGNYNEAERLSRQALKLKEEVLGTKHPSTLTSMDNLALVLASQGKHEEAEEMHRQALELKEEVLGTKHPETLISMDNPARILRKQGKHEEPEKIACLNVI

SEQ ID NO: 37355 - DNA, 963 bp, Muscodor strobelii
  misc_feature: SGI cDNA ID NO. 572963
  misc_feature: Elevated expression when VOC is produced
  misc_feature: Encodes the peptide sequence at SEQ ID NO 37356
atgaccttattcgaacccatcttaaacgtgagtggctacgaccacgcccgactcatccctatcgatgttgcatttgtcaaagcgcacggtatcctcttcagtcagaaatttcaagacgactatcgcccggctgtgaatgaatttctcggtcttctcaacagacatataggtcgaactacaagaagatggatggagtcaggctactacattgggatcgccaactgctgtgccttactctcgtatggaaaggaggagaatgtgatcatgaaatcgatccagagctttggtgaagagacagccaaccgtacggagctcacaacagccgccaagttatcttcagatttggaagaagctctataccttgtaacaggaactcacgaagtcgtgttccgacgacttggtgactccaatgttctgccttatatccatgtcattgtcgtctttatgtcatacatctcaaggtttccgaacgcgatggctcatctcgagaaaagctttccatggaagtgggcttgtatgattctcaactcactgcttgtctcgtacaaagactatgaacgtatcaagagcaaggaatttcccagggagaatgaggaagcgcctcggccattgcctgacgattttgcgctcaaggggctcttgtgggtcgatcattactaccctactgactggttttctaacgacaagatcgacgacgacgaaaagtactttgagatgccttcgatgacagacattcgaaaggaaagaattctttggctggcataccaaatagcacagtcaggaaagggattggtgtacgacgagatgctgaatcgatttggtgtaacgcctgagtacgaggtggaaattgaggagattgaggagattcgggatgccgaaacgatatctgatgcagattcgcaaacatctaccttgaagtctgaagcaggcggagatatcatggatgttgatacagacgcctga

SEQ ID NO: 37356 - protein, 320 aa, Muscodor strobelii
  misc_feature: SGI Peptide ID NO. 572963
  misc_feature (1)..(286): NCBI GI: 256727644 Blast Desc: NECHADRAFT_66648 [Nectria haematococca mpVI 77-13-4]
  misc_feature (1)..(282): NCBI GI: 164428463 Blast Desc: NCU00611 [Neurospora crassa OR74A] gi|157072156|gb|EAA36515.2| conserved [Neurospora crassa OR74A]
  misc_feature (1)..(285): NCBI GI: 46135793 Blast Desc: FG09412.1 [Gibberella zeae PH-1]
  misc_feature (1)..(296): NCBI GI: 171683933 Blast Desc: protein product [Podospora anserina] gi|170941927|emb|CAP67579.1| protein product [Podospora anserina]
  misc_feature (1)..(317): NCBI GI: 261353274 Blast Desc: conserved [Verticillium albo-atrum VaMs.102]
  misc_feature (1)..(287): NCBI GI: 156050837 Blast Desc: SS1G_08006 [Sclerotinia sclerotiorum 1980] gi|154692406|gb|EDN92144.1| SS1G_08006 [Sclerotinia sclerotiorum 1980]
  misc_feature (1)..(284): NCBI GI: 116192981 Blast Desc: CHGG_06208 [Chaetomium globosum CBS 148.51] gi|88182121|gb|EAQ89589.1| CHGG_06208 [Chaetomium globosum CBS 148.51]
  misc_feature (1)..(303): NCBI GI: 156058500 Blast Desc: SS1G_03262 [Sclerotinia sclerotiorum 1980] gi|154701049|gb|EDO00788.1| SS1G_03262 [Sclerotinia sclerotiorum 1980]
  misc_feature (1)..(299): NCBI GI: 145609934 Blast Desc: MGG_12580 [Magnaporthe grisea 70-15] gi|145017314|gb|EDK01677.1| MGG_12580 [Magnaporthe grisea 70-15]
  misc_feature (1)..(299): NCBI GI: 149210299 Blast Desc: MGCH7_ch7g627 [Magnaporthe grisea 70-15] gi|86196582|gb|EAQ71220.1| MGCH7_ch7g627 [Magnaporthe grisea 70-15]
  misc_feature: Useful for introducing or modulating the production of volatile compounds
MTLFEPILNVSGYDHARLIPIDVAFVKAHGILFSQKFQDDYRPAVNEFLGLLNRHIGRTTRRWMESGYYIGIANCCALLSYGKEENVIMKSIQSFGEETANRTELTTAAKLSSDLEEALYLVTGTHEVVFRRLGDSNVLPYIHVIVVFMSYISRFPNAMAHLEKSFPWKWACMILNSLLVSYKDYERIKSKEFPRENEEAPRPLPDDFALKGLLWVDHYYPTDWFSNDKIDDDEKYFEMPSMTDIRKERILWLAYQIAQSGKGLVYDEMLNRFGVTPEYEVEIEEIEEIRDAETISDADSQTSTLKSEAGGDIMDVDTDA

SEQ ID NO: 37357 - DNA, 505 bp, Muscodor strobelii
  misc_feature: SGI cDNA ID NO. 572964
  misc_feature: Elevated expression when VOC is produced
  misc_feature: Encodes the peptide sequence at SEQ ID NO 37358
atggatgcaatgggagtcaaagtggtagtggagtgctgttccaagctcaaggcgcttcgagcaggagaagttcgcggattcgacagcctggaagttgcggaagccatctctaagcgcgatacgcttgagcgcctggttctcagcggctgtgatgaccttacggatagatcatttaggactatgatccgaggtatcacctcggacactggtagcagcgccgactggtcacttgttccgcctaggcaccttcgacacgttgatgtgagccgatgctcccaattgacgactgatggcatcagatctctgagttatctcgcgccagcgctggaagagctcttacttggcggttgcacagccgtgaccgacgcagctctggagcccatcctcgcctcggcgccacgcctcactcgcctagagctcgattatctgcaccagctcacgaacaacatcctctcggaccatctcgccaaatcgccttgcgcagagacattggagcacctttccg

SEQ ID NO: 37358 - protein, 168 aa, Muscodor strobelii
  misc_feature: SGI Peptide ID NO. 572964
  misc_feature (1)..(168): NCBI GI: 85109814 Blast Desc: NCU06250 [Neurospora crassa OR74A] gi|28924752|gb|EAA33865.1| conserved [Neurospora crassa OR74A]
  misc_feature (1)..(168): NCBI GI: 256733171 Blast Desc: [Nectria haematococca mpVI 77-13-4]
  misc_feature (1)..(168): NCBI GI: 116192199 Blast Desc: CHGG_05817 [Chaetomium globosum CBS 148.51] gi|88181730|gb|EAQ89198.1| CHGG_05817 [Chaetomium globosum CBS 148.51]
  misc_feature (1)..(168): NCBI GI: 46125183 Blast Desc: FG06969.1 [Gibberella zeae PH-1]
  misc_feature (1)..(168): NCBI GI: 154295215 Blast Desc: BC1G_13421 [Botryotinia fuckeliana B05.10] gi|150844148|gb|EDN19341.1| BC1G_13421 [Botryotinia fuckeliana B05.10]
  misc_feature (1)..(168): NCBI GI: 171686676 Blast Desc: protein product [Podospora anserina] gi|170943299|emb|CAP68952.1| protein product [Podospora anserina]
  misc_feature (1)..(168): NCBI GI: 145602055 Blast Desc: MGG_05222 [Magnaporthe grisea 70-15] gi|145010505|gb|EDJ95161.1| MGG_05222 [Magnaporthe grisea 70-15]
  misc_feature (1)..(168): NCBI GI: 242785386 Blast Desc: F-box domain protein [Talaromyces stipitatus ATCC 10500] gi|218720730|gb|EED20149.1| F-box domain protein [Talaromyces stipitatus ATCC 10500]
  misc_feature (1)..(168): NCBI GI: 226283775 Blast Desc: F-box/LRR-repeat protein [Paracoccidioides brasiliensis Pb01]
  misc_feature (1)..(168): NCBI GI: 212542989 Blast Desc: F-box domain protein [Penicillium marneffei ATCC 18224] gi|210066556|gb|EEA20649.1| F-box domain protein [Penicillium marneffei ATCC 18224]
  misc_feature: Useful for introducing or modulating the production of volatile compounds
MDAMGVKVVVECCSKLKALRAGEVRGFDSLEVAEAISKRDTLERLVLSGCDDLTDRSFRTMIRGITSDTGSSADWSLVPPRHLRHVDVSRCSQLTTDGIRSLSYLAPALEELLLGGCTAVTDAALEPILASAPRLTRLELDYLHQLTNNILSDHLAKSPCAETLEHLS

SEQ ID NO: 37359 - DNA, 776 bp, Muscodor strobelii
  misc_feature: SGI EST ID NO. CUFF.89375.0
  misc_feature: Variant of the nucleotide sequence at SEQ ID NO 37357
gatcatcacgtccgcgggcccctttatccaagacctgaacctccgcggctgtgtccagttagaatactacaagcgcaccgacgttctcgtcgctgcctgcagaaacctaaccagcgcttcgctagaagggtgcgcaaattttctaaggccgacgattcacacgctgatccggaacaaccagaggctggtccacttgaacctagcaggtataaatgccgtcacaaatagaacttgcgaagtgatctcggagagctgtccgcagctcgagagcctggatgtttcgtggtgcagcaacatggatgcaatgggagtcaaagtggtagtggagtgctgttccaagctcaaggcgcttcgagcaggagaagttcgcggattcgacagcctggaagttgcggaagccatctctaagcgcgatacgcttgagcgcctggttctcagcggctgtgatgaccttacggatagatcatttaggactatgatccgaggtatcacctcggacactggtagcagcgccgactggtcacttgttccgcctaggcaccttcgacacgttgatgtgagccgatgctcccaattgacgactgatggcatcagatctctgagttatctcgcgccagcgctggaagagctcttacttggcggttgcacagccgtgaccgacgcagctctggagcccatcctcgcctcggcgccacgcctcactcgcctagagctcgattatctgcaccagctcacgaacaacatcctctcggaccatctcgccaaatcgccttgcg

SEQ ID NO: 37360 - DNA, 468 bp, Muscodor strobelii
  misc_feature: SGI cDNA ID NO. 572965
  misc_feature: Encodes the peptide sequence at SEQ ID NO 37361
atggcgagctttgttgaacagctctgggaatccattttcactcccgggccgaccccgagcctcctcatcgctaccaacgtcacctttgcctctttgcaggtcgtcctccttgtcctcctcatcgccacctacagcatacacttcctcgctctttccatcatatctgccgggctctggtgggccatcaactggtttgcgaccgagctggctgcagtcaaggcaagggaagaagccgacaaggcccgcgcagatcaacgagcgacgaaacaggccgatagcgatagcgagaccgaggtcgaaacgacggtcatatccaagggcaaaccgaagaccgggagcaaggaggtcgaaccgatcgaaaaggttggggagctgaagctccgcgcagaaccatcgtcagacaccaaatctgctgttagtacagaagatgagtgggagaaagtgtcagagaacgagaaagacaaataa

SEQ ID NO: 37361 - protein, 155 aa, Muscodor strobelii
  misc_feature: SGI Peptide ID NO. 572965
  misc_feature (1)..(75): Pfam Id: PF08636 Pfam Desc: ER protein Pkr1
  misc_feature (1)..(155): NCBI GI: 171684875 Blast Desc: protein product [Podospora anserina] gi|170942398|emb|CAP68050.1| protein product [Podospora anserina]
  misc_feature (1)..(155): NCBI GI: 116192447 Blast Desc: CHGG_05941 [Chaetomium globosum CBS 148.51] gi|88181854|gb|EAQ89322.1| CHGG_05941 [Chaetomium globosum CBS 148.51]
  misc_feature (1)..(155): NCBI GI: 85112254 Blast Desc: NCU00506 [Neurospora crassa OR74A] gi|28926087|gb|EAA35074.1| conserved [Neurospora crassa OR74A]
  misc_feature (1)..(155): NCBI GI: 154297618 Blast Desc: BC1G_12654 [Botryotinia fuckeliana B05.10] gi|150858477|gb|EDN33669.1| BC1G_12654 [Botryotinia fuckeliana B05.10]
  misc_feature (1)..(155): NCBI GI: 39945516 Blast Desc: MGG_04740 [Magnaporthe grisea 70-15] gi|145021374|gb|EDK05503.1| MGG_04740 [Magnaporthe grisea 70-15]
  misc_feature (1)..(155): NCBI GI: 156030965 Blast Desc: SS1G_14263 [Sclerotinia sclerotiorum 1980] gi|154700654|gb|EDO00393.1| SS1G_14263 [Sclerotinia sclerotiorum 1980]
  misc_feature (1)..(155): NCBI GI: 46108324 Blast Desc: FG01044.1 [Gibberella zeae PH-1]
  misc_feature (1)..(152): NCBI GI: 255948432 Blast Desc: Pc22g09730 [Penicillium chrysogenum Wisconsin 54-1255] gi|211592000|emb|CAP98261.1| Pc22g09730 [Penicillium chrysogenum Wisconsin 54-1255]
  misc_feature (1)..(109): NCBI GI: 169617520 Blast Desc: SNOG_11942 [Phaeosphaeria nodorum SN15] gi|160703426|gb|EAT80354.2| SNOG_11942 [Phaeosphaeria nodorum SN15]
  misc_feature (1)..(113): NCBI GI: 189200781 Blast Desc: conserved [Pyrenophora tritici-repentis Pt-1C-BFP] gi|187983826|gb|EDU49314.1| conserved [Pyrenophora tritici-repentis Pt-1C-BFP]
MASFVEQLWESIFTPGPTPSLLIATNVTFASLQVVLLVLLIATYSIHFLALSIISAGLWWAINWFATELAAVKAREEADKARADQRATKQADSDSETEVETTVISKGKPKTGSKEVEPIEKVGELKLRAEPSSDTKSAVSTEDEWEKVSENEKDK

SEQ ID NO: 37362 - DNA, 1298 bp, Muscodor strobelii
  misc_feature: SGI EST ID NO. CUFF.89390.0
  misc_feature: Variant of the nucleotide sequence at SEQ ID NO 37360
ggtacctatttagtttcgagtgcttctctttttgtacccaaaccatgttctctttgcagccacccgtctcagttctgaatctcttgtctctaggattctaagcgccgcaggcatccaagacaactcacattcccatgttgccaaatttgcctaaccggatgcgcctgatgcaactcacgcgcctgagtcaatactgttgataccctcaaacacggttagataccgacagacgccatccctcattaggtggctttcacagtgccccgctctgccccccaaagaccctttggatctgtaatccacggatcgcgatccttacgacaaccaccatcgcggtggtgttgctgttgtctgtcctctcccaggcccttatatatctatattactgcctaaacggacttacctggccacaagcccaaagaacacgtcgagaaagcgccaaaccacaatctccctcccacgcattcatcaggcgttaaaaccccgctacccgccacatcagtcctcttcggcacgcatcatcggccgctccaaacggcctgttgcacaacaacggagcaaccacctgtcgcgtaacatatccaaatcgatatcttgacatagcatcatggcgagctttgttgaacagctctgggaatccattttcactcccgggccgaccccgagcctcctcatcgctaccaacgtcacctttgcctctttgcaggtcgtcctccttgtcctcctcatcgccacctacagcatacacttcctcgctctttccatcatatctgccgggctctggtgggccatcaactggtttgcgaccgagctggctgcagtcaaggcaagggaagaagccgacaaggcccgcgcagatcaacgagcgacgaaacaggccgatagcgatagcgagaccgaggtcgaaacgacggtcatatccaagggcaaaccgaagaccgggagcaaggaggtcgaaccgatcgaaaaggttggggagctgaagctccgcgcagaaccatcgtcagacaccaaatctgctgttagtacagaagatgagtgggagaaagtgtcagagaacgagaaagacaaataaactcatgcctacataggggaagggattatatatactttatgtgggactttacatgctgttgtcagacaccatgacaagagctcttgcttcatacctcacacacacattggcagtggatctgatttagctataaagatacctcatctgtattgtaccttggagtcataatacatacgatcaactacgtctattgctaaagatgatttagttgcagtctgaaaag

SEQ ID NO: 37363 - DNA, 1281 bp, Muscodor strobelii
  misc_feature: SGI cDNA ID NO. 572966
  misc_feature: Reduced expression when VOC is produced
  misc_feature: Encodes the peptide sequence at SEQ ID NO 37364
atgagcgacaccgacgccaagcctgtcgaggctgtcgacaccaaccctgctgaggtcgccgacgcctctgctgaagctcctgccgacatcgttataggagatgcgactgtcgacatcaagcctgctgagtccgccactacccctgctggtgctcccaccgacaaggccggtgactcagaggccgagaccaaggccacaacagccggtgacgcacctgtcgacgagcctatggctgaccaggagaccgagactgtcgaccccaaattcatcccgcctaaaggcatgcttagaattcaggagaagagcgtggtcgtcaagtccaaccccagtactctccccgacaccgacgaccatcgcgagatccgcaagcaagtcgagttctacttctgcgacgtcaatctgcccaccgacaagtttctgcttggccaagtcggagccgaggagaacaagccagttcccatcaagctcatcgctagcttcgcacgcatgcgccgcttcaagccctacgcagctgtcgtcaaggctctccaggattcccgcacccttgtcgtcgagggggccgagggtgaggagaccgtcaaacgtaaagagcctattgacctgaagaatctcgaggagaaggacgagtgtggtacctacatcaagggtttcggcgatgagacagacaattcacaatacgaaatcgagaactgggttggtgaatttggcaaatacaaagctgtccgtctccgtcgagcagaggataagggcttcaagggctcaatcaacatcacatgggccgataaggaggaggccgacaaattccacgcccttgatcccaagcccacatggcgcggttaccccctctttattctgcgcaagagcgagtacactgagatgaaagctaaagatatccgagatgggaaggtccagcccaaagacagccgtcctggacgaggacggggccgaggtcgtggacaacaccgcggcaatgaccgcagaggaggtaatgatgactggaaacagcgccgtgagcgagaccagcagaacggcttcaggggtggccgaggcaacttcaacggacgtggtcgagggcgtggtgatcggggccggggccgtggccgtggcgactctcgtggacgtggtgaccgccagacggaagtccctgctcctgtcaacgacggccgtcctaggatcaatgtcagcaagagccagtcaaccgagactaacggaaagcgagctcgtgacgacgacacctctgctaccgaacccccctctaagaaagtggacacaaaggagtga

SEQ ID NO: 37364 - protein, 426 aa, Muscodor strobelii
  misc_feature: SGI Peptide ID NO. 572966
  misc_feature (121)..(179): Pfam Id: PF05383 Pfam Desc: La domain
  misc_feature (106)..(425): NCBI GI: 256720741 Blast Desc: NECHADRAFT_72306 [Nectria haematococca mpVI 77-13-4]
  misc_feature (105)..(426): NCBI GI: 70995748 Blast Desc: RNA-binding La domain protein [Aspergillus fumigatus Af293] gi|42820664|emb|CAF31977.1| la protein homolog, [Aspergillus fumigatus] gi|66850264|gb|EAL90591.1| RNA-binding La
  misc_feature (99)..(424): NCBI GI: 39951753 Blast Desc: MGG_01519 [Magnaporthe grisea 70-15] gi|145020636|gb|EDK04765.1| MGG_01519 [Magnaporthe grisea 70-15]
  misc_feature (105)..(426): NCBI GI: 119495439 Blast Desc: RNA-binding La domain protein [Neosartorya fischeri NRRL 181] gi|119412666|gb|EAW22607.1| RNA-binding La domain protein [Neosartorya fischeri NRRL 181]
  misc_feature (106)..(425): NCBI GI: 171690320 Blast Desc: protein product [Podospora anserina] gi|170945108|emb|CAP71219.1| protein product [Podospora anserina]
  misc_feature (106)..(421): NCBI GI: 46110172 Blast Desc: FG01968.1 [Gibberella zeae PH-1]
  misc_feature (86)..(425): NCBI GI: 156034803 Blast Desc: SS1G_13337 [Sclerotinia sclerotiorum 1980] gi|154698740|gb|EDN98478.1| SS1G_13337 [Sclerotinia sclerotiorum 1980]
  misc_feature (105)..(426): NCBI GI: 119183993 Blast Desc: CIMG_06864 [Coccidioides immitis RS]
  misc_feature (106)..(426): NCBI GI: 67517727 Blast Desc: AN1045.2 [Aspergillus nidulans FGSC A4] gi|40747007|gb|EAA66163.1| AN1045.2 [Aspergillus nidulans FGSC A4] gi|259488653|tpe|CBF88265.1| TPA: RNA-binding La domain FGSC
  misc_feature (106)..(426): NCBI GI: 145239993 Blast Desc: An08g05260 [Aspergillus niger] gi|134077157|emb|CAK45498.1| protein product [Aspergillus niger]
  misc_feature: Useful for introducing or modulating the production of volatile compounds
MSDTDAKPVEAVDTNPAEVADASAEAPADIVIGDATVDIKPAESATTPAGAPTDKAGDSEAETKATTAGDAPVDEPMADQETETVDPKFIPPKGMLRIQEKSVVVKSNPSTLPDTDDHREIRKQVEFYFCDVNLPTDKFLLGQVGAEENKPVPIKLIASFARMRRFKPYAAVVKALQDSRTLVVEGAEGEETVKRKEPIDLKNLEEKDECGTYIKGFGDETDNSQYEIENWVGEFGKYKAVRLRRAEDKGFKGSINITWADKEEADKFHALDPKPTWRGYPLFILRKSEYTEMKAKDIRDGKVQPKDSRPGRGRGRGRGQHRGNDRRGGNDDWKQRRERDQQNGFRGGRGNFNGRGRGRGDRGRGRGRGDSRGRGDRQTEVPAPVNDGRPRINVSKSQSTETNGKRARDDDTSATEPPSKKVDTKE

SEQ ID NO: 37365 - DNA, 2083 bp, Muscodor strobelii
  misc_feature: SGI EST ID NO. CUFF.89399.2
  misc_feature: Variant of the nucleotide sequence at SEQ ID NO 37363
gtttcctacaacttactcacatccgacagaactgcacttgccgtccatgcaaagtgtttcctgaacacaatagtgcggtcttggattgggggcattcttgttcaaagtacatatccttctcgaggttcaatattcaattcagccaacaatcttgcccctcttcgtcgcaaccatgagcgacaccgacgccaagcctgtcgaggctgtcgacaccaaccctgctgaggtcgccgacgcctctgctgaagctcctgccgacatcgttataggagatgcgactgtcgacatcaagcctgctgagtccgccactacccctgctggtgctcccaccgacaaggccggtgactcagaggccgagaccaaggccacaacagccggtgacgcacctgtcgacgagcctatggctgaccaggagaccgagactgtcgaccccaaattcatcccgcctaaaggcatgcttagaattcaggagaagagcgtggtcgtcaagtccaaccccagtactctccccgacaccgacgaccatcgcgagatccgcaagcaagtcgagttctacttctgcgacgtcaatctgcccaccgacaagtttctgcttggccaagtcggagccgaggagaacaagccagttcccatcaagctcatcgctagcttcgcacgcatgcgccgcttcaagccctacgcagctgtcgtcaaggctctccaggattcccgcacccttgtcgtcgagggggccgagggtgaggagaccgtcaaacgtaaagagcctattgacctgaagaatctcgaggagaaggacgagtgtggtacctacatcaagggtttcggcgatgagacagacaattcacaatacgaaatcgagaactgggttggtgaatttggcaaatacaaagctgtccgtctccgtcgagcagaggataagggcttcaagggctcaatcaacatcacatgggccgataaggaggaggccgacaaattccacgcccttgatcccaagcccacatggcgcggttaccccctctttattctgcgcaagagcgagtacactgagatgaaagctaaagatatccgagatgggaaggtccagcccaaagacagccgtcctggacgaggacggggccgaggtcgtggacaacaccgcggcaatgaccgcagaggaggtaatgatgactggaaacagcgccgtgagcgagaccagcagaacggcttcaggggtggccgaggcaacttcaacggacgtggtcgagggcgtggtgatcggggccggggccgtggccgtggcgactctcgtggacgtggtgaccgccagacggaagtccctgctcctgtcaacgacggccgtcctaggatcaatgtcagcaagagccagtcaaccgagactaacggaaagcgagctcgtgacgacgacacctctgctaccgaacccccctctaagaaagtggacacaaaggagtgagaaaaaacacgagctgcgttgctgtgcagattgtgcgatgccctccccaacaccattttatgtacttgctctatcccatacgactgcatactcggcgtttgtgttgtggtttcaccaagctctaaaccaacgatttttcatgaagagtctagagggaaaatggataccctcaccaagcgatcttacattttgtgagatgacgggaaaaggacgatgttgcgggttagggacaggcgttcaggctcggaaacggacgatcacaggttttggccagaggaagacagtgatctcattatgtaaatgaaaaagtcatgcgcaggtttctaatccaagagacagcgactttctgacgtaaatgacatatggcgctcgaagcctgaatctcgtgtacctagacttctgttcacaggtcgattaatagattctgtctttacgcaatgctgatactaggctctgctgagagctaacgatcgtgttccaacatcaagtactaaggtcggagtcttcacttcagcacgcgaagcagtaccattgagccagtcgagatatctttcgactgtatttcgcatgagtagcgtgcttaagcttgatttgactactgctgtacacctatacttgagccattgagtg

SEQ ID NO: 37366 - DNA, 1779 bp, Muscodor strobelii
  misc_feature: SGI cDNA ID NO. 572967
  misc_feature: Reduced expression when VOC is produced
  misc_feature: Encodes the peptide sequence at SEQ ID NO 37367
atgagtggcgtggaggatcaacagaatctttccgaaaaacatgaaccagccaccttggcttcagacgaaaatgacaccaaagtaaaagattttgccggagacgagaaatccaacacagacgacgatgttgacgcagcgagcagcataacggcccggagcagcacatcgtcgtcttcagacgaaatcgaccaacacagaagtcgattcagcagaccggggagtttacatccagcgtctcggacagtatcaaaagctgtatcagtgtccgaaattcacgatgagtttcaaaatcaacgagatccagaactaggtccagcgcttcacgagaagatctcgacgacggcacccaacccaaatgatcctaatttggtgacctggacaggacccgatgacccacagaatccaaagaattggaagtattctaggaaatggggtgcggttttcactgtttcgctctttacgctcatctcacctgtctcttcgtccttggtggcgccagcgctggaaaaaatcggagaggagctgcacatcacttcagcgattgagaagaatcttacgctttctgtgtttatcctcgcgtatgcgattggacctttggtttgggggccaatgtccgaactatatggccgagtccgagtcctacagctcgtgaatctgatatacctattcttcaacttgggttgtggtttagcacggacgaaaaatcaactaatagttttccgattcctctccggcctaggcggatcagtctcactcgccgtcggtggcggtgtgctgggcgacttgttcgtagcagaggaacgtggcaaagcccttgcgctctacggtcttgctcctctcctcggcccagcaatcggtcctatcgctggtgccttcatctcccagaacacaacctggcgatgggcattctacgccacgaccatcgctgatgcagtgatccagatcgcgggtttattcttcctccaggagacctacaccccggttctactacaatggaagaaacaacgccttatcaaagaaacaggcaacgaagacttacacactccattcgaccacccagaccgcacagtcggaaaagccatccgtctcgcgctcgagcggccgatgaagatgatcacaacacagatcatcgtgcaatgtctcgcgttatacatgttatacctatacggcctaatctacatagtcctagtctccttcccaaccctctggtcgtcaccaaaacccgaaggttacggcgagagcctcggcataggcggtctaaactacatctccctcggcctcggcttcttcgtcggaacgcaagtctgcgcccctctgcaagaccgtatctacgcggccctaaaacgcaagtacggcggtgcaggccgaccagaataccgcgttcccctcatgatccccggcgcgctcctggtgcccattggactcgtgatatacggctggacagccgagtacaaaacgcactggatcgccccgaatatcgggacgtttttattctccgctggtactatcataggattccagtgtctacaatcgtacctcgtcgattcatatacacgatacgctgcatcagcggtaagttcaggcactgtgctcagatctctcgctgggttcggcttcccgctgtttgcaccgagtttatacaatagtctgggctatggatggggaaatacactacttgcgtttgtggggatcgcgattggatggcctggacctttcttactgtggaagtatggcgagaggctgagacagaggagtccgtttgctgcgggtggttattaa

SEQ ID NO: 37367 - protein, 592 aa, Muscodor strobelii
  misc_feature: SGI Peptide ID NO. 572967
  misc_feature (150)..(540): Pfam Id: PF07690 Pfam Desc: Major Facilitator Superfamily
  misc_feature (185)..(247): Pfam Id: PF00083 Pfam Desc: Sugar (and other) transporter
  misc_feature (50)..(590): NCBI GI: 145247084 Blast Desc: An12g07400 [Aspergillus niger] gi|134080519|emb|CAK46366.1| protein product [Aspergillus niger]
  misc_feature (87)..(590): NCBI GI: 70984531 Blast Desc: MFS multidrug transporter [Aspergillus fumigatus Af293] gi|66845399|gb|EAL85734.1| MFS multidrug transporter, [Aspergillus fumigatus Af293] gi|159122556|gb|EDP47677.1| MFS
  misc_feature (88)..(590): NCBI GI: 119467378 Blast Desc: MFS multidrug transporter, [Neosartorya fischeri NRRL 181] gi|119405647|gb|EAW15598.1| MFS multidrug transporter, [Neosartorya fischeri NRRL 181]
  misc_feature (63)..(590): NCBI GI: 121703922 Blast Desc: MFS multidrug transporter, [Aspergillus clavatus NRRL 1] gi|119398369|gb|EAW08799.1| MFS multidrug transporter, [Aspergillus clavatus NRRL 1]
  misc_feature (2)..(590): NCBI GI: 255934024 Blast Desc: Pc12g14890 [Penicillium chrysogenum Wisconsin 54-1255] gi|211582912|emb|CAP81116.1| Pc12g14890 [Penicillium chrysogenum Wisconsin 54-1255]
  misc_feature (120)..(590): NCBI GI: 212526694 Blast Desc: conserved [Penicillium marneffei ATCC 18224] gi|210072902|gb|EEA26989.1| conserved [Penicillium marneffei ATCC 18224]
  misc_feature (119)..(590): NCBI GI: 242781573 Blast Desc: MFS multidrug transporter, [Talaromyces stipitatus ATCC 10500] gi|218719974|gb|EED19393.1| MFS multidrug transporter, [Talaromyces stipitatus ATCC 10500]
  misc_feature (119)..(590): NCBI GI: 259483026 Blast Desc: TPA: MFS multidrug transporter, (AFU_orthologue; AFUA_6G03040) [Aspergillus nidulans FGSC A4]
  misc_feature (124)..(590): NCBI GI: 238495919 Blast Desc: efflux pump antibiotic resistance protein, [Aspergillus flavus NRRL3357] gi|220694075|gb|EED50419.1| efflux pump antibiotic resistance protein, [Aspergillus flavus NRRL3357]
  misc_feature (88)..(590): NCBI GI: 115386582 Blast Desc: conserved [Aspergillus terreus NIH2624] gi|114190830|gb|EAU32530.1| conserved [Aspergillus terreus NIH2624]
  misc_feature: Useful for introducing or modulating the production of volatile compounds
MSGVEDQQNLSEKHEPATLASDENDTKVKDFAGDEKSNTDDDVDAASSITARSSTSSSSDEIDQHRSRFSRPGSLHPASRTVSKAVSVSEIHDEFQNQRDPELGPALHEKISTTAPNPNDPNLVTWTGPDDPQNPKNWKYSRKWGAVFTVSLFTLISPVSSSLVAPALEKIGEELHITSAIEKNLTLSVFILAYAIGPLVWGPMSELYGRVRVLQLVNLIYLFFNLGCGLARTKNQLIVFRFLSGLGGSVSLAVGGGVLGDLFVAEERGKALALYGLAPLLGPAIGPIAGAFISQNTTWRWAFYATTIADAVIQIAGLFFLQETYTPVLLQWKKQRLIKETGNEDLHTPFDHPDRTVGKAIRLALERPMKMITTQIIVQCLALYMLYLYGLIYIVLVSFPTLWSSPKPEGYGESLGIGGLNYISLGLGFFVGTQVCAPLQDRIYAALKRKYGGAGRPEYRVPLMIPGALLVPIGLVIYGWTAEYKTHWIAPNIGTFLFSAGTIIGFQCLQSYLVDSYTRYAASAVSSGTVLRSLAGFGFPLFAPSLYNSLGYGWGNTLLAFVGIAIGWPGPFLLWKYGERLRQRSPFAAGGY

SEQ ID NO: 37368 - DNA, 2331 bp, Muscodor strobelii
  misc_feature: SGI EST ID NO. CUFF.89403.0
  misc_feature: Variant of the nucleotide sequence at SEQ ID NO 37366
gaatgatccattttattattaatctgtctgcccgtggttgttttaattgaggaagtcaatttgaaataagaaaaggaaaagttcaacactgaaacttcccagatagtcttttcaactttagggattctctattgactaaattgctccaacgtcaccactcgctgcatactttatgtcattagttgaattgaaccttacctctctttgcaattggccctaacttgacctccattgctgtggtgttacatttgttaagactcgctgggtctagttattgttgattagaaaggaatatctgtattgaggctattagttggtataacgcccaagactacttgtattaagcaacaagaattgtgagaatgagtggcgtggaggatcaacagaatctttccgaaaaacatgaaccagccaccttggcttcagacgaaaatgacaccaaagtaaaagattttgccggagacgagaaatccaacacagacgacgatgttgacgcagcgagcagcataacggcccggagcagcacatcgtcgtcttcagacgaaatcgaccaacacagaagtcgattcagcagaccggggagtttacatccagcgtctcggacagtatcaaaagctgtatcagtgtccgaaattcacgatgagtttcaaaatcaacgagatccagaactaggtccagcgcttcacgagaagatctcgacgacggcacccaacccaaatgatcctaatttggtgacctggacaggacccgatgacccacagaatccaaagaattggaagtattctaggaaatggggtgcggttttcactgtttcgctctttacgctcatctcacctgtctcttcgtccttggtggcgccagcgctggaaaaaatcggagaggagctgcacatcacttcagcgattgagaagaatcttacgctttctgtgtttatcctcgcgtatgcgattggacctttggtttgggggccaatgtccgaactatatggccgagtccgagtcctacagctcgtgaatctgatatacctattcttcaacttgggttgtggtttagcacggacgaaaaatcaactaatagttttccgattcctctccggcctaggcggatcagtctcactcgccgtcggtggcggtgtgctgggcgacttgttcgtagcagaggaacgtggcaaagcccttgcgctctacggtcttgctcctctcctcggcccagcaatcggtcctatcgctggtgccttcatctcccagaacacaacctggcgatgggcattctacgccacgaccatcgctgatgcagtgatccagatcgcgggtttattcttcctccaggagacctacaccccggttctactacaatggaagaaacaacgccttatcaaagaaacaggcaacgaagacttacacactccattcgaccacccagaccgcacagtcggaaaagccatccgtctcgcgctcgagcggccgatgaagatgatcacaacacagatcatcgtgcaatgtctcgcgttatacatgttatacctatacggcctaatctacatagtcctagtctccttcccaaccctctggtcgtcaccaaaacccgaaggttacggcgagagcctcggcataggcggtctaaactacatctccctcggcctcggcttcttcgtcggaacgcaagtctgcgcccctctgcaagaccgtatctacgcggccctaaaacgcaagtacggcggtgcaggccgaccagaataccgcgttcccctcatgatccccggcgcgctcctggtgcccattggactcgtgatatacggctggacagccgagtacaaaacgcactggatcgccccgaatatcgggacgtttttattctccgctggtactatcataggattccagtgtctacaatcgtacctcgtcgattcatatacacgatacgctgcatcagcggtaagttcaggcactgtgctcagatctctcgctgggttcggcttcccgctgtttgcaccgagtttatacaatagtctgggctatggatggggaaatacactacttgcgtttgtggggatcgcgattggatggcctggacctttcttactgtggaagtatggcgagaggctgagacagaggagtccgtttgctgcgggtggttattaaaaaagcaattcgggaccgaagaggtgtttgacgatagatgtgaagacatacactgattgaagtgcataaccacctactatatatgagagggtcgaacgcgtacgcattttggataaggtttaaaacaccatgaccatacctgatgtgaagtgtagatatatcaattaataatcttacagattggatgaac

SEQ ID NO: 37369 - DNA, 1299 bp, Muscodor strobelii
  misc_feature: SGI cDNA ID NO. 572968
  misc_feature: Reduced expression when VOC is produced
  misc_feature: Encodes the peptide sequence at SEQ ID NO 37370
atgagaccaagagggtattataatctcaagcgcggcaaaattcgccaatcatggaacaaatacaatctatataacctatccaaagtcctgcggcccattgagatcggcaagttcaattcacccacattcttccagcagaaatggaaagccaagggcatgctgcgcagctaccacggcgagcacatcgtcgagcggaaatgggagcgtatgttcagcaggcgcctgttgagcgtcgtcaacatggatcccaagtacatggccaccaacgacggttctgagatggctgctggtcgtggttccggcaaggacgtcgagccgaaatgggatgagagatccgtccgccccaagctggccaccccctacatgcagatgaccttcgcccccatggagaggaggctggacatcgccgtcttcagagctatgtttgcctccagtacgagacaggccaggcagttctgcgtccacggcgccgtcaaggtcaacggcaaagtcatgccctaccctgcctaccgtctcaaccccggcgacatgttccaagttgacccggagcgcgtcatgtacgcaactggtcgccagaaagaactctccaagaaggagaaaatgccgccttcaatggctcaagaagaagaagcacctgaagagacacccgaggaggacgttgaggccgccgccgaggaatcttcagaagataagcccgagcaagaccccgacacgactgacgcccccgttgccgagcccatcgatatgaagccaacgcgacaacagatccaagatctcactgcacaagtgaaaacgatcctcaaagaggagaagttcagcgccaagcaaaagaaaggcctacggagctttctcaaggatgccaaacctttactctcgcgcgccggaagacccaacgcatccccggccgaaatcgccaaacaactatccacattgatcgccgagctcgacatctccggcggcaaggaggcgtcagtctcagacaaattcgaagaaacagacgtgatcggtgatctgagcccatcacaacttaaagagctcgagaagcgcatggcggatcatatccgagaggaggaggagaatcctatcgacccttcaaaaccttacatgacgccctggagaccgcgccacttcatgtcaccctttgctttcattccgcggtaccttgaggtcaaccagaatatttgctccgcagtttatctgagacatcccgttgcgaggcagggcagcgctgaggtgccgacgccatataataatgaggttggacagcttgctttcaattggtatttgagaaggaggtag

SEQ ID NO: 37370 - protein, 432 aa, Muscodor strobelii
  misc_feature: SGI Peptide ID NO. 572968
  misc_feature (131)..(178): Pfam Id: PF01479 Pfam Desc: S4 domain
  misc_feature (6)..(432): NCBI GI: 171690318 Blast Desc: protein product [Podospora anserina] gi|170945107|emb|CAP71218.1| protein product [Podospora anserina]
  misc_feature (1)..(432): NCBI GI: 212538099 Blast Desc: 30S ribosomal subunit S4, [Penicillium marneffei ATCC 18224] gi|210068947|gb|EEA23038.1| 30S ribosomal subunit S4, [Penicillium marneffei ATCC 18224]
  misc_feature (1)..(432): NCBI GI: 242807612 Blast Desc: 30S ribosomal subunit S4, [Talaromyces stipitatus ATCC 10500] gi|218715617|gb|EED15039.1| 30S ribosomal subunit S4, [Talaromyces stipitatus ATCC 10500]
  misc_feature (7)..(432): NCBI GI: 39951755 Blast Desc: MGG_01520 [Magnaporthe grisea 70-15] gi|145020635|gb|EDK04764.1| MGG_01520 [Magnaporthe grisea 70-15]
  misc_feature (1)..(432): NCBI GI: 70991196 Blast Desc: 30S ribosomal subunit S4 [Aspergillus fumigatus Af293] gi|66848079|gb|EAL88409.1| 30S ribosomal subunit S4, [Aspergillus fumigatus Af293] gi|159130921|gb|EDP56034.1| 30S ribosomal S4,
  misc_feature (1)..(432): NCBI GI: 238489961 Blast Desc: 30S ribosomal subunit S4, [Aspergillus flavus NRRL3357] gi|220698606|gb|EED54946.1| 30S ribosomal subunit S4, [Aspergillus flavus NRRL3357]
  misc_feature (1)..(432): NCBI GI: 169763980 Blast Desc: [Aspergillus oryzae RIB40] gi|83770918|dbj|BAE61051.1| protein product [Aspergillus oryzae]
  misc_feature (1)..(432): NCBI GI: 115388607 Blast Desc: conserved [Aspergillus terreus NIH2624] gi|114195893|gb|EAU37593.1| conserved [Aspergillus terreus NIH2624]
  misc_feature (1)..(432): NCBI GI: 119496387 Blast Desc: 30S ribosomal subunit S4, [Neosartorya fischeri NRRL 181] gi|119413129|gb|EAW23070.1| 30S ribosomal subunit S4, [Neosartorya fischeri NRRL 181]
  misc_feature (1)..(432): NCBI GI: 121702393 Blast Desc: 30S ribosomal subunit S4, [Aspergillus clavatus NRRL 1] gi|119397604|gb|EAW08035.1| 30S ribosomal subunit S4, [Aspergillus clavatus NRRL 1]
  misc_feature: Useful for introducing or modulating the production of volatile compounds
MRPRGYYNLKRGKIRQSWNKYNLYNLSKVLRPIEIGKFNSPTFFQQKWKAKGMLRSYHGEHIVERKWERMFSRRLLSVVNMDPKYMATNDGSEMAAGRGSGKDVEPKWDERSVRPKLATPYMQMTFAPMERRLDIAVFRAMFASSTRQARQFCVHGAVKVNGKVMPYPAYRLNPGDMFQVDPERVMYATGRQKELSKKEKMPPSMAQEEEAPEETPEEDVEAAAEESSEDKPEQDPDTTDAPVAEPIDMKPTRQQIQDLTAQVKTILKEEKFSAKQKKGLRSFLKDAKPLLSRAGRPNASPAEIAKQLSTLIAELDISGGKEASVSDKFEETDVIGDLSPSQLKELEKRMADHIREEEENPIDPSKPYMTPWRPRHFMSPFAFIPRYLEVNQNICSAVYLRHPVARQGSAEVPTPYNNEVGQLAFNWYLRRR

SEQ ID NO: 37371 - DNA, 1644 bp, Muscodor strobelii
  misc_feature: SGI EST ID NO. CUFF.89417.0
  misc_feature: Variant of the nucleotide sequence at SEQ ID NO 37369
caggagtcttggaagtgcaagccacgtgatagcctgtctcgaaatttttggggcgcgttgaacctaggcggcgcattgattgatagacggtgtcgagctgagtgcaattgcgactgttgcagcttcaactagcaattgaacatcggccaagatgagaccaagagggtattataatctcaagcgcggcaaaattcgccaatcatggaacaaatacaatctatataacctatccaaagtcctgcggcccattgagatcggcaagttcaattcacccacattcttccagcagaaatggaaagccaagggcatgctgcgcagctaccacggcgagcacatcgtcgagcggaaatgggagcgtatgttcagcaggcgcctgttgagcgtcgtcaacatggatcccaagtacatggccaccaacgacggttctgagatggctgctggtcgtggttccggcaaggacgtcgagccgaaatgggatgagagatccgtccgccccaagctggccaccccctacatgcagatgaccttcgcccccatggagaggaggctggacatcgccgtcttcagagctatgtttgcctccagtacgagacaggccaggcagttctgcgtccacggcgccgtcaaggtcaacggcaaagtcatgccctaccctgcctaccgtctcaaccccggcgacatgttccaagttgacccggagcgcgtcatgtacgcaactggtcgccagaaagaactctccaagaaggagaaaatgccgccttcaatggctcaagaagaagaagcacctgaagagacacccgaggaggacgttgaggccgccgccgaggaatcttcagaagataagcccgagcaagaccccgacacgactgacgcccccgttgccgagcccatcgatatgaagccaacgcgacaacagatccaagatctcactgcacaagtgaaaacgatcctcaaagaggagaagttcagcgccaagcaaaagaaaggcctacggagctttctcaaggatgccaaacctttactctcgcgcgccggaagacccaacgcatccccggccgaaatcgccaaacaactatccacattgatcgccgagctcgacatctccggcggcaaggaggcgtcagtctcagacaaattcgaagaaacagacgtgatcggtgatctgagcccatcacaacttaaagagctcgagaagcgcatggcggatcatatccgagaggaggaggagaatcctatcgacccttcaaaaccttacatgacgccctggagaccgcgccacttcatgtcaccctttgctttcattccgcggtaccttgaggtcaaccagaatatttgctccgcagtttatctgagacatcccgttgcgaggcagggcagcgctgaggtgccgacgccatataataatgaggttggacagcttgctttcaattggtatttgagaaggaggtagagagcctcaggctgggtgtaaggggtgaggttgtatcaaagctgtagtcacgtgtcgccatgatcgacatgtaaagactatgagccactgtacatatatcttcgggctagaaagatagaagacatgtataataatattgtaccaacaatgttgcggagtagacgttttatgatcaagtgcgacctcccggtcaa

SEQ ID NO: 37372 - DNA, 1494 bp, Muscodor strobelii
  misc_feature: SGI cDNA ID NO. 572969
  misc_feature: Encodes the peptide sequence at SEQ ID NO 37373
atgaggtcctatatcgccccaaaggccgttgttttggctgttattctaatggccaccgtgcaaggggcctctgactgtcttcgcaaactggagtcggcattgcaagatattgcttatgttacgctcggccgcaaccgtgattacaagacaattgggcataaccgcacagttgactggattgttaaggagcttaaggatgcaacgggtgattactacgacatcgaggttgccccaaccgagttcattgtcccccgtgatcctgctcccttcgtctatggcggcgtgacgtatgagggtaaaccgatgtcgaagaccgagggtggtccttttggagaggtcgaggctcctgttgttgtcgttgctaatcttggttgcgatgctgctgattatcctgccggactcgaaggtgccatcgcgctcatcgcacgtggcacgtgtactttcgagctcaagtcgcagttagctggtagtgctggagccgttggcgctcttatatataaccctgagggaaattacaatgtcgttggtggtacccttggtgcgggtgacggcaccgttcccactattggtattcattacgataatgctactactatcaaggcgcacttggccaccaaccccgatgataccggcgctttgagcgtagtgacgtacatccagtatagcaagaacgtcatcgcaaccaccaaaggcggcgatcaggacaacatctacgttctaggggcacacgccgactcggtcgaagccggtcccggcatcaacgacgacggcagcggaacaatcgcgctcctcgagatcgccagccagctgtccaagttcaaggtacaaaacgcagtgcgattcgcatggtggacaggtgaagaatacggcaagctaggatccttctactacaccgatcacctgaccccagttgaaaatgcacgtatccgtctatacaacaacttcgacatggtggcgtcgcccaactacgtgctgggcatctacgatggcgacgggagcgcattcaatttatctggccctacgggttctgcccaggccgagaagctgttcgaggactacttcacggccgagggcttgccattcacggcgagcgcattcagcggtcgtagtgactacgctggatttatcgacgccggtatcccctcaggtgctctattcagtggcgccgacgggaacaagacagaggcagaggttgccttgctcggtgggcaggcggggatcatctacgatcctaattatcacactgcgctcgatacggtggataatttgaaccctatgtgtttcatccagatgactaaggccattgctcacagcgtcgctgtatatggtaacagctgggcgggcttcccgcctcggaatgatacggtgagtgtgaggaagcgatggatggataagaatgtccttgttaagcatcatcaccccgtgcgaacgcttactaatggtgagttgaatatggcttcctccggttgctctcatgctgctaaggttatgtga

SEQ ID NO: 37373 - protein, 497 aa, Muscodor strobelii
  misc_feature: SGI Peptide ID NO. 572969
  misc_feature (108)..(203): Pfam Id: PF02225 Pfam Desc: PA domain
  misc_feature (236)..(429): Pfam Id: PF04389 Pfam Desc: Peptidase family M28
  misc_feature (236)..(425): Pfam Id: PF04389 Pfam Desc: Peptidase family M28
  misc_feature (34)..(459): NCBI GI: 39952804 Blast Desc: MGG_01863 [Magnaporthe grisea 70-15] gi|145020269|gb|EDK04398.1| MGG_01863 [Magnaporthe grisea 70-15]
  misc_feature (43)..(477): NCBI GI: 171677143 Blast Desc: protein product [Podospora anserina] gi|170936639|emb|CAP61298.1| protein product [Podospora anserina]
  misc_feature (5)..(472): NCBI GI: 146323131 Blast Desc: aminopeptidase Y [Aspergillus fumigatus Af293] gi|129556480|gb|EAL86348.2| aminopeptidase Y, [Aspergillus fumigatus Af293] gi|159128479|gb|EDP53594.1| aminopeptidase Y,
  misc_feature (5)..(472): NCBI GI: 40850672 Blast Desc: LAP1 [Aspergillus fumigatus]
  misc_feature (32)..(462): NCBI GI: 261356154 Blast Desc: aminopeptidase Y [Verticillium albo-atrum VaMs.102]
  misc_feature (27)..(453): NCBI GI: 239611531 Blast Desc: aminopeptidase Y [Ajellomyces dermatitidis ER-3]
  misc_feature (34)..(455): NCBI GI: 259494295 Blast Desc: LAP1_NANOT RecName: Full=Aminopeptidase Y; AltName: Full=Leucine aminopeptidase 1; AltName: Full=Leucyl aminopeptidase 1; Short=LAP1; Flags: Precursor leucine 1 canis
  misc_feature (34)..(465): NCBI GI: 121712335 Blast Desc: aminopeptidase Y, [Aspergillus clavatus NRRL 1] gi|119401931|gb|EAW12353.1| aminopeptidase Y, [Aspergillus clavatus NRRL 1]
  misc_feature (34)..(449): NCBI GI: 154279320 Blast Desc: HCAG_04313 [Ajellomyces capsulatus NAm1] gi|150412416|gb|EDN07803.1| HCAG_04313 [Ajellomyces capsulatus NAm1]
  misc_feature (34)..(449): NCBI GI: 225562460 Blast Desc: conserved [Ajellomyces capsulatus G186AR]
  misc_feature (34)..(455): SWISSPROT Homolog: EC 3.4.11.15 Aminopeptidase Y
MRSYIAPKAVVLAVILMATVQGASDCLRKLESALQDIAYVTLGRNRDYKTIGHNRTVDWIVKELKDATGDYYDIEVAPTEFIVPRDPAPFVYGGVTYEGKPMSKTEGGPFGEVEAPVVVVANLGCDAADYPAGLEGAIALIARGTCTFELKSQLAGSAGAVGALIYNPEGNYNVVGGTLGAGDGTVPTIGIHYDNATTIKAHLATNPDDTGALSVVTYIQYSKNVIATTKGGDQDNIYVLGAHADSVEAGPGINDDGSGTIALLEIASQLSKFKVQNAVRFAWWTGEEYGKLGSFYYTDHLTPVENARIRLYNNFDMVASPNYVLGIYDGDGSAFNLSGPTGSAQAEKLFEDYFTAEGLPFTASAFSGRSDYAGFIDAGIPSGALFSGADGNKTEAEVALLGGQAGIIYDPNYHTALDTVDNLNPMCFIQMTKAIAHSVAVYGNSWAGFPPRNDTVSVRKRWMDKNVLVKHHHPVRTLTNGELNMASSGCSHAAKVM

SEQ ID NO: 37374 - DNA, 516 bp, Muscodor strobelii
  misc_feature: SGI EST ID NO. CUFF.89412.0
  misc_feature: Variant of the nucleotide sequence at SEQ ID NO 37372
agacaattgggcataaccgcacagttgactggattgttaaggagcttaaggatgcaacgggtgattactacgacatcgaggttgccccaaccgagttcattgtcccccgtgatcctgctcccttcgtctatggcggcgtgacgtatgagggtaaaccgatgtcgaagaccgagggtggtccttttggagaggtcgaggctcctgttgttgtcgttgctaatcttggttgcgatgctgctgattatcctgccggactcgaaggtgccatcgcgctcatcgcacgtggcacgtgtactttcgagctcaagtcgcagttagctggtagtgctggagccgttggcgctcttatatataaccctgagggaaattacaatgtcgttggtggtacccttggtgcgggtgacggcaccgttcccactattggtattcattacgataatgctactactatcaaggcgcacttggccaccaaccccgatgataccggcgctttgagcgtagtgacgtacatccagt

SEQ ID NO: 37375 - DNA, 1671 bp, Muscodor strobelii
  misc_feature: SGI cDNA ID NO. 572970
  misc_feature: Reduced expression when VOC is produced
  misc_feature: Encodes the peptide sequence at SEQ ID NO 37376
atgatgccaccctttctctacggtcatggcaagacacgcaaccgcagtctccagctggaaaacaagcttgtcatgacccatatgaaccgccactctgtgcagactcaccccagttccatccacagcagtatcttcgccgataaggagaacgtggaccgggagccaaccatacgccactaccggagtatgctcgtagttgatgccccaacacttggtccctataaacgactgagctacgacatgggcagacacctcgaccagatacccggtacaagcctcggaccagcctgccacaagctgacttgtggtgctgtagctgccaacggtacgaatgaatcgctcgcgtctgccgactctggcaacgcccagacctccattccatctcccacgatcgatgtgtctgacatcaaggcgacagcccctacttcttctgcaggccccatcatcaatgacaataagaacattgtccgaaggaagttgactggctatgttggctttgccaatctcccaaaccaatggcatcgcaagagtgtccgcaaggggttcaacttcaacgtaatggttgtcggtgaatccggtctgggtaaatctaccttggtcaacacgctgttcaacacttctctctaccctcccaaggaccgcaagggcccgagcctcgacatcattcccaagaccgtttccatccagtccatcagtgccgatatcgaggaggctggtgtccgtctgcgcctgactgttgtcgacactcccggctttggtgacttcgtcaataacgatgagtcatggcgacccatcgtcgacaacattgagcagcgctacgatgcctacctggatgccgagaacaaggtgaaccggatgaacatagtggataaccgcattcatgcctgtgtcttcttcatccagcccaccggccactccctgaagcccttggacattgaggtcatgcgccgtctacacaccaaggtcaacctgatccccgtcattgctaagtctgataccttgaccgacgaggagattactagcttcaagtcaagaatcctctctgacatcaagcatcacggcatccaaatcttcgagggccctcgttacgagttggacgacgacgagaccattgctgagaacaatgagatcatgtccaaggttcccttcgctgtcgtcggtagcaacgacgagatcactaatgctgatggtcgtaaagtccgcggtcgtcgttacccttggggtgtcatcgaggtggacaacgaggaacactgcgactttgtcaagcttcgccagatgctgatccgcacacacatggaggagctcaaggagcacacgaacaacctgctgtatgagaactaccgtacggacaagctgaccgctatgggcgttgctcaagatgccagtgttttcaaggaggtgaaccctgctgtcaagcaggaggaagagcgggctctccacgagcagaagctcgccaagatggaggccgagatgaagatggtcttccagcagaaggtgcaggagaaagagagcaaattgaagcagagcgaagaagagctctacgcccgccaccgcgaaatgaaagagcaactagaacggcaacggttagagctcgaagacaagaaggccagagtcgagagcggcagaccactggagaaggaaggcaagcgaaagggtttctccctgcgctaa

SEQ ID NO: 37376 - protein, 556 aa, Muscodor strobelii
  misc_feature: SGI Peptide ID NO. 572970
  misc_feature (180)..(461): Pfam Id: PF00735 Pfam Desc: Septin
  misc_feature (5)..(556): NCBI GI: 171688652 Blast Desc: protein product [Podospora anserina] gi|170944288|emb|CAP70398.1| protein product [Podospora anserina]
  misc_feature (105)..(556): NCBI GI: 164423542 Blast Desc: cell division control protein 3 [Neurospora crassa OR74A] gi|157070139|gb|EAA33274.2| cell division control protein 3 [Neurospora crassa OR74A]
  misc_feature (151)..(556): NCBI GI: 256720929 Blast Desc: [Nectria haematococca mpVI 77-13-4]
  misc_feature (149)..(556): NCBI GI: 116196238 Blast Desc: CHGG_04717 [Chaetomium globosum CBS 148.51] gi|88180630|gb|EAQ88098.1| CHGG_04717 [Chaetomium globosum CBS 148.51]
  misc_feature (139)..(556): NCBI GI: 145613578 Blast Desc: MGG_01521 [Magnaporthe grisea 70-15] gi|145020634|gb|EDK04763.1| MGG_01521 [Magnaporthe grisea 70-15]
  misc_feature (13)..(556): NCBI GI: 154311020 Blast Desc: BC1G_06628 [Botryotinia fuckeliana B05.10] gi|150851032|gb|EDN26225.1| BC1G_06628 [Botryotinia fuckeliana B05.10]
  misc_feature (59)..(556): NCBI GI: 156034591 Blast Desc: SS1G_13230 [Sclerotinia sclerotiorum 1980] gi|154698634|gb|EDN98372.1| SS1G_13230 [Sclerotinia sclerotiorum 1980]
  misc_feature (116)..(556): NCBI GI: 119190373 Blast Desc: CIMG_05234 [Coccidioides immitis RS]
  misc_feature (119)..(556): NCBI GI: 119482906 Blast Desc: septin AspB [Neosartorya fischeri NRRL 181] gi|119409636|gb|EAW19584.1| septin AspB [Neosartorya fischeri NRRL 181]
  misc_feature (119)..(556): NCBI GI: 159123258 Blast Desc: septin AspB [Aspergillus fumigatus A1163]
  misc_feature: Useful for introducing or modulating the production of volatile compounds
MMPPFLYGHGKTRNRSLQLENKLVMTHMNRHSVQTHPSSIHSSIFADKENVDREPTIRHYRSMLVVDAPTLGPYKRLSYDMGRHLDQIPGTSLGPACHKLTCGAVAANGTNESLASADSGNAQTSIPSPTIDVSDIKATAPTSSAGPIINDNKNIVRRKLTGYVGFANLPNQWHRKSVRKGFNFNVMVVGESGLGKSTLVNTLFNTSLYPPKDRKGPSLDIIPKTVSIQSISADIEEAGVRLRLTVVDTPGFGDFVNNDESWRPIVDNIEQRYDAYLDAENKVNRMNIVDNRIHACVFFIQPTGHSLKPLDIEVMRRLHTKVNLIPVIAKSDTLTDEEITSFKSRILSDIKHHGIQIFEGPRYELDDDETIAENNEIMSKVPFAVVGSNDEITNADGRKVRGRRYPWGVIEVDNEEHCDFVKLRQMLIRTHMEELKEHTNNLLYENYRTDKLTAMGVAQDASVFKEVNPAVKQEEERALHEQKLAKMEAEMKMVFQQKVQEKESKLKQSEEELYARHREMKEQLERQRLELEDKKARVESGRPLEKEGKRKGFSLR

SEQ ID NO: 37377 - DNA, 2672 bp, Muscodor strobelii
  misc_feature: SGI EST ID NO. CUFF.90057.1
  misc_feature: Variant of the nucleotide sequence at SEQ ID NO 37375
atcccgtacaggcctaattttgtttcggcttccctctaccacttctttttccaccccatcctcacccgactgcagtttcgacattcactacgtctgtccgacagcatcattgtctattgtcttctgtcttttgcatccataagactcacgacgcgtgcgactggccgcatcccgcataccggacgtcccacgctgccactcgttgccctccgcgcgctccctagtcttagccgacgcacggtttcatccccgtacatcatctggacacgcgattctctaccattcaagccgtcatctttcgactctctgtgccttccgctctgcattattctctagttttgacacgtcgcgaaagcattcataatggctgccaacggtacgaatgaatcgctcgcgtctgccgactctggcaacgcccagacctccattccatctcccacgatcgatgtgtctgacatcaaggcgacagcccctacttcttctgcaggccccatcatcaatgacaataagaacattgtccgaaggaagttgactggctatgttggctttgccaatctcccaaaccaatggcatcgcaagagtgtccgcaaggggttcaacttcaacgtaatggttgtcggtgaatccggtctgggtaaatctaccttggtcaacacgctgttcaacacttctctctaccctcccaaggaccgcaagggcccgagcctcgacatcattcccaagaccgtttccatccagtccatcagtgccgatatcgaggaggctggtgtccgtctgcgcctgactgttgtcgacactcccggctttggtgacttcgtcaataacgatgagtcatggcgacccatcgtcgacaacattgagcagcgctacgatgcctacctggatgccgagaacaaggtgaaccggatgaacatagtggataaccgcattcatgcctgtgtcttcttcatccagcccaccggccactccctgaagcccttggacattgaggtcatgcgccgtctacacaccaaggtcaacctgatccccgtcattgctaagtctgataccttgaccgacgaggagattactagcttcaagtcaagaatcctctctgacatcaagcatcacggcatccaaatcttcgagggccctcgttacgagttggacgacgacgagaccattgctgagaacaatgagatcatgtccaaggttcccttcgctgtcgtcggtagcaacgacgagatcactaatgctgatggtcgtaaagtccgcggtcgtcgttacccttggggtgtcatcgaggtggacaacgaggaacactgcgactttgtcaagcttcgccagatgctgatccgcacacacatggaggagctcaaggagcacacgaacaacctgctgtatgagaactaccgtacggacaagctgaccgctatgggcgttgctcaagatgccagtgttttcaaggaggtgaaccctgctgtcaagcaggaggaagagcgggctctccacgagcagaagctcgccaagatggaggccgagatgaagatggtcttccagcagaaggtgcaggagaaagagagcaaattgaagcagagcgaagaagagctctacgcccgccaccgcgaaatgaaagagcaactagaacggcaacggttagagctcgaagacaagaaggccagagtcgagagcggcagaccactggagaaggaaggcaagcgaaagggtttctccctgcgctaagcacctctcgacgtctgtctgcttgcatgtgccacgcccgagtcttttcacgatccacattctgtacagcctgccgtgttcattaccttctctttgtcactttgtcctctcttatctaatctcgtttaataaccccataaaacaacaacgtctctggggtgtcgacctctgtgattaattgatactccgacacaattagcagtggcaagggagcaagggatgcatgcatgtccgatcatcattgactctttcgctgaccagacaatcaggctcgtgttctcaggtagacacgggcttcctggttattccgacaagtcaacatgtggtactctctagcatacctagctatgctaccaaggctgtcatactgtgtattccctagaaggatggattctggcggtggggacagagtatgggctgtggcaggtatgctacatgagacaatgtcagctggacagcatgttatgttgaacggatcatgtgtcgtcccttgcacccagaacattaatttgatggcaatatcattgttgtcttgttcttagcatgtatttggtcggttgccaccaacatagccgcctgtttactagtctgttcggctttgatgatacaataccccggagtcggtggaaaaagtcatgagctgcgtgtggaagggttaaaaacgaggatgcctgagagtaggagaatttccatctttgctagatgcttgtattttaagagagtaatgcttctctcgatcatagggcagcttggtccgcaggtctcgctaacctgccactgtcggtgtagaaagggaggtgtcctcaagaagggtcattcggtatgaccatgcttctagtttccttagttgcaaacactgtcttcgtatttccctgtcttctgtacctcggtgctgtctccaacgtaggtaaatcgtctgagaggacaaaatgacgtgctagtgagccatg

SEQ ID NO: 37378 - DNA, 1338 bp, Muscodor strobelii
  misc_feature: SGI cDNA ID NO. 572971
  misc_feature: Encodes the peptide sequence at SEQ ID NO 37379
atggttcgccttgttcaagtatcagttggtcttgcctccgccagcgttggccttgcagccgtgactagagcgcggctcgattctcgcggcgacactccactgtacccatatgataataacacgacgccgtactgtgattattggtacgatgtcaagagtaccagcactaagtgtacatcgattccaacgcagtgggaaatatctctagctgatttccttcgctggaatccatctttggcccctgactgcaccggcctaaatatccaacagtcatactgtgttgagacgttcggagaaccgacgacaacaacatcatcttcggcatcagcgacaccaaccactcccggcaatggaatcaccacgcctcagcctatacagccaggtatggtaaacaactgcgacgacttctatttggtacctaaggataccagttgtcaggccatcgctacctctcacggtatcacgctacagcagtttctgacatggaaccctgaagttggcgacacctgtggcggtttgtgggccgacgcatatgtgtgcgtttcagtcattggcgtagatcccacgacgaccaaggcttcaccgacggccacgcccaccaaggttccaaacggagttaccactccagtacctacgcagcctaacattgttgacaattgcgacgctttctatcttgtcacctcgggcgaaggctgtgccgacattgctaagaagaatggtatctctctagcacagttcttggcatggaatccagatgcagggacaacatgtggcgggctctgggcagacgcttatgcatgtgtatcgataattggtgtcgaaccaacgcgagtgaccacaactcctacccctacacccacgaaaacccctaacggcatcactacccctgtcccgacacagcctgacatcgttgacaactgcgacgccttttacctagttacttcaggagagggctgtgctgctattgctagcaagaacgggattactctagcccaatttttggcctggaatcctgatgcaggctcaacctgcaatggcctgtgggctgacgcatatgcctgtgtgtcgatcatcggcgtagagcctagcaagacaacaacaacgactaaggccacgaccaccacgaagggcaatggggtaacgactccaactccaacgcagactggcatggtcagcaactgcaagacattctactacgttgcagctggtcagacctgccaaacgattgctgataagtataagatcacccttgcaaatttcataaagtggaatcctgctgttgggtcgtcttgtggttcgctctggactggcacgtacgcttgtgtcggtctgatataa

SEQ ID NO: 37379 - protein, 445 aa, Muscodor strobelii
  misc_feature: SGI Peptide ID NO. 572971
  misc_feature (398)..(425): Pfam Id: PF01476 Pfam Desc: LysM domain
  misc_feature (311)..(338): Pfam Id: PF01476 Pfam Desc: LysM domain
  misc_feature (224)..(251): Pfam Id: PF01476 Pfam Desc: LysM domain
  misc_feature (19)..(445): NCBI GI: 171682716 Blast Desc: protein product [Podospora anserina] gi|170941317|emb|CAP66967.1| protein product [Podospora anserina]
  misc_feature (76)..(445): NCBI GI: 171678451 Blast Desc: protein product [Podospora anserina] gi|170937295|emb|CAP61952.1| protein product [Podospora anserina]
  misc_feature (1)..(445): NCBI GI: 67516523 Blast Desc: AN0543.2 [Aspergillus nidulans FGSC A4] gi|40747486|gb|EAA66642.1| AN0543.2 [Aspergillus nidulans FGSC A4] gi|259489198|tpe|CBF89272.1| TPA: [Aspergillus nidulans FGSC
  misc_feature (2)..(445): NCBI GI: 67540988 Blast Desc: AN6664.2 [Aspergillus nidulans FGSC A4] gi|40739003|gb|EAA58193.1| AN6664.2 [Aspergillus nidulans FGSC A4] gi|259480248|tpe|CBF71205.1| TPA: [Aspergillus nidulans FGSC
  misc_feature (1)..(355): NCBI GI: 238841745 Blast Desc: LysM domain-containing protein [Microsporum canis CBS 113480]
  misc_feature (97)..(443): NCBI GI: 238841745 Blast Desc: LysM domain-containing protein [Microsporum canis CBS 113480]
  misc_feature (45)..(430): NCBI GI: 67516523 Blast Desc: AN0543.2 [Aspergillus nidulans FGSC A4] gi|40747486|gb|EAA66642.1| AN0543.2 [Aspergillus nidulans FGSC A4] gi|259489198|tpe|CBF89272.1| TPA: [Aspergillus nidulans FGSC
  misc_feature (31)..(445): NCBI GI: 261359968 Blast Desc: LysM domain-containing protein [Verticillium albo-atrum VaMs.102]
  misc_feature (41)..(445): NCBI GI: 258570607 Blast Desc: [Uncinocarpus reesii 1704] gi|237904377|gb|EEP78778.1| [Uncinocarpus reesii 1704]
  misc_feature (36)..(445): NCBI GI: 261361228 Blast Desc: LysM domain-containing protein [Verticillium albo-atrum VaMs.102]
MVRLVQVSVGLASASVGLAAVTRARLDSRGDTPLYPYDNNTTPYCDYWYDVKSTSTKCTSIPTQWEISLADFLRWNPSLAPDCTGLNIQQSYCVETFGEPTTTTSSSASATPTTPGNGITTPQPIQPGMVNNCDDFYLVPKDTSCQAIATSHGITLQQFLTWNPEVGDTCGGLWADAYVCVSVIGVDPTTTKASPTATPTKVPNGVTTPVPTQPNIVDNCDAFYLVTSGEGCADIAKKNGISLAQFLAWNPDAGTTCGGLWADAYACVSIIGVEPTRVTTTPTPTPTKTPNGITTPVPTQPDIVDNCDAFYLVTSGEGCAAIASKNGITLAQFLAWNPDAGSTCNGLWADAYACVSIIGVEPSKTTTTTKATTTTKGNGVTTPTPTQTGMVSNCKTFYYVAAGQTCQTIADKYKITLANFIKWNPAVGSSCGSLWTGTYACVGLI

SEQ ID NO: 37380 - DNA, 2316 bp, Muscodor strobelii
  misc_feature: SGI EST ID NO. CUFF.89433.0
  misc_feature: Variant of the nucleotide sequence at SEQ ID NO 37378
gctatacgcagccgcctggttgggagatggttcgcttgagcccacaactaggttaggctgtggacctgaccaccaatcatgctgctcgcttatgtaatattggcatcctagtcatggccgaatgtctgctgccaggtccttttccaatgctgctgaacaatcccttaccctgcttgccaaggccgtctatgttcagcaccaggacgttctatggacgaccgtggagacaaccccatcgttccttacaaagagacagcaatgataggtcgccctatacgatttcaaggacacgatcccggcacaacagggttgtcgaatatcgtgacttggcataagcacgtggctccgctctgtcgcccgccgttctctgaccgttcatacacaaaaaaaggcttctagtatgcaacttaaatttttccaatgaagacaaacaagcaagtgcctccaagctgatgtatgttacgggactgagggaatatggaatctcggtagtcggtatcacgcggaccacgaatgttacgttgtctgaaaatacctcgcccaaaggctagactatccgctacacggatataatctatccatctagggagattgcgccgtaagaggatcaatcatcctagacgttcaatgtgatcaactatttttgccatcacagtcgtgggctgtttcctgtacgatgtctggcttcatatcagagctttacgcgactaaatataaagtcacaaacttcgccatctgctttggctttgtgacactgccaggcatgggccaagattcatatcattacctgctggtttctttccaattcctctcttcttgttgagtcctgtggcaatttgtcaatatggttcgccttgttcaagtatcagttggtcttgcctccgccagcgttggccttgcagccgtgactagagcgcggctcgattctcgcggcgacactccactgtacccatatgataataacacgacgccgtactgtgattattggtacgatgtcaagagtaccagcactaagtgtacatcgattccaacgcagtgggaaatatctctagctgatttccttcgctggaatccatctttggcccctgactgcaccggcctaaatatccaacagtcatactgtgttgagacgttcggagaaccgacgacaacaacatcatcttcggcatcagcgacaccaaccactcccggcaatggaatcaccacgcctcagcctatacagccaggtatggtaaacaactgcgacgacttctatttggtacctaaggataccagttgtcaggccatcgctacctctcacggtatcacgctacagcagtttctgacatggaaccctgaagttggcgacacctgtggcggtttgtgggccgacgcatatgtgtgcgtttcagtcattggcgtagatcccacgacgaccaaggcttcaccgacggccacgcccaccaaggttccaaacggagttaccactccagtacctacgcagcctaacattgttgacaattgcgacgctttctatcttgtcacctcgggcgaaggctgtgccgacattgctaagaagaatggtatctctctagcacagttcttggcatggaatccagatgcagggacaacatgtggcgggctctgggcagacgcttatgcatgtgtatcgataattggtgtcgaaccaacgcgagtgaccacaactcctacccctacacccacgaaaacccctaacggcatcactacccctgtcccgacacagcctgacatcgttgacaactgcgacgccttttacctagttacttcaggagagggctgtgctgctattgctagcaagaacgggattactctagcccaatttttggcctggaatcctgatgcaggctcaacctgcaatggcctgtgggctgacgcatatgcctgtgtgtcgatcatcggcgtagagcctagcaagacaacaacaacgactaaggccacgaccaccacgaagggcaatggggtaacgactccaactccaacgcagactggcatggtcagcaactgcaagacattctactacgttgcagctggtcagacctgccaaacgattgctgataagtataagatcacccttgcaaatttcataaagtggaatcctgctgttgggtcgtcttgtggttcgctctggactggcacgtacgcttgtgtcggtctgatataaactctactaggattaaagactagaatccaatttccattcctgaaatgcgtatcttaattacctatgtaatatccgggagactgccgcggagaatctaggtggacaagttcggcccccattcatacatatcatca

SEQ ID NO: 37381 - DNA, 6030 bp, Muscodor strobelii
  misc_feature: SGI cDNA ID NO. 572972
  misc_feature: Encodes the peptide sequence at SEQ ID NO 37382
atgctcagactgaaacattttgggcaacttatcgttgctcttagcagtttcctctccgctgatgcaacggtcaccaagtcgctaaggactggatttgatagacttcataagccctgccctaggtcttgtacagcattcccagatcaagcagactgggacagttattattcggtcgatagactttcgttgtgcgacgagccattgttactcactttcgcaacattctttcctctcgacgatgcagatactcaagtcaaaattcgcacatgtacaacaggagactcagaaacagccatcaatgctctgactggtacggcggtcaccgagtcttctgatgcttcagacaattcgacgagcgcgaatctagaagcgtatcaaagtagaatcgctcgaagtattgacgaaggagatgtcaacggccaaccgcctgtgtgctacgatgcctcgtcgacgaaggccactgctgaatggattacgtggggtctggagcataatctgactgatagtcaggaagttctgacttccctacacagcacgcagacatttctccaagaagctgtcaactgcgaagagagtgtcgtctatggctacatgcatggcactgtggtaggtgtctatgccgggcccaaaatccagaatcgcggtgtggcagcaggcttcgtgcaaactgttattgatcggatcgcaaaagcaccctctgagcgatcacgcgtggtcgcgcaggtctgtggagagggtcgaaactctgatcatcatcttggtgtcgttgttgaccccaccggtgaccttgcttggacacagcaagccctacgctcgtggtctgaagcgaaatgcgtcaacttatcgcaatccgatggcatcgccacgaagtcgcaggtcaccgtcactgtaccagtcatcaacagtgccgcaacgacgaagttgcgaaccaggcacacgtcaaatgctcgagaatgccatagagttatgtcagcacatggcgacagcgtggagtcgctggcatccacgtgtcagatcacgactggcgagctacgccgttacaaccaggtcggtgaagactgggaaccgtcggcttatgactgggtctgttgctctcctggctcctcattcagcaagcgagcaactgagccccgaccagacggaacgtgtgcctcgtacataaccgtcaatcaagatacgtgttacaagattgcacaagcgaatgacatcactgaggacgacatctatacatataacaaggatacatggggatggggaggctgcaatgccgtctttccaggctaccggatctgtgttggacctggcacacctcgtttgcccgcacctcaagccaatgccgtgtgcggtccctcaaagcctggaacggttgccatagacggcgtgaagattgaagatctcagcccttgccctatcaaagcctgctacggatgtgtacagaactgtggcatggatctagtgacaggctcagcaccatctgacttcatgaaagtcggctacttcgagagctggaaccgtgaaaggccctgccttcacatgagccccaaggatatccctagctcgtacactcacgtgcattacgcatttgccgacattacatcgggctttggagtcagtctcggtcgcttctctgacgtcttcgacgaattcaaagcactcactggctttaagcgtgtagtcgcttttggaggatgggccttctccactgagcccgagacataccaactcttccgcgacgctgtgaaggctggtaatcgcgaaacgtttgccacagccatcgtggacttcctcacgtctaacgggctggacggcgtagattttgattgggaataccctggcgaaccagatattcctggcatacctgccggcacggcagaagacgcagagaattatctagaattcgtgaaaacgctcaaaggcaagatgccagctggcaagacaatgtccatcgcggccccagcatcctattggtatcttaaacagttcctgattgcggagatgagcgagtatctcgactatatagtgtatatgacgtatgatcttcacggccagtgggattatggcaatgaatggtcacagtcgggatgttcgtcaggaaactgtctccgatctcacgttaatatgacagagaccatgtccgcactcgttatggttactaaagctggtgttccttcaaacaaggtcgtcgttggcgttaccagttatgggcgctctttcaagatgacggatgcgtcgtgttctggaccacaatgcacctataccggcccagattccggtgctaaacatggcaagtgcacagatactggtggttatatcagcgacggggagattgaacagatcattgctgacggaggagctgttcggcaatggagcgatgacacgcaatcaaattatatcatatacgatggcgattcgtgggtcgcatacatggacagacctaataaacaggcacggattgccaagtttcagggtctcaacttcaggggcacaacagattgggccattgaccttggcactgatgttggatcctcaaatgatacaactgtcgtgtatctggcaccagaagtgtacagtgacactccagctcaatgtcaaccaccatgtctctttgtattcgcgcccagcagcatgtcttctccaaccaccatcaccattcctgcttatacaacatcgattcagcttgattctggctctacaacgacaatcactgttcatccttcggcgttgaccgttacgtccatgagtttctccaacatgaacatctcatcgagccagaatactggaactatccagccatacctgagcgtcaatgtaccactagtaacaactaccgttaatgacgaaacccgagtgctgaagttgccgccctggccgttgatcacactcgggcccccggatacttgggacaactctaccacgaacccagggggctctgacatcacgggtgacccaacaggggactctacaataaccctgcctactccaagcggcgatacaactgtcggagatctccccacaatcacaaaaccaccttttacctgggatgtgccaactgcaacaacaactgacgtcggcacctggccaactgacatatggcttacaccagtacccacccctgttgacgaggacaatggcgaagacgatgatggtgatgggccccatcacaagtccacatgcaaactgtggttcttcttcgtttgcgttgactggggcactgagtttggcatcaagataaatggctgggattgggacttccctgtcggtgtttgggggccgggtccaccaccaataggaagccttcatcttccagaaggcttcactctcaaagggcgcctgccgccgtggccaaagatcactgttgcgcctggaggtgccatcaacgcaccggccgaaccagcagattgtaaaccggccgaagcttcactgtgtcttaccaaaagctcattcgcaacaacaataaccggagggtcgaccaaaaccaccgcaacgcaagtgaaatcaacctgcgcgaccattacaggttgcgacttacaagatgccgaaaccaccaaatcagctgatgcatgtactctgcagcgcagaatggttgatgtaacggagtttctgcccgagcaaacggaagcccctgctgcacaggtgtcggccgcagtagtacagcattccaaacgcactgttatcacgaagcgatcagagcctgactgggcggcaacatgtggtgacactggtgccgatggtgttctatggcctaggaggttcgacaacgccgcggggtcgattgatgtcatccgcaacatcctcaaacggcgcaaagccgctcttgggaacaactatggtttcatggagttcacagctactgatctggggttcactgctttcttcgtcgtaaacaacatgggtccaatcgctcttgactactttaactcaaaggaagtaaacgaagtctacctcgcgtattaccccgataacccaagcctgcccgcaggctcgagccgcaaacgagacgaccatgaattcaccaatagcacggctgaatactttccaacgatgtttggagagattacctcaggattagatcaagccgaagaagatctgattcctcaactacccactaacaatgatttgagctccaacgcaacaatcgattatgccgcgatgtcatacgaagaggtcaggcatcccgctgtcaatccgcgttcaatatggaaaaggactgcgaggaagtttctggttggaaaattctggcacctatccctgatatcatggccaccaggttgggatttcaacaaggattatggcaccatcgataatcctatacacaaaccatcggaggggaaatactacgtggcagcagacgatacttggggtgttggacagacgatctatgtgatggacagtggctggcgttcaacctatggtgagtacgctggaagatcagcgcctttgccattgaagacgtacgggacaatgcccgctactcctgctacgggcagtgcagaagaagcacatggcacctatgtgtcggttctcgccgttggcaaagcggttgggctggctaagaaagctgaactcaggttcatccaggtgcctaccaagtccaaaagcagtcaggggacacccgccgctgatcgtgcatggctcgaaaggttcctggaagctctacttgttgtagcagacgactgtgcactaaagccaagaaacacgtgcgtggtaaatatgagtttcgggatcgggcagacggtacctataacacaggccttctggaccatttacaccaacctcatggtcgccatggaaaaagaatacggtatcatattcgtagtagcgcctggtaactcaggaacttccgcgaagcactacccagcccttgcttgggacaaagtacctggcatgatgagcatctatctgacatgcagtagggttgcgggcgccgtcgatcaaaatggctttccgttcaagctcaacaccggtgaagatatcatcaacgcatatgcgcctggtgtcaagattgaagttgctcctgaccaattcgccacgggcacgtcattcgcgtcgccgcttgtggcggcattggcagcgagcttccgcgcagatcaatcttatcaaggtggcagagaccctacatctatccgcgaccacattcaatcgctttcgcgcgaacttaccgtgggagggccggatgatattccctcagatacgcagatcgtgtggaacggccagcgcttgattgaacagtgtaatgtcgacggcattgatggtgctgctatactccgtcggcaattcgacgacggcgatgccaatgactcttgtccgctcccaggaagcggaggtggtaatggaccgggaggcaaccagccacgaggtccgaatgtcagtttcaaaacgggcacacctggacccttgtgctctaccaattgcggtaccctctgttcgggatactattgcaccccgacacctactggaacgccacccgacttccttccaccaagtattaccatcaccgatacgcctacgcgtataccggagcccacgacctgctcttcaggctcaaccatcacatccgtcaaggtttgtaatggtgaccctcgtggtgagagctgtcaaactaccaagtcttgcgcgcctactcccacgccgacgcccgtgcccgagatggactccacagattgtgtgaaggttgagaccaatttctgggtcaaagatcagatctggtacaacacggcgacggtctggtcatttggagcttcaacttcgaaccaagtctgcgagtttcctctcaccacaattgaccctaatagtttcacgcgctgtccgggccatgaagatgaagctggcctgacgttgaccctggactcgtatcccaaatcggaagatctaagatttagcttctactacgtcgatcaggttaaggatttcagattgcctggcaaggtgcattatgagtgctcggacggcggggatattagcgcggagtgcgagcagtggtattattcttatacaagtactgatccagcttgtggaggtgggccgccgtga

SEQ ID NO: 37382 - protein, 2009 aa, Muscodor strobelii
  misc_feature: SGI Peptide ID NO. 572972
  misc_feature (494)..(810): Pfam Id: PF00704 Pfam Desc: Glycosyl hydrolases family 18
  misc_feature (1442)..(1730): Pfam Id: PF00082 Pfam Desc: Subtilase family
  misc_feature (36)..(892): NCBI GI: 159130298 Blast Desc: class V chitinase, [Aspergillus fumigatus A1163]
  misc_feature (36)..(892): NCBI GI: 70992799 Blast Desc: class V chitinase [Aspergillus fumigatus Af293] gi|66848881|gb|EAL89210.1| class V chitinase, [Aspergillus fumigatus Af293]
  misc_feature (319)..(1303): NCBI GI: 171678449 Blast Desc: protein product [Podospora anserina] gi|170937294|emb|CAP61951.1| protein product [Podospora anserina]
  misc_feature (39)..(836): NCBI GI: 126032297 Blast Desc: TPA: TPA_inf: chitinase 18-10 [Hypocrea jecorina]
  misc_feature (17)..(902): NCBI GI: 238504682 Blast Desc: class V chitinase Chi100 [Aspergillus flavus NRRL3357] gi|220691043|gb|EED47392.1| class V chitinase Chi100 [Aspergillus flavus NRRL3357]
  misc_feature (37)..(850): NCBI GI: 258566031 Blast Desc: conserved [Uncinocarpus reesii 1704] gi|237907461|gb|EEP81862.1| conserved [Uncinocarpus reesii 1704]
  misc_feature (38)..(836): NCBI GI: 258574793 Blast Desc: conserved [Uncinocarpus reesii 1704] gi|237901844|gb|EEP76245.1| conserved [Uncinocarpus reesii 1704]
  misc_feature (34)..(903): NCBI GI: 45643372 Blast Desc: Chi100 [Aspergillus fumigatus]
  misc_feature (34)..(903): NCBI GI: 159126126 Blast Desc: class V chitinase Chi100 [Aspergillus fumigatus A1163]
  misc_feature (34)..(903): NCBI GI: 146324032 Blast Desc: class V chitinase Chi100 [Aspergillus fumigatus Af293] gi|129556357|gb|EAL85910.2| class V chitinase Chi100 [Aspergillus fumigatus Af293]
MLRLKHFGQLIVALSSFLSADATVTKSLRTGFDRLHKPCPRSCTAFPDQADWDSYYSVDRLSLCDEPLLLTFATFFPLDDADTQVKIRTCTTGDSETAINALTGTAVTESSDASDNSTSANLEAYQSRIARSIDEGDVNGQPPVCYDASSTKATAEWITWGLEHNLTDSQEVLTSLHSTQTFLQEAVNCEESVVYGYMHGTVVGVYAGPKIQNRGVAAGFVQTVIDRIAKAPSERSRVVAQVCGEGRNSDHHLGVVVDPTGDLAWTQQALRSWSEAKCVNLSQSDGIATKSQVTVTVPVINSAATTKLRTRHTSNARECHRVMSAHGDSVESLASTCQITTGELRRYNQVGEDWEPSAYDWVCCSPGSSFSKRATEPRPDGTCASYITVNQDTCYKIAQANDITEDDIYTYNKDTWGWGGCNAVFPGYRICVGPGTPRLPAPQANAVCGPSKPGTVAIDGVKIEDLSPCPIKACYGCVQNCGMDLVTGSAPSDFMKVGYFESWNRERPCLHMSPKDIPSSYTHVHYAFADITSGFGVSLGRFSDVFDEFKALTGFKRVVAFGGWAFSTEPETYQLFRDAVKAGNRETFATAIVDFLTSNGLDGVDFDWEYPGEPDIPGIPAGTAEDAENYLEFVKTLKGKMPAGKTMSIAAPASYWYLKQFLIAEMSEYLDYIVYMTYDLHGQWDYGNEWSQSGCSSGNCLRSHVNMTETMSALVMVTKAGVPSNKVVVGVTSYGRSFKMTDASCSGPQCTYTGPDSGAKHGKCTDTGGYISDGEIEQIIADGGAVRQWSDDTQSNYIIYDGDSWVAYMDRPNKQARIAKFQGLNFRGTTDWAIDLGTDVGSSNDTTVVYLAPEVYSDTPAQCQPPCLFVFAPSSMSSPTTITIPAYTTSIQLDSGSTTTITVHPSALTVTSMSFSNMNISSSQNTGTIQPYLSVNVPLVTTTVNDETRVLKLPPWPLITLGPPDTWDNSTTNPGGSDITGDPTGDSTITLPTPSGDTTVGDLPTITKPPFTWDVPTATTTDVGTWPTDIWLTPVPTPVDEDNGEDDDGDGPHHKSTCKLWFFFVCVDWGTEFGIKINGWDWDFPVGVWGPGPPPIGSLHLPEGFTLKGRLPPWPKITVAPGGAINAPAEPADCKPAEASLCLTKSSFATTITGGSTKTTATQVKSTCATITGCDLQDAETTKSADACTLQRRMVDVTEFLPEQTEAPAAQVSAAVVQHSKRTVITKRSEPDWAATCGDTGADGVLWPRRFDNAAGSIDVIRNILKRRKAALGNNYGFMEFTATDLGFTAFFVVNNMGPIALDYFNSKEVNEVYLAYYPDNPSLPAGSSRKRDDHEFTNSTAEYFPTMFGEITSGLDQAEEDLIPQLPTNNDLSSNATIDYAAMSYEEVRHPAVNPRSIWKRTARKFLVGKFWHLSLISWPPGWDFNKDYGTIDNPIHKPSEGKYYVAADDTWGVGQTIYVMDSGWRSTYGEYAGRSAPLPLKTYGTMPATPATGSAEEAHGTYVSVLAVGKAVGLAKKAELRFIQVPTKSKSSQGTPAADRAWLERFLEALLVVADDCALKPRNTCVVNMSFGIGQTVPITQAFWTIYTNLMVAMEKEYGIIFVVAPGNSGTSAKHYPALAWDKVPGMMSIYLTCSRVAGAVDQNGFPFKLNTGEDIINAYAPGVKIEVAPDQFATGTSFASPLVAALAASFRADQSYQGGRDPTSIRDHIQSLSRELTVGGPDDIPSDTQIVWNGQRLIEQCNVDGIDGAAILRRQFDDGDANDSCPLPGSGGGNGPGGNQPRGPNVSFKTGTPGPLCSTNCGTLCSGYYCTPTPTGTPPDFLPPSITITDTPTRIPEPTTCSSGSTITSVKVCNGDPRGESCQTTKSCAPTPTPTPVPEMDSTDCVKVETNFWVKDQIWYNTATVWSFGASTSNQVCEFPLTTIDPNSFTRCPGHEDEAGLTLTLDSYPKSEDLRFSFYYVDQVKDFRLPGKVHYECSDGGDISAECEQWYYSYTSTDPACGGGPP

SEQ ID NO: 37383 - DNA, 3500 bp, Muscodor strobelii
  misc_feature: SGI EST ID NO. CUFF.89444.0
  misc_feature: Variant of the nucleotide sequence at SEQ ID NO 37381
ttggtgaaagtcacactctgattattaagctaacggaactttgtgtactagacggatgtgtacagaactgtggcatggatctagtgacaggctcagcaccatctgacttcatgaaagtcggctacttcgagagctggaaccgtgaaaggccctgccttcacatgagccccaaggatatccctagctcgtacactcacgtgcattacgcatttgccgacattacatcgggctttggagtcagtctcggtcgcttctctgacgtcttcgacgaattcaaagcactcactggctttaagcgtgtagtcgcttttggaggatgggccttctccactgagcccgagacataccaactcttccgcgacgctgtgaaggctggtaatcgcgaaacgtttgccacagccatcgtggacttcctcacgtctaacgggctggacggcgtagattttgattgggaataccctggcgaaccagatattcctggcatacctgccggcacggcagaagacgcagagaattatctagaattcgtgaaaacgctcaaaggcaagatgccagctggcaagacaatgtccatcgcggccccagcatcctattggtatcttaaacagttcctgattgcggagatgagcgagtatctcgactatatagtgtatatgacgtatgatcttcacggccagtgggattatggcaatgaatggtcacagtcgggatgttcgtcaggaaactgtctccgatctcacgttaatatgacagagaccatgtccgcactcgttatggttactaaagctggtgttccttcaaacaaggtcgtcgttggcgttaccagttatgggcgctctttcaagatgacggatgcgtcgtgttctggaccacaatgcacctataccggcccagattccggtgctaaacatggcaagtgcacagatactggtggttatatcagcgacggggagattgaacagatcattgctgacggaggagctgttcggcaatggagcgatgacacgcaatcaaattatatcatatacgatggcgattcgtgggtcgcatacatggacagacctaataaacaggcacggattgccaagtttcagggtctcaacttcaggggcacaacagattgggccattgaccttggcactgatgttggatcctcaaatgatacaactgtcgtgtatctggcaccagaagtgtacagtgacactccagctcaatgtcaaccaccatgtctctttgtattcgcgcccagcagcatgtcttctccaaccaccatcaccattcctgcttatacaacatcgattcagcttgattctggctctacaacgacaatcactgttcatccttcggcgttgaccgttacgtccatgagtttctccaacatgaacatctcatcgagccagaatactggaactatccagccatacctgagcgtcaatgtaccactagtaacaactaccgttaatgacgaaacccgagtgctgaagttgccgccctggccgttgatcacactcgggcccccggatacttgggacaactctaccacgaacccagggggctctgacatcacgggtgacccaacaggggactctacaataaccctgcctactccaagcggcgatacaactgtcggagatctccccacaatcacaaaaccaccttttacctgggatgtgccaactgcaacaacaactgacgtcggcacctggccaactgacatatggcttacaccagtacccacccctgttgacgaggacaatggcgaagacgatgatggtgatgggccccatcacaagtccacatgcaaactgtggttcttcttcgtttgcgttgactggggcactgagtttggcatcaagataaatggctgggattgggacttccctgtcggtgtttgggggccgggtccaccaccaataggaagccttcatcttccagaaggcttcactctcaaagggcgcctgccgccgtggccaaagatcactgttgcgcctggaggtgccatcaacgcaccggccgaaccagcagattgtaaaccggccgaagcttcactgtgtcttaccaaaagctcattcgcaacaacaataaccggagggtcgaccaaaaccaccgcaacgcaagtgaaatcaacctgcgcgaccattacaggttgcgacttacaagatgccgaaaccaccaaatcagctgatgcatgtactctgcagcgcagaatggttgatgtaacggagtttctgcccgagcaaacggaagcccctgctgcacaggtgtcggccgcagtagtacagcattccaaacgcactgttatcacgaagcgatcagagcctgactgggcggcaacatgtggtgacactggtgccgatggtgttctatggcctaggaggttcgacaacgccgcggggtcgattgatgtcatccgcaacatcctcaaacggcgcaaagccgctcttgggaacaactatggtttcatggagttcacagctactgatctggggttcactgctttcttcgtcgtaaacaacatgggtccaatcgctcttgactactttaactcaaaggaagtaaacgaagtctacctcgcgtattaccccgataacccaagcctgcccgcaggctcgagccgcaaacgagacgaccatgaattcaccaatagcacggctgaatactttccaacgatgtttggagagattacctcaggattagatcaagccgaagaagatctgattcctcaactacccactaacaatgatttgagctccaacgcaacaatcgattatgccgcgatgtcatacgaagaggtcaggcatcccgctgtcaatccgcgttcaatatggaaaaggactgcgaggaagtttctggttggaaaattctggcacctatccctgatatcatggccaccaggttgggatttcaacaaggattatggcaccatcgataatcctatacacaaaccatcggaggggaaatactacgtggcagcagacgatacttggggtgttggacagacgatctatgtgatggacagtggctggcgttcaacctatggtgagtacgctggaagatcagcgcctttgccattgaagacgtacgggacaatgcccgctactcctgctacgggcagtgcagaagaagcacatggcacctatgtgtcggttctcgccgttggcaaagcggttgggctggctaagaaagctgaactcaggttcatccaggtgcctaccaagtccaaaagcagtcaggggacacccgccgctgatcgtgcatggctcgaaaggttcctggaagctctacttgttgtagcagacgactgtgcactaaagccaagaaacacgtgcgtggtaaatatgagtttcgggatcgggcagacggtacctataacacaggccttctggaccatttacaccaacctcatggtcgccatggaaaaagaatacggtatcatattcgtagtagcgcctggtaactcaggaacttccgcgaagcactacccagcccttgcttgggac

SEQ ID NO: 37384 - DNA, 762 bp, Muscodor strobelii
  misc_feature: SGI cDNA ID NO. 572973
  misc_feature: Elevated expression when VOC is produced
  misc_feature: Encodes the peptide sequence at SEQ ID NO 37385
atgaagcctaccacaatactttcttcctgcctgttggccggtgccgtcacggcaacacccatcttcacacctatgaccaaaatcgccggtgtagaagtcatcgatacacaaatcgttcgcgatgcacagaagcttatccaaggcttccccgactacctattctctcatcagatgcgatcatggctattcggcgcagcgatgataaacaacaacgccacacttcgacactctatcgacctcgaggtccatgccgttgccacgatgctgcacgatctaggctgggaccagacgcctggttcccgatgggttagcaacgacaagcggtttgaggttgatggtgccatcggagcaagaacatggcttagcgagcaccctatcggtaaattctggtcgaaggaccgggtccgaaaagtcttccagtctattgccctgcacgggtcaacgagtatcgttaattactttgagctggaagaggctgtcatcgtctcgagcattggacttgattatcgaggcgccggcgatggaagtttagtccctgtcgatgtctataacaacatcgcgaaggtgtaccctcaggatgaactcctttcgggaaccaatgatacgtttgtgtggatctgccagaccaagcctaatgttacctatgatacttggcttcagcccttcggcgaacatttcatccccggctattcagccgtcggccaccgaacatttgatagtatcaatggcaagagtgccgacaaggcctttatcatgccataa

SEQ ID NO: 37385 - protein, 253 aa, Muscodor strobelii
  misc_feature: SGI Peptide ID NO. 572973
  misc_feature (14)..(240): NCBI GI: 256721693 Blast Desc: NECHADRAFT_44823 [Nectria haematococca mpVI 77-13-4]
  misc_feature (6)..(239): NCBI GI: 116200323 Blast Desc: CHGG_08317 [Chaetomium globosum CBS 148.51] gi|88179596|gb|EAQ87064.1| CHGG_08317 [Chaetomium globosum CBS 148.51]
  misc_feature (24)..(242): NCBI GI: 171681192 Blast Desc: protein product [Podospora anserina] gi|170940554|emb|CAP65782.1| protein product [Podospora anserina]
  misc_feature (28)..(245): NCBI GI: 116202473 Blast Desc: CHGG_09121 [Chaetomium globosum CBS 148.51] gi|88177639|gb|EAQ85107.1| CHGG_09121 [Chaetomium globosum CBS 148.51]
  misc_feature (15)..(239): NCBI GI: 171693093 Blast Desc: protein product [Podospora anserina] gi|170946495|emb|CAP73296.1| protein product [Podospora anserina]
  misc_feature (28)..(218): NCBI GI: 116204295 Blast Desc: CHGG_10031 [Chaetomium globosum CBS 148.51] gi|88176159|gb|EAQ83627.1| CHGG_10031 [Chaetomium globosum CBS 148.51]
  misc_feature (24)..(216): NCBI GI: 242795716 Blast Desc: conserved [Talaromyces stipitatus ATCC 10500] gi|218719237|gb|EED18657.1| conserved [Talaromyces stipitatus ATCC 10500]
  misc_feature (64)..(215): NCBI GI: 116178824 Blast Desc: CHGG_00040 [Chaetomium globosum CBS 148.51] gi|88184337|gb|EAQ91805.1| CHGG_00040 [Chaetomium globosum CBS 148.51]
  misc_feature (27)..(233): NCBI GI: 108798361 Blast Desc: metal dependent phosphohydrolase [Mycobacterium sp. MCS] gi|119867458|ref|YP_937410.1| metal dependent phosphohydrolase [Mycobacterium sp. KMS] metal dependent sp. MCS]
  misc_feature (28)..(232): NCBI GI: 13471098 Blast Desc: mlr0982 [Mesorhizobium loti MAFF303099] gi|14021842|dbj|BAB48453.1| mlr0982 [Mesorhizobium loti MAFF303099]
  misc_feature: Useful for introducing or modulating the production of volatile compounds
MKPTTILSSCLLAGAVTATPIFTPMTKIAGVEVIDTQIVRDAQKLIQGFPDYLFSHQMRSWLFGAAMINNNATLRHSIDLEVHAVATMLHDLGWDQTPGSRWVSNDKRFEVDGAIGARTWLSEHPIGKFWSKDRVRKVFQSIALHGSTSIVNYFELEEAVIVSSIGLDYRGAGDGSLVPVDVYNNIAKVYPQDELLSGTNDTFVWICQTKPNVTYDTWLQPFGEHFIPGYSAVGHRTFDSINGKSADKAFIMP

SEQ ID NO: 37386 - DNA, 1421 bp, Muscodor strobelii
  misc_feature: SGI EST ID NO. CUFF.89467.0
  misc_feature: Variant of the nucleotide sequence at SEQ ID NO 37384
gctctccttgcctcctcaacttgcctgcctacgacttgccgtcaaggagtcaaagattccacgttggtgaatgagcgttgatacttgagcggccgcgctaatctcaaattgacatgatgatatgtcggccgcactcgaaagagactgctgtgatgatcatttgtgtggtatatgcttctggaaggatttggaatatatttttggatgatgcttttctacagtatgcgttgatgagccttgtcgagctctcgaatacggagattgtgaaggaattctgatggaacgtagatggaatgcttagaaggccagatgagttgagcattaggtataaagtctcatgctaatcatcggaaaataagaagaacttatcatcgatctatgtcaacgggccctttcacatctgctccttaatactatcaatccttcactagaccgcaaacatgaagcctaccacaatactttcttcctgcctgttggccggtgccgtcacggcaacacccatcttcacacctatgaccaaaatcgccggtgtagaagtcatcgatacacaaatcgttcgcgatgcacagaagcttatccaaggcttccccgactacctattctctcatcagatgcgatcatggctattcggcgcagcgatgataaacaacaacgccacacttcgacactctatcgacctcgaggtccatgccgttgccacgatgctgcacgatctaggctgggaccagacgcctggttcccgatgggttagcaacgacaagcggtttgaggttgatggtgccatcggagcaagaacatggcttagcgagcaccctatcggtaaattctggtcgaaggaccgggtccgaaaagtcttccagtctattgccctgcacgggtcaacgagtatcgttaattactttgagctggaagaggctgtcatcgtctcgagcattggacttgattatcgaggcgccggcgatggaagtttagtccctgtcgatgtctataacaacatcgcgaaggtgtaccctcaggatgaactcctttcgggaaccaatgatacgtttgtgtggatctgccagaccaagcctaatgttacctatgatacttggcttcagcccttcggcgaacatttcatccccggctattcagccgtcggccaccgaacatttgatagtatcaatggcaagagtgccgacaaggcctttatcatgccataattgaaacatgaacggtattaagagatataattatgtaaataatagacttcgaggtcgatatacatgctgcttcagatttcgcaaggccagtggggatggctttaacccagctccatggtttgaggaatggacaacagctttgataaatgataaagataatgatagatagttatgagtaatgtataaaagacgtcagattgcaaattctttgtattgtgc

SEQ ID NO: 37387 - DNA, 1878 bp, Muscodor strobelii
  misc_feature: SGI cDNA ID NO. 572974
  misc_feature: Encodes the peptide sequence at SEQ ID NO 37388
atgcccggcgatcgcattgtcgttgatgggctttggcgatgtctgtgtccctccattgatgtcgccctcctcggcaagtctctccgtgggcctcgtcaagcgtcgccgccgtcaagaccgacactcgtctcccgccgcaacccgccgaagccgtcgctacagtgctgcagagcttcttctaccggccctgcaactgttgcagctccaataactcctacagccccaattcgacacagagctggtgttcagaacgagacgtcgcgcgtggcatatctcaaacgcttagccaaacgcgccccatggattcccagcggcgtgctcgagaagaatgagaaactggccacatccctccaatcgaccagcactcgcatcatctatgctacattaaaggatctccaggactccaaaggctttacctccactgtcactgcactagtcgagtacttggtcagggagcgcggagaggccccaaatgccgcgctgtacgaggccttgatcaaggccaacatcagcaggagtactggctccgctgccgtcgccagacagctattcagagagatgcaagcccataacattcccaccaccgcgggcgtctaccaggctctcctacaggtgacggccgtccacccggactatgttctcaggtcccaagtgcttcatgacatgaagaacaggtggttcgccttggatgtcaacgcccaggtgagcgtcatcattggccttctgcgtgacggccagtacgagctagccttctccaaactcgaacaattcattagcactcatcacacggcacccacatggcttttggaggtctttctttatgtcttcggggacctgggcttccaggaagaaaccttggccatcctcaaacgtcgtcagaacgtcaccggccttgtcaagcaggggcctttatctttaaatgcctggcacttcctgctcagtgtcttcagtcgcgattctttctatcccggtgtgaaatatgtttgggaccgtatggttgcgcatggctacatctgccccccagatggtgtggtcttgaattcgctgaatacagcatcgagcagcggggatacgatactagccatggccgccattcagactttgtcagcacgtggtgtcaaactagatctacatcactacgagcccctgatccagcttcacatacagcacaaggacctccagaaagcattcgcagtgctttgcatcatggcaaaagcaagtctttcgcctgacctatcctgtacacgccccatcttccaaatgcttcgcgactccaaagagcggacagacgaagcactccgaattcttcaggatctcaaagagcaccatgttattcctgcagcagctttcaatgtcgttctggaggcgaccgttatacacagaaacctttcatgcgcgatcgacatgtatcgaagtatacggcaggtctgcgtcaacggccctgatatcgaaacttttgaaatactgctccgaaattgcacacatttcaagcgaatggtttttcttgttgcagacatggaggctttttgcttgaagcccactcagcccattttagatgatattgttcggatatgtgatgcccacaacagattcactacagccttcaagtacctcgagccagcaaccgaggctgcaccatggtttagttcaaaatccgcatttctccttttgcagaagtctattgatgccggagatccgagggctgagctcatcatgagagaatgccgtcgacgcggtatggatggtgatatttcaaatttacacacgcacagtgtagcgatatcgagaacctcagccgataacgcagatccgcctacactaggagactcttctccgtcagaatggtctgtacgaataacagatgcagctgcagcttag

SEQ ID NO: 37388 - protein, 625 aa, Muscodor strobelii
  misc_feature: SGI Peptide ID NO. 572974
  misc_feature (1)..(585): NCBI GI: 85107177 Blast Desc: NCU07684 [Neurospora crassa OR74A] gi|28923929|gb|EAA33090.1| [Neurospora crassa OR74A]
  misc_feature (116)..(587): NCBI GI: 156034607 Blast Desc: SS1G_13238 [Sclerotinia sclerotiorum 1980] gi|154698642|gb|EDN98380.1| SS1G_13238 [Sclerotinia sclerotiorum 1980]
  misc_feature (110)..(587): NCBI GI: 154311062 Blast Desc: BC1G_06649 [Botryotinia fuckeliana B05.10] gi|150851053|gb|EDN26246.1| BC1G_06649 [Botryotinia fuckeliana B05.10]
  misc_feature (3)..(581): NCBI GI: 261352480 Blast Desc: pentatricopeptide repeat protein [Verticillium albo-atrum VaMs.102]
  misc_feature (125)..(580): NCBI GI: 39951735 Blast Desc: MGG_01510 [Magnaporthe grisea 70-15] gi|145020646|gb|EDK04775.1| MGG_01510 [Magnaporthe grisea 70-15]
  misc_feature (25)..(539): NCBI GI: 116196220 Blast Desc: CHGG_04708 [Chaetomium globosum CBS 148.51] gi|88180621|gb|EAQ88089.1| CHGG_04708 [Chaetomium globosum CBS 148.51]
  misc_feature (6)..(539): NCBI GI: 71001704 Blast Desc: pentatricopeptide repeat protein [Aspergillus fumigatus Af293] gi|66853171|gb|EAL93495.1| pentatricopeptide repeat protein [Aspergillus fumigatus Af293]
  misc_feature (6)..(539): NCBI GI: 159129597 Blast Desc: pentatricopeptide repeat protein [Aspergillus fumigatus A1163]
  misc_feature (6)..(538): NCBI GI: 238841620 Blast Desc: pentatricopeptide repeat protein [Microsporum canis CBS 113480]
  misc_feature (6)..(539): NCBI GI: 119481263 Blast Desc: pentatricopeptide repeat protein [Neosartorya fischeri NRRL 181] gi|119408814|gb|EAW18763.1| pentatricopeptide repeat protein [Neosartorya fischeri NRRL 181]
MPGDRIVVDGLWRCLCPSIDVALLGKSLRGPRQASPPSRPTLVSRRNPPKPSLQCCRASSTGPATVAAPITPTAPIRHRAGVQNETSRVAYLKRLAKRAPWIPSGVLEKNEKLATSLQSTSTRIIYATLKDLQDSKGFTSTVTALVEYLVRERGEAPNAALYEALIKANISRSTGSAAVARQLFREMQAHNIPTTAGVYQALLQVTAVHPDYVLRSQVLHDMKNRWFALDVNAQVSVIIGLLRDGQYELAFSKLEQFISTHHTAPTWLLEVFLYVFGDLGFQEETLAILKRRQNVTGLVKQGPLSLNAWHFLLSVFSRDSFYPGVKYVWDRMVAHGYICPPDGVVLNSLNTASSSGDTILAMAAIQTLSARGVKLDLHHYEPLIQLHIQHKDLQKAFAVLCIMAKASLSPDLSCTRPIFQMLRDSKERTDEALRILQDLKEHHVIPAAAFNVVLEATVIHRNLSCAIDMYRSIRQVCVNGPDIETFEILLRNCTHFKRMVFLVADMEAFCLKPTQPILDDIVRICDAHNRFTTAFKYLEPATEAAPWFSSKSAFLLLQKSIDAGDPRAELIMRECRRRGMDGDISNLHTHSVAISRTSADNADPPTLGDSSPSEWSVRITDAAAA

SEQ ID NO: 37389 - DNA, 3066 bp, Muscodor strobelii
  misc_feature: SGI EST ID NO. CUFF.89457.0
  misc_feature: Variant of the nucleotide sequence at SEQ ID NO 37387
gaatcactgtcaaaactacgcctcgaatagatcattgctcgctcggctgatctgttgatacatgtaatgctttactgtcaatgttgtatggctgtattagttcgtttttgttcatggtctgtcgcgtaccgtatatggggcttataggcaatgacttggccccacaactggttgcagctggtcgctacatgtaccttgatgtcagtgttgatatttggtcctgggctttgaagcttcatcctagacgtcgcatcaacaagtttttccttcggttgcactcatgcccggcgatcgcattgtcgttgatgggctttggcgatgtctgtgtccctccattgatgtcgccctcctcggcaagtctctccgtgggcctcgtcaagcgtcgccgccgtcaagaccgacactcgtctcccgccgcaacccgccgaagccgtcgctacagtgctgcagagcttcttctaccggccctgcaactgttgcagctccaataactcctacagccccaattcgacacagagctggtgttcagaacgagacgtcgcgcgtggcatatctcaaacgcttagccaaacgcgccccatggattcccagcggcgtgctcgagaagaatgagaaactggccacatccctccaatcgaccagcactcgcatcatctatgctacattaaaggatctccaggactccaaaggctttacctccactgtcactgcactagtcgagtacttggtcagggagcgcggagaggccccaaatgccgcgctgtacgaggccttgatcaaggccaacatcagcaggagtactggctccgctgccgtcgccagacagctattcagagagatgcaagcccataacattcccaccaccgcgggcgtctaccaggctctcctacaggtgacggccgtccacccggactatgttctcaggtcccaagtgcttcatgacatgaagaacaggtggttcgccttggatgtcaacgcccaggtgagcgtcatcattggccttctgcgtgacggccagtacgagctagccttctccaaactcgaacaattcattagcactcatcacacggcacccacatggcttttggaggtctttctttatgtcttcggggacctgggcttccaggaagaaaccttggccatcctcaaacgtcgtcagaacgtcaccggccttgtcaagcaggggcctttatctttaaatgcctggcacttcctgctcagtgtcttcagtcgcgattctttctatcccggtgtgaaatatgtttgggaccgtatggttgcgcatggctacatctgccccccagatggtgtggtcttgaattcgctgaatacagcatcgagcagcggggatacgatactagccatggccgccattcagactttgtcagcacgtggtgtcaaactagatctacatcactacgagcccctgatccagcttcacatacagcacaaggacctccagaaagcattcgcagtgctttgcatcatggcaaaagcaagtctttcgcctgacctatcctgtacacgccccatcttccaaatgcttcgcgactccaaagagcggacagacgaagcactccgaattcttcaggatctcaaagagcaccatgttattcctgcagcagctttcaatgtcgttctggaggcgaccgttatacacagaaacctttcatgcgcgatcgacatgtatcgaagtatacggcaggtctgcgtcaacggccctgatatcgaaacttttgaaatactgctccgaaattgcacacatttcaagcgaatggtttttcttgttgcagacatggaggctttttgcttgaagcccactcagcccattttagatgatattgttcggatatgtgatgcccacaacagattcactacagccttcaagtacctcgagccagcaaccgaggctgcaccatggtttagttcaaaatccgcatttctccttttgcagaagtctattgatgccggagatccgagggctgagctcatcatgagagaatgccgtcgacgcggtatggatggtgatatttcaaatttacacacgcacagtgtagcgatatcgagaacctcagccgataacgcagatccgcctacactaggagactcttctccgtcagaatggtctgtacgaataacagatgcagctgcagcttagactccgcccaaacttctgatgactccttccatctctcccggattttacatatgtgaagaggcaaaatagacaaaatatttgcattgtgtcaatttcagcttggcattgtctgcctaggctctaccctgtcttgagtaccatattttgctgacgtgcggttgtgataaggtgatgaggatccttccccaacattggcatatccacatacactctgaacatcaaagtctgtcgcagtgggtcaagaatagggatatattctgacacctaacacaaggaaatccagaaagagattgtatcactactttcttaacactcctcgtccgtacgatggtctgggcatcacccatttactcgaactatgaggttctcttgacattcatgccctaatagatgatcatgatgtgagaggttatgagtggttctccgatcgaactccttacatgttatttcgttattacgagctaattttgctctcttccccatcaactggcatccactacacgcaaaacaagcaccatcctcgtcactatttatcccctaagtggataggaatccccggctatagacatctaggcattccttcatactctgattccaacttagactttgggttagatatggtaatgttatttgcatgtatatgtatgtatatcagtaggccatacgcgtctacatagaaagctctcagaatgggtagtggtagactggtaggagtgacaaggatattcaaaagcaagcagccagggaaaggaatacaagctcggcagagtcggtagttttagcgcaatgtaacactgttgtacgagataaccaccactttcgtcagaggctacggcagtcgtcgctgaattcaattgattgggggtttggaatacattacaattaagccgcatgcaggtccaattctg

SEQ ID NO: 37390 - DNA, 384 bp, Muscodor strobelii
  misc_feature: SGI cDNA ID NO. 572975
  misc_feature: Encodes the peptide sequence at SEQ ID NO 37391
atgctacccctagggctcctgaccgcggcccagggctcgccgatgctggtcgagctcaagaacggcgagaccctcaacggccacctcatacaatgcgacacttggatgaacctgacactcaaggaggtcatccagacgagcccggaggcagacaaattcgtcagactacctgaggtttacgtcaagggtaataatatcaagtacctccgaatccccgacgagatcatcgagaaggccaaggaccagcagcaccaacaaggaggtggtttcagaggcggtcgtggcgggcaaggtcaccagcgcggtgaccacggcggaagaggaggagacagaggtcgtggtggccggggccggggtggacgcggtcgcggtcgaggagcttga

SEQ ID NO: 37391 - protein, 127 aa, Muscodor strobelii
  misc_feature: SGI Peptide ID NO. 572975
  misc_feature (5)..(71): Pfam Id: PF01423 Pfam Desc: LSM domain
  misc_feature (1)..(84): NCBI GI: 85107173 Blast Desc: NCU07683 [Neurospora crassa OR74A] gi|28923928|gb|EAA33089.1| NCU07683 [Neurospora crassa OR74A]
  misc_feature (1)..(90): NCBI GI: 154311062 Blast Desc: BC1G_06649 [Botryotinia fuckeliana B05.10] gi|150851053|gb|EDN26246.1| BC1G_06649 [Botryotinia fuckeliana B05.10]
  misc_feature (1)..(103): NCBI GI: 225563373 Blast Desc: small nuclear ribonucleoprotein [Ajellomyces capsulatus G186AR]
  misc_feature (1)..(103): NCBI GI: 154281997 Blast Desc: HCAG_03909 [Ajellomyces capsulatus NAm1] gi|150411990|gb|EDN07378.1| HCAG_03909 [Ajellomyces capsulatus NAm1]
  misc_feature (1)..(90): NCBI GI: 256720730 Blast Desc: NECHADRAFT_85726 [Nectria haematococca mpVI 77-13-4]
  misc_feature (1)..(105): NCBI GI: 226280212 Blast Desc: small nuclear ribonucleoprotein [Paracoccidioides brasiliensis Pb01]
  misc_feature (1)..(105): NCBI GI: 225684632 Blast Desc: U6 snRNP-associated protein Lsm4 [Paracoccidioides brasiliensis Pb03] gi|226286829|gb|EEH42342.1| small nuclear ribonucleoprotein [Paracoccidioides brasiliensis Pb18]
  misc_feature (1)..(103): NCBI GI: 240275971 Blast Desc: small nuclear ribonucleoprotein [Ajellomyces capsulatus H143]
  misc_feature (1)..(99): NCBI GI: 261195536 Blast Desc: small nuclear ribonucleoprotein [Ajellomyces dermatitidis SLH14081] gi|239588044|gb|EEQ70687.1| small nuclear ribonucleoprotein [Ajellomyces dermatitidis SLH14081] small ER-3]
  misc_feature (1)..(99): NCBI GI: 238496529 Blast Desc: U6 snRNA-associated Sm-like protein LSM4, [Aspergillus flavus NRRL3357] gi|220694380|gb|EED50724.1| U6 snRNA-associated Sm-like protein LSM4, [Aspergillus flavus NRRL3357]
MLPLGLLTAAQGSPMLVELKNGETLNGHLIQCDTWMNLTLKEVIQTSPEADKFVRLPEVYVKGNNIKYLRIPDEIIEKAKDQQHQQGGGFRGGRGGQGHQRGDHGGRGGDRGRGGRGRGGRGRGRGA

SEQ ID NO: 37392 - DNA, 1048 bp, Muscodor strobelii
  misc_feature: SGI EST ID NO. CUFF.89473.0
  misc_feature: Variant of the nucleotide sequence at SEQ ID NO 37390
ggcattgataggccaacttggacaacctgaggcccctacctcgccgaagacctaccaggtaccccagctcgccttgtttgccccaccataatcttgctccagcttgctccgtcatttgcgatcaaggatcattgcgactgaaggctcgaaagctatcgttacagcattgtcaacttgcgcacaagttataacaatacgcactcagtactatgctacccctagggctcctgaccgcggcccagggctcgccgatgctggtcgagctcaagaacggcgagaccctcaacggccacctcatacaatgcgacacttggatgaacctgacactcaaggaggtcatccagacgagcccggaggcagacaaattcgtcagactacctgaggtttacgtcaagggtaataatatcaagtacctccgaatccccgacgagatcatcgagaaggccaaggaccagcagcaccaacaaggaggtggtttcagaggcggtcgtggcgggcaaggtcaccagcgcggtgaccacggcggaagaggaggagacagaggtcgtggtggccggggccggggtggacgcggtcgcggtcgaggagcttgaggcagtggcgtgatcaagaggatgacttaccacggggcgtcacacgcttacagcgcaattttaccacaatcctagagccagcatggacttttacatgtcgtggcttagaacggcctgcaacatcttaagcgccgatggaccagagaagaagatgggcgccaactatacctgaaccacctccgctgctgtgaaccaagaaagctgccaaagataccccaggatgcacgaagagagtgcacagtcacaatatcatatctgacggtatcatggtcttgcgatttgcaattgcctgcgagcttgcagcgacagattgccttgcaagcggacaagatatcggcatgctgctgcacccttgacaggaagcagtaggtcactgaatatctagatagtattaacactcgatcaaaaaagcgaaagaaatcaaatctggacctcttgaggtattccaactgaag

SEQ ID NO: 37393 - DNA, 1596 bp, Muscodor strobelii
  misc_feature: SGI cDNA ID NO. 572976
  misc_feature: Encodes the peptide sequence at SEQ ID NO 37394
atgtttgtgtcgctcaaggccacccttgcattgctgttggctcccgcgctggccgcggtcattccgactgcaccggccgacgagctcacacctcctgatgccctggttactctggactttgccagttactcggaacaactcacattacagcaaacgacactcgagctacgtatcgtcgagtcgagaagtccatgcggtcatgggtctctcactatcaacggtgagcctttggctcagaatgctattggcaacggatctggcaccatcacgaccaccagcggaaacctcctagacgctcggtggaaattcacttgcattcgtctagaaaatggagcagaagcacaattactgtcctttgcagctgtgtctcttgatggccaagcggttcagaacaccgcgttctccatccaattccagcagactgcccctgtgtcgattctctctatcgaaggggccacatcagccatcatcgaggataatgaatcggaatcacaaattgaaactactttaccgagtctagacgtcgagctagctgaattgaaggcgctggaggagcagctacggactcttgagaaatccattgccttgaaagtcgagtatatcaccgacacgttcgatgcacggccggaaacgatgcatcgcattaacagttgcaacacctttaaatgcgtcatgcgaacgatatactctcgggtgaagggcatggcaagccacgtgtaccatggcacagagcaccacggagtgaccgacgggtcatcttcatctcacggctggaggcataacagccaacatcatcctcatggcaaccactcatcaacagaaacacaagagaatcatctcgaccacgcgtcggaattgctgactagcggagacgaatcagagcgtccattagcaagctctggccgtgaataccctcgtccatatactcagcaagagaatgccacagtatcacatcatcacggaggagcacgaattattgccatagttatcctcacaaatctaatcacattcagtctaatcttcttgttcatcaaacgcagacgtcaacaacgtaaagctcgatgggaagaaagacgccgtaaaatgcgcgcagctcgcgcgcaatgcacgacaactgcagcgatggcagcgatggatctaattaagtggctccgggatggtatggcgccatatgaaaacggagatgaagaaaaagatgccatcatgagacggtttggttcagattccgaagttgattcagagccggattcggactctgacagccggcaggaagatgcactttccaccactatggaggaggaacttgctcagttgcgcgcagttgctggggtcgttggtgatttggtagcaccaaacggacgaagtcgcattcagatgcatggccgcgtcccaggacgacgtcgcggctctgcagcttcgagtatcacatctgcatgccctacttacacatccacggacgagactttaccaccctacgatgagagcccccggtcaccagtctacatcccagatgagtttatcggaagctcactagcaccaagcgaggggtcgatggccggttctacactagatgagcagccagaaagaaaagactga

SEQ ID NO: 37394 - protein, 531 aa, Muscodor strobelii
  misc_feature: SGI Peptide ID NO. 572976
  misc_feature (10)..(246): NCBI GI: 156034611 Blast Desc: SS1G_13240 [Sclerotinia sclerotiorum 1980] gi|154698644|gb|EDN98382.1| SS1G_13240 [Sclerotinia sclerotiorum 1980]
  misc_feature (32)..(240): NCBI GI: 256720726 Blast Desc: NECHADRAFT_101829 [Nectria haematococca mpVI 77-13-4]
  misc_feature (32)..(240): NCBI GI: 46121865 Blast Desc: FG05310.1 [Gibberella zeae PH-1]
  misc_feature (65)..(497): NCBI GI: 189197849 Blast Desc: [Pyrenophora tritici-repentis Pt-1C-BFP] gi|187981210|gb|EDU47836.1| [Pyrenophora tritici-repentis Pt-1C-BFP]
  misc_feature (10)..(154): NCBI GI: 154311064 Blast Desc: [Botryotinia fuckeliana B05.10] gi|150851054|gb|EDN26247.1| [Botryotinia fuckeliana B05.10]
  misc_feature (2)..(234): NCBI GI: 169606005 Blast Desc: SNOG_06035 [Phaeosphaeria nodorum SN15] gi|160706891|gb|EAT87099.2| SNOG_06035 [Phaeosphaeria nodorum SN15]
  misc_feature (34)..(195): NCBI GI: 145603408 Blast Desc: [Magnaporthe grisea 70-15] gi|145011647|gb|EDJ96303.1| [Magnaporthe grisea 70-15]
  misc_feature (51)..(155): NCBI GI: 256730100 Blast Desc: NECHADRAFT_101110 [Nectria haematococca mpVI 77-13-4]
MFVSLKATLALLLAPALAAVIPTAPADELTPPDALVTLDFASYSEQLTLQQTTLELRIVESRSPCGHGSLTINGEPLAQNAIGNGSGTITTTSGNLLDARWKFTCIRLENGAEAQLLSFAAVSLDGQAVQNTAFSIQFQQTAPVSILSIEGATSAIIEDNESESQIETTLPSLDVELAELKALEEQLRTLEKSIALKVEYITDTFDARPETMHRINSCNTFKCVMRTIYSRVKGMASHVYHGTEHHGVTDGSSSSHGWRHNSQHHPHGNHSSTETQENHLDHASELLTSGDESERPLASSGREYPRPYTQQENATVSHHHGGARIIAIVILTNLITFSLIFLFIKRRRQQRKARWEERRRKMRAARAQCTTTAAMAAMDLIKWLRDGMAPYENGDEEKDAIMRRFGSDSEVDSEPDSDSDSRQEDALSTTMEEELAQLRAVAGVVGDLVAPNGRSRIQMHGRVPGRRRGSAASSITSACPTYTSTDETLPPYDESPRSPVYIPDEFIGSSLAPSEGSMAGSTLDEQPERKD

SEQ ID NO: 37395 - DNA, 3918 bp, Muscodor strobelii
  misc_feature: SGI EST ID NO. CUFF.89827.0
  misc_feature: Variant of the nucleotide sequence at SEQ ID NO 37393
attttatgcccctcggcctacttcaattgatgacaagtcgcaactttgctcttccgcacccttccacttaatcaagtgggtgcagccggagtagactcgccacttcgaggttgaaaccatcgtctgttgagtggccgcgtcatttcttatatgccctcattgttcgttgcctacggtaggcaggctcacgatgtttgtgtcgctcaaggccacccttgcattgctgttggctcccgcgctggccgcggtcattccgactgcaccggccgacgagcgtaaggacctcttcatgatacccgttgacgtgctctggtattgtcttgaactcgtgattaatttttgtttgtagtcacacctcctgatgccctggttactctggactttgccagttactcggaacaactcacattacagcaaacgacactcgagctacgtatcgtcgagtcgagaagtccatgcggtcatgggtctctcactatcaacggtgagcctttggctcagaatgctattggcaacggatctggcaccatcacgaccaccagcggaaacctcctagacgctcggtggaaattcacttgcattcgtctagaaaatggagcagaagcacaattactgtcctttgcagctgtgtctcttgatggccaagcggttcagaacaccgcgttctccatccaattccagcagactgcccctgtgtcgattctctctatcgaaggggccacatcagccatcatcgaggataatgaatcggaatcacaaattgaaactactttaccgagtctagacgtcgagctagctgaattgaaggcgctggaggagcagctacggactcttgagaaatccattgccttgaaagtcgagtatatcaccgacacgttcgatgcacggccggaaacgatgcatcgcattaacagttgcaacacctttaaatgcgtcatgcgaacgatatactctcgggtgaagggcatggcaagccacgtgtaccatggcacagagcaccacggagtgaccgacgggtcatcttcatctcacggctggaggcataacagccaacatcatcctcatggcaaccactcatcaacagaaacacaagagaatcatctcgaccacgcgtcggaattgctgactagcggagacgaatcagagcgtccattagcaagctctggccgtgaataccctcgtccatatactcagcaagagaatgccacagtatcacatcatcacggaggagcacgaattattgccatagttatcctcacaaatctaatcacattcagtctaatcttcttgttcatcaaacgcagacgtcaacaacgtaaagctcgatgggaagaaagacgccgtaaaatgcgcgcagctcgcgcgcaatgcacgacaactgcagcgatggcagcgatggatctaattaagtggctccgggatggtatggcgccatatgaaaacggagatgaagaaaaagatgccatcatgagacggtttggttcagattccgaagttgattcagagccggattcggactctgacagccggcaggaagatgcactttccaccactatggaggaggaacttgctcagttgcgcgcagttgctggggtcgttggtgatttggtagcaccaaacggacgaagtcgcattcagatgcatggccgcgtcccaggacgacgtcgcggctctgcagcttcgagtatcacatctgcatgccctacttacacatccacggacgagactttaccaccctacgatgagagcccccggtcaccagtctacatcccagatgagtttatcggaagctcactagcaccaagcgaggggtcgatggccggttctacactagatgagcagccagaaagaaaagactgaggggtcttgcatattataataatgatgtagcatactaatgtggtgtttggtctgtcttacatataggcgtttgagcatttattgggtttcgactaaggtcgtaggagaagggacaggtcacatactggcttgaaagctgtaattgatacagacaagtgcgcacaacataccttggcgtcgactcgtgccaaatggactgaagtctgctgcagaactgcagttggaacaaaagttcacaggttcacaccaactaatgaagctatgtgtgaactttatgcaagccacatcatgtgttcaattgcgggcagctcgtgagaattggaaagggactatcagctaatatcgaggacatcgaatcctcattttgcagtatttaaagctggcaatcttgggatggtggaatagtctcccatatgtatacattaattagatcaagcaccgacatgagacgtgggtataccaggttaagtgtacgaccaggatctttttttcgcactcggattcaatctgggtctagatacctggtatttgctgcctgaaaggcgctgaaagaactcagcctccaaaactcaggcgaggaggactccaatggacccaactaaaactgctggcgccggcatcttcatgccgtggatctgacttatatgataggcgcaactacgagagatctcactctagcatattattcatacataaggtcggatgaagcccaatgtcgtgaaaactgagtatcaaaagtagaatatagagcacatagcacagagcacacacataatacgcggcttggcttcacaaagaacacacacacagagacatttgaccttcaatcatcacaacaacatataaaacgccaagcaattgaataccataccaatcatgccctcaccaacaaaagacgagctcgcgcacgaagacgcatcgcaaaatcaacctcacgatgaactaccagcctacacggccgtagcctcatcatcagaacaaacagcaacatacccgagcccagactcgccattcaacttcccgccagcctacacaggtccaagtacatcatcatcatcaaccaccaaattctcaccatcctccgacgacaagaaacaatccacacactacggtgcaatagcaacgctgatagcaatccctcagctaaatccccacccaacatcccccttcctcccatcctacacttctctcctcctctcatccggcatcccacattcatcatttacatcattcctcagcacactctccgccttcctatccgccaacgtctcatcacgtgccctgtcacacgtgcaagacgtgggaaaacacttaacatccctcccaacgcgattctccaaagaaacagctgcgcacttcaaatacgtggggaaatccgtaactcaatccgccaaatccggggacgccatcggacttgccaggggcgtagtaggcggtgctatcggcctcacagtcgggaccgctgcacgagccgttggatctcttgtctcgctccctgctactacactcggtgtagcgacgaagaaacctcttacgccgagacaaagggctgaggcgtatttatctgttgcggaaaaggactggtttagtacccgcggacttagtgcgcggttggtgaacacgggagagctcgtagagctgttgatgttggttagaccgatggggaatcatgctgatatgacggcggagaggatggtggatcttgggcgacggactgctaagggaggtgctgaggagcagattgctgcgctggagagggagtttgggattacgaggttggaggttgatggaggtgggaaggcgttggatttagggctgcagacgctgtggttggttcttacggatttggagcgtgggaggttggatgagtttatgaggtactaactgagggagagggcgtgcgatgttctacggacttgacatgtttagtgtatgttaaatgataaaagagccttgctattgttgaaaatatacgtgagtaccgatgaatagatcgagactgtagcttaacctagtgaaaagatgcatatatacttttatcgcaatcttgaaaccggg

SEQ ID NO: 37396 - DNA, 1008 bp, Muscodor strobelii
  misc_feature: SGI cDNA ID NO. 572977
  misc_feature: Reduced expression when VOC is produced
  misc_feature: Encodes the peptide sequence at SEQ ID NO 37397
atgccctcaccaacaaaagacgagctcgcgcacgaagacgcatcgcaaaatcaacctcacgatgaactaccagcctacacggccgtagcctcatcatcagaacaaacagcaacatacccgagcccagactcgccattcaacttcccgccagcctacacaggtccaagtacatcatcatcatcaaccaccaaattctcaccatcctccgacgacaagaaacaatccacacactacggtgcaatagcaacgctgatagcaatccctcagctaaatccccacccaacatcccccttcctcccatcctacacttctctcctcctctcatccggcatcccacattcatcatttacatcattcctcagcacactctccgccttcctatccgccaacgtctcatcacgtgccctgtcacacgtgcaagacgtgggaaaacacttaacatccctcccaacgcgattctccaaagaaacagctgcgcacttcaaatacgtggggaaatccgtaactcaatccgccaaatccggggacgccatcggacttgccaggggcgtagtaggcggtgctatcggcctcacagtcgggaccgctgcacgagccgttggatctcttgtctcgctccctgctactacactcggtgtagcgacgaagaaacctcttacgccgagacaaagggctgaggcgtatttatctgttgcggaaaaggactggtttagtacccgcggacttagtgcgcggttggtgaacacgggagagctcgtagagctgttgatgttggttagaccgatggggaatcatgctgatatgacggcggagaggatggtggatcttgggcgacggactgctaagggaggtgctgaggagcagattgctgcgctggagagggagtttgggattacgaggttggaggttgatggaggtgggaaggcgttggatttagggctgcagacgctgtggttggttcttacggatttggagcgtgggaggttggatgagtttatgaggtactaa

SEQ ID NO: 37397 - protein, 335 aa, Muscodor strobelii
  misc_feature: SGI Peptide ID NO. 572977
  misc_feature (22)..(325): NCBI GI: 256723833 Blast Desc: NECHADRAFT_92287 [Nectria haematococca mpVI 77-13-4]
  misc_feature (10)..(325): NCBI GI: 46111893 Blast Desc: FG02828.1 [Gibberella zeae PH-1]
  misc_feature (34)..(324): NCBI GI: 261361335 Blast Desc: conserved [Verticillium albo-atrum VaMs.102]
  misc_feature (21)..(322): NCBI GI: 39941846 Blast Desc: MGG_10772 [Magnaporthe grisea 70-15] gi|145010343|gb|EDJ94999.1| MGG_10772 [Magnaporthe grisea 70-15]
  misc_feature (47)..(328): NCBI GI: 255953621 Blast Desc: Pc21g05170 [Penicillium chrysogenum Wisconsin 54-1255] gi|211589274|emb|CAP95414.1| Pc21g05170 [Penicillium chrysogenum Wisconsin 54-1255]
  misc_feature: Useful for introducing or modulating the production of volatile compounds
MPSPTKDELAHEDASQNQPHDELPAYTAVASSSEQTATYPSPDSPFNFPPAYTGPSTSSSSTTKFSPSSDDKKQSTHYGAIATLIAIPQLNPHPTSPFLPSYTSLLLSSGIPHSSFTSFLSTLSAFLSANVSSRALSHVQDVGKHLTSLPTRFSKETAAHFKYVGKSVTQSAKSGDAIGLARGVVGGAIGLTVGTAARAVGSLVSLPATTLGVATKKPLTPRQRAEAYLSVAEKDWFSTRGLSARLVNTGELVELLMLVRPMGNHADMTAERMVDLGRRTAKGGAEEQIAALEREFGITRLEVDGGGKALDLGLQTLWLVLTDLERGRLDEFMRY

SEQ ID NO: 37398 - DNA, 3918 bp, Muscodor strobelii; identical to SEQ ID NO: 37395
  misc_feature: SGI EST ID NO. CUFF.89827.0
  misc_feature: Variant of the nucleotide sequence at SEQ ID NO 37396

SEQ ID NO: 37399 - DNA, 3192 bp, Muscodor strobelii
  misc_feature: SGI cDNA ID NO. 572978
  misc_feature: Reduced expression when VOC is produced
  misc_feature: Encodes the peptide sequence at SEQ ID NO 37400
atggattccctcggcctcgatctcgatcttgatgcgtccaggtccaatgtcgtctgcagctccgtccacgagctgcaagaccgcctgcaccacctgatcacttcgcgatgcaccccgacgcgcgccgcccgcaccgccgtcacctacgaactgcgcgcacacaccaccctgttcctcgtcgacgaccctgccgctacgcccacgcccgcccccgcgcccgtcgagccgcttgacgatgccgagccaccatctcaaccgcctcccccgcctcccgtcacgaggactgtgctcgcctccgacgccgtgctaaaccagcccagtgacgatcccgtgctgcagaaggatatcgccaagcacatatctactgccgtgggcgccgtcgacgggagcacctggaatgtccgtcaagtggctaggggccagcaaggatggtctttcacctacatctgcaaagactccctgcaggcatggaaccgggccaatgccaaaaacccccagaggcccgtcatcggcggcttcagcggcaaggacggcctggatcccattaatctgtcgcgtcctgcgttcgactgccgcggatctctcactatcgccttttccaagcttagtcgaggtatcattgttaagtacgagcataccccactccaccggactgttgtccagttggtcgactcgcttgcgcctgtcccgcctccagtccgccaaggcaacaatgccaactcacggacacccaagtccaagcgtgcgccaggcgccgatgacgaggacggcacacgcagcaaaaagaagaccccgaaggccaaacgcccaactggcactgatgccgatggtgaaggcgacgaggcgagcgcaaagaagaaagcaccaaagcggaagcgtcctgcgtcaatgcccggagccgatggacctgatggagaaagtcgaccaaaaaggcagaggaagaaaggcaaatcattaggagccaactcgcaagacggccttgcagtggggatcgaccaggacaccacaggcacccagaatcagcctccaaatgccgctgataaagcttcgacggcgttcctcaatgttcctgctgccgaagccgagcgccggcgacagactgccatcgaactgctcaatggaaggggaatacctcctgagaccttgtctgccgagcaattcaatatttttgccaaccaagcccccaacttacagactacgtcgctagagatgctcgctaggtacggcgccgagcggttgagaattgtacaccccgatgagaaggaacaggcagcatcttccaactccacacctgtccagggagcctctgcagacgcttcacctgcgccttcgtctcagtcagcatccagcaatgttaacacacctgcaagaaaacctcgaggcaagaaaaaaggatccgctgggcatctgacagaggttcctattggaaatggtgcggttgtacccatagaacagaccggacagctagggactacagagtcggcgctcaagcccaaaaaggggcgagttactcgaggcgcttgcgacacatgcaagcagcgcaaaataaagtgcaccaaagagcatcctacgtgttcggtatgcgagagtgcaaacgtcaagtgcgtctacttgccaccaagaccgcgtaggaaatctgagaagtctgctgaagtggtcgaaaacgacgactcagactatccagaagaaaccagctatgtccagcatgaatcagtgtcccaaaatccagaaccgccgatcgcacctccatccgtctcccagcctactactgtacctcaaacaatgcaggatcttgacaatgaggagtttattccggatccgaacatcctctcagcaccagtcgagcagcatcatacatatgcacacccgcagcatgccaacgataatctctaccaacatccacacggcgagattgattttcctccgatgaactcacatgcctctacatcaactaattctatgcctgccttaacatatcctcagtcgcaaacacaggacagcttccagcagtctacgacgaatttgggcttcccgtccaactcagtaaatttacaacaccaatcacctgggatctcgcactctcagcctgcgtcgaattctgcttcgtctcagagaaggcagtcgggcgcagcagctaggaagagtctccctaccaccagccaggtcaaacaaacccctatacctcctcctagcataccaaatcatacatccagctggagcacttcaccaacggttaatcaggccactacgtcgtcgccaaccgtagctcaccaacagactgccccgcgaccgagatcgcgcaagtctagagctgaaccagaacaacagatccaggcagtttcccattcggcacacaaccaatcgccaatgactcggtcaccctatcaaagtggtgctcacgtaaattcaagacaagcgcgtcgtgcacagactaatacaccgcctgtcacctcaaactcacgcccgccaccccaagcaccaggatctactcaccatcaaacgtctaccagtacggcttcacatcatacctcttcggcctccagctcagtacccgcatatgataactattctcgttataataacgatacgagtactcaatataccggtcatagaaacgatgatcccaattcttcgtcacgggctggttatgaatcaagctcgtatcactctactactaccacaactacagctgccccttacacatcgacttcgtcctatgattatggacgtagctcgggtacagcaaatcctttatctcaggcgctgaatagcactacggaatacggtggaactaatacttcgagtacaaatcagtggcctacttcacaaacacgtggacagaccaccactggttctagcggttatcccgccaccgattcaggttctcatcactacggcacccggtctagtgacgggcggagctcgaatcaaaatcctccgtacagtcaaccacaatcacagagctacaatgcatattcatcacaacagcccagtcttagtcagcaaaatcagcaacaaaactggtatgggtttacgcctgccaataacaacaatcagaaccatttcggcggcaaccggcagagtggctttagcgggcacaggtcgaacgtgcccgcatactcgaatcagtacactggagctgaggatcagacgatatatgatcttctcagagcgtcaggatcgaatcactaa

SEQ ID NO: 37400 - protein, 1063 aa, Muscodor strobelii
  misc_feature: SGI Peptide ID NO. 572978
  misc_feature (506)..(545): Pfam Id: PF00172 Pfam Desc: Fungal Zn(2)-Cys(6) binuclear cluster domain
  misc_feature (6)..(902): NCBI GI: 116196232 Blast Desc: CHGG_04714 [Chaetomium globosum CBS 148.51] gi|88180627|gb|EAQ88095.1| CHGG_04714 [Chaetomium globosum CBS 148.51]
  misc_feature (1)..(543): NCBI GI: 256720729 Blast Desc: NECHADRAFT_85723 [Nectria haematococca mpVI 77-13-4]
  misc_feature (6)..(948): NCBI GI: 85108097 Blast Desc: NCU08289 [Neurospora crassa OR74A] gi|28924110|gb|EAA33266.1| NCU08289 [Neurospora crassa OR74A]
  misc_feature (1)..(554): NCBI GI: 145613586 Blast Desc: MGG_11192 [Magnaporthe grisea 70-15] gi|145020644|gb|EDK04773.1| MGG_11192 [Magnaporthe grisea 70-15]
  misc_feature (12)..(422): NCBI GI: 46121879 Blast Desc: FG05317.1 [Gibberella zeae PH-1]
  misc_feature (286)..(537): NCBI GI: 261352478 Blast Desc: VDBG_01015 [Verticillium albo-atrum VaMs.102]
  misc_feature: Useful for introducing or modulating the production of volatile compounds
MDSLGLDLDLDASRSNVVCSSVHELQDRLHHLITSRCTPTRAARTAVTYELRAHTTLFLVDDPAATPTPAPAPVEPLDDAEPPSQPPPPPPVTRTVLASDAVLNQPSDDPVLQKDIAKHISTAVGAVDGSTWNVRQVARGQQGWSFTYICKDSLQAWNRANAKNPQRPVIGGFSGKDGLDPINLSRPAFDCRGSLTIAFSKLSRGIIVKYEHTPLHRTVVQLVDSLAPVPPPVRQGNNANSRTPKSKRAPGADDEDGTRSKKKTPKAKRPTGTDADGEGDEASAKKKAPKRKRPASMPGADGPDGESRPKRQRKKGKSLGANSQDGLAVGIDQDTTGTQNQPPNAADKASTAFLNVPAAEAERRRQTAIELLNGRGIPPETLSAEQFNIFANQAPNLQTTSLEMLARYGAERLRIVHPDEKEQAASSNSTPVQGASADASPAPSSQSASSNVNTPARKPRGKKKGSAGHLTEVPIGNGAVVPIEQTGQLGTTESALKPKKGRVTRGACDTCKQRKIKCTKEHPTCSVCESANVKCVYLPPRPRRKSEKSAEVVENDDSDYPEETSYVQHESVSQNPEPPIAPPSVSQPTTVPQTMQDLDNEEFIPDPNILSAPVEQHHTYAHPQHANDNLYQHPHGEIDFPPMNSHASTSTNSMPALTYPQSQTQDSFQQSTTNLGFPSNSVNLQHQSPGISHSQPASNSASSQRRQSGAAARKSLPTTSQVKQTPIPPPSIPNHTSSWSTSPTVNQATTSSPTVAHQQTAPRPRSRKSRAEPEQQIQAVSHSAHNQSPMTRSPYQSGAHVNSRQARRAQTNTPPVTSNSRPPPQAPGSTHHQTSTSTASHHTSSASSSVPAYDNYSRYNNDTSTQYTGHRNDDPNSSSRAGYESSSYHSTTTTTTAAPYTSTSSYDYGRSSGTANPLSQALNSTTEYGGTNTSSTNQWPTSQTRGQTTTGSSGYPATDSGSHHYGTRSSDGRSSNQNPPYSQPQSQSYNAYSSQQPSLSQQNQQQNWYGFTPANNNNQNHFGGNRQSGFSGHRSNVPAYSNQYTGAEDQTIYDLLRASGSNH

SEQ ID NO: 37401 - DNA, 3885 bp, Muscodor strobelii
  misc_feature: SGI EST ID NO. CUFF.89585.1
  misc_feature: Variant of the nucleotide sequence at SEQ ID NO 37399
ctttagtccaatcgcacgcggcaccgcgtacgagctggatcttcgaaggtgaaggcgaccagatgcgctgcaattgcgcgggttagctaaggcagtcgcaagctgccggcagtacacggatcattcttccacagttggtacacagctcttctgtgaagacacgcatctatcttggccttcacgcggaacccagaacccagaacccagaacacgtcccgcgatagctacctttgtcgatgttgccgtctcgtcctacactgcccaccaccgcccgccaccccgacacaccatcgacagtgacgacagaacagccgtccgtccgtccgactgcggtgccgcgcgcgacactgcttcgccgacatggattccctcggcctcgatctcgatcttgatgcgtccaggtccaatgtcgtctgcagctccgtccacgagctgcaagaccgcctgcaccacctgatcacttcgcgatgcaccccgacgcgcgccgcccgcaccgccgtcacctacgaactgcgcgcacacaccaccctgttcctcgtcgacgaccctgccgctacgcccacgcccgcccccgcgcccgtcgagccgcttgacgatgccgagccaccatctcaaccgcctcccccgcctcccgtcacgaggactgtgctcgcctccgacgccgtgctaaaccagcccagtgacgatcccgtgctgcagaaggatatcgccaagcacatatctactgccgtgggcgccgtcgacgggagcacctggaatgtccgtcaagtggctaggggccagcaaggatggtctttcacctacatctgcaaagactccctgcaggcatggaaccgggccaatgccaaaaacccccagaggcccgtcatcggcggcttcagcggcaaggacggcctggatcccattaatctgtcgcgtcctgcgttcgactgccgcggatctctcactatcgccttttccaagcttagtcgaggtatcattgttaagtacgagcataccccactccaccggactgttgtccagttggtcgactcgcttgcgcctgtcccgcctccagtccgccaaggcaacaatgccaactcacggacacccaagtccaagcgtgcgccaggcgccgatgacgaggacggcacacgcagcaaaaagaagaccccgaaggccaaacgcccaactggcactgatgccgatggtgaaggcgacgaggcgagcgcaaagaagaaagcaccaaagcggaagcgtcctgcgtcaatgcccggagccgatggacctgatggagaaagtcgaccaaaaaggcagaggaagaaaggcaaatcattaggagccaactcgcaagacggccttgcagtggggatcgaccaggacaccacaggcacccagaatcagcctccaaatgccgctgataaagcttcgacggcgttcctcaatgttcctgctgccgaagccgagcgccggcgacagactgccatcgaactgctcaatggaaggggaatacctcctgagaccttgtctgccgagcaattcaatatttttgccaaccaagcccccaacttacagactacgtcgctagagatgctcgctaggtacggcgccgagcggttgagaattgtacaccccgatgagaaggaacaggcagcatcttccaactccacacctgtccagggagcctctgcagacgcttcacctgcgccttcgtctcagtcagcatccagcaatgttaacacacctgcaagaaaacctcgaggcaagaaaaaaggatccgctgggcatctgacagaggttcctattggaaatggtgcggttgtacccatagaacagaccggacagctagggactacagagtcggcgctcaagcccaaaaaggggcgagttactcgaggcgcttgcgacacatgcaagcagcgcaaaataaagtgcaccaaagagcatcctacgtgttcggtatgcgagagtgcaaacgtcaagtgcgtctacttgccaccaagaccgcgtaggaaatctgagaagtctgctgaagtggtcgaaaacgacgactcagactatccagaagaaaccagctatgtccagcatgaatcagtgtcccaaaatccagaaccgccgatcgcacctccatccgtctcccagcctactactgtacctcaaacaatgcaggatcttgacaatgaggagtttattccggatccgaacatcctctcagcaccagtcgagcagcatcatacatatgcacacccgcagcatgccaacgataatctctaccaacatccacacggcgagattgattttcctccgatgaactcacatgcctctacatcaactaattctatgcctgccttaacatatcctcagtcgcaaacacaggacagcttccagcagtctacgacgaatttgggcttcccgtccaactcagtaaatttacaacaccaatcacctgggatctcgcactctcagcctgcgtcgaattctgcttcgtctcagagaaggcagtcgggcgcagcagctaggaagagtctccctaccaccagccaggtcaaacaaacccctatacctcctcctagcataccaaatcatacatccagctggagcacttcaccaacggttaatcaggccactacgtcgtcgccaaccgtagctcaccaacagactgccccgcgaccgagatcgcgcaagtctagagctgaaccagaacaacagatccaggcagtttcccattcggcacacaaccaatcgccaatgactcggtcaccctatcaaagtggtgctcacgtaaattcaagacaagcgcgtcgtgcacagactaatacaccgcctgtcacctcaaactcacgcccgccaccccaagcaccaggatctactcaccatcaaacgtctaccagtacggcttcacatcatacctcttcggcctccagctcagtacccgcatatgataactattctcgttataataacgatacgagtactcaatataccggtcatagaaacgatgatcccaattcttcgtcacgggctggttatgaatcaagctcgtatcactctactactaccacaactacagctgccccttacacatcgacttcgtcctatgattatggacgtagctcgggtacagcaaatcctttatctcaggcgctgaatagcactacggaatacggtggaactaatacttcgagtacaaatcagtggcctacttcacaaacacgtggacagaccaccactggttctagcggttatcccgccaccgattcaggttctcatcactacggcacccggtctagtgacgggcggagctcgaatcaaaatcctccgtacagtcaaccacaatcacagagctacaatgcatattcatcacaacagcccagtcttagtcagcaaaatcagcaacaaaactggtatgggtttacgcctgccaataacaacaatcagaaccatttcggcggcaaccggcagagtggctttagcgggcacaggtcgaacgtgcccgcatactcgaatcagtacactggagctgaggatcagacgatatatgatcttctcagagcgtcaggatcgaatcactaaggcagagtcgagcctcattgtgtatagttatcattcctatggaatgacacctctccgtaaataattggcagcaagcaaggcgttacggtacagattcattgctttcacgcagtgtaatcgttaggattgcggtattattaggattaccccggtgtgttacgcccatgctaggtcgacagagccatgctagctagatgtaaaggccacctgtcagctttatcttgcacatttaagaagagcttaatgaaaagctgatatgccttttcaatttgccgaacttcatatttgatacgcctgttctgcaaattttcagcccctgagatctcattttag

SEQ ID NO: 37402 - DNA, 1962 bp, Muscodor strobelii
  misc_feature: SGI cDNA ID NO. 572979
  misc_feature: Encodes the peptide sequence at SEQ ID NO 37403
atggcagataagccaccctacaacagatcgcaggaggaggaagatgacgatgaggaagaagaagacgagctaggtgaaaggtcctacaagactcagaaagatgctcttcttttcgccatcgaggttagcgagtctatgctgcaaaccccactagagtccgacgacaagaatgccgagaaggactcccctctgcaagctgcactcaagtgtgcctaccaagtcatgcaacaacgcatcatctcaaatcccaaggacctaatgagcatcgtcctttttgggacggacaaatctaccgataaagatggcatcgaggtccagggtcatgaagcttacgcctctcactgttacgtgctcactgacatgaatattccctctgccggtgatgtcaaggctttgagaagtctcgtggaggagggcgaagatccccacggtgtcctagttccgtccaaggagcccaccaatctctacaagtgcttgtttctcaccaaagcgctcctccagtctaaagccgcaaattttgattctcgcaagatatttatcattacagacaacgatgaccctcacaagggaaacaagacggataacaacagctgctatacgcaagctaaagatctctatgacatgggcgcatccattgagctctttgctttggtgcgcgagggtgacaagtttgatttcagcaaattctatgatgatatcctgtatcgggacccgactgcagctgatgtcaatcctgacaaggcgatggcctcccgcacgggcgatgggacaagcttattcaattctttggttgctaacgtcaattcgaagcaaagtgccaagcgagcctacttcagcaacatgccgcttgagattgggcctggacttacaatctcagtcaagggttataatacaatccaaaagcaagcacctaaccgcagctgctacatttggcttgatggggaaagcgcgcagatcgccgtgggtgagaccgcacgcttagccgaggacagtgccaggactgtcgaaagtggcgaggttaagaaggcatacaagtttggcggcgagtatgtatacttttcggcggaagagcagaaggcgatcaagcagtggggaaacaagtgcattcgcatcattggttttaaggatcgatccaaactgaagttctgggcgtcgatcaaaaagtccatcttcatattcccaagcgaggaaggatacgtgggttcgacgcgggtcttcacggcgctgtggcaaaagttgctgaagtctaagaaaatcggtatcgcctggcatctcgcccggaacaacagcaatccgcagcttgtcgcgctcgtcccctcgagatcgtcttctgatgaaaactctgggacgccattcctgccagcagggctttggctcttcccgattccatttgtcgacgatgtgcgcgacggacctgagctagggaaggttatcagaacgacggacggcttgacggacaggatgaacaagatcgttcagcagctgcaactacctggtggtatttacaacccgtcaaagtaccccaacccagcgttacaatggcactacaagattcttcaggtgctggccctcgaagatgaggtacctgaaaagcccgacgatgcgacggtccccaaattccgagcgatccacaaacgatgtggcgggtacattcaggaatggtctcatgaagccgatgaagtgcttggccagctacaggagcagaagaagatcaagagggagctggaaggcggcgaggaagatgacgaaggacggccagccaagaagtcgagagtgaagatgagccatagtagtggcgacggcgtcggtgatgcggagctgaagaagcggttcaacgccgggacgctaggcaaattaacggtggcagagctgaagactgccatgagtagccgtggccttgacaccaaaggactaaagaaagatctcatagacagactggagcagtgggttgaggccaactga

SEQ ID NO: 37403 - protein, 653 aa, Muscodor strobelii
  misc_feature: SGI Peptide ID NO. 572979
  misc_feature (283)..(492): Pfam Id: PF02735 Pfam Desc: Ku70/Ku80 beta-barrel domain
  misc_feature (501)..(594): Pfam Id: PF03730 Pfam Desc: Ku70/Ku80 C-terminal arm
  misc_feature (35)..(277): Pfam Id: PF03731 Pfam Desc: Ku70/Ku80 N-terminal alpha/beta domain
  misc_feature (616)..(650): Pfam Id: PF02037 Pfam Desc: SAP domain
  misc_feature (1)..(650): NCBI GI: 256720729 Blast Desc: NECHADRAFT_85723 [Nectria haematococca mpVI 77-13-4]
  misc_feature (1)..(653): NCBI GI: 46121879 Blast Desc: FG05317.1 [Gibberella zeae PH-1]
  misc_feature (7)..(653): NCBI GI: 161789038 Blast Desc: FG05317.1 [Gibberella zeae PH-1]
  misc_feature (7)..(653): NCBI GI: 111120025 Blast Desc: ATP-dependent DNA helicase II, 70 kDa subunit [Sordaria macrospora]
  misc_feature (29)..(653): NCBI GI: 164423551 Blast Desc: NCU08290 [Neurospora crassa OR74A] gi|157070143|gb|EAA33267.2| conserved [Neurospora crassa OR74A]
  misc_feature (7)..(653): NCBI GI: 46401618 Blast Desc: MUS51 [Neurospora crassa]
  misc_feature (27)..(653): NCBI GI: 126632270 Blast Desc: ku70 protein [Claviceps purpurea]
  misc_feature (29)..(653): NCBI GI: 281311975 Blast Desc: Ku70 protein [Colletotrichum higginsianum]
  misc_feature (29)..(651): NCBI GI: 171690386 Blast Desc: protein product [Podospora anserina] gi|170945141|emb|CAP71252.1| protein product [Podospora anserina]
  misc_feature (27)..(653): NCBI GI: 39951739 Blast Desc: MGG_01512 [Magnaporthe grisea 70-15] gi|145020643|gb|EDK04772.1| MGG_01512 [Magnaporthe grisea 70-15] gi|254749400|dbj|BAH86596.1| Ku70 protein [Magnaporthe grisea]
MADKPPYNRSQEEEDDDEEEEDELGERSYKTQKDALLFAIEVSESMLQTPLESDDKNAEKDSPLQAALKCAYQVMQQRIISNPKDLMSIVLFGTDKSTDKDGIEVQGHEAYASHCYVLTDMNIPSAGDVKALRSLVEEGEDPHGVLVPSKEPTNLYKCLFLTKALLQSKAANFDSRKIFIITDNDDPHKGNKTDNNSCYTQAKDLYDMGASIELFALVREGDKFDFSKFYDDILYRDPTAADVNPDKAMASRTGDGTSLFNSLVANVNSKQSAKRAYFSNMPLEIGPGLTISVKGYNTIQKQAPNRSCYIWLDGESAQIAVGETARLAEDSARTVESGEVKKAYKFGGEYVYFSAEEQKAIKQWGNKCIRIIGFKDRSKLKFWASIKKSIFIFPSEEGYVGSTRVFTALWQKLLKSKKIGIAWHLARNNSNPQLVALVPSRSSSDENSGTPFLPAGLWLFPIPFVDDVRDGPELGKVIRTTDGLTDRMNKIVQQLQLPGGIYNPSKYPNPALQWHYKILQVLALEDEVPEKPDDATVPKFRAIHKRCGGYIQEWSHEADEVLGQLQEQKKIKRELEGGEEDDEGRPAKKSRVKMSHSSGDGVGDAELKKRFNAGTLGKLTVAELKTAMSSRGLDTKGLKKDLIDRLEQWVEAN

SEQ ID NO: 37404 - DNA, 2762 bp, Muscodor strobelii
  misc_feature: SGI EST ID NO. CUFF.89476.0
  misc_feature: Variant of the nucleotide sequence at SEQ ID NO 37402
gggtagcaaccgacgggagctgttgcctgcatgccactgccttgagcagcccccaccaaagtcacctgagcacgcgcctcaacaccagagagcacttattgctgtagttgtggacgaacgcgcctagaatcgtgcagcgcgactgcctgatccaatgcatctatccctttggtcttcatgaacttttaataggtgcatgcagacaaagttattgtacttatgattgcctctctctcaacccccccgattctgatcaacaataactgcaacagaagagaccgcatctcaactcttcattaattctccgttacggcagaatcgacatcatcttgtcatatctacagccatggcagataagccaccctacaacagatcgcaggaggaggaagatgacgatgaggaagaagaagacgagctaggtgaaaggtcctacaagactcagaaagatgctcttcttttcgccatcgaggttagcgagtctatgctgcaaaccccactagagtccgacgacaagaatgccgagaaggactcccctctgcaagctgcactcaagtgtgcctaccaagtcatgcaacaacgcatcatctcaaatcccaaggacctaatgagcatcgtcctttttgggacggacaaatctaccgataaagatggcatcgaggtccagggtcatgaagcttacgcctctcactgttacgtgctcactgacatgaatattccctctgccggtgatgtcaaggctttgagaagtctcgtggaggagggcgaagatccccacggtgtcctagttccgtccaaggagcccaccaatctctacaagtgcttgtttctcaccaaagcgctcctccagtctaaagccgcaaattttgattctcgcaagatatttatcattacagacaacgatgaccctcacaagggaaacaagacggataacaacagctgctatacgcaagctaaagatctctatgacatgggcgcatccattgagctctttgctttggtgcgcgagggtgacaagtttgatttcagcaaattctatgatgatatcctgtatcgggacccgactgcagctgatgtcaatcctgacaaggcgatggcctcccgcacgggcgatgggacaagcttattcaattctttggttgctaacgtcaattcgaagcaaagtgccaagcgagcctacttcagcaacatgccgcttgagattgggcctggacttacaatctcagtcaagggttataatacaatccaaaagcaagcacctaaccgcagctgctacatttggcttgatggggaaagcgcgcagatcgccgtgggtgagaccgcacgcttagccgaggacagtgccaggactgtcgaaagtggcgaggttaagaaggcatacaagtttggcggcgagtatgtatacttttcggcggaagagcagaaggcgatcaagcagtggggaaacaagtgcattcgcatcattggttttaaggatcgatccaaactgaagttctgggcgtcgatcaaaaagtccatcttcatattcccaagcgaggaaggatacgtgggttcgacgcgggtcttcacggcgctgtggcaaaagttgctgaagtctaagaaaatcggtatcgcctggcatctcgcccggaacaacagcaatccgcagcttgtcgcgctcgtcccctcgagatcgtcttctgatgaaaactctgggacgccattcctgccagcagggctttggctcttcccgattccatttgtcgacgatgtgcgcgacggacctgagctagggaaggttatcagaacgacggacggcttgacggacaggatgaacaagatcgttcagcagctgcaactacctggtggtatttacaacccgtcaaagtaccccaacccagcgttacaatggcactacaagattcttcaggtgctggccctcgaagatgaggtacctgaaaagcccgacgatgcgacggtccccaaattccgagcgatccacaaacgatgtggcgggtacattcaggaatggtctcatgaagccgatgaagtgcttggccagctacaggagcagaagaagatcaagagggagctggaaggcggcgaggaagatgacgaaggacggccagccaagaagtcgagagtgaagatgagccatagtagtggcgacggcgtcggtgatgcggagctgaagaagcggttcaacgccgggacgctaggcaaattaacggtggcagagctgaagactgccatgagtagccgtggccttgacaccaaaggactaaagaaagatctcatagacagactggagcagtgggttgaggccaactgaaagcaagtgtataagtacaatgtttcacggattgtcatgtgtggtgggaggcgtttgaggttaattggcttgtacatataacggcacggttcgtcgtggacggttagaggcactgcagcactgcgacttgggtgtaaaatgcttatggtctcgtaagagaggagacattgcagatgaggggccgttgcctcttccgagactcaaagatcataagagatacatgtatctagctcgaatatcagggggctatgaggcctatacagtgattgtaggggttgattttgcagagaagcaatgtgctattcattgacctcgaaaaaatccatagtgtcctcatactcgaatctctggacaaatgagacccgatatccttcattatttcaatgagttgtatctctcttaatgaaagcaaaaactggctctttaaacattattgaggtaccaagaggtaaat

SEQ ID NO: 37405 - DNA, 1269 bp, Muscodor strobelii
  misc_feature: SGI cDNA ID NO. 572980
  misc_feature: Reduced expression when VOC is produced
  misc_feature: Encodes the peptide sequence at SEQ ID NO 37406
atggcaacccgccattccgttgcgcaattgtcgcgccgagttgtcgcttgctcgccagcctcttcctcttgggctccaaaagccaattcaagggccacctccctccagactcgatggtttgcgacgcccgcgccgcccgttacccagaatgccgcggggtccaaggggccaactgccatggtctttctcaatatgggggggccttccaccactgacgaagttggggattttctcagtcggctcttcgcagatgccgatctcatcccgctcggccggctgcaaaactacatcggacccctcattgcgagcaggaggacgtccaagattcaaaagcagtatgcagagatcgggggcggatcccccattcgcaagtggtcagagtaccagaacgccgagatgtgcaagatcctcgaccagatctcccccgagacggctccccacaagccctacgtcgccttccgatacgcggaccccttgaccgaggagatgtacaacaagctactggacgatggcttcggcaacgggaaaggcggccgggccgtcgcattcacgcagtatccacagtactcctgctcgaccacgggaagcagcttgaacgagctctggaagtggcggcagcggctagagggcaaggctagctccggtgcaatccagtggagtgtcattgaccgctggcccgtccacccgggtctcgtagaggcctttgcttccaatatcgagaagactttgtccgagtaccccgaggagcggagagataaagcggtgctcctcttctccgcccacagtctacccatgactgttgtcaaccgaggcgatccatatcctgcagaagttgctgctactgtatatgccataatgcaacgtttgaacttctctaacccttacagactatgctggcaatcacaagtcggccctcagccgtggctaggtccccagactcaatcctctgtagaggaatacattgcaaagggtcaaaaggatttagtcctcattcccgtcgccttcacatctgatcatatcgagaccctgttcgaactggataaagaagtcattggagaatcgggccatgcggacactgtcaagcgtgttgagagtctgaatggaaatccgatctttattgatgctctcgccagcctcgctaagagtcacctggacggcggcgtggcctgttcctaccagatgggattaaggtgtcccggatgcaaaagcgagcgctgtgccgaatcaaagaaattcttcgctggtgctgaaaatgcattcgctgtgtaa

SEQ ID NO: 37406 - protein, 422 aa, Muscodor strobelii
  misc_feature: SGI Peptide ID NO. 572980
  misc_feature (57)..(384): Pfam Id: PF00762 Pfam Desc: Ferrochelatase
  misc_feature (58)..(384): Pfam Id: PF00762 Pfam Desc: Ferrochelatase
  misc_feature (36)..(419): NCBI GI: 171690388 Blast Desc: protein product [Podospora anserina] gi|170945142|emb|CAP71253.1| protein product [Podospora anserina]
  misc_feature (1)..(414): NCBI GI: 261359731 Blast Desc: ferrochelatase [Verticillium albo-atrum VaMs.102]
  misc_feature (32)..(421): NCBI GI: 39951741 Blast Desc: ferrochelatase precursor [Magnaporthe grisea 70-15] gi|145020642|gb|EDK04771.1| ferrochelatase precursor [Magnaporthe grisea 70-15]
  misc_feature (1)..(417): NCBI GI: 85108105 Blast Desc: ferrochelatase, mitochondrial precursor [Neurospora crassa OR74A] gi|28924112|gb|EAA33268.1| ferrochelatase, mitochondrial precursor [Neurospora crassa OR74A]
  misc_feature (1)..(414): NCBI GI: 256720930 Blast Desc: [Nectria haematococca mpVI 77-13-4]
  misc_feature (1)..(421): NCBI GI: 46121877 Blast Desc: FG05316.1 [Gibberella zeae PH-1]
  misc_feature (30)..(414): NCBI GI: 116196228 Blast Desc: conserved [Chaetomium globosum CBS 148.51] gi|88180625|gb|EAQ88093.1| conserved [Chaetomium globosum CBS 148.51]
  misc_feature (1)..(421): NCBI GI: 156061147 Blast Desc: SS1G_02716 [Sclerotinia sclerotiorum 1980] gi|154700120|gb|EDN99858.1| SS1G_02716 [Sclerotinia sclerotiorum 1980]
  misc_feature (38)..(422): NCBI GI: 67901530 Blast Desc: AN7752.2 [Aspergillus nidulans FGSC A4] gi|40742350|gb|EAA61540.1| AN7752.2 [Aspergillus nidulans FGSC A4] gi|259484103|tpe|CBF80037.1| TPA: mitochondrial AFUA_5G07750)
  misc_feature (36)..(415): NCBI GI: 70998274 Blast Desc: mitochondrial ferrochelatase [Aspergillus fumigatus Af293] gi|66851497|gb|EAL91823.1| mitochondrial ferrochelatase, [Aspergillus fumigatus Af293] gi|159126403|gb|EDP51519.1| A1163]
  misc_feature (49)..(396): SWISSPROT Homolog: EC 4.99.1.1 Ferrochelatase
  misc_feature: Useful for introducing or modulating the production of volatile compounds
MATRHSVAQLSRRVVACSPASSSWAPKANSRATSLQTRWFATPAPPVTQNAAGSKGPTAMVFLNMGGPSTTDEVGDFLSRLFADADLIPLGRLQNYIGPLIASRRTSKIQKQYAEIGGGSPIRKWSEYQNAEMCKILDQISPETAPHKPYVAFRYADPLTEEMYNKLLDDGFGNGKGGRAVAFTQYPQYSCSTTGSSLNELWKWRQRLEGKASSGAIQWSVIDRWPVHPGLVEAFASNIEKTLSEYPEERRDKAVLLFSAHSLPMTVVNRGDPYPAEVAATVYAIMQRLNFSNPYRLCWQSQVGPQPWLGPQTQSSVEEYIAKGQKDLVLIPVAFTSDHIETLFELDKEVIGESGHADTVKRVESLNGNPIFIDALASLAKSHLDGGVACSYQMGLRCPGCKSERCAESKKFFAGAENAFAV

SEQ ID NO: 37407 - DNA, 13295 bp, Muscodor strobelii
  misc_feature: SGI EST ID NO. CUFF.89902.0
  misc_feature: Variant of the nucleotide sequence at SEQ ID NO 37405
agatagaatagcttagttcgatgtgctaattgacgctatgccattgggtgataatggggcaaatggaaaggtcgggtttccgattgctggagatgccgagcatgctgtcatcgcccgcgaatctcgtcgacttttgcgaagacggaatcatgcctacctgtgtcaagtcaggccttattgtctctcaattgcattcgatattgctcttaccgcctaggtcttcacatagcgccgtccttaacgacatcatcatttgtgatccgcattttctcttgcagaattagccttgtggtttttgtagtttgcagattgcgggccggggatagtggaaagcatggcaacccgccattccgttgcgcaattgtcgcgccgagttgtcgcttgctcgccagcctcttcctcttgggctccaaaagccaattcaagggccacctccctccagactcgatggtttgcgacgcccgcgccgcccgttacccagaatgccgcggggtccaaggggccaactgccatggtctttctcaatatgggggggccttccaccactgacgaagttggggattttctcagtcggctcttcgcagatgccgatctcatcccgctcggccggctgcaaaactacatcggacccctcattgcgagcaggaggacgtccaagattcaaaagcagtatgcagagatcgggggcggatcccccattcgcaagtggtcagagtaccagaacgccgagatgtgcaagatcctcgaccagatctcccccgagacggctccccacaagccctacgtcgccttccgatacgcggaccccttgaccgaggagatgtacaacaagctactggacgatggcttcggcaacgggaaaggcggccgggccgtcgcattcacgcagtatccacagtactcctgctcgaccacgggaagcagcttgaacgagctctggaagtggcggcagcggctagagggcaaggctagctccggtgcaatccagtggagtgtcattgaccgctggcccgtccacccgggtctcgtagaggcctttgcttccaatatcgagaagactttgtccgagtaccccgaggagcggagagataaagcggtgctcctcttctccgcccacagtctacccatgactgttgtcaaccgaggcgatccatatcctgcagaagttgctgctactgtatatgccataatgcaacgtttgaacttctctaacccttacagactatgctggcaatcacaagtcggccctcagccgtggctaggtccccagactcaatcctctgtagaggaatacattgcaaagggtcaaaaggatttagtcctcattcccgtcgccttcacatctgatcatatcgagaccctgttcgaactggataaagaagtcattggagaatcgggccatgcggacactgtcaagcgtgttgagagtctgaatggaaatccgatctttattgatgctctcgccagcctcgctaagagtcacctggacggcggcgtggcctgttcctaccagatgggattaaggtgtcccggatgcaaaagcgagcgctgtgccgaatcaaagaaattcttcgctggtgctgaaaatgcattcgctgtgtaaagtgagacctcacttctttgcatctcgatattaccacaattacggcctacgcgctgcacttccaccagcgtgatttggtgcgtgctctcgtgcgctaggcatcatgaatgatgtgtgtatataggagagttccgggtcatgggcttgcatcattaggcaattagatcgctgcgaccagttggttgtccctgtataatactattaacctccctccagcatattatttgggttgcaggacggatttcagaagcttggccaacaaaacgctaaagggcgggtttcaaacaatcaccgattgccgaacacaacatgcagcttatcaagtcattaagcatattccaaagtcccatcatgcatgacatcgtcatcgaaaggtcttaaagccactattgtttccgatcatgatcaagtaacattttgagttttcgaccgaattgcggacagacgaaatgtttcacgtggtgattaaccgtaatcaaccatcttcgcaagtcgctgaaaagcgcactggtaagtttatgctgaaacaggcataagcatgtgctacagcttgtcaaggtaaatgtaattcatgtgacgagtctcactccctcccgagtaataatcagacacgcgttccatgctggcctaatcagtcgagccagtctcatcgtctccatcccgagattcacgatgcagtgattatcaatcagccacgagtacgtgtagcttaaaccagacgaatggcaccagcagggatcgccctggactaatccgggctggtgggagtgatgacaagcacgatacggccttgacgtacgacccactcgatctccgttccataccatccgtgctccaagaagatggagattcaagataacccgctttcccatagtcgcatttctatcgtcgccctatccttctccatggccttgctccttgcgccgtgctctgcctctctcccttcccttcaccctctatatccctttccccttgggtgatcttgtaacagagcaatattttctgttttcgcactgcgtacggcaccacgccgaataccaaagtccggactttctacatatagcaagacgatcagacagcatcatgcgcaggtcgctttccgtcagcaccattacacgtatcgaccgaggataggaaactaccctcgacttcgatttcgacattagatttctctgccgtctcgttccatcattctcatcgtcttgagacgccgctagccgtacaccatcttagtcgaaacgcccagaagttcttctctattctctatacaccgaaaagatgaaaaccagccaggacgagcgcgcgccaattcatttggttgacgctgaaaacaacgaagagactggccgaaacgatcctacggaaacgactgctctatttggcgcaaacactgagcgagatggacataaccgaaacaatgttaccaataagcaaagctcggaggatgataacgagtttgcgagtttgccgtggtggagaagaccgaatgtgtactggctagtcgggccttattttctatttactcttgcgtttggaggcattatcgtgcctagaattgacctaattgtaacgcttgtctgccgtcgatattacgctgagcaacagctgctcgaccccaacgctgtattcagtcccgtcaccatcggcgggaacaatccgcaatgcaactcggcccctgttcagaaaagggttgcaacattcacactagttctgagcgctcttgtcggtggcctcagtgcctttaccgctccgaagctaggggctttgagtgatcgatacggccgaaaacgattattagtcgttgcatcgtgcggaggcatactgaatgagatcatcaccatcttcacagcgaaatacccggacatgattgactaccgctttttgatacttggaggtttttttgatggcattacgggatctttcacggctggctctgtcctaggcaattcttacgccagcgattgcacgccgccatcgaagcgcggagtggcaatcgggtacctgcatgcgtgtcttttcgctggtcttgcatttgggccttacatcgctggtaaatttgttgaactgacaggctctcttcttacgatattttatatcgctctgggatgccacatcactgttatacttttcttctggtttttcttgcccgaatcattatcgaaaaaacggcaaatgttagcgcgcgacaagtacgaagctcagaaagaagcaacagaagcggctctttctccatccatcacgagatatatgggctcgaaactaccaatctggttgatgagtgataaagtcgcagcttggatgccaattcttctcggtgccaacccgttcgcgccgctcaagatgttcgtccccagcggacagcaaaactcacgtttacggcgaaatatgctactccttgccttcattgacaccgtcctcatgagcggcgccatgggtgccggaactgtcctaatcttgtacggcaaattcatgttcaactggggcaccttggaggcttctaggttcatatcaattgtcagcttgtttcgcgtccttgctctcctaggcgtatttcctttggtcaactacttctttcgtattcgtcctatgcggcgaagacaggagcaaaatggcaatctacacatgatggagacccacactggtgccgatgacctcgatgtttggactgttcggctcgcgataatgagtgatttcgtgggtgtcatgggctacgtattcgttcgaactgaggagctgtttgttctgtctggtgtcttcacagcatttggcggtttggcaaatgcgactatccagagctcaatgacgaaacaaatcccggttgaacgcactggtgccatgttgggcgcaatgggtcttttacacgcgcttgctcgtgtcttcgcgcctattgtgtttgatggtatatatgctggaactattgaggtcttccctcagacgtttgtcgttgtacttgcgtctttgttcggactttctgtcattgctagcatgttcatccggcctcgtcttgtgctccaggaagaaggatactcttcagtacccgtgcgcgaacccggcacgcaagaggatttagataatctcgttgctgaagaaggggtgtcagagactcttccaaggatttgatatcaacttagctgagacggcatgtctctgaccaatgaactgactatatgtacatatgttgcacctttcctttctcattcagattatgattcccgacattaggcatatagacctagaaacatctggttcacaacttggcgttcgggctgcattgagggttccggtcagcatcagacggggttcacaagacattcttatagttctatgcggaggcgacagaaccggcagtgtcgtagtcgaataaatttcaatgcgaatgccatccactgctttttcttcgaaccgcatcgtcaacagaaatgtgtcccgagaataatgagtgaggcaagccaattttgcagcatttctatgtcatacgtactacttcaactattaggttctacgaccaatgcgctattcaattacccactcgcctgtattatgatctacccagatattcaacgagattcttaattttcctgctcagccagtgaccaccatttccccttctcctctctcctgacgagtttccgggaagaactaggtgataaccaagcaaccatactgatgtttgcaccgaaatttctttgcagttggtttctaatccgcaaagaggataacccaggtcaggctggtattgttaattttcaaagtctatctcgctatcattgccacttttgttgcctgtgcaaaggtctaccgaaggagcaagtctaaagtatgctatctaactcccattttattctattttaccaatgatccaaagtcttattcttttcatgattccgcatctacttttgctcgtgaaccaaacgaccctggacccagacctttttggtgtttctgtcatcgccattgaagacccacttatgaatcttctcctcccaagtctcccagccaaatatatcgacgttggtcttgagagtgaagtcattctcgtccaagtcgtcagcaacgatgccaaggtcgatgagctgcgcatcccactgcataccaacttctaacgctccaatcttgtctgcaagccctactacctgcgctccactttttgtcgccaagaacagaacttcttcgaccgttaatctggcgtgctcgtgcttctcttcggtgccgccgggcataacaagatgatttgaaaccatctttgcttgccttgctgcctcaagaatgcttgggctgtatcctccgcttacatccgagccaaggccaacttgaatgcctttgtccaacatccagcgtacacgagctacgccacttgtcaaggcggagttactacaagggcaatgtgatactttagcaccacgctcggctatgagatttgcctcttcatcagtcaaatggacggcgtgtgccaagatcatcttatcgcacaaaagtccgtgagtgtcatacacatcagcgtagctcttgctcccagggaaaagctccttgacgagattgatctcgttgacattttcgtcgatatgtgtctggactgggagatttgtctctttttggagatccgatagttgactcaacatctctccgctacaagagggggcaaatcgtggcgtgatgataggactcacaagctcgaagttgctatcgatgctacgtatgtggtcaattgtagcgcgtgtagcgatcaccgcttgctctggtgtctcgtctcggtagtagtctgtgccaagtctgtccatgcacacacgaccgatgaatgcacgctggcccatggagagacataggtcggccaagagattggtagcatctacgtcaatagttgcatagtaagctgccgttgttgttccatgcgacagggtccgcctgatacactgtgtgtagaccctacgagcttttggaagggaagccagggatgcttccatgggaaaggtataggtgctcagccagtcaagcaatgtcgacttgccaaaaatgcctgcgttcggatattgagatgcatggatatgtgtgtctggagttttatagtcaaaacaaaagaaaatgtcttttcttgggctaaagcactcaccaataaaccccgggaaataaaactgtcgtgaatctctagcgacagttatggcaacatcgtcaagactccagcccaacttggcatagaccgtctcgacggccttttgctggttacagtttggctcaatggccacgatcttccccgagatatccacgcatacagctgcgttatgagtgtacacaagctcattgagctgcttggagtagattatggtaccaaaaaacacttggttctttggcttgctggagctcgccatgttttgactcctccgctccacccgcttgattgccatcgttgttcttactacttagcaagaagcaagttatctagagatagcctgaagagacttaaaatcgaggcaagtgcctcaacaattatcaggagatttctgactgtcagggactgagctgctgctgtgtcatagaggtgtgaaatagaaccgacaacagagcgcttgacagtgacttattttcggcctgagaggagcagtgagatctccttccctcgtttggtctagtattgagttctctaagccccagagggtcctccacattggacaagctacctagcttggattgattcaacgtaccgtttcacgaataatggtgcgacagcaagaactcaagagaaaaagagaaagtgttcctgcggctgctagggccggtatgatgcgccaggtggttattatgagaataggaacaagggacgttgtgcgacccgacggggaatgcctactcggctcagtattcctacctagtcggccggcctgcggcggcgcccggcaagaggttggggcatggcggaacgccgaggacgccgagatcatgtatctcgtaatctattgtgtggtcagtgacgagcttcgtgaacgctttgctgatgttctttctctatgctttctttctttgacttcactagaagttaggctcggatgtcagtccatgctgtgtgagcgttacaagactggtgacgggaaattactctgtggtacgtgtagcatgtgctcccttttacgcagcactgcaggaaatcaactgcttcctcttttcaagtatgtacttagtaagccaatgtcattcattgtgtacctgttgaaagcctctcgctacagataacatccaacaattccatagagaaaaagaaaaactcatttatgagggcatgtcttgttttcatgtcaaacgggctgaatgaaaatatttggttataggtacctctaagcacctattcaaagtctcaacctagcggaatagctgaacctggaggggcctggctaagatgtgggctccaagttcgggactagttcaaatcggatccacatatttccgatccattcaacatcgcatcacgagaccatcattcatcatggccacgacgacctcatctacgtcaatggttggggatgtgcagcgttgagttcattaatggtgtcataataccttgtgaccaaatcaatacctcctaactcaagtggtacagacacgttttgaccattggcaccgaaccagcagcggaactcagcatgccacttcgcatagccagtctggggagctcatttgctgccggccccaacataccgccaataattgacgagcctgccggccgctctggagttaattatgccgctcttcttacggagcgtgtcgccggaacgctagaggacttgagtgtttgcggtgctactctgctcaatctactagaccagcctcagtatcaaggcggcagacgttttgctccgcaggtggacgaccttccgtcagatacggaggtcgtcctagtgcttggcggtggcaatgatatgggctacattggaggactttttgaagataccttaagccgaagctggttcggcagcgtcttccaatatctatggggaacagatcctgaacgcgaggacaaggcacagttccagctcgatgtcgatgctattgccgaacgctactcaaaagtcctcgacgccatacacgataaggcgccgagcgcttacgtgctggttatcgagtaccaagccatcctcggcccagacacacgcccgttagaggacgtcgtctttgatgccgatcgcatcgcacatcacagaaccgtagcggcgcacctattagaggccacacgcatggctgtgcgtgggcgtgaagactggtgtagcacagtcggcgttgcggaagcgagcgaagcacacgccattggatccgaaaatccgtggatcgctggcttcacgtggaagctctttcaccaaggtggtgcgtaccaccctcggtcagaagggatgagagctattgcagatttgatttacgagaagatggtaaaacttggacttgcgaaccacggagccacaatggaccttgaagacggctttgttctgatctaggagcatacgacggtgctcgtcgtatcgaatgcgaggtcgcatcatagttcatgacattgttacgccacaaagttacgctacaccggcgtgcatataaaaaagatctcgcgacttctacttcaaggcttcaataatgcagatcgtattattgcacatcttaaggttgtcgaaggtctccatgtttgctgatatcgtgtgccgacaaagtccagacttgtctagaggatacccccaaagggaaacaaaagcgtcatatctcttgtttctatgcaccatacggctaatgccatggcaagcggaatcggtacacacggatgtcgagtggcagaagcgaggttatcaggacatgtaactaatcatcctaccagggcgcgtcctgctaccccagacccgggcggccgccattgaatttatcatgcatctatccgtgctacaatcgtcccaaatcatgagcttttttggtttggctggactgtgaccgagtgctgcagtgtcagcccaataaggagttactagtcaccaaagcccgatgtccagagccgtttatgtttgcgaaatcgtctgccaagactgataaattggtagtttgatgctattcttccacgacaaactgtcttagcgagtctgctacactcttcattacaaattgcaatattctccgtatggctcctcatattcaatgtccacttgtacacgcaattcaacgtcagaaagacgagcaatctcgacgtaggtgatattagtaacgtcatgttacatcatgttacaccccgacatcccgttatctcattacagcgccaaccgagaggtctcattggagaaccatgagaaccatgcaagaaggcactctttgccaagcacaacttctctatgactatcacctgtttttaccatgtgcatgtgcaatatcaagcatcttttccaggctctgatgcatctagagggtggataaatcatgaattggaattatttgacaattcttaatcctaggcatccctgcggtgccgttctttttgtgcgttgtccgagtatactcgtctccgttgttcttggcatctgcataactcaacctcatccgcgccgctgacggtcgccgcatatttgaatgtcacggcggtcgagtagaaagcggcaggatgccccgaccctcactctgggcaatacacatcaaacagtggcgcgatgatcccagccttttttctcctatgcgaatagattcccaagacctgcgacagccattgcttccttcctcctaaggcctgcgcccgcctcatctattcaccacgtggggggcttttcgtttgcggcgccgtggcaatgacctgcatgttggacatcctagtactcgtggatctgaagaggataatagataatgcgtggagacgcacaagtcgtatctacacttttttgtaaacttttgttgttggttttgcatgtgcgcatatgcgagagtgagcaaatgagtgggtaagtcgtcggttgtgtgaggtcgtttaccgactgcgacactgttatcccagacggagatctcaacggcacatcgagcggcaaccgtacctgggaaacccagatagcaaaaaagggccaggtaaggtccctgtccagtcgaaatgattctgagcttcactacagtaacatcattgagcgttgcattccgatcagagtggtacccggcaagccggagcaagcagcgaccccaaagatcccagatcagagcagcggtcgatgctcatctgccatgacgttcagttcatgataatacaaaacaagcatacgctgcattgctcagtgtttcctgccggtggcaaactcagaagttgcagtgtgtgtgtcacacccacatatcaagtatcaccggctgggcacaatctggtagcgaacggcacttcgtgctgcatcggcacagatgcactcgttaggcaggtacacgatggacttggcgtatgctgtgtagcttcttgatatgactatctgcagcatgcgtttctttagtctatctaactatctattccatcatgaagaatgcaagacatgtttgtaaccggtgacgattggatacatgcagcatgtctgtccatttcaaacctagagagaagcacgtacatgcagaatgatgttgcaaccactaagcgagcatttgacgtgatctgagaacgttgcaaatcatgatctttgactaaggcaaagtcagattgctcctcgatagacgagaaacttgcaactttaagccctttgaccctatcagagactagtagcgtacgtgtactccaaacacccaatatcaagtgcccaatgggatttctcggccaaaaacagccaactaccatccaaagtcctaccgtagtagtgcatggtggttatactatatctcgtacgcacaaatggtgcatccagcccctgctatagttcgaacgctctgcagtgccccgcaggtatcgtgaaattaacacggacgtgagtcaaacgtccaaaaggaatggttaaaatcggtatgagctgaatgggcgccgtgctggtagggagagtttcgtaatcattagtattgcgatttccatcacgtaaatcgatatattgatcgcccaacggagggcatcggtacggcctccggatcacactatacgttgcttgatcaggcagttgtagagaaggcgcgagattagcagaaggtgatctaagacatctaggcatgtttgtcgcattacttacagataatggcatcttccgtatccatctcccaatcttgcgtggagagaatggcgaccaacgcatgtgggttggcgcggcgttaacaacatgcgccgacatcttccctcaagagcacttgcagaggccgtcgtccgcatgcgcagcgggtgttcaacacatggatgcactggtgtggcgagaactgcacttttgggattatcggagcaggttctcaggacgctgtgctggctagtccctccttgctatcatatggtgatcttcatatcataagagtgaagcaggaactacaaaacatgatcctgtttagctgccatcatgctcttacaacccagatattgacactatatgcctgtcacatggaggtgggggatgacgcccaaatcttttgcttacattttcttctcaacaagatgaattctatcacgtaagtaagagatggtcacggggatagtctcgagatcatcttgagatcaggccaaaaagggcattgctgtacccacaagacatccgaacgcattatgtacgccacatatctacctcccctatagagacagcgcagactacttagatgagaatggaaaggactgcacacggtcccagaaggatcaacaatggggtcgggggcgtgaatgcaaaatgtatggctatcgcttgaaatgtgagttcgtgaaattaactgaaacaattgggaagggaatcgatgctctcggtgcttgtctaccctcggctccgtcttcaccttaggcggtgatgggtttgataagataggcgacgaggatagcaatgcctgcttgcctacataggtggcttcgaaggagtggactgaaggggtcgccgtttcgaatatctcatttaaagttaaaagtttaaaaatataagcttacttcctagggcgttattatggaacgggcagtgactttgattggcctcatgttaaagatgtgaaatacaaccctgtcgcgccctgtatccctacagagatccctcggagtcgcctatagactaatctcgaaatctcaaaatccttgattagaacgtggcctggctcgcctggcgacacgagtgcttgagacacggacggagaagccagtatgaggtcgcgagctaggacgcatagaagcgggtgctgtgttacattgcacgaccgaagacagactgcagattgagcatctcagtaccccagagaatacttgcaccctctcgtcaggaaatctaccaagccattcctggcaggaaagtcttggaccatcttgatccaatttctagcttcctaatagtctcgtcacgtcccgcatcagatagataacaccgtcacttcatcaagatgctgtggcaagcttggacactcgcattagagtgcccctaccataatgtatgcgtccagtacgagacattcccagataggcagttcgcatctgttcatcataacgccaagatcggtgccaatgttacgcactcgctgggtgcttcctcatcgttacggccctctattgaaagcaagcaagcaaggg

SEQ ID NO: 37408 - DNA, 1842 bp, Muscodor strobelii
  misc_feature: SGI cDNA ID NO. 572981
  misc_feature: Encodes the peptide sequence at SEQ ID NO 37409
atgaaaaccagccaggacgagcgcgcgccaattcatttggttgacgctgaaaacaacgaagagactggccgaaacgatcctacggaaacgactgctctatttggcgcaaacactgagcgagatggacataaccgaaacaatgttaccaataagcaaagctcggaggatgataacgagtttgcgagtttgccgtggtggagaagaccgaatgtgtactggctagtcgggccttattttctatttactcttgcgtttggaggcattatcgtgcctagaattgacctaattgtaacgcttgtctgccgtcgatattacgctgagcaacagctgctcgaccccaacgctgtattcagtcccgtcaccatcggcgggaacaatccgcaatgcaactcggcccctgttcagaaaagggttgcaacattcacactagttctgagcgctcttgtcggtggcctcagtgcctttaccgctccgaagctaggggctttgagtgatcgatacggccgaaaacgattattagtcgttgcatcgtgcggaggcatactgaatgagatcatcaccatcttcacagcgaaatacccggacatgattgactaccgctttttgatacttggaggtttttttgatggcattacgggatctttcacggctggctctgtcctaggcaattcttacgccagcgattgcacgccgccatcgaagcgcggagtggcaatcgggtacctgcatgcgtgtcttttcgctggtcttgcatttgggccttacatcgctggtaaatttgttgaactgacaggctctcttcttacgatattttatatcgctctgggatgccacatcactgttatacttttcttctggtttttcttgcccgaatcattatcgaaaaaacggcaaatgttagcgcgcgacaagtacgaagctcagaaagaagcaacagaagcggctctttctccatccatcacgagatatatgggctcgaaactaccaatctggttgatgagtgataaagtcgcagcttggatgccaattcttctcggtgccaacccgttcgcgccgctcaagatgttcgtccccagcggacagcaaaactcacgtttacggcgaaatatgctactccttgccttcattgacaccgtcctcatgagcggcgccatgggtgccggaactgtcctaatcttgtacggcaaattcatgttcaactggggcaccttggaggcttctaggttcatatcaattgtcagcttgtttcgcgtccttgctctcctaggcgtatttcctttggtcaactacttctttcgtattcgtcctatgcggcgaagacaggagcaaaatggcaatctacacatgatggagacccacactggtgccgatgacctcgatgtttggactgttcggctcgcgataatgagtgatttcgtgggtgtcatgggctacgtattcgttcgaactgaggagctgtttgttctgtctggtgtcttcacagcatttggcggtttggcaaatgcgactatccagagctcaatgacgaaacaaatcccggttgaacgcactggtgccatgttgggcgcaatgggtcttttacacgcgcttgctcgtgtcttcgcgcctattgtgtttgatggtatatatgctggaactattgaggtcttccctcagacgtttgtcgttgtacttgcgtctttgttcggactttctgtcattgctagcatgttcatccggcctcgtcttgtgctccaggaagaaggatactcttcagtacccgtgcgcgaacccggcacgcaagaggatttagataatctcgttgctgaagaaggggtgtcagagactcttccaaggatttga

SEQ ID NO: 37409 - protein, 613 aa, Muscodor strobelii
  misc_feature: SGI Peptide ID NO. 572981
  misc_feature (74)..(536): Pfam Id: PF07690 Pfam Desc: Major Facilitator Superfamily
  misc_feature (145)..(536): Pfam Id: PF07690 Pfam Desc: Major Facilitator Superfamily
  misc_feature (6)..(604): NCBI GI: 164423549 Blast Desc: NCU08292 [Neurospora crassa OR74A] gi|157070142|gb|EAA33269.2| conserved [Neurospora crassa OR74A]
  misc_feature (25)..(574): NCBI GI: 171690390 Blast Desc: protein product [Podospora anserina] gi|170945143|emb|CAP71254.1| protein product [Podospora anserina]
  misc_feature (15)..(581): NCBI GI: 46136581 Blast Desc: FG09806.1 [Gibberella zeae PH-1]
  misc_feature (26)..(612): NCBI GI: 256727552 Blast Desc: NECHADRAFT_66496 [Nectria haematococca mpVI 77-13-4]
  misc_feature (27)..(606): NCBI GI: 145613580 Blast Desc: MGG_01516 [Magnaporthe grisea 70-15] gi|145020639|gb|EDK04768.1| MGG_01516 [Magnaporthe grisea 70-15]
  misc_feature (17)..(581): NCBI GI: 116196222 Blast Desc: CHGG_04709 [Chaetomium globosum CBS 148.51] gi|88180622|gb|EAQ88090.1| CHGG_04709 [Chaetomium globosum CBS 148.51]
  misc_feature (24)..(597): NCBI GI: 261359734 Blast Desc: conserved [Verticillium albo-atrum VaMs.102]
  misc_feature (15)..(604): NCBI GI: 156061145 Blast Desc: SS1G_02715 [Sclerotinia sclerotiorum 1980] gi|154700119|gb|EDN99857.1| SS1G_02715 [Sclerotinia sclerotiorum 1980]
  misc_feature (21)..(581): NCBI GI: 189209532 Blast Desc: conserved [Pyrenophora tritici-repentis Pt-1C-BFP] gi|187977191|gb|EDU43817.1| conserved [Pyrenophora tritici-repentis Pt-1C-BFP]
  misc_feature (44)..(600): NCBI GI: 240109196 Blast Desc: Major Facilitator Superfamily protein [Coccidioides posadasii C735 delta SOWgp]
MKTSQDERAPIHLVDAENNEETGRNDPTETTALFGANTERDGHNRNNVTNKQSSEDDNEFASLPWWRRPNVYWLVGPYFLFTLAFGGIIVPRIDLIVTLVCRRYYAEQQLLDPNAVFSPVTIGGNNPQCNSAPVQKRVATFTLVLSALVGGLSAFTAPKLGALSDRYGRKRLLVVASCGGILNEIITIFTAKYPDMIDYRFLILGGFFDGITGSFTAGSVLGNSYASDCTPPSKRGVAIGYLHACLFAGLAFGPYIAGKFVELTGSLLTIFYIALGCHITVILFFWFFLPESLSKKRQMLARDKYEAQKEATEAALSPSITRYMGSKLPIWLMSDKVAAWMPILLGANPFAPLKMFVPSGQQNSRLRRNMLLLAFIDTVLMSGAMGAGTVLILYGKFMFNWGTLEASRFISIVSLFRVLALLGVFPLVNYFFRIRPMRRRQEQNGNLHMMETHTGADDLDVWTVRLAIMSDFVGVMGYVFVRTEELFVLSGVFTAFGGLANATIQSSMTKQIPVERTGAMLGAMGLLHALARVFAPIVFDGIYAGTIEVFPQTFVVVLASLFGLSVIASMFIRPRLVLQEEGYSSVPVREPGTQEDLDNLVAEEGVSETLPRI

SEQ ID NO: 37410 - DNA, 13295 bp, Muscodor strobelii; identical to SEQ ID NO: 37407
  misc_feature: SGI EST ID NO. CUFF.89902.0
  misc_feature: Variant of the nucleotide sequence at SEQ ID NO 37408

SEQ ID NO: 37411 - DNA, 1416 bp, Muscodor strobelii
  misc_feature: SGI cDNA ID NO. 572982
  misc_feature: Reduced expression when VOC is produced
  misc_feature: Encodes the peptide sequence at SEQ ID NO 37412
atggcgagctccagcaagccaaagaaccaagtgttttttggtaccataatctactccaagcagctcaatgagcttgtgtacactcataacgcagctgtatgcgtggatatctcggggaagatcgtggccattgagccaaactgtaaccagcaaaaggccgtcgagacggtctatgccaagttgggctggagtcttgacgatgttgccataactgtcgctagagattcacgacagttttatttcccggggtttattgacacacatatccatgcatctcaatatccgaacgcaggcatttttggcaagtcgacattgcttgactggctgagcacctatacctttcccatggaagcatccctggcttcccttccaaaagctcgtagggtctacacacagtgtatcaggcggaccctgtcgcatggaacaacaacggcagcttactatgcaactattgacgtagatgctaccaatctcttggccgacctatgtctctccatgggccagcgtgcattcatcggtcgtgtgtgcatggacagacttggcacagactactaccgagacgagacaccagagcaagcggtgatcgctacacgcgctacaattgaccacatacgtagcatcgatagcaacttcgagcttgtgagtcctatcatcacgccacgatttgccccctcttgtagcggagagatgttgagtcaactatcggatctccaaaaagagacaaatctcccagtccagacacatatcgacgaaaatgtcaacgagatcaatctcgtcaaggagcttttccctgggagcaagagctacgctgatgtgtatgacactcacggacttttgtgcgataagatgatcttggcacacgccgtccatttgactgatgaagaggcaaatctcatagccgagcgtggtgctaaagtatcacattgcccttgtagtaactccgccttgacaagtggcgtagctcgtgtacgctggatgttggacaaaggcattcaagttggccttggctcggatgtaagcggaggatacagcccaagcattcttgaggcagcaaggcaagcaaagatggtttcaaatcatcttgttatgcccggcggcaccgaagagaagcacgagcacgccagattaacggtcgaagaagttctgttcttggcgacaaaaagtggagcgcaggtagtagggcttgcagacaagattggagcgttagaagttggtatgcagtgggatgcgcagctcatcgaccttggcatcgttgctgacgacttggacgagaatgacttcactctcaagaccaacgtcgatatatttggctgggagacttgggaggagaagattcataagtgggtcttcaatggcgatgacagaaacaccaaaaaggtctgggtccagggtcgtttggttcacgagcaaaagtag

SEQ ID NO: 37412 - protein, 471 aa, Muscodor strobelii
  misc_feature: SGI Peptide ID NO. 572982
  misc_feature (79)..(414): Pfam Id: PF01979 Pfam Desc: Amidohydrolase family
  misc_feature (3)..(471): NCBI GI: 171683423 Blast Desc: protein product [Podospora anserina] gi|170941671|emb|CAP67325.1| protein product [Podospora anserina]
  misc_feature (8)..(471): NCBI GI: 39944216 Blast Desc: MGG_04119 [Magnaporthe grisea 70-15] gi|145014854|gb|EDJ99422.1| MGG_04119 [Magnaporthe grisea 70-15]
  misc_feature (8)..(470): NCBI GI: 256720732 Blast Desc: NECHADRAFT_50060 [Nectria haematococca mpVI 77-13-4]
  misc_feature (1)..(471): NCBI GI: 46121891 Blast Desc: FG05323.1 [Gibberella zeae PH-1]
  misc_feature (8)..(471): NCBI GI: 116194702 Blast Desc: CHGG_03949 [Chaetomium globosum CBS 148.51] gi|88179862|gb|EAQ87330.1| CHGG_03949 [Chaetomium globosum CBS 148.51]
  misc_feature (8)..(471): NCBI GI: 85107912 Blast Desc: NCU07309 [Neurospora crassa OR74A] gi|28924074|gb|EAA33231.1| NCU07309 [Neurospora crassa OR74A]
  misc_feature (8)..(471): NCBI GI: 154293410 Blast Desc: BC1G_14331 [Botryotinia fuckeliana B05.10] gi|150845312|gb|EDN20505.1| BC1G_14331 [Botryotinia fuckeliana B05.10]
  misc_feature (1)..(471): NCBI GI: 189204988 Blast Desc: guanine deaminase [Pyrenophora tritici-repentis Pt-1C-BFP] gi|187985928|gb|EDU51416.1| guanine deaminase [Pyrenophora tritici-repentis Pt-1C-BFP]
  misc_feature (19)..(470): NCBI GI: 240281399 Blast Desc: chlorohydrolase [Ajellomyces capsulatus H143]
  misc_feature (19)..(470): NCBI GI: 225555178 Blast Desc: chlorohydrolase [Ajellomyces capsulatus G186AR]
  misc_feature (11)..(469): SWISSPROT Homolog: EC 3.5.4.3 Guanine deaminase
  misc_feature: Useful for introducing or modulating the production of volatile compounds
MASSSKPKNQVFFGTIIYSKQLNELVYTHNAAVCVDISGKIVAIEPNCNQQKAVETVYAKLGWSLDDVAITVARDSRQFYFPGFIDTHIHASQYPNAGIFGKSTLLDWLSTYTFPMEASLASLPKARRVYTQCIRRTLSHGTTTAAYYATIDVDATNLLADLCLSMGQRAFIGRVCMDRLGTDYYRDETPEQAVIATRATIDHIRSIDSNFELVSPIITPRFAPSCSGEMLSQLSDLQKETNLPVQTHIDENVNEINLVKELFPGSKSYADVYDTHGLLCDKMILAHAVHLTDEEANLIAERGAKVSHCPCSNSALTSGVARVRWMLDKGIQVGLGSDVSGGYSPSILEAARQAKMVSNHLVMPGGTEEKHEHARLTVEEVLFLATKSGAQVVGLADKIGALEVGMQWDAQLIDLGIVADDLDENDFTLKTNVDIFGWETWEEKIHKWVFNGDDRNTKKVWVQGRLVHEQK

SEQ ID NO: 37413 - DNA, 13799 bp, Muscodor strobelii
  misc_feature: SGI EST ID NO. CUFF.89903.1
  misc_feature: Variant of the nucleotide sequence at SEQ ID NO 37411
cccttgcttgcttgctttcaatagagggccgtaacgatgaggaagcacccagcgagtgcgtaacattggcaccgatcttggcgttatgatgaacagatgcgaactgcctatctgggaatgtctcgtactggacgcatacattatggtaggggcactctaatgcgagtgtccaagcttgccacagcatcttgatgaagtgacggtgttatctatctgatgcgggacgtgacgagactattaggaagctagaaattggatcaagatggtccaagactttcctgccaggaatggcttggtagatttcctgacgagagggtgcaagtattctctggggtactgagatgctcaatctgcagtctgtcttcggtcgtgcaatgtaacacagcacccgcttctatgcgtcctagctcgcgacctcatactggcttctccgtccgtgtctcaagcactcgtgtcgccaggcgagccaggccacgttctaatcaaggattttgagatttcgagattagtctataggcgactccgagggatctctgtagggatacagggcgcgacagggttgtatttcacatctttaacatgaggccaatcaaagtcactgcccgttccataataacgccctaggaagtaagcttatatttttaaacttttaactttaaatgagatattcgaaacggcgaccccttcagtccactccttcgaagccacctatgtaggcaagcaggcattgctatcctcgtcgcctatcttatcaaacccatcaccgcctaaggtgaagacggagccgagggtagacaagcaccgagagcatcgattcccttcccaattgtttcagttaatttcacgaactcacatttcaagcgatagccatacattttgcattcacgcccccgaccccattgttgatccttctgggaccgtgtgcagtcctttccattctcatctaagtagtctgcgctgtctctataggggaggtagatatgtggcgtacataatgcgttcggatgtcttgtgggtacagcaatgccctttttggcctgatctcaagatgatctcgagactatccccgtgaccatctcttacttacgtgatagaattcatcttgttgagaagaaaatgtaagcaaaagatttgggcgtcatcccccacctccatgtgacaggcatatagtgtcaatatctgggttgtaagagcatgatggcagctaaacaggatcatgttttgtagttcctgcttcactcttatgatatgaagatcaccatatgatagcaaggagggactagccagcacagcgtcctgagaacctgctccgataatcccaaaagtgcagttctcgccacaccagtgcatccatgtgttgaacacccgctgcgcatgcggacgacggcctctgcaagtgctcttgagggaagatgtcggcgcatgttgttaacgccgcgccaacccacatgcgttggtcgccattctctccacgcaagattgggagatggatacggaagatgccattatctgtaagtaatgcgacaaacatgcctagatgtcttagatcaccttctgctaatctcgcgccttctctacaactgcctgatcaagcaacgtatagtgtgatccggaggccgtaccgatgccctccgttgggcgatcaatatatcgatttacgtgatggaaatcgcaatactaatgattacgaaactctccctaccagcacggcgcccattcagctcataccgattttaaccattccttttggacgtttgactcacgtccgtgttaatttcacgatacctgcggggcactgcagagcgttcgaactatagcaggggctggatgcaccatttgtgcgtacgagatatagtataaccaccatgcactactacggtaggactttggatggtagttggctgtttttggccgagaaatcccattgggcacttgatattgggtgtttggagtacacgtacgctactagtctctgatagggtcaaagggcttaaagttgcaagtttctcgtctatcgaggagcaatctgactttgccttagtcaaagatcatgatttgcaacgttctcagatcacgtcaaatgctcgcttagtggttgcaacatcattctgcatgtacgtgcttctctctaggtttgaaatggacagacatgctgcatgtatccaatcgtcaccggttacaaacatgtcttgcattcttcatgatggaatagatagttagatagactaaagaaacgcatgctgcagatagtcatatcaagaagctacacagcatacgccaagtccatcgtgtacctgcctaacgagtgcatctgtgccgatgcagcacgaagtgccgttcgctaccagattgtgcccagccggtgatacttgatatgtgggtgtgacacacacactgcaacttctgagtttgccaccggcaggaaacactgagcaatgcagcgtatgcttgttttgtattatcatgaactgaacgtcatggcagatgagcatcgaccgctgctctgatctgggatctttggggtcgctgcttgctccggcttgccgggtaccactctgatcggaatgcaacgctcaatgatgttactgtagtgaagctcagaatcatttcgactggacagggaccttacctggcccttttttgctatctgggtttcccaggtacggttgccgctcgatgtgccgttgagatctccgtctgggataacagtgtcgcagtcggtaaacgacctcacacaaccgacgacttacccactcatttgctcactctcgcatatgcgcacatgcaaaaccaacaacaaaagtttacaaaaaagtgtagatacgacttgtgcgtctccacgcattatctattatcctcttcagatccacgagtactaggatgtccaacatgcaggtcattgccacggcgccgcaaacgaaaagccccccacgtggtgaatagatgaggcgggcgcaggccttaggaggaaggaagcaatggctgtcgcaggtcttgggaatctattcgcataggagaaaaaaggctgggatcatcgcgccactgtttgatgtgtattgcccagagtgagggtcggggcatcctgccgctttctactcgaccgccgtgacattcaaatatgcggcgaccgtcagcggcgcggatgaggttgagttatgcagatgccaagaacaacggagacgagtatactcggacaacgcacaaaaagaacggcaccgcagggatgcctaggattaagaattgtcaaataattccaattcatgatttatccaccctctagatgcatcagagcctggaaaagatgcttgatattgcacatgcacatggtaaaaacaggtgatagtcatagagaagttgtgcttggcaaagagtgccttcttgcatggttctcatggttctccaatgagacctctcggttggcgctgtaatgagataacgggatgtcggggtgtaacatgatgtaacatgacgttactaatatcacctacgtcgagattgctcgtctttctgacgttgaattgcgtgtacaagtggacattgaatatgaggagccatacggagaatattgcaatttgtaatgaagagtgtagcagactcgctaagacagtttgtcgtggaagaatagcatcaaactaccaatttatcagtcttggcagacgatttcgcaaacataaacggctctggacatcgggctttggtgactagtaactccttattgggctgacactgcagcactcggtcacagtccagccaaaccaaaaaagctcatgatttgggacgattgtagcacggatagatgcatgataaattcaatggcggccgcccgggtctggggtagcaggacgcgccctggtaggatgattagttacatgtcctgataacctcgcttctgccactcgacatccgtgtgtaccgattccgcttgccatggcattagccgtatggtgcatagaaacaagagatatgacgcttttgtttccctttgggggtatcctctagacaagtctggactttgtcggcacacgatatcagcaaacatggagaccttcgacaaccttaagatgtgcaataatacgatctgcattattgaagccttgaagtagaagtcgcgagatcttttttatatgcacgccggtgtagcgtaactttgtggcgtaacaatgtcatgaactatgatgcgacctcgcattcgatacgacgagcaccgtcgtatgctcctagatcagaacaaagccgtcttcaaggtccattgtggctccgtggttcgcaagtccaagttttaccatcttctcgtaaatcaaatctgcaatagctctcactaccaacagttcgagtcagtgattactctttatagtatgtttgctaagggttcgggagtcttgaaacatgtctaaggagcgcttgaaccagagaataaagacgccgactcccagaattttcctcaataggtagaaaataacttcaagaattactcactcccttctgaccgagggtggtacgcaccaccttggtgaaagagcttccacgtgaagccagcgatccacggattttcggatccaatggcgtgtgcttcgctcgcttccgcaacgccgactgtgctacaccagtcttcacgcccacgcacagccatgcgtgtggcctctaataggtgcgccgctacggttctgtgatgtgcgatgcgatcggcatcaaagacgacgtcctctaacgggcgtgtgtctgggcctactcggtcggtagagtcaatattctgccaatgaagaccaatttttcgcttctaccagtggtcaagagacatttatcatgccgctagcaagggaactaactaaaagctactgaatacataccgaggatggcttggtactcgataaccagcacgtaagcgctcggcgccttatcgtgtatggcgtcgaggacttttgagtagcgttcggcaatagcatcgacatcgagctggaactgtgccttgtcctcgcgttcaggatctgttccccatagatattggaagacgctgccgaaccagcttcggcttaaggtatcttcaaaaagtcctccaatgtagcccatatcattgccaccgccaagcactaggacgacctccgtatctgacggaaggtcgtccacctgcggagcaaaacgtctgccgccttgatactgaggctggtctagtagattgagcagagtagcaccgcaaacactcaagtcctctagcgttccggcgacacgctccgtaagaagagcggcataattaactccagagcggccggcaggctcgtcaattattggcggtatgttggggccggcagcaaatgagctccccagactggctatgcgaagtggcatgctgagttccgctgctggttcggtgccaatggtcaaaacgtgtctgtaccacttgagttaggaggtattgatttggtcacaaggtattatgacaccattaatgaactcaacgctgcacatccccaaccattgacgtagatgaggtcgtcgtggccatgatgaatgatggtctcgtgatgcgatgttgaatggatcggaaatatgtggatccgatttgaactagtcccgaacttggagcccacatcttagccaggcccctccaggttcagctattccgctaggttgagactttgaataggtgcttagaggtacctataaccaaatattttcattcagcccgtttgacatgaaaacaagacatgccctcataaatgagtttttctttttctctatggaattgttggatgttatctgtagcgagaggctttcaacaggtacacaatgaatgacattggcttactaagtacatacttgaaaagaggaagcagttgatttcctgcagtgctgcgtaaaagggagcacatgctacacgtaccacagagtaatttcccgtcaccagtcttgtaacgctcacacagcatggactgacatccgagcctaacttctagtgaagtcaaagaaagaaagcatagagaaagaacatcagcaaagcgttcacgaagctcgtcactgaccacacaatagattacgagatacatgatctcggcgtcctcggcgttccgccatgccccaacctcttgccgggcgccgccgcaggccggccgactaggtaggaatactgagccgagtaggcattccccgtcgggtcgcacaacgtcccttgttcctattctcataataaccacctggcgcatcataccggccctagcagccgcaggaacactttctctttttctcttgagttcttgctgtcgcaccattattcgtgaaacggtacgttgaatcaatccaagctaggtagcttgtccaatgtggaggaccctctggggcttagagaactcaatactagaccaaacgagggaaggagatctcactgctcctctcaggccgaaaataagtcactgtcaagcgctctgttgtcggttctatttcacacctctatgacacagcagcagctcagtccctgacagtcagaaatctcctgataattgttgaggcacttgcctcgattttaagtctcttcaggctatctctagataacttgcttcttgctaagtagtaagaacaacgatggcaatcaagcgggtggagcggaggagtcaaaacatggcgagctccagcaagccaaagaaccaagtgttttttggtaccataatctactccaagcagctcaatgagcttgtgtacactcataacgcagctgtatgcgtggatatctcggggaagatcgtggccattgagccaaactgtaaccagcaaaaggccgtcgagacggtctatgccaagttgggctggagtcttgacgatgttgccataactgtcgctagagattcacgacagttttatttcccggggtttattgacacacatatccatgcatctcaatatccgaacgcaggcatttttggcaagtcgacattgcttgactggctgagcacctatacctttcccatggaagcatccctggcttcccttccaaaagctcgtagggtctacacacagtgtatcaggcggaccctgtcgcatggaacaacaacggcagcttactatgcaactattgacgtagatgctaccaatctcttggccgacctatgtctctccatgggccagcgtgcattcatcggtcgtgtgtgcatggacagacttggcacagactactaccgagacgagacaccagagcaagcggtgatcgctacacgcgctacaattgaccacatacgtagcatcgatagcaacttcgagcttgtgagtcctatcatcacgccacgatttgccccctcttgtagcggagagatgttgagtcaactatcggatctccaaaaagagacaaatctcccagtccagacacatatcgacgaaaatgtcaacgagatcaatctcgtcaaggagcttttccctgggagcaagagctacgctgatgtgtatgacactcacggacttttgtgcgataagatgatcttggcacacgccgtccatttgactgatgaagaggcaaatctcatagccgagcgtggtgctaaagtatcacattgcccttgtagtaactccgccttgacaagtggcgtagctcgtgtacgctggatgttggacaaaggcattcaagttggccttggctcggatgtaagcggaggatacagcccaagcattcttgaggcagcaaggcaagcaaagatggtttcaaatcatcttgttatgcccggcggcaccgaagagaagcacgagcacgccagattaacggtcgaagaagttctgttcttggcgacaaaaagtggagcgcaggtagtagggcttgcagacaagattggagcgttagaagttggtatgcagtgggatgcgcagctcatcgaccttggcatcgttgctgacgacttggacgagaatgacttcactctcaagaccaacgtcgatatatttggctgggagacttgggaggagaagattcataagtgggtcttcaatggcgatgacagaaacaccaaaaaggtctgggtccagggtcgtttggttcacgagcaaaagtagatgcggaatcatgaaaagaataagactttggatcattggtaaaatagaataaaatgggagttagatagcatactttagacttgctccttcggtagacctttgcacaggcaacaaaagtggcaatgatagcgagatagactttgaaaattaacaataccagcctgacctgggttatcctctttgcggattagaaaccaactgcaaagaaatttcggtgcaaacatcagtatggttgcttggttatcacctagttcttcccggaaactcgtcaggagagaggagaaggggaaatggtggtcactggctgagcaggaaaattaagaatctcgttgaatatctgggtagatcataatacaggcgagtgggtaattgaatagcgcattggtcgtagaacctaatagttgaagtagtacgtatgacatagaaatgctgcaaaattggcttgcctcactcattattctcgggacacatttctgttgacgatgcggttcgaagaaaaagcagtggatggcattcgcattgaaatttattcgactacgacactgccggttctgtcgcctccgcatagaactataagaatgtcttgtgaaccccgtctgatgctgaccggaaccctcaatgcagcccgaacgccaagttgtgaaccagatgtttctaggtctatatgcctaatgtcgggaatcataatctgaatgagaaaggaaaggtgcaacatatgtacatatagtcagttcattggtcagagacatgccgtctcagctaagttgatatcaaatccttggaagagtctctgacaccccttcttcagcaacgagattatctaaatcctcttgcgtgccgggttcgcgcacgggtctgggaagcattagtattgtggctttaagaatgagcgatacggagcgtgacctacactgaagagtatccttcttcctggagcacaagacgaggccggatgaacatgctagcaatgacagaaagtccgaacaaagacgcaagtacaacgacaaacgtctgagggaagacctcaatagttccagcatatataccatcaaacacaataggcgcgaagacacgagcaagcgcgtgtaaaagacccattgcgcccaacatggcaccagtgcgttcaaccgggatttgtttcgtcattgagctctggatagtcgcatttgccaaaccgccaaatgctgtgaagacaccagacagaacaaacagctcctcagttcgaacgaatacgtagcccatgacacccacgaaatcactcattatcgcgagccgaacagtccaaacatcgaggtcatcggcaccagtgtgggtctccatcatgtgtagattgccattttgctcctgtcttcgccgcataggacgaatacgaaagaagtagttgaccaaaggaaatacgcctaggagagcaaggacgcgaaacaagctgacaattgatatgaacctagaagcctccaaggtgccccagttgaacatgaatttgccgtacaagattaggacagttccggcacccatggcgccgctcatgaggacggtgtcaatgaaggcaaggagtagcatatttcgccgtaaacgtgagttttgctgtccgctggggacgaacatcttgagcggcgcgaacgggttggcaccgagaagaattggcatccaagctgcgactttatcactcatcaaccagattggtagtttcgagcccatatatctcgtgatggatggagaaagagccgcttctgttgcttctttctgagcttcgtacttgtcgcgcgctaacatttgccgttttttcgataatgattcgggcaagaaaaaccagaagaaaagtataacagtgatgtggcatcccagagcgatataaaatatcgtaagaagagagcctgtcagttcaacaaatttaccagcgatgtaaggcccaaatgcaagaccagcgaaaagacacgcatgcaggtacccgattgccactccgcgcttcgatggcggcgtgcaatcgctggcgtaagaattgcctaggacagagccagccgtgaaagatcccgtaatgccatcaaaaaaacctccaagtatcaaaaagcggtagtcaatcatgtccgggtatttcgctgtgaagatggtgatgatctcattcagtatgcctccgcacgatgcaacgactaataatcgttttcggccgtatcgatcactcaaagcccctagcttcggagcggtaaaggcactgaggccaccgacaagagcgctcagaactagtgtgaatgttgcaacccttttctgaacaggggccgagttgcattgcggattgttcccgccgatggtgacgggactgaatacagcgttggggtcgagcagctgttgctcagcgtaatatcgacggcagacaagcgttacaattctgcacagtcgagacgagtaagctacatattcattctaaaggagcacgagaagccttacaggtcaattctaggcacgataatgcctccaaacgcaagagtaaatagaaaataaggcccgactagccagtacacctatcgatctgctcagtatgtaattcaaggacatcgggttctagggaccgcatacattcggtcttctccaccacggcaaactcgcaaactcgttatcatcctccgagctttgcttattggtaacattgtttcggttatgtccatctcgctcagtgtttgcgccaaatagagcagtcgtttccgtaggatcgtttcggccagtctcttcgttgttttcagcgtcaaccaaatgaattggcgcgcgctcgtcctggctggttttcatcttttcggtgtatagagaatagagaagaacttctgggcgtttcgactaagatggtgtacggctagcggcgtctcaagacgatgagaatgatggaacgagacggcagagaaatctaatgtcgaaatcgaagtcgagggtagtttcctatcctcggtcgatacgtgtaatggtgctgacggaaagcgacctgcgcatgatgctgtctgatcgtcttgctatatgtagaaagtccggactttggtattcggcgtggtgccgtacgcagtgcgaaaacagaaaatattgctctgttacaagatcacccaaggggaaagggatatagagggtgaagggaagggagagaggcagagcacggcgcaaggagcaaggccatggagaaggatagggcgacgatagaaatgcgactatgggaaagcgggttatcttgaatctccatcttcttggagcacggatggtatggaacggagatcgagtgggtcgtacgtcaaggccgtatcgtgcttgtcatcactcccaccagcccggattagtccagggcgatccctgctggtgccattcgtctggtttaagctacacgtactcgtggctgattgataatcactgcatcgtgaatctcgggatggagacgatgagactggctcgactgattaggccagcatggaacgcgtgtctgattattactcgggagggagtgagactcgtcacatgaattacatttaccttgacaagctgtagcacatgcttatgcctgtttcagcataaacttaccagtgcgcttttcagcgacttgcgaagatggttgattacggttaatcaccacgtgaaacatttcgtctgtccgcaattcggtcgaaaactcaaaatgttacttgatcatgatcggaaacaatagtggctttaagacctttcgatgacgatgtcatgcatgatgggactttggaatatgcttaatgacttgataagctgcatgttgtgttcggcaatcggtgattgtttgaaacccgccctttagcgttttgttggccaagcttctgaaatccgtcctgcaacccaaataatatgctggagggaggttaatagtattatacagggacaaccaactggtcgcagcgatctaattgcctaatgatgcaagcccatgacccggaactctcctatatacacacatcattcatgatgcctagcgcacgagagcacgcaccaaatcacgctggtggaagtgcagcgcgtaggccgtaattgtggtaatatcgagatgcaaagaagtgaggtctcactttacacagcgaatgcattttcagcaccagcgaagaatttctttgattcggcacagcgctcgcttttgcatccgggacaccttaatcccatctggtaggaacaggccacgccgccgtccaggtgactcttagcgaggctggcgagagcatcaataaagatcggatttccattcagactctcaacacgcttgacagtgtccgcatggcccgattctccaatgacttctttatccagttcgaacagggtctcgatatgatcagatgtgaaggcgacgggaatgaggactaaatccttttgaccctttgcaatgtattcctctacagaggattgagtctggggacctagccacggctgagggccgacttgtgattgccagcatagtctgtaagggttagagaagttcaaacgttgcattatggcatatacagtagcagcaacttctgcaggatatggatcgcctgaagtacatgtcagcgagcgtagcgtgagatgcatggcctccatcacccacctcggttgacaacagtcatgggtagactgtgggcggagaagaggagcaccgctttatctctccgctcctcggggtactcggacaaagtcttctcgatattggaagcaaaggcctctacgagacccgggtggacgggccagcggtcaatgacactccactggattgcaccggagctagccttgccctctagccgctgccgccacttccagagctcgttcaagctgcttcccgtggtcgagcaggagtactgtggatactgcgtgaatgcgacggcccggccgcctttcccgttgccgaagccatcgtccagtagcttgttgtacatctcctcggtcaaggggtccgcgtatcggaaggcgacgtagggcttgtggggagccgtctcgggggagatctggtcgaggatcttgcacatctcggcgttctggtactctgaccacttgcgaatgggggatccgcccccgatctctgcatactgcttttgaatcttggacgtcctcctgctcgcaatgaggggtccgatgtagttttgcagccggccgagcgggatgagatcggcatctgccttgagagttgtgagacgactgtgagtagagcatgggaaaggtgggagcagtctcttacgaagagccgactgagaaaatccccaacttcgtcagtggtggaaggcccccccatattgagaaagaccatggcagttggccccttggaccccgcggcattctgggtaacgggcggcgcgggcgtcgcaaaccatcgagtctggagggaggtggcccttgaattggcttttggagcccaagaggaagaggctggcgagcaagcgacaactcggcgcgacaattgcgcaacggaatggcgggttgccatgctttccactatccccggcccgcaatctgcaaactacaaaaaccacaaggctaattctgcaagagaaaatgcggatcacaaatgatgatgtcgttaaggacggcgctatgtgaagacctaggcggtaagagcaatatcgaatgcaattgagagacaataaggcctgacttgacacaggtaggcatgattccgtcttcgcaaaagtcgacgagattcgcgggcgatgacagcatgctcggcatctccagcaatcggaaacccgacctttccatttgccccattatcacccaatggcatagcgtcaattagcacatcgaactaagctattctatct

SEQ ID NO: 37414 - DNA, 846 bp, Muscodor strobelii
  misc_feature: SGI cDNA ID NO. 572983
  misc_feature: Encodes the peptide sequence at SEQ ID NO 37415
atgccacttcgcatagccagtctggggagctcatttgctgccggccccaacataccgccaataattgacgagcctgccggccgctctggagttaattatgccgctcttcttacggagcgtgtcgccggaacgctagaggacttgagtgtttgcggtgctactctgctcaatctactagaccagcctcagtatcaaggcggcagacgttttgctccgcaggtggacgaccttccgtcagatacggaggtcgtcctagtgcttggcggtggcaatgatatgggctacattggaggactttttgaagataccttaagccgaagctggttcggcagcgtcttccaatatctatggggaacagatcctgaacgcgaggacaaggcacagttccagctcgatgtcgatgctattgccgaacgctactcaaaagtcctcgacgccatacacgataaggcgccgagcgcttacgtgctggttatcgagtaccaagccatcctcggcccagacacacgcccgttagaggacgtcgtctttgatgccgatcgcatcgcacatcacagaaccgtagcggcgcacctattagaggccacacgcatggctgtgcgtgggcgtgaagactggtgtagcacagtcggcgttgcggaagcgagcgaagcacacgccattggatccgaaaatccgtggatcgctggcttcacgtggaagctctttcaccaaggtggtgcgtaccaccctcggtcagaagggatgagagctattgcagatttgatttacgagaagatggtaaaacttggacttgcgaaccacggagccacaatggaccttgaagacggctttgttctgatctag

SEQ ID NO: 37415 - protein, 281 aa, Muscodor strobelii
  misc_feature: SGI Peptide ID NO. 572983
  misc_feature (3)..(267): NCBI GI: 255935269 Blast Desc: Pc13g02200 [Penicillium chrysogenum Wisconsin 54-1255] gi|211583281|emb|CAP91289.1| Pc13g02200 [Penicillium chrysogenum Wisconsin 54-1255]
  misc_feature (3)..(263): NCBI GI: 71010388 Blast Desc: UM02236.1 [Ustilago maydis 521] gi|46098125|gb|EAK83358.1| UM02236.1 [Ustilago maydis 521]
  misc_feature (5)..(260): NCBI GI: 227978373 Blast Desc: TpauDRAFT_10620 [Tsukamurella paurometabola DSM 20162] gi|227965731|gb|EEK01040.1| TpauDRAFT_10620 [Tsukamurella paurometabola DSM 20162]
  misc_feature (2)..(260): NCBI GI: 280960654 Blast Desc: conserved [Frankia sp. EuI1c] gi|270735149|gb|EFA63343.1| conserved [Frankia sp. EuI1c]
  misc_feature (5)..(256): NCBI GI: 258650930 Blast Desc: Namu_0683 [Nakamurella multipartita DSM 44233] gi|258554155|gb|ACV77097.1| conserved [Nakamurella multipartita DSM 44233]
  misc_feature (7)..(260): NCBI GI: 284990002 Blast Desc: Gobs_1455 [Geodermatophilus obscurus DSM 43160] gi|284063247|gb|ADB74185.1| conserved [Geodermatophilus obscurus DSM 43160]
  misc_feature (3)..(256): NCBI GI: 256376999 Blast Desc: Amir_2886 [Actinosynnema mirum DSM 43827] gi|255921302|gb|ACU36813.1| conserved [Actinosynnema mirum DSM 43827]
  misc_feature (4)..(260): NCBI GI: 108797528 Blast Desc: Mmcs_0548 [Mycobacterium sp. MCS] gi|108767947|gb|ABG06669.1| conserved [Mycobacterium sp. MCS]
  misc_feature (7)..(260): NCBI GI: 126433150 Blast Desc: Mjls_0538 [Mycobacterium sp. JLS] gi|126232950|gb|ABN96350.1| conserved [Mycobacterium sp. JLS]
  misc_feature (7)..(260): NCBI GI: 119866614 Blast Desc: Mkms_0560 [Mycobacterium sp. KMS] gi|119692703|gb|ABL89776.1| conserved [Mycobacterium sp. KMS]
MPLRIASLGSSFAAGPNIPPIIDEPAGRSGVNYAALLTERVAGTLEDLSVCGATLLNLLDQPQYQGGRRFAPQVDDLPSDTEVVLVLGGGNDMGYIGGLFEDTLSRSWFGSVFQYLWGTDPEREDKAQFQLDVDAIAERYSKVLDAIHDKAPSAYVLVIEYQAILGPDTRPLEDVVFDADRIAHHRTVAAHLLEATRMAVRGREDWCSTVGVAEASEAHAIGSENPWIAGFTWKLFHQGGAYHPRSEGMRAIADLIYEKMVKLGLANHGATMDLEDGFVLI

SEQ ID NO: 37416 - DNA, 13295 bp, Muscodor strobelii; identical to SEQ ID NO: 37407
  misc_feature: SGI EST ID NO. CUFF.89902.0
  misc_feature: Variant of the nucleotide sequence at SEQ ID NO 37414

SEQ ID NO: 37417 - DNA, 1113 bp, Muscodor strobelii
  misc_feature: SGI cDNA ID NO. 572984
  misc_feature: Elevated expression when VOC is produced
  misc_feature: Encodes the peptide sequence at SEQ ID NO 37418
atggcggccgtcactcagacccctcctaacacaaccaccaagagaccagagcgtctccgggacacattgtacgcagacatgatgaagcctgatgaggacctcagcaagatggcagatcccgctgagcgccggagaatccaaaaccgtctagcacagcgtgcctaccgacgcaagatgagggaacagaagaacgaagtcgagaagctgagagaccagattaagaaactacaagagactcccgaatccagcaacaccagcaggcaaagcaccccgtgcacaccaccagacagcagcacaccatcgatggcaccagcatcgctttccccatcaaattttgaggtggcgtcgcagacgtcggagcagcaatggatgggcggctactttcatgagtggcctgccgctccagctcaagagaacttcatgactggcttaatttccccaactgaactcgaggcgcctgtccattacgacgactcgctctcgactagctactcatccgacgcatactcaaccgctcctacatctatcaagtcaccacctgcaggccgccagcacttgaaatcgaggcggacatcatctcaatccaagagacgaccgactctgcctcgcagtgttggcagcccaggacaaacaccgcaaagtcctcattccccatggatggctcctcagggatctcctatggatgtgccggctagcgtgatgatgatgacaccggagcctcagatgccagtctactctcctcacttcgacctgcacgcgcaccctgaggaatttcaatatccttcgccaccacatatcgatgacgttaccaatggatgggcaatgcctaccgcagagcaattggtcagacacgcttcagaacctactttgaatggaaatggcactcgtgctgcacctcgctcgctacctgatgcaaatgcaccgatacttcaccttgcagttgctggtggtcacatcgatacgcttcgcatcattctcaaacaatgcaatgtttcagtcaacgtacgtgatagcgctggttacacaccgctgcagcgcgcgatcatcaatggacacaccgacattgtcgagcttttgctcaagcacggtgcggaggtgaacatggacgcgtaa

SEQ ID NO: 37418 - protein, 370 aa, Muscodor strobelii
  misc_feature: SGI Peptide ID NO. 572984
  misc_feature (339)..(371): Pfam Id: PF00023 Pfam Desc: Ankyrin repeat
  misc_feature (339)..(368): Pfam Id: PF00023 Pfam Desc: Ankyrin repeat
  misc_feature (261)..(368): NCBI GI: 145236072 Blast Desc: protein product [Aspergillus niger] gi|134075134|emb|CAK39144.1| protein product [Aspergillus niger]
  misc_feature (3)..(113): NCBI GI: 145236072 Blast Desc: protein product [Aspergillus niger] gi|134075134|emb|CAK39144.1| protein product [Aspergillus niger]
  misc_feature (309)..(367): NCBI GI: 145614787 Blast Desc: [Magnaporthe grisea 70-15] gi|145021723|gb|EDK05800.1| [Magnaporthe grisea 70-15]
  misc_feature (9)..(78): NCBI GI: 169621773 Blast Desc: SNOG_14099 [Phaeosphaeria nodorum SN15] gi|111057216|gb|EAT78336.1| SNOG_14099 [Phaeosphaeria nodorum SN15]
  misc_feature (18)..(94): NCBI GI: 145614787 Blast Desc: [Magnaporthe grisea 70-15] gi|145021723|gb|EDK05800.1| [Magnaporthe grisea 70-15]
  misc_feature (18)..(94): NCBI GI: 149209313 Blast Desc: MGCH7_ch7g149 [Magnaporthe grisea 70-15] gi|86196104|gb|EAQ70742.1| MGCH7_ch7g149 [Magnaporthe grisea 70-15]
  misc_feature (310)..(368): NCBI GI: 242020509 Blast Desc: ankyrin repeat-containing protein, [Pediculus humanus corporis] gi|212515885|gb|EEB17957.1| ankyrin repeat-containing protein, [Pediculus humanus corporis]
  misc_feature (310)..(367): NCBI GI: 28274844 Blast Desc: ankyrin repeat protein E2_5 [synthetic construct]
  misc_feature (310)..(367): NCBI GI: 207099793 Blast Desc: CD4-specific ankyrin repeat protein D3.1 [synthetic construct]
  misc_feature (310)..(367): NCBI GI: 207099803 Blast Desc: CD4-specific ankyrin repeat protein D25.2 [synthetic construct]
  misc_feature: Useful for introducing or modulating the production of volatile compounds
MAAVTQTPPNTTTKRPERLRDTLYADMMKPDEDLSKMADPAERRRIQNRLAQRAYRRKMREQKNEVEKLRDQIKKLQETPESSNTSRQSTPCTPPDSSTPSMAPASLSPSNFEVASQTSEQQWMGGYFHEWPAAPAQENFMTGLISPTELEAPVHYDDSLSTSYSSDAYSTAPTSIKSPPAGRQHLKSRRTSSQSKRRPTLPRSVGSPGQTPQSPHSPWMAPQGSPMDVPASVMMMTPEPQMPVYSPHFDLHAHPEEFQYPSPPHIDDVTNGWAMPTAEQLVRHASEPTLNGNGTRAAPRSLPDANAPILHLAVAGGHIDTLRIILKQCNVSVNVRDSAGYTPLQRAIINGHTDIVELLLKHGAEVNMDA

SEQ ID NO: 37419 - DNA, 1567 bp, Muscodor strobelii
  misc_feature: SGI EST ID NO. CUFF.89489.0
  misc_feature: Variant of the nucleotide sequence at SEQ ID NO 37417
cacgaagaagatataatagatgcttccatcttccactcgaaatatttcaaatcctcacgagctcgacttcatcgcaaatcacctcaactcaccagaacaaggttgatccgcatacatcgtctatcactcatcaagacactgaagcaatggcggccgtcactcagacccctcctaacacaaccaccaagagaccagagcgtctccgggacacattgtacgcagacatgatgaagcctgatgaggacctcagcaagatggcagatcccgctgagcgccggagaatccaaaaccgtctagcacagcgtgcctaccgacgcaagatgagggaacagaagaacgaagtcgagaagctgagagaccagattaagaaactacaagagactcccgaatccagcaacaccagcaggcaaagcaccccgtgcacaccaccagacagcagcacaccatcgatggcaccagcatcgctttccccatcaaattttgaggtggcgtcgcagacgtcggagcagcaatggatgggcggctactttcatgagtggcctgccgctccagctcaagagaacttcatgactggcttaatttccccaactgaactcgaggcgcctgtccattacgacgactcgctctcgactagctactcatccgacgcatactcaaccgctcctacatctatcaagtcaccacctgcaggccgccagcacttgaaatcgaggcggacatcatctcaatccaagagacgaccgactctgcctcgcagtgttggcagcccaggacaaacaccgcaaagtcctcattccccatggatggctcctcagggatctcctatggatgtgccggctagcgtgatgatgatgacaccggagcctcagatgccagtctactctcctcacttcgacctgcacgcgcaccctgaggaatttcaatatccttcgccaccacatatcgatgacgttaccaatggatgggcaatgcctaccgcagagcaattggtcagacacgcttcagaacctactttgaatggaaatggcactcgtgctgcacctcgctcgctacctgatgcaaatgcaccgatacttcaccttgcagttgctggtggtcacatcgatacgcttcgcatcattctcaaacaatgcaatgtttcagtcaacgtacgtgatagcgctggttacacaccgctgcagcgcgcgatcatcaatggacacaccgacattgtcgagcttttgctcaagcacggtgcggaggtgaacatggacgcgtaattggctgacgcccaggactttaacgattttacttgactgcatacactggggcgttttttggttcactcaggcttcattggggacatttggccggctcatatggcgcagcggtggcacggtttgaaattttggataccctttttttgtatgaatggctcctgaaaaatagagggctatagaatatgggccatgtgttgaatttgtggtagaggcgctgggtttgttagcctggcacctctttagacttgatagaacaatttgatggcatcaaatgccacccatctcaaaagacgcttccacagtctcag

SEQ ID NO: 37420 - DNA, 1350 bp, Muscodor strobelii
  misc_feature: SGI cDNA ID NO. 572985
  misc_feature: Encodes the peptide sequence at SEQ ID NO 37421
atgatcagtgtgccatggatcactgtcttaattgtggatcagcagcagcctcctctctcagcctaccaaagctaccagcagccgtctttttctgcctatcagcattaccagcagccattcccgactcctccacagcagcctccatttctggctcatcagcaactgcccgtggtccctactcgtcagcaacagccatcttcgccgcctggcaatcgggatgcaccagcctccctgagccttggccctcgatctgacatggccgatctgcagaaggagcgcgaagataaggagcgcgaagataaggatcgtgagatacagcagctgcgtagaaagcttgaccagaccacccgctctgagtctccacgagacgacactgattctgcacacaacgacaccgactctgctcacaacgacacagactctccgcaagatgattcggacaccttcacacatgacagagatctgccgtcgtcgcagacactcgccgagactcagcacacacaacatactccgcatacacagcacgtccagcacactcagtacactcaggtgaaacgcaaaggggaaggcaagcagcctgtgctgcgacctccaagtctgcgccagcgtttccgtcagctcgccaatctcgaacgtgaactatccgacgacctgatttctgacagccaggtttctcccgatggcagtgatacagatggaaacgactcttcgtcttcatacgacccctcgaagagacgtagacccgctcgccctccccgctcagacaccccatttccatctcatccccaacagagtgactcccatgggcctgagggacacgactctcctggcggtcgatcccacgtctccgagtctcctaatatccatggatccatgtcatcatctctgccccgtcgggatgctctggtctccctgaggcctggaccccgattggggcagaaggctgcctcgcagtctcttacagtggacgtgacctatcccgcttccgactgctgcctccgaaacgcggccgactccaagatctcaagccgatcattccgcactgccgacgccacctcccacgccgagtccgactctaaatccgaccgcaagctcgcctcaaccccgacctcagccaatcgcccgcgcctatctgcattctgcgcgcactcctctctcccgacagtcctcgccggctccaaaaccattgtccgcgtagtgatagccaccgaccagtcccagctcagcgcgtcttacgtccagccgcttgacgagagcggcaaccgctcgcaagagggcgacctctttgcctttgcaacgctagtcctagtctccctacagatcacagtcccggacgtggaggaaggctag

SEQ ID NO: 37421 - protein, 449 aa, Muscodor strobelii
  misc_feature: SGI Peptide ID NO. 572985
MISVPWITVLIVDQQQPPLSAYQSYQQPSFSAYQHYQQPFPTPPQQPPFLAHQQLPVVPTRQQQPSSPPGNRDAPASLSLGPRSDMADLQKEREDKEREDKDREIQQLRRKLDQTTRSESPRDDTDSAHNDTDSAHNDTDSPQDDSDTFTHDRDLPSSQTLAETQHTQHTPHTQHVQHTQYTQVKRKGEGKQPVLRPPSLRQRFRQLANLERELSDDLISDSQVSPDGSDTDGNDSSSSYDPSKRRRPARPPRSDTPFPSHPQQSDSHGPEGHDSPGGRSHVSESPNIHGSMSSSLPRRDALVSLRPGPRLGQKAASQSLTVDVTYPASDCCLRNAADSKISSRSFRTADATSHAESDSKSDRKLASTPTSANRPRLSAFCAHSSLPTVLAGSKTIVRVVIATDQSQLSASYVQPLDESGNRSQEGDLFAFATLVLVSLQITVPDVEEG

SEQ ID NO: 37422 - DNA, 771 bp, Muscodor strobelii
  misc_feature: SGI cDNA ID NO. 572986
  misc_feature: Encodes the peptide sequence at SEQ ID NO 37423
atgcaacacgcctcagctaatctatcgcttttcgtgcctgcgcgtgctttatgtatccagggtttcggcacttcttccacgccttcgggtgttggttcatctcatgctacccctagtagcaaccctgttacaccacaccttcgtcatagatatgtcgaaaaatccactgcacagatagtcaacaaaggacctgatgaagaagattcagacgcagacaactacgatgatgcgcatctaaccagtgtgccacttgacagctttgtgaaacttacctctcgcccacctctgcctaatgccgaaccggtcaactatcaagactacatcgttgatcatgttcgaccttctcctggccttcgtggtcatggtgccaccgagcctacgagtggccggcttcctccgggagatcaatgggttacgaatggcctcacctatactaacgaatcttccctgcacaattgtgcacacgacacgtatatgcttatgcaagcacatctcaaaatgatgttcatgtcaccaaaggagtatgagtactggctaggtggaaacgacctcaaggagcaggagtggccggcaatctcactactagaccgaatcaacaatatgcgccaaaacgaaaacaactacttgaagagttgtgaaccttactacggcgctggttgtgagaaagacatgaaattcaagaacgaacgaaagacgaagggcgccgctgctgctggattcgcgccgattgagtaccctggtaaagcggcggatgcagagacaaaatggtga

SEQ ID NO: 37423 - protein, 256 aa, Muscodor strobelii
  misc_feature: SGI Peptide ID NO. 572986
MQHASANLSLFVPARALCIQGFGTSSTPSGVGSSHATPSSNPVTPHLRHRYVEKSTAQIVNKGPDEEDSDADNYDDAHLTSVPLDSFVKLTSRPPLPNAEPVNYQDYIVDHVRPSPGLRGHGATEPTSGRLPPGDQWVTNGLTYTNESSLHNCAHDTYMLMQAHLKMMFMSPKEYEYWLGGNDLKEQEWPAISLLDRINNMRQNENNYLKSCEPYYGAGCEKDMKFKNERKTKGAAAAGFAPIEYPGKAADAETKW

SEQ ID NO: 37424 - DNA, 3135 bp, Muscodor strobelii
  misc_feature: SGI cDNA ID NO. 572987
  misc_feature: Encodes the peptide sequence at SEQ ID NO 37425
atggccacaacgctgactgtcgctggcgaaggacaggcttccgccaatgctgttgcgccaatagcagatgtcacccgacccatcttcacgttggatgagttaatacgacgtcgcgcatccgagctgggcgaggctcccctgattgggtatccaaatcactcgctgcttgacttcgaggagcatagtgcacgttctgtcaaccactatgttgacgctgcagtcgagaaactgcagcagcttggactgcctccagttgatcccactctgcgaaaaccacctgttgttggtattctttcgcagtccggcttgcatgtgatcattacaattatcgccttgagtcgtcttggttattctgtgttcttgatttcgacgagactccgggggcctgcacttgatcggttgattgaattgactggatgcatcaccattctcaccacgcccaacttccatgctgcgattgctgaagtgccattggacaaacggcctgccgtcgttccaattctgtctcattccgactactatcgcagagatgcgccacctttcgtgcgatattgtgatgctgagtttgagagtaaaaagatagctgtgatcttgcattcgtctggctcaacaggtctgccgaaacctatatggctatcccatcagagctgcatcggggcattctcactcaacatgaacatgaactcactgctcgtctcacccttattccacagcaatggcttctatgaagtttttaggtcaatctattctaaaaacactgtatatctttgcaactactcccttgcactgacccggcagagtctgctccagatgctcaatcatgtcaaaccggagctgttccactgtgtgccatatatagtgaagctcctcgcggagtcgaacgaagggattcgagctctcgcaaaggtcaacatggtcttatttgctgggagtagctgccccgacgagatgggcgacatgctcgtgagtcgtggcgtgaatctagttgcaaattacggcgccaccgaaacaggcagactgatgaactctgctcggcctccaggtgatcgatactggaactatctacgaatactgccacccgcgcggccgttcgtattaatggatgaggttgcgcctggtttacatgagtgtgtagctcttgacggcctcaagtcgaagagtacagtcaactcggataatccgccaaactcattccgaacgagagatctgttcgcaccccactcctcagagccaggtttgtggaagtacgtctgccgactcgacgatcgtttcacgctcatcaatggagagaaggtcttgcctattgaaattgagggtcgcattcgccaagaagaatttgtgaaggaagccgtcgtgttcggcgagggaaagtcatatcccggagtgatagtgttccgggcccagaatgcatcttcaatgtcagacactgattttctcgaagctgtctggccagctgtgaaagccgcaaactctcaagcagaggcattctcgcatatcccgagaggcttggtcgtggtacagcctgccgatgctacatacccccagacagacaaaggaacattcattcgagtgccgacatataaacagtacgaaaaggagatcgaggcagcatacgagaagttcgagaatgtgacagggggcgccttgttactgacaggccaagatttggaaacctttctactgcgcgctatcaaagaccagactggtatgcagctgacgatagacgacgagttctttgcatcaggcgtggacagtctgcagtgcatccaaatgtggaatttgatcaaaagggaaatcgatctgggggggaacgagtcacgactgagccaaaatgtgttgtatgagacgggaaatatccgagcgcttgccaggcatatcgagagggtgagatcaggagaggaactattgtcggacgagctgggagacatgcaggaactgatcgagaagtattcatcgttcaaaccacatatgcctggagatgctcctcatcccgagaaagaagttgcgcttgtgactggagtaactggaggactgggcgcacaccttctcgcccaattggtatcgcaagataatgtgtcatcagtatgggcgatggtccgagcaacctcagatactgcagcatcggatcgagtctttgatgccctcaaggcacgaggcattgaactcacacctaggcagcgcagtaaagtagttccgttatcgtgcgacctcggcgatcccaaccttggactgagcccatcgcgtcttgcagctttgactcgggttctgaccctggtcattcatagtgcttgggccgtcaacttcaacatccccgttcagagcttcgaaaatcaacacatcaaggccgttcataatcttatacggcaatgtctgagagtacagacgccagagcccgctcgtttcttcttctgctcgtctgtctcgtcggccggtggaactcctcgtccgggcatcatccccgaaagccctgtgatggaccccgcgcatgctcagaatacgggctatgcgcgttcgaaatatgtcgcagaacatatcactcgcaatgccaggcaaactgtgggagcaccggcacgagttctacgcataggacaactgattggagacacggcagtcggcgaatggaacccgacagagggtgtccctatgacgatacagaccgcagtgacacttggctgtttgccaactcttgacgaggaaatgtcatggttgccagtcgatactgcagcatctaccatcatcgagctagcgggggtgaccggaaacggaggcaactctgacccagacctggtctaccacgttttgaaccctcagcgattccaatggactcgtgatatgcttcccgcgctagctcaagccgggctaaagttcgagagtctcgccacgacgcagtggatgcagaggttgagaagctcggacagagatccagtcaagaaccctcctatcaaactgctcgaatggttcgaaagcaaatatggccaggacaaacccagcggactagctggaggactggtctacctgacagatgagacgaggcggcagtctcacgtgttgaggaacgtgccaagtgtcaccgatgttcagtttgtccggatgatgttgttgagactgaagcaacattgggacagcactgcgtga

SEQ ID NO: 37425 - protein, 1044 aa, Muscodor strobelii
  misc_feature: SGI Peptide ID NO. 572987
  misc_feature (62)..(452): Pfam Id: PF00501 Pfam Desc: AMP-binding enzyme
  misc_feature (669)..(960): Pfam Id: PF01370 Pfam Desc: NAD dependent epimerase/dehydratase family
  misc_feature (671)..(912): Pfam Id: PF07993 Pfam Desc: Male sterility protein
  misc_feature (558)..(626): Pfam Id: PF00550 Pfam Desc: Phosphopantetheine attachment site
  misc_feature (89)..(349): Pfam Id: PF00501 Pfam Desc: AMP-binding enzyme
  misc_feature (410)..(452): Pfam Id: PF00501 Pfam Desc: AMP-binding enzyme
  misc_feature (798)..(867): Pfam Id: PF01370 Pfam Desc: NAD dependent epimerase/dehydratase family
  misc_feature (23)..(1041): NCBI GI: 256726639 Blast Desc: NECHADRAFT_32900 [Nectria haematococca mpVI 77-13-4]
  misc_feature (28)..(1044): NCBI GI: 46110739 Blast Desc: FG02251.1 [Gibberella zeae PH-1]
  misc_feature (30)..(1027): NCBI GI: 255944033 Blast Desc: Pc20g02260 [Penicillium chrysogenum Wisconsin 54-1255] gi|211587519|emb|CAP85555.1| Pc20g02260 [Penicillium chrysogenum Wisconsin 54-1255]
  misc_feature (27)..(1040): NCBI GI: 67537314 Blast Desc: AN4827.2 [Aspergillus nidulans FGSC A4] gi|40740872|gb|EAA60062.1| AN4827.2 [Aspergillus nidulans FGSC A4] gi|259482319|tpe|CBF76688.1| TPA: NRPS-like enzyme, (JCVI)
  misc_feature (25)..(1040): NCBI GI: 154296846 Blast Desc: BC1G_12512 [Botryotinia fuckeliana B05.10] gi|150843166|gb|EDN18359.1| BC1G_12512 [Botryotinia fuckeliana B05.10]
  misc_feature (30)..(1019): NCBI GI: 145604843 Blast Desc: MGG_07939 [Magnaporthe grisea 70-15] gi|145012759|gb|EDJ97413.1| MGG_07939 [Magnaporthe grisea 70-15]
  misc_feature (13)..(1017): NCBI GI: 261359251 Blast Desc: L-aminoadipate-semialdehyde dehydrogenase [Verticillium albo-atrum VaMs.102]
  misc_feature (44)..(1040): NCBI GI: 156043926 Blast Desc: SS1G_10066 [Sclerotinia sclerotiorum 1980] gi|154694455|gb|EDN94193.1| SS1G_10066 [Sclerotinia sclerotiorum 1980]
  misc_feature (6)..(1040): NCBI GI: 70991793 Blast Desc: NRPS-like enzyme [Aspergillus fumigatus Af293] gi|66848378|gb|EAL88707.1| NRPS-like enzyme, [Aspergillus fumigatus Af293]
  misc_feature (6)..(1040): NCBI GI: 159124307 Blast Desc: NRPS-like enzyme, [Aspergillus fumigatus A1163]
MATTLTVAGEGQASANAVAPIADVTRPIFTLDELIRRRASELGEAPLIGYPNHSLLDFEEHSARSVNHYVDAAVEKLQQLGLPPVDPTLRKPPVVGILSQSGLHVIITIIALSRLGYSVFLISTRLRGPALDRLIELTGCITILTTPNFHAAIAEVPLDKRPAVVPILSHSDYYRRDAPPFVRYCDAEFESKKIAVILHSSGSTGLPKPIWLSHQSCIGAFSLNMNMNSLLVSPLFHSNGFYEVFRSIYSKNTVYLCNYSLALTRQSLLQMLNHVKPELFHCVPYIVKLLAESNEGIRALAKVNMVLFAGSSCPDEMGDMLVSRGVNLVANYGATETGRLMNSARPPGDRYWNYLRILPPARPFVLMDEVAPGLHECVALDGLKSKSTVNSDNPPNSFRTRDLFAPHSSEPGLWKYVCRLDDRFTLINGEKVLPIEIEGRIRQEEFVKEAVVFGEGKSYPGVIVFRAQNASSMSDTDFLEAVWPAVKAANSQAEAFSHIPRGLVVVQPADATYPQTDKGTFIRVPTYKQYEKEIEAAYEKFENVTGGALLLTGQDLETFLLRAIKDQTGMQLTIDDEFFASGVDSLQCIQMWNLIKREIDLGGNESRLSQNVLYETGNIRALARHIERVRSGEELLSDELGDMQELIEKYSSFKPHMPGDAPHPEKEVALVTGVTGGLGAHLLAQLVSQDNVSSVWAMVRATSDTAASDRVFDALKARGIELTPRQRSKVVPLSCDLGDPNLGLSPSRLAALTRVLTLVIHSAWAVNFNIPVQSFENQHIKAVHNLIRQCLRVQTPEPARFFFCSSVSSAGGTPRPGIIPESPVMDPAHAQNTGYARSKYVAEHITRNARQTVGAPARVLRIGQLIGDTAVGEWNPTEGVPMTIQTAVTLGCLPTLDEEMSWLPVDTAASTIIELAGVTGNGGNSDPDLVYHVLNPQRFQWTRDMLPALAQAGLKFESLATTQWMQRLRSSDRDPVKNPPIKLLEWFESKYGQDKPSGLAGGLVYLTDETRRQSHVLRNVPSVTDVQFVRMMLLRLKQHWDSTA

SEQ ID NO: 37426 - DNA, 3276 bp, Muscodor strobelii
  misc_feature: SGI EST ID NO. CUFF.89561.0
  misc_feature: Variant of the nucleotide sequence at SEQ ID NO 37424
cttggactgcctccagttgatcccactctgcgaaaaccacctgttgttggtattctttcgcagtccggcttgcatgtgatcattacaattatcgccttgagtcgtcttggttattctgtgttcttgatttcgacgagactccgggggcctgcacttgatcggttgattgaattgactggatgcatcaccattctcaccacgcccaacttccatgctgcgattgctgaagtgccattggacaaacggcctgccgtcgttccaattctgtctcattccgactactatcgcagagatgcgccacctttcgtgcgatattgtgatgctgagtttgagagtaaaaagatagctgtgatcttgcattcgtctggctcaacaggtctgccgaaacctatatggctatcccatcagagctgcatcggggcattctcactcaacatgaacatgaactcactgctcgtctcacccttattccacagcaatggcttctatgaagtttttaggtcaatctattctaaaaacactgtatatctttgcaactactcccttgcactgacccggcagagtctgctccagatgctcaatcatgtcaaaccggagctgttccactgtgtgccatatatagtgaagctcctcgcggagtcgaacgaagggattcgagctctcgcaaaggtcaacatggtcttatttgctgggagtagctgccccgacgagatgggcgacatgctcgtgagtcgtggcgtgaatctagttgcaaattacggcgccaccgaaacaggcagactgatgaactctgctcggcctccaggtgatcgatactggaactatctacgaatactgccacccgcgcggccgttcgtattaatggatgaggttgcgcctggtttacatgagtgtgtagctcttgacggcctcaagtcgaagagtacagtcaactcggataatccgccaaactcattccgaacgagagatctgttcgcaccccactcctcagagccaggtttgtggaagtacgtctgccgactcgacgatcgtttcacgctcatcaatggagagaaggtcttgcctattgaaattgagggtcgcattcgccaagaagaatttgtgaaggaagccgtcgtgttcggcgagggaaagtcatatcccggagtgatagtgttccgggcccagaatgcatcttcaatgtcagacactgattttctcgaagctgtctggccagctgtgaaagccgcaaactctcaagcagaggcattctcgcatatcccgagaggcttggtcgtggtacagcctgccgatgctacatacccccagacagacaaaggaacattcattcgagtgccgacatataaacagtacgaaaaggagatcgaggcagcatacgagaagttcgagaatgtgacagggggcgccttgttactgacaggccaagatttggaaacctttctactgcgcgctatcaaagaccagactggtatgcagctgacgatagacgacgagttctttgcatcaggcgtggacagtctgcagtgcatccaaatgtggaatttgatcaaaagggaaatcgatctgggggggaacgagtcacgactgagccaaaatgtgttgtatgagacgggaaatatccgagcgcttgccaggcatatcgagagggtgagatcaggagaggaactattgtcggacgagctgggagacatgcaggaactgatcgagaagtattcatcgttcaaaccacatatgcctggagatgctcctcatcccgagaaagaagttgcgcttgtgactggagtaactggaggactgggcgcacaccttctcgcccaattggtatcgcaagataatgtgtcatcagtatgggcgatggtccgagcaacctcagatactgcagcatcggatcgagtctttgatgccctcaaggcacgaggcattgaactcacacctaggcagcgcagtaaagtagttccgttatcgtgcgacctcggcgatcccaaccttggactgagcccatcgcgtcttgcagctttgactcgggttctgaccctggtcattcatagtgcttgggccgtcaacttcaacatccccgttcagagcttcgaaaatcaacacatcaaggccgttcataatcttatacggcaatgtctgagagtacagacgccagagcccgctcgtttcttcttctgctcgtctgtctcgtcggccggtggaactcctcgtccgggcatcatccccgaaagccctgtgatggaccccgcgcatgctcagaatacgggctatgcgcgttcgaaatatgtcgcagaacatatcactcgcaatgccaggcaaactgtgggagcaccggcacgagttctacgcataggacaactgattggagacacggcagtcggcgaatggaacccgacagagggtgtccctatgacgatacagaccgcagtgacacttggctgtttgccaactcttgacgaggaaatgtcatggttgccagtcgatactgcagcatctaccatcatcgagctagcgggggtgaccggaaacggaggcaactctgacccagacctggtctaccacgttttgaaccctcagcgattccaatggactcgtgatatgcttcccgcgctagctcaagccgggctaaagttcgagagtctcgccacgacgcagtggatgcagaggttgagaagctcggacagagatccagtcaagaaccctcctatcaaactgctcgaatggttcgaaagcaaatatggccaggacaaacccagcggactagctggaggactggtctacctgacagatgagacgaggcggcagtctcacgtgttgaggaacgtgccaagtgtcaccgatgttcagtttgtccggatgatgttgttgagactgaagcaacattgggacagcactgcgtgaggcaaggatgggtctgtgcgtgtgtgtctcttctccctcttgatgttttcgcagtgattaggcaatcatctccgcggtgaaggtgcacgctgtatattgtaggataccgccttcaaaattgactcttcaattagtcacagctctgcctgctaaccagtatttcgcgtcacttggaactggaaagacagcactgtgtcgcggtgctccgatgggagtctggaagttcaaggcgcagattgccgtattaggaattgcaacgagaatgaatataaacaaaaaatgcatcatgatggcggagccgtacgtcgagcatgaagaagcatgtatttactgtctcaattaagctatgaaacttacacaagcacacacgagtgcctg

SEQ ID NO: 37427 - DNA, 1476 bp, Muscodor strobelii
  misc_feature: SGI cDNA ID NO. 572988
  misc_feature: Elevated expression when VOC is produced
  misc_feature: Encodes the peptide sequence at SEQ ID NO 37428
atggcatcaaataagctggagcccgctccagttgagccaaaacaagatggagcagttctcgaacatcaagaagataccatagatgatctgaagaaagatctggaacaccaagatgttgacaagtttggatcatacagcaaagttgatcctaaagagatcgcgctggtgcgcaagatggatagacatctaatgcccgtgctctggctgatgtatttcctgaacttcctggaccgcaacgcaatggtcaatggcaagatcaatgatcttgacaaagacctgggtctagttggttcgcagtataacacctgtgtcagcatctttttcgtaggctatatcaccgcacaagtgccttcaaacatgatcgttacccgtgtcaggccatcttggtatttatcgttctggacatttgcatgggccatagtgtcaacgctgaactgcttggtaaaggattatcgtggcctcctcgccatccgattggtgctcggacttgctgaagctcccttctatcccggagctctctacattatcagtctcttctacacacgtaaagagacagcaaccagacttgccatattctacactggcaatctacttgcgagtaccttttccggcctcattgctgctggtatatttgccagactcgacggggttcatggcatggagggttggcgatggcttttcttgatacaaggcgcagctactatccttatatcaatagcaggcttcttcattctgccagacaccccccttacgacccgctggctcaccgaggaagaacgtcaactcgcccacaatcgtatagcccgtgacacaacggagaaacgattcacgccagtgagctcctggtccggattatttagtgctgcacgagattatagaacctggttattcaccctcatggctaatctacatctctcagccaatgggttcaagaactacctgcctaccgctgttgcatctttggggttcagcgatactatcacactcgttctgactagtccgccgtacctggtggctacctttgtttctgtagccgtctcttactcttctggtcgattcaatgaacgtacatggcacatcactgcctccaagagcactgccatcgtcggcttcattgtagcaactactacatacaacatcggagctcgatactttgccatcatactattcgtcggctccacatatggtgtgaacaacatcatacttgcatggactgctgctaccgttggtcagacggacgagaagaaagccagtgcactcgcaattgttaatgcgctcggcaacttgtcatttgtgtacacaccttacttgtggactgatgactctgcgccgcttttccatcccgcctgtattgctagcgtgttcttttcatttggggttgtggttacagcctgggcgatgaagagcgttcttatgagggcaaatagaaagatcaaatcgcaggataacgaggctatcaatttctatgcctactga

SEQ ID NO: 37428 - protein, 491 aa, Muscodor strobelii
  misc_feature: SGI Peptide ID NO. 572988
  misc_feature (67)..(435): Pfam Id: PF07690 Pfam Desc: Major Facilitator Superfamily
  misc_feature (21)..(491): NCBI GI: 119492061 Blast Desc: MFS transporter, [Neosartorya fischeri NRRL 181] gi|119411685|gb|EAW21628.1| MFS transporter, [Neosartorya fischeri NRRL 181]
  misc_feature (14)..(491): NCBI GI: 159127710 Blast Desc: MFS transporter, [Aspergillus fumigatus A1163]
  misc_feature (14)..(491): NCBI GI: 70999968 Blast Desc: MFS transporter [Aspergillus fumigatus Af293] gi|66852338|gb|EAL92663.1| MFS transporter, [Aspergillus fumigatus Af293]
  misc_feature (21)..(491): NCBI GI: 238502087 Blast Desc: MFS transporter, [Aspergillus flavus NRRL3357] gi|220691087|gb|EED47435.1| MFS transporter, [Aspergillus flavus NRRL3357]
  misc_feature (20)..(491): NCBI GI: 256728188 Blast Desc: NECHADRAFT_87727 [Nectria haematococca mpVI 77-13-4]
  misc_feature (21)..(444): NCBI GI: 169776816 Blast Desc: [Aspergillus oryzae RIB40] gi|83771610|dbj|BAE61741.1| protein product [Aspergillus oryzae]
  misc_feature (7)..(491): NCBI GI: 261359239 Blast Desc: MFS transporter [Verticillium albo-atrum VaMs.102]
  misc_feature (4)..(491): NCBI GI: 256724254 Blast Desc: [Nectria haematococca mpVI 77-13-4]
  misc_feature (7)..(491): NCBI GI: 46139145 Blast Desc: FG11087.1 [Gibberella zeae PH-1]
  misc_feature (22)..(436): NCBI GI: 67537312 Blast Desc: AN4826.2 [Aspergillus nidulans FGSC A4] gi|40740871|gb|EAA60061.1| AN4826.2 [Aspergillus nidulans FGSC A4] gi|259482320|tpe|CBF76690.1| TPA: MFS transporter, nidulans
  misc_feature: Useful for introducing or modulating the production of volatile compounds
MASNKLEPAPVEPKQDGAVLEHQEDTIDDLKKDLEHQDVDKFGSYSKVDPKEIALVRKMDRHLMPVLWLMYFLNFLDRNAMVNGKINDLDKDLGLVGSQYNTCVSIFFVGYITAQVPSNMIVTRVRPSWYLSFWTFAWAIVSTLNCLVKDYRGLLAIRLVLGLAEAPFYPGALYIISLFYTRKETATRLAIFYTGNLLASTFSGLIAAGIFARLDGVHGMEGWRWLFLIQGAATILISIAGFFILPDTPLTTRWLTEEERQLAHNRIARDTTEKRFTPVSSWSGLFSAARDYRTWLFTLMANLHLSANGFKNYLPTAVASLGFSDTITLVLTSPPYLVATFVSVAVSYSSGRFNERTWHITASKSTAIVGFIVATTTYNIGARYFAIILFVGSTYGVNNIILAWTAATVGQTDEKKASALAIVNALGNLSFVYTPYLWTDDSAPLFHPACIASVFFSFGVVVTAWAMKSVLMRANRKIKSQDNEAINFYAY

SEQ ID NO: 37429 - DNA, 1144 bp, Muscodor strobelii
  misc_feature: SGI EST ID NO. CUFF.89569.0
  misc_feature: Variant of the nucleotide sequence at SEQ ID NO 37427
atgcctggcctgcaatatctccaccacgttagaggatgattttggagcgcgcgtgaactgcagtcaacatgtcgctcacttctctgatataagacgtcgagtcgaacgtgatattgcttagtattgctttcgtcactaattgaattgcttgtttgtacaccgatcacgatacatcaacgatggcatcaaataagctggagcccgctccagttgagccaaaacaagatggagcagttctcgaacatcaagaagataccatagatgatctgaagaaagatctggaacaccaagatgttgacaagtttggatcatacagcaaagttgatcctaaagagatcgcgctggtgcgcaagatggatagacatctaatgcccgtgacacaacggagaaacgattcacgccagtgagctcctggtccggattatttagtgctgcacgagattatagaacctggttattcaccctcatggctaatctacatctctcagccaatgggttcaagaactacctgcctaccgctgttgcatctttggggttcagcgatactatcacactcgttctgactagtccgccgtacctggtggctacctttgtttctgtagccgtctcttactcttctggtcgattcaatgaacgtacatggcacatcactgcctccaagagcactgccatcgtcggcttcattgtagcaactactacatacaacatcggagctcgatactttgccatcatactattcgtcggctccacatatggtgtgaacaacatcatacttgcatggactgctgctaccgttggtcagacggacgagaagaaagccagtgcactcgcaattgttaatgcgctcggcaacttgtcatttgtgtacacaccttacttgtggactgatgactctgcgccgcttttccatcccgcctgtattgctagcgtgttcttttcatttggggttgtggttacagcctgggcgatgaagagcgttcttatgagggcaaatagaaagatcaaatcgcaggataacgaggctatcaatttctatgcctactgaaggacgaagccatagattgtggatgacggatactcttaacgcaaatgcctagtgatttcgagtatctctagctcgttaatctattcatatataacggag

SEQ ID NO: 37430 - DNA, 834 bp, Muscodor strobelii
  misc_feature: SGI cDNA ID NO. 572989
  misc_feature: Encodes the peptide sequence at SEQ ID NO 37431
atgactgagatcgccgggtcagcgactggtgccaactgcgaacgagtctccaacattcttcacaggattacatactttagcttattagaagatttcaatatgaagtctgaccagccctttgcccttctggcttttgttagtctcgccgtcgctctcgatcccggttgcgctcctggtgggaattttgatctaagtaaatgggagcttcagctcccgatcgggaatgggtcgcctcaaatcattccaccagaccagcttgtcgggtgtagtggataccaagaccccgggcatcactatttcttcacggagagcggcgatggtgctctcgttatgaaggcaccaggaagcccagatcaaacacattgtgtcaagttcgccgaaagtgaccactgccgcactgaactcggcgagaaggctacatggagtcccaacaccggcaccaacagattattcgcagatttagtaggaacgaacgtacataatatctgtattggacaagttttccaagctgaaagtggcttcaacaagccatttgctgagctatattataccagcgatggaaaaatccagtttggaacggcgaaagcagctgctggtggcgcaggacaagatcttcagctccttgggacagtaccaatcaacacccgttttacgtatgaggtccgattcgagggtggtcaacttctagcaagaatcaacagcaacccatttcagacactgcggacctacttcaccactcctaaggcgttcttcaaggctggcaactacaatcaagatgtggccaccacagaaaccgccgacctacacttcttccagttgaagattacacattga

SEQ ID NO: 37431 - protein, 277 aa, Muscodor strobelii
  misc_feature: SGI Peptide ID NO. 572989
  misc_feature (62)..(277): Pfam Id: PF08787 Pfam Desc: Alginate lyase
  misc_feature (42)..(277): NCBI GI: 238504747 Blast Desc: conserved [Aspergillus flavus NRRL3357] gi|220689718|gb|EED46068.1| conserved [Aspergillus flavus NRRL3357]
  misc_feature (32)..(277): NCBI GI: 119473637 Blast Desc: NFIA_001460 [Neosartorya fischeri NRRL 181] gi|119406847|gb|EAW16797.1| conserved [Neosartorya fischeri NRRL 181]
  misc_feature (47)..(277): NCBI GI: 256723539 Blast Desc: NECHADRAFT_94021 [Nectria haematococca mpVI 77-13-4]
  misc_feature (48)..(277): NCBI GI: 156062546 Blast Desc: SS1G_01389 [Sclerotinia sclerotiorum 1980] gi|154696725|gb|EDN96463.1| SS1G_01389 [Sclerotinia sclerotiorum 1980]
  misc_feature (52)..(277): NCBI GI: 154304968 Blast Desc: BC1G_08574 [Botryotinia fuckeliana B05.10] gi|150853737|gb|EDN28929.1| BC1G_08574 [Botryotinia fuckeliana B05.10]
  misc_feature (53)..(277): NCBI GI: 29827343 Blast Desc: SAV_802 [Streptomyces avermitilis MA-4680] gi|29604442|dbj|BAC68512.1| [Streptomyces avermitilis MA-4680]
  misc_feature (57)..(277): NCBI GI: 256396593 Blast Desc: Alginate lyase 2 [Catenulispora acidiphila DSM 44928] gi|256362819|gb|ACU76316.1| Alginate lyase 2 [Catenulispora acidiphila DSM 44928]
  misc_feature (40)..(277): NCBI GI: 242760537 Blast Desc: conserved [Talaromyces stipitatus ATCC 10500] gi|218723207|gb|EED22624.1| conserved [Talaromyces stipitatus ATCC 10500]
  misc_feature (52)..(277): NCBI GI: 256390804 Blast Desc: Alginate lyase 2 [Catenulispora acidiphila DSM 44928] gi|256357030|gb|ACU70527.1| Alginate lyase 2 [Catenulispora acidiphila DSM 44928]
  misc_feature (49)..(277): NCBI GI: 212539249 Blast Desc: conserved [Penicillium marneffei ATCC 18224] gi|210069522|gb|EEA23613.1| conserved [Penicillium marneffei ATCC 18224]
MTEIAGSATGANCERVSNILHRITYFSLLEDFNMKSDQPFALLAFVSLAVALDPGCAPGGNFDLSKWELQLPIGNGSPQIIPPDQLVGCSGYQDPGHHYFFTESGDGALVMKAPGSPDQTHCVKFAESDHCRTELGEKATWSPNTGTNRLFADLVGTNVHNICIGQVFQAESGFNKPFAELYYTSDGKIQFGTAKAAAGGAGQDLQLLGTVPINTRFTYEVRFEGGQLLARINSNPFQTLRTYFTTPKAFFKAGNYNQDVATTETADLHFFQLKITH

SEQ ID NO: 37432 - DNA, 150 bp, Muscodor strobelii
  misc_feature: SGI EST ID NO. CUFF.89578.0
  misc_feature: Variant of the nucleotide sequence at SEQ ID NO 37430
cttcaaggctggcaactacaatcaagatgtggccaccacagaaaccgccgacctacacttcttccagttgaagattacacattgataggagcccttcgcgtagagatgttgcattgttcctagaaacctgtagtagacgaagtatcttgg

SEQ ID NO: 37433 - DNA, 1839 bp, Muscodor strobelii
  misc_feature: SGI cDNA ID NO. 572990
  misc_feature: Encodes the peptide sequence at SEQ ID NO 37434
atggatagacaaacaaagctcataccgatattaccccaacccataactggaagcgccacattaaaggatcgaattgcaacgaagagaagacaggtcgatgtggcttgcaattcttgtcgtcgtcaaaaagcaaagtgcgatgctgcaaggcctgcttgtcgtcgatgtactgctagaggtgaaggatgcgtctacgatacagaagagggcgaaactatcgcacttgcgatgaaaagaaaaatcagcacattggagaatgaaaatgctcgataccgagagcttctcgctgcgatctacgatagatcagatgccgacgcagaagagatcttccgccgactgagaatagcacccgatcctttagctgttttagaatctatcaaggcagctgatcttctattgccaaatccatctacaaccgagtgggcaaccaacaagaggctattgaggctcgataacaatgccctgcagaatagcgccatcaaagtacgcgctcagccctggaccacaatcgctggcaatggcatcgtatcggaactcatcacgaatttctttgcttgggacaacgcctacctctttcctgcaatcgatcaaagggcatttgtcgatgatatgaatacaggcgtcgttgaaaaaggggtttggtgtactcctctactcgtgaatgctatatgtgcgcagcgctgtcaaagtgttgagagatcaaaagtgtttggtgccatgactcatcaaaacatggtagagaggtttctgagcgagtccaaaggcctgcttgaccgcgaacaaggccgcgcatctataccgacagtgctagcccttgtgctactgtttctcactaccactgaaactgggcgagatcgggcagcaactatgtatcgcttcgcagcatatgaaatgttgaaacgtctcaaacttgaggctcgattccagcggctcagtacagggtcaatggccagctcaaacgaactggttcgaatatcgagggccctgtggggaatcttcttgctagaaagccgtattgcatatctgtactatcaaccatcaattgtcccaccacctacaatacctcaaatgttttacgagaaccagcatgcaatgttcgacgtacaaggcaatgtcgatgttgttggcgaccgattcggcccttcttcgtacccggttcctgttgtgcccggaatcttaacagctgtctgcaacctttcggtgctattttacgagatcatgcagtatttagtggcgcatgaggactgcaagggaagcccaagcgacttgcatgagaagaacttacaattacttagtatgcatgaaagtgagattgcattcagtcttcttcagggattatctcccgaagagctcttccaaaccgagttcgatcctgccgagtcatctaccgtcaaggatgcttgcttacggcattgccgctctgatactcaattgatcgaatgctacatccgccaatggccaattgattcactagttacgcgtcagttgtacatgtcaatgcaacctctggtactcctgctcgatgagcctgaagcgaaagatctatttacaagggactgtttcatggcccgattatctgctcacaaccttaaagttggtggcttcttcttgcaggcaacacaggcatttgcatgggcgatgaagaaagacatcccagaagctgcgcgcccgtatctagagggttggacgcaagatgttgttaagaaggacttgcctgtcagctttgcaattccgcaacaggacgagattcgtgagctgctggaagatggcggcgaagatgaaaggggtcatatcggagctcagcttggtgctctcattgaaaaatgggcacttgtttag

SEQ ID NO: 37434 - protein, 612 aa, Muscodor strobelii
  misc_feature: SGI Peptide ID NO. 572990
  misc_feature (34)..(72): Pfam Id: PF00172 Pfam Desc: Fungal Zn(2)-Cys(6) binuclear cluster domain
  misc_feature (29)..(336): NCBI GI: 171678591 Blast Desc: protein product [Podospora anserina] gi|170937365|emb|CAP62023.1| protein product [Podospora anserina]
  misc_feature (84)..(336): NCBI GI: 116179200 Blast Desc: [Chaetomium globosum CBS 148.51] gi|88184525|gb|EAQ91993.1| [Chaetomium globosum CBS 148.51]
  misc_feature (28)..(514): NCBI GI: 238506671 Blast Desc: C6 transcription factor, [Aspergillus flavus NRRL3357] gi|220689250|gb|EED45601.1| C6 transcription factor, [Aspergillus flavus NRRL3357]
  misc_feature (6)..(136): NCBI GI: 46115448 Blast Desc: FG03566.1 [Gibberella zeae PH-1]
  misc_feature (24)..(556): NCBI GI: 212535094 Blast Desc: C6 transcription factor, [Penicillium marneffei ATCC 18224] gi|210070102|gb|EEA24192.1| C6 transcription factor, [Penicillium marneffei ATCC 18224]
  misc_feature (28)..(516): NCBI GI: 145248259 Blast Desc: An13g02400 [Aspergillus niger] gi|134081129|emb|CAK41639.1| protein product [Aspergillus niger]
  misc_feature (29)..(380): NCBI GI: 242788306 Blast Desc: conserved [Talaromyces stipitatus ATCC 10500] gi|218721339|gb|EED20758.1| conserved [Talaromyces stipitatus ATCC 10500]
  misc_feature (30)..(355): NCBI GI: 145234901 Blast Desc: An03g02000 [Aspergillus niger] gi|134057775|emb|CAK38170.1| protein product [Aspergillus niger]
  misc_feature (28)..(570): NCBI GI: 242820054 Blast Desc: conserved [Talaromyces stipitatus ATCC 10500] gi|218713904|gb|EED13328.1| conserved [Talaromyces stipitatus ATCC 10500]
  misc_feature (23)..(552): NCBI GI: 121704182 Blast Desc: C6 transcription factor, [Aspergillus clavatus NRRL 1] gi|119398499|gb|EAW08929.1| C6 transcription factor, [Aspergillus clavatus NRRL 1]
MDRQTKLIPILPQPITGSATLKDRIATKRRQVDVACNSCRRQKAKCDAARPACRRCTARGEGCVYDTEEGETIALAMKRKISTLENENARYRELLAAIYDRSDADAEEIFRRLRIAPDPLAVLESIKAADLLLPNPSTTEWATNKRLLRLDNNALQNSAIKVRAQPWTTIAGNGIVSELITNFFAWDNAYLFPAIDQRAFVDDMNTGVVEKGVWCTPLLVNAICAQRCQSVERSKVFGAMTHQNMVERFLSESKGLLDREQGRASIPTVLALVLLFLTTTETGRDRAATMYRFAAYEMLKRLKLEARFQRLSTGSMASSNELVRISRALWGIFLLESRIAYLYYQPSIVPPPTIPQMFYENQHAMFDVQGNVDVVGDRFGPSSYPVPVVPGILTAVCNLSVLFYEIMQYLVAHEDCKGSPSDLHEKNLQLLSMHESEIAFSLLQGLSPEELFQTEFDPAESSTVKDACLRHCRSDTQLIECYIRQWPIDSLVTRQLYMSMQPLVLLLDEPEAKDLFTRDCFMARLSAHNLKVGGFFLQATQAFAWAMKKDIPEAARPYLEGWTQDVVKKDLPVSFAIPQQDEIRELLEDGGEDERGHIGAQLGALIEKWALV

SEQ ID NO: 37435 - DNA, 2037 bp, Muscodor strobelii
  misc_feature: SGI EST ID NO. CUFF.89606.2
  misc_feature: Variant of the nucleotide sequence at SEQ ID NO 37433
cccaatgctcagtaattaccgggaacaagatcttttgacccgacacaatggatagacaaacaaagctcataccgatattaccccaacccataactggaagcgccacattaaaggatcgaattgcaacgaagagaagacaggtcgatgtggcttgcaattcttgtcgtcgtcaaaaagcaaagtgcgatgctgcaaggcctgcttgtcgtcgatgtactgctagaggtgaaggatgcgtctacgatacagaagagggcgaaactatcgcacttgcgatgaaaagaaaaatcagcacattggagaatgaaaatgctcgataccgagagcttctcgctgcgatctacgatagatcagatgccgacgcagaagagatcttccgccgactgagaatagcacccgatcctttagctgttttagaatctatcaaggcagctgatcttctattgccaaatccatctacaaccgagtgggcaaccaacaagaggctattgaggctcgataacaatgccctgcagaatagcgccatcaaagtacgcgctcagccctggaccacaatcgctggcaatggcatcgtatcggaactcatcacgaatttctttgcttgggacaacgcctacctctttcctgcaatcgatcaaagggcatttgtcgatgatatgaatacaggcgtcgttgaaaaaggggtttggtgtactcctctactcgtgaatgctatatgtgcgcagcgctgtcaaagtgttgagagatcaaaagtgtttggtgccatgactcatcaaaacatggtagagaggtttctgagcgagtccaaaggcctgcttgaccgcgaacaaggccgcgcatctataccgacagtgctagcccttgtgctactgtttctcactaccactgaaactgggcgagatcgggcagcaactatgtatcgcttcgcagcatatgaaatgttgaaacgtctcaaacttgaggctcgattccagcggctcagtacagggtcaatggccagctcaaacgaactggttcgaatatcgagggccctgtggggaatcttcttgctagaaagccgtattgcatatctgtactatcaaccatcaattgtcccaccacctacaatacctcaaatgttttacgagaaccagcatgcaatgttcgacgtacaaggcaatgtcgatgttgttggcgaccgattcggcccttcttcgtacccggttcctgttgtgcccggaatcttaacagctgtctgcaacctttcggtgctattttacgagatcatgcagtatttagtggcgcatgaggactgcaagggaagcccaagcgacttgcatgtaagaaagtcatactatgctaggctaaggcaattcagaacgcaactcccaaaaaggtttctagttgaagagaactttaccccctcaacatgtttccttcgtatgcatgaaagtgagattgcattcagtcttcttcagggattatctcccgaagagctcttccaaaccgagttcgatcctgccgagtcatctaccgtcaaggatgcttgcttacggcattgccgctctgatactcaattgatcgaatgctacatccgccaatggccaattgattcactagttacgcgtcagttgtacatgtcaatgcaacctctggtactcctgctcgatgagcctgaagcgaaagatctatttacaagggactgtttcatggcccgattatctgctcacaaccttaaagttggtggcttcttcttgcaggcaacacaggcatttgcatgggcgatgaagaaagacatcccagaagctgcgcgcccgtatctagagggttggacgcaagatgttgttaagaaggacttgcctgtcagctttgcaattccgcaacaggacgagattcgtgagctgctggaagatggcggcgaagatgaaaggggtcatatcggagctcagcttggtgctctcattgaaaaatgggcacttgtttagccggaatgtaatgaataaaacacaataatgataagctatctatctgaatgcgtagcatgttggtcattcttcc

SEQ ID NO: 37436 - DNA, 1422 bp, Muscodor strobelii
  misc_feature: SGI cDNA ID NO. 572991
  misc_feature: Encodes the peptide sequence at SEQ ID NO 37437
atgctgaagaaacaaagcgcatgtgacagatgccataaacaaaaagaaaagtgcgtcctgttcgccggtgcatcgtcatgtgtactatgccgagagacacaatcaccgtgtgcgtacctacgcgagcgacgccgtaggggccgatggccgactgctcagaagcttggcccgacgacctcagttggtgtttgggacatcgggatagcctcgaagcaaccaagcccagatgtcttagaggaagacaagtatattgcagaaagggcagtcgcagaacagagccgagcataccaacttcgccttgtcttctctcaatcaactctgccgagtccattcgacactgatcccgacatcctcgacaagttcgctgcgaggtacacttgtttcatgattgggccaacatttgctccgcaattccgatccacgctgcagctcgcctacgcctgttcaccggggctccttcaggatatctttacgattttctggaccgaaattcaggatggcacgtaccagacaagcccggtgcatcaatttaatgtcgagaaaagcgcggcatctttgcgtatgttacgtacggcgcgagtagccaaactgcaggatgccttcgctatcatggccttggcgcagagcttggccgcatttgagctgctcactcacgtcacaggctcgccgttgatattgcagttctcgttatcagtcatccagccctggtatcccgaacttgcgctgcatgcaccattcgatcctgtcattatcggattgattctgtgggatactgtcaattgtctgattaaacggcagatccccgtcatcaagtttcggccaagaaattctcaacccattgatcatgttgcagggctatgtatgactctgctgccgctgctccacgatttgtgtgtcgtcgctagcgtttcggcgcgcgagtctcagtgcaactcagaaaccgacatcgatgccctatcgcaaatcgagcagagcatcttagcatggacgcctcaaataccaccagatgcggtaactaattattccccgcaagagctgatagcaatgacgacgcaagcctctatgtataaaacaggtgctttgctcgttgcgcatcgcctcacttcgccaatcggctcgcaggatgatatcgccgcttcatatgcaagcactatcttgctggaaatgtccacgtatttgtctatgtttgggtcggatgccaccttgccctttgtcgcatttcctatattcatggctgcacttgagattccgaatgtctcaagtgatatttggatacacgtcaacctgctagcgaaagccccgaaatgcgctgccggattatctgcgactattgattccatctgggagatgaggcgtgctggatttatgggttatctctttgatctcgttgaatcgtactcgaatattgtacttgtaccataa

SEQ ID NO: 37437 - protein, 473 aa, Muscodor strobelii
  misc_feature: SGI Peptide ID NO. 572991
  misc_feature (4)..(473): NCBI GI: 259485785 Blast Desc: TPA: Zn(II)2Cys6 transcription factor (Eurofung) [Aspergillus nidulans FGSC A4]
  misc_feature (48)..(473): NCBI GI: 238500315 Blast Desc: conserved [Aspergillus flavus NRRL3357] gi|220693145|gb|EED49491.1| conserved [Aspergillus flavus NRRL3357]
  misc_feature (108)..(473): NCBI GI: 67525585 Blast Desc: AN3250.2 [Aspergillus nidulans FGSC A4] gi|40743969|gb|EAA63151.1| AN3250.2 [Aspergillus nidulans FGSC A4]
  misc_feature (108)..(423): NCBI GI: 255933179 Blast Desc: Pc12g12460 [Penicillium chrysogenum Wisconsin 54-1255] gi|211582679|emb|CAP80873.1| Pc12g12460 [Penicillium chrysogenum Wisconsin 54-1255]
  misc_feature (3)..(416): NCBI GI: 189190646 Blast Desc: [Pyrenophora tritici-repentis Pt-1C-BFP] gi|187973268|gb|EDU40767.1| [Pyrenophora tritici-repentis Pt-1C-BFP]
  misc_feature (4)..(468): NCBI GI: 67536912 Blast Desc: AN4626.2 [Aspergillus nidulans FGSC A4] gi|40741238|gb|EAA60428.1| AN4626.2 [Aspergillus nidulans FGSC A4] gi|259482539|tpe|CBF77118.1| TPA: Zn(II)2Cys6 transcription
  misc_feature (5)..(462): NCBI GI: 255940816 Blast Desc: Pc16g08580 [Penicillium chrysogenum Wisconsin 54-1255] gi|211585800|emb|CAP93528.1| Pc16g08580 [Penicillium chrysogenum Wisconsin 54-1255]
  misc_feature (167)..(469): NCBI GI: 238504709 Blast Desc: conserved [Aspergillus flavus NRRL3357] gi|220689699|gb|EED46049.1| conserved [Aspergillus flavus NRRL3357]
  misc_feature (172)..(464): NCBI GI: 115492711 Blast Desc: [Aspergillus terreus NIH2624] gi|114197843|gb|EAU39543.1| [Aspergillus terreus NIH2624]
  misc_feature (3)..(464): NCBI GI: 154290953 Blast Desc: BC1G_15540 [Botryotinia fuckeliana B05.10] gi|150847176|gb|EDN22369.1| BC1G_15540 [Botryotinia fuckeliana B05.10]
MLKKQSACDRCHKQKEKCVLFAGASSCVLCRETQSPCAYLRERRRRGRWPTAQKLGPTTSVGVWDIGIASKQPSPDVLEEDKYIAERAVAEQSRAYQLRLVFSQSTLPSPFDTDPDILDKFAARYTCFMIGPTFAPQFRSTLQLAYACSPGLLQDIFTIFWTEIQDGTYQTSPVHQFNVEKSAASLRMLRTARVAKLQDAFAIMALAQSLAAFELLTHVTGSPLILQFSLSVIQPWYPELALHAPFDPVIIGLILWDTVNCLIKRQIPVIKFRPRNSQPIDHVAGLCMTLLPLLHDLCVVASVSARESQCNSETDIDALSQIEQSILAWTPQIPPDAVTNYSPQELIAMTTQASMYKTGALLVAHRLTSPIGSQDDIAASYASTILLEMSTYLSMFGSDATLPFVAFPIFMAALEIPNVSSDIWIHVNLLAKAPKCAAGLSATIDSIWEMRRAGFMGYLFDLVESYSNIVLVP

SEQ ID NO: 37438 - DNA, 1956 bp, Muscodor strobelii
  misc_feature: SGI EST ID NO. CUFF.89590.0
  misc_feature: Variant of the nucleotide sequence at SEQ ID NO 37436
catgttattgaaagactcaatgccaattgaaaagggtatcgttattaagcgtacaataaatgtacctatcatttgtttgctgacggccgggcacgtgaccagtatttataggggatatggcgcatggctgggctcgccaggcagcgatgtattgttcgtctgcgcaatgtatctctctgaccaccactgaagcattgcatgcagaaatgctgaagaaacaaagcgcatgtgacagatgccataaacaaaaagaaaagtgcgtcctgttcgccggtgcatcgtcatgtgtactatgccgagagacacaatcaccgtgtgcgtacctacgcgagcgacgccgtaggggccgatggccgactgctcagaagcttggcccgacgacctcagttggtgtttgggacatcgggatagcctcgaagcaaccaagcccagatgtcttagaggaagacaagtatattgcagaaagggcagtcgcagaacagagccgagcataccaacttcgccttgtcttctctcaatcaactctgccgagtccattcgacactgatcccgacatcctcgacaagttcgctgcgaggtacacttgtttcatgattgggccaacatttgctccgcaattccgatccacgctgcagctcgcctacgcctgttcaccggggctccttcaggatatctttacgattttctggaccgaaattcaggatggcacgtaccagacaagcccggtgcatcaatttaatgtcgagaaaagcgcggcatctttgcgtatgttacgtacggcgcgagtagccaaactgcaggatgccttcgctatcatggccttggcgcagagcttggccgcatttgagctgctcactcacgtcacaggctcgccgttgatattgcagttctcgttatcagtcatccagccctggtatcccgaacttgcgctgcatgcaccattcgatcctgtcattatcggattgattctgtgggatactgtcaattgtctgattaaacggcagatccccgtcatcaagtttcggccaagaaattctcaacccattgatcatgttgcagggctatgtatgactctgctgccgctgctccacgatttgtgtgtcgtcgctagcgtttcggcgcgcgagtctcagtgcaactcagaaaccgacatcgatgccctatcgcaaatcgagcagagcatcttagcatggacgcctcaaataccaccagatgcggtaactaattattccccgcaagagctgatagcaatgacgacgcaagcctctatgtataaaacaggtgctttgctcgttgcgcatcgcctcacttcgccaatcggctcgcaggatgatatcgccgcttcatatgcaagcactatcttgctggaaatgtccacgtatttgtctatgtttgggtcggatgccaccttgccctttgtcgcatttcctatattcatggctgcacttgagattccgaatgtctcaagtgatatttggatacacgtcaacctgctagcgaaagccccgaaatgcgctgccggattatctgcgactattgattccatctgggagatgaggcgtgctggatttatgggttatctctttgatctcgttgaatcgtactcgaatattgtacttgtaccataattaatcaaattaatcatgcatgggttattataatcttatgcgactttcatccggcactgttcactttgctccactaagcttttcagtgttccggcactttggctctcaacaagcttgacaagatctttacgtacaatgtgacttcttctgcatactagatcggagccaagtccgtccccactgactgctaagttgatgttgattggtgaactggctccgaggttggctctcgataaagcgcttgcatgaagcccttgttcccggctcttctcccgattaacgtactgtattggcgccgaaatggcaagactggtagcagagatgaaat

SEQ ID NO: 37439 - DNA, 4326 bp, Muscodor strobelii
  misc_feature: SGI cDNA ID NO. 572992
  misc_feature: Encodes the peptide sequence at SEQ ID NO 37440
atgtcgccacaagcagagccgaactgccaggctctcaacttggcagatggcctgaaatgtgccgaaacagcagtggtatgggatgacctattctgcaggcttcatggcagacaatgctatggtctgtacgccggatacaagaagaggaacgcgcagctagatgcattagctaaacatgcccctcaatttctcgtttccaaaggcacgcctcttgccaatgaagatttcgaagatgttgaggatgagactactctcaatcagatacacgctcacttattcaaggagtatgtcctcctcggccaagtcattgacgctaggaagcttcatcacaagcatttcttcccgttacagttggattatggacaccaagcatatttagacacactgtcaaatagaagacacattgttcttcgtgcactggaaaagattacgaagcgcacagttctgttgctatacgccaaagagaagtggtacgattgggttgacgaagtccagcaaatcgaagagatgaatcgcgagaaggagtctaaaaagatcaaactcgaagcagccatgttcaaacgacactggaagaagatgcaagcgcgtgtgaaagtccaacgcgagaaggaacacaagcaaaagcaagatgctttccttgacaaggcctaccaggatcgccttagtgcagcgagcgaaagtgaggaaataatggagacttgggatccaaccgaagacttgatagaagatgaacattgtcgatatgttgacttgatcaaacattttctatggatggacatattaagtgaggaagaagagaagggcccagacacgggcatcgctgcgacgttggctactaacgtcaacaacatgagcttatccgagcccactgcctccagaaagtctaagaagaaatccaagtccaaaaactctcaaccgccaagcaaaatcaccaaagaagtcacatcacaaggtgctgccgatagccaatatcaagagaagagcaatggccaagttcgaattctagcgatgatggataccgaagaggtcagcacagatggcaatgcggaaccagacagtcgaaatattgagacagaagaagagatgcggaagcgcctgaaagaaggcgtcgagaaaaactacgatgaggtccgcggacctattctagtcggctccctcgagactccccacggaacacatgagaaaacggcaccaatggaggacgacgagatagagtcattgatgaaagatatcaaggagatcaaacttcttcttttctgtcgattgcttttatcacatgcgtctctgctcccagccgcactacgggcccgaagcgtagacgaatttctgaatgatactgagatttcaggacctgatctacgtaacttgtgcttgaaggtcgagcagccgagtctccaagacgtcagagacgcttgtgctgatctgctccgcggggacaaagaagagatccatgacgaagaggaatacgaatatgaggacctctcattcgaagatattatggtgcacgataagcattatggccacttgcaagggcccgagtggtattacgagaacatggttgtacagagatcgaaacccgtgggagaacctgtcacggattcaggagcgtttcttcgctcgacgccgaatagtttgaagaggacaaaggtccagatctgtggaaagggtatttggaactactccagtgcatcatcaatgtcacgggagggctggctacaattctctattttggccaaaggatgtgacctccatcatgcagttgagctgtgtagaaattgggacgagttctctcagctcaactttctggcttcttggcaatatttcccggcgtcaaattgggtatcctggggaactgatcggataaccaaacaattgcatgacctaggtttctttcctttctttacggactactccgcgaagagctgcagtcattactttcaaggcggcggcccacgaagccaggcaaggcggacacaccatgtggtcgaggccaaaaatatcatagtaggacacatgaagagaaatgactctgctacacgtcgatttctccagtactgcagtatgcgcacaggagagttgctgctggcagtgagagatggcagaaccgataaaatcatcatagcacctcgtgacaaagaatcgctttggaccctacggtccaagaagggcataggacgcgctgcgaagaatgaatgggaaatcgatctcgagatcgggcccgattatttcgaaatggttaaccgctgccgcaaatggcaccttggttttgatgattactatgaagtgtggttatgggattttgtgccgggtctggagggcaatatcctctacaacacagtcgtcgaagagcttcgcaaagcatggcggatcacgaaacctgtcgacgtatacaatcatcaggagcccttgttgcgctccctgacgcggaatcgtgattctaatcgggtacgccccataaagaacggtgaacaggtcttgagcctctgggatgatgcccatcacccagataacatcttcatcacgacagatgccattagccggaaaacttggactattcaaggcgatggagcacagaagctaccaccacatacggtgtacagtgaagccgatgcggccgaagacgctgttttgttccctgatgaattagtatcacctgatcgcaatacgccgttcaagccgcttcgcaatgcaattacgaagctagaagacggatttggtacaacctctcgctacatggccaagcgggccagagatctgagctttattacgttgcagggtcgtttgccacccggcgtttctactatttccgagtcatccttcgggtatgaaaatgacgatgtttctgtcaatcatgaggtagatgagctccaaggcgaagacaaggagatcacaaagcactggcttttgccgttgatatggcagcatcggatcacggcactgaggcaaggccacattgagaacaacaagatgaaaacacttgcaaatgtcgggctgctctcgctatcttccgggaagatacgagaaacaccaacagatgcagagtatgctaaaagtatgagggacatggacagactaatgcttatggaaaaagaccgtggcgatgccttattagaagctttccacgaaggggatctcgagcccggtggccctgaaagatacaagcagacatgtgctatcatttctggcatcttgaatcagcaaaagtgtgacgacaacgatagctggttttggttcactctggagctcttggaatggcttagcgtcagaacggaccatagggaatatgcccaagacaatgcggctccttggccacatccattcatcactcaagatatcgtcaaagcgtgggcttatatggctattttcttcccagatcttgagcagtgtcaacttgcttctcgatttttcaagtcctcaagtggtcaacaatacagtagatcacctctacacaatccaagtcaatgcgcctcgactctccctgatgctcgtacaaaaacaagctttcggcaccgaccaaagcaattttgggaagattgggatgttatcctaaaagaagccgagaagaacaagaaatattatgcagatgccttccccccggactggggcgtcgtggttcgacctatacttgcaaaatgtgagagtgctctgtcggccctaaatcttaaccctatcgcaagtcgatccgctgacgtcttccaagtgtatcttgctggcattattgcccccatagaaatgcagaacagtcctctagtctgtccaggtttcgcgatagctaacacagagcctcaccgtccggggaaggtggacatgttcatcgattatgcagatcgactgaaagcatcttactttcctccggttccagtatcgcccaatgactttccattgctattgccattagctcaagacttcgcagcgaagcatgaaacagcgcgcttcgcaatcctccgtctctggtccgcaccacatttttatcctgccatgctaggtgatcacaatcgaagaggcacagcatttctcgatagcgctgcacgctcgtggagatggaacttcataggtaaagatattcctatttctgaatggagtatgtataacatcttgaagctccgtcttgatcttctcaaggaacaacttggcgatcgcgttgcacatcgagacgacgtgattctcgtcatgggtgtgagtcagctcgagttacttcgatatgccacggctgtcacgttcgcaatccagactaaaccatggtaccgcgagttcgatctctggaagagttttgtcaatgtagacattgatttcgtaagaacgttaaatccttactggttaggttga

SEQ ID NO: 37440 - protein, 1441 aa, Muscodor strobelii
  misc_feature: SGI Peptide ID NO. 572992
  misc_feature (19)..(897): NCBI GI: 256726317 Blast Desc: NECHADRAFT_94709 [Nectria haematococca mpVI 77-13-4]
  misc_feature (5)..(896): NCBI GI: 46126737 Blast Desc: FG07746.1 [Gibberella zeae PH-1]
  misc_feature (9)..(1439): NCBI GI: 258564414 Blast Desc: [Uncinocarpus reesii 1704] gi|237908459|gb|EEP82860.1| [Uncinocarpus reesii 1704]
  misc_feature (45)..(1439): NCBI GI: 239615330 Blast Desc: conserved [Ajellomyces dermatitidis ER-3]
  misc_feature (41)..(881): NCBI GI: 156059058 Blast Desc: SS1G_03541 [Sclerotinia sclerotiorum 1980] gi|154701328|gb|EDO01067.1| SS1G_03541 [Sclerotinia sclerotiorum 1980]
  misc_feature (118)..(919): NCBI GI: 261188852 Blast Desc: conserved [Ajellomyces dermatitidis SLH14081] gi|239591981|gb|EEQ74562.1| conserved [Ajellomyces dermatitidis SLH14081]
  misc_feature (547)..(1439): NCBI GI: 154272005 Blast Desc: [Ajellomyces capsulatus NAm1] gi|150408842|gb|EDN04298.1| [Ajellomyces capsulatus NAm1]
  misc_feature (460)..(881): NCBI GI: 154294155 Blast Desc: BC1G_13968 [Botryotinia fuckeliana B05.10] gi|150845015|gb|EDN20208.1| BC1G_13968 [Botryotinia fuckeliana B05.10]
  misc_feature (1083)..(1440): NCBI GI: 256726316 Blast Desc: NECHADRAFT_104871 [Nectria haematococca mpVI 77-13-4]
  misc_feature (784)..(1439): NCBI GI: 240276585 Blast Desc: conserved [Ajellomyces capsulatus H143]
MSPQAEPNCQALNLADGLKCAETAVVWDDLFCRLHGRQCYGLYAGYKKRNAQLDALAKHAPQFLVSKGTPLANEDFEDVEDETTLNQIHAHLFKEYVLLGQVIDARKLHHKHFFPLQLDYGHQAYLDTLSNRRHIVLRALEKITKRTVLLLYAKEKWYDWVDEVQQIEEMNREKESKKIKLEAAMFKRHWKKMQARVKVQREKEHKQKQDAFLDKAYQDRLSAASESEEIMETWDPTEDLIEDEHCRYVDLIKHFLWMDILSEEEEKGPDTGIAATLATNVNNMSLSEPTASRKSKKKSKSKNSQPPSKITKEVTSQGAADSQYQEKSNGQVRILAMMDTEEVSTDGNAEPDSRNIETEEEMRKRLKEGVEKNYDEVRGPILVGSLETPHGTHEKTAPMEDDEIESLMKDIKEIKLLLFCRLLLSHASLLPAALRARSVDEFLNDTEISGPDLRNLCLKVEQPSLQDVRDACADLLRGDKEEIHDEEEYEYEDLSFEDIMVHDKHYGHLQGPEWYYENMVVQRSKPVGEPVTDSGAFLRSTPNSLKRTKVQICGKGIWNYSSASSMSREGWLQFSILAKGCDLHHAVELCRNWDEFSQLNFLASWQYFPASNWVSWGTDRITKQLHDLGFFPFFTDYSAKSCSHYFQGGGPRSQARRTHHVVEAKNIIVGHMKRNDSATRRFLQYCSMRTGELLLAVRDGRTDKIIIAPRDKESLWTLRSKKGIGRAAKNEWEIDLEIGPDYFEMVNRCRKWHLGFDDYYEVWLWDFVPGLEGNILYNTVVEELRKAWRITKPVDVYNHQEPLLRSLTRNRDSNRVRPIKNGEQVLSLWDDAHHPDNIFITTDAISRKTWTIQGDGAQKLPPHTVYSEADAAEDAVLFPDELVSPDRNTPFKPLRNAITKLEDGFGTTSRYMAKRARDLSFITLQGRLPPGVSTISESSFGYENDDVSVNHEVDELQGEDKEITKHWLLPLIWQHRITALRQGHIENNKMKTLANVGLLSLSSGKIRETPTDAEYAKSMRDMDRLMLMEKDRGDALLEAFHEGDLEPGGPERYKQTCAIISGILNQQKCDDNDSWFWFTLELLEWLSVRTDHREYAQDNAAPWPHPFITQDIVKAWAYMAIFFPDLEQCQLASRFFKSSSGQQYSRSPLHNPSQCASTLPDARTKTSFRHRPKQFWEDWDVILKEAEKNKKYYADAFPPDWGVVVRPILAKCESALSALNLNPIASRSADVFQVYLAGIIAPIEMQNSPLVCPGFAIANTEPHRPGKVDMFIDYADRLKASYFPPVPVSPNDFPLLLPLAQDFAAKHETARFAILRLWSAPHFYPAMLGDHNRRGTAFLDSAARSWRWNFIGKDIPISEWSMYNILKLRLDLLKEQLGDRVAHRDDVILVMGVSQLELLRYATAVTFAIQTKPWYREFDLWKSFVNVDIDFVRTLNPYWLG

SEQ ID NO: 37441 - DNA, 1555 bp, Muscodor strobelii
  misc_feature: SGI EST ID NO. CUFF.89599.0
  misc_feature: Variant of the nucleotide sequence at SEQ ID NO 37439
ccaagttcgaattctagcgatgatggataccgaagaggtcagcacagatggcaatgcggaaccagacagtcgaaatattgagacagaagaagagatgcggaagcgcctgaaagaaggcgtcgagaaaaactacgatgaggtccgcggacctattctagtcggctccctcgagactccccacggaacacatgagaaaacggcaccaatggaggacgacgagatagagtcattgatgaaagatatcaaggagatcaaacttcttcttttctgtcgattgcttttatcacatgcgtctctgctcccagccgcactacgggcccgaagcgtagacgaatttctgaatgatactgagatttcaggacctgatctacgtaacttgtgcttgaaggtcgagcagccgagtctccaagacgtcagagacgcttgtgctgatctgctccgcggggacaaagaagagatccatgacgaagaggaatacgaatatgaggacctctcattcgaagatattatggtgcacgataagcattatggccacttgcaagggcccgagtggtattacgagaacatggttgtacagagatcgaaacccgtgggagaacctgtcacggattcaggagcgtttcttcgctcgacgccgaatagtttgaagaggacaaaggtccagatctgtggaaagggtatttggaactactccagtgcatcatcaatgtcacgggagggctggctacaattctctattttggccaaaggatgtgacctccatcatgcagttgagctgtgtagaaattgggacgagttctctcagctcaactttctggcttcttggcaatatttcccggcgtcaaattgggtatcctggggaactgatcggataaccaaacaattgcatgacctaggtttctttcctttctttacggactactccgcgaagagctgcagtcattactttcaaggcggcggcccacgaagccaggcaaggcggacacaccatgtggtcgaggccaaaaatatcatagtaggacacatgaagagaaatgactctgctacacgtcgatttctccagtactgcagtatgcgcacaggagagttgctgctggcagtgagagatggcagaaccgataaaatcatcatagcacctcgtgacaaagaatcgctttggaccctacggtccaagaagggcataggacgcgctgcgaagaatgaatgggaaatcgatctcgagatcgggcccgattatttcgaaatggttaaccgctgccgcaaatggcaccttggttttgatgattactatgaagtgtggttatgggattttgtgccgggtctggagggcaatatcctctacaacacagtcgtcgaagagcttcgcaaagcatggcggatcacgaaacctgtcgacgtatacaatcatcaggagcccttgttgcgctccctgacgcggaatcgtgattctaatcgggtacgccccataaagaacggtgaacaggtcttgagcctctgggatgatgcccatcacccagataacatcttcatcacgacagatgccattagccggaaa

SEQ ID NO: 37442 - DNA, 909 bp, Muscodor strobelii
  misc_feature: SGI cDNA ID NO. 572993
  misc_feature: Reduced expression when VOC is produced
  misc_feature: Encodes the peptide sequence at SEQ ID NO 37443
atgatgctagcgcaagtgatcaaggcgtgcccgtcggcagacgacgacttccagcccttgaacgaataccaggcgcagacgcccgacaccttcttcgacctcgagggcgccgcgcctgtgctgcactaccacgacaagagcaccaaggcctgggtgtcggccggacaggctgatcagctcttcatcttcgattctacagccgcagcacccacggcgcccgagtcgcaggcgctcgacgacgcgaccaggcaggccacgcgcgaggagaaggacgtcgaggtctttgtctcttcccggcatctggttctcttctctcacagcacgggaaccggcgtcgagattccctacccagccatcaccctccacgccatcaagaagttcaaccacggcgacactagcaccagcttcgtcggtgtctacatgcagctcgagctcgccggctccgaccctgacgacgacgagtccttcgaccccatcgagctgaccctcatcccctccgacttgaattcggaacgcgcaaacgccctcttcaaccagatctcggcctgctccaacctcaacccagacccccacaacgacgacgacgaagacgacgagttcaacgccgaccacatcatcttcgagagcagcgtcgagcccgccattgccatcgatggtctgcctggtgtcttgcagggcaacgctacgggaggactgccccctcccatgcccggcagctcaggctggattacagccgataatgtagaccaatacttcgaccaagacggaaactggattggtgaggaaggagtaagcggcgagcttggagatggcgctggtcgtgtccgtggtcgtgacgaggcggagcaggatggtgctaatggtgtggaggaacaagacggtgatgccaagaggtccaggacggagtag

SEQ ID NO: 37443 - protein, 302 aa, Muscodor strobelii
  misc_feature: SGI Peptide ID NO. 572993
  misc_feature (2)..(302): NCBI GI: 261359141 Blast Desc: conserved [Verticillium albo-atrum VaMs.102]
  misc_feature (2)..(302): NCBI GI: 46123207 Blast Desc: FG05981.1 [Gibberella zeae PH-1]
  misc_feature (3)..(302): NCBI GI: 85098575 Blast Desc: NCU03588 [Neurospora crassa OR74A] gi|28922142|gb|EAA31396.1| [Neurospora crassa OR74A]
  misc_feature (10)..(302): NCBI GI: 39972021 Blast Desc: MGG_07326 [Magnaporthe grisea 70-15] gi|145019837|gb|EDK04065.1| MGG_07326 [Magnaporthe grisea 70-15]
  misc_feature (3)..(302): NCBI GI: 38566791 Blast Desc: [Neurospora crassa]
  misc_feature (2)..(302): NCBI GI: 256731089 Blast Desc: NECHADRAFT_96347 [Nectria haematococca mpVI 77-13-4]
  misc_feature (1)..(302): NCBI GI: 164419157 Blast Desc: FPD1 [Fusarium oxysporum f. cubense]
  misc_feature (1)..(302): NCBI GI: 46575804 Blast Desc: [Fusarium oxysporum f. sp. lycopersici]
  misc_feature (1)..(302): NCBI GI: 164419155 Blast Desc: FPD1 [Fusarium oxysporum f. cubense]
  misc_feature (2)..(302): NCBI GI: 116198859 Blast Desc: CHGG_07585 [Chaetomium globosum CBS 148.51] gi|88178864|gb|EAQ86332.1| CHGG_07585 [Chaetomium globosum CBS 148.51]
  misc_feature: Useful for introducing or modulating the production of volatile compounds
MMLAQVIKACPSADDDFQPLNEYQAQTPDTFFDLEGAAPVLHYHDKSTKAWVSAGQADQLFIFDSTAAAPTAPESQALDDATRQATREEKDVEVFVSSRHLVLFSHSTGTGVEIPYPAITLHAIKKFNHGDTSTSFVGVYMQLELAGSDPDDDESFDPIELTLIPSDLNSERANALFNQISACSNLNPDPHNDDDEDDEFNADHIIFESSVEPAIAIDGLPGVLQGNATGGLPPPMPGSSGWITADNVDQYFDQDGNWIGEEGVSGELGDGAGRVRGRDEAEQDGANGVEEQDGDAKRSRTE

SEQ ID NO: 37444 - DNA, 537 bp, Muscodor strobelii
  misc_feature: SGI cDNA ID NO. 572994
  misc_feature: Encodes the peptide sequence at SEQ ID NO 37445
atggtgactatgcgcgacgaccgcacacatccgctcctggcgcaggttccactaacagtctcgccatttgtcactttacccactgccgccaccttgccctacacatacaagaacatgccgtcaacattaccgccatcatccacaggcataactggcgctacagatgagaagccaaaatatgtcgtctcccagtctggccatgccgctcatcccgacgacatcatcgcctcttgcaacgccctgcgcgcgcacatcacccagatgcaggaggacgccgatcgcgagttgcgccagctcgacgagcgcatccgcgcccgtgagctcgccgagaagcgccgcgtcgcccctgggtggctagacagtgatgccaggttgctcgagcccgagaggaagccaggctctctgcctgcggcatccgatggcggggacgtgtctagccaatttgccgagatgagcattgccgagcgcgagggcgccagcgagatggccgtcgatcagggtgaggagctcgatcgtgcctttggcggttggaagtga

SEQ ID NO: 37445 - protein, 178 aa, Muscodor strobelii
  misc_feature: SGI Peptide ID NO. 572994
  misc_feature (4)..(175): NCBI GI: 171692977 Blast Desc: protein product [Podospora anserina] gi|170946437|emb|CAP73238.1| protein product [Podospora anserina]
  misc_feature (4)..(176): NCBI GI: 156063340 Blast Desc: SS1G_01786 [Sclerotinia sclerotiorum 1980] gi|154697122|gb|EDN96860.1| SS1G_01786 [Sclerotinia sclerotiorum 1980]
  misc_feature (6)..(176): NCBI GI: 256731486 Blast Desc: NECHADRAFT_73879 [Nectria haematococca mpVI 77-13-4]
  misc_feature (4)..(175): NCBI GI: 85098579 Blast Desc: NCU03589 [Neurospora crassa OR74A] gi|28922143|gb|EAA31397.1| conserved [Neurospora crassa OR74A] gi|38566790|emb|CAE76100.1| [Neurospora crassa]
  misc_feature (4)..(176): NCBI GI: 261359140 Blast Desc: conserved [Verticillium albo-atrum VaMs.102]
  misc_feature (4)..(134): NCBI GI: 116198857 Blast Desc: CHGG_07584 [Chaetomium globosum CBS 148.51] gi|88178863|gb|EAQ86331.1| CHGG_07584 [Chaetomium globosum CBS 148.51]
  misc_feature (7)..(176): NCBI GI: 238839578 Blast Desc: conserved [Microsporum canis CBS 113480]
  misc_feature (7)..(176): NCBI GI: 242793094 Blast Desc: conserved [Talaromyces stipitatus ATCC 10500] gi|218718680|gb|EED18100.1| conserved [Talaromyces stipitatus ATCC 10500]
  misc_feature (8)..(176): NCBI GI: 255956189 Blast Desc: Pc21g18550 [Penicillium chrysogenum Wisconsin 54-1255] gi|211590558|emb|CAP96752.1| Pc21g18550 [Penicillium chrysogenum Wisconsin 54-1255]
  misc_feature (8)..(176): NCBI GI: 145237594 Blast Desc: An07g03610 [Aspergillus niger] gi|134075917|emb|CAK39375.1| protein product [Aspergillus niger]
MVTMRDDRTHPLLAQVPLTVSPFVTLPTAATLPYTYKNMPSTLPPSSTGITGATDEKPKYVVSQSGHAAHPDDIIASCNALRAHITQMQEDADRELRQLDERIRARELAEKRRVAPGWLDSDARLLEPERKPGSLPAASDGGDVSSQFAEMSIAEREGASEMAVDQGEELDRAFGGWK

SEQ ID NO: 37446 - DNA, 4638 bp, Muscodor strobelii
  misc_feature: SGI EST ID NO. CUFF.89808.0
  misc_feature: Variant of the nucleotide sequence at SEQ ID NO 37444
ccgcaacctgcaggtgcaccactaaacatcacatcacccgtcgcatttcgctcaaactctcaacctcgtctcacgaccaaattcagactcagtacagttggcctcaacatcaaatgtacacctcatgacaagacattctttttttgcgttgagctcatctatataacacctcatagacacaatggtgactatgcgcgacgaccgcacacatccgctcctggcgcaggttccactaacagtctcgccatttgtcactttacccactgccgccaccttgccctacacatacaagaacatgccgtcaacattaccgccatcatccacaggcataactggcgctacagatgagaagccaaaatatgtcgtctcccagtctggccatgccgctcatcccgacgacatcatcgcctcttgcaacgccctgcgcgcgcacatcacccagatgcaggaggacgccgatcgcgagttgcgccagctcgacgagcgcatccgcgcccgtgagctcgccgagaagcgccgcgtcgcccctgggtggctagacagtgatgccaggttgctcgagcccgagaggaagccaggctctctgcctgcggcatccgatggcggggacgtgtctagccaatttgccgagatgagcattgccgagcgcgagggcgccagcgagatggccgtcgatcagggtgaggagctcgatcgtgcctttggcggttggaagtgattggactgctctcatctatactgttccaaattctgctttctcggcgttttgggggtcttactcgcatcatttggtcgtccagcatgtggcgtttacggagcactggggtatttctacactcctcgtttcacggtggatagtcttcgacgaggctcgcaattttcgtccttgatctactcaagcaactaagactgcgacatcgatgagtcgtcatagaactgaaagaaatgacacatgcctactaaaataaaatctgaaagccgtactcgcgcgctcctgctctgaccttggcctcctatgtcaccctagactaggtatgtgcgcgccattctaccagaatattcagcggcgagtatggcggattgcttctcaagcacaatagcagtacgcctgaacgtccagccttgccaacttagcttgccgccttgacgatttgcttgatatccctcagtacactcgtatgtgattggaactgtggcaaatcttcagtcaagctcctagcggtaacgacgtcaatatcatcgttcaaagaatgccttttatcctcgtcccgccaacgtcatacgcccagagattggctcggcgcaataacggtgcccaaagccgttccagtcaatctgccagctcgccagcacggttagtctcggggagctccttgatctgtcctactataaagacgaatagcttcgagtcggacgccgtagtggccaagctagctttcaggtcaacggagcgaccaactcgagatggcaaattgcaaacttggaatcgccaaggtattaaaccgacgtgattagcaagttatatccgttcatatctacggcaagagtaagcccaaccacccacccaacaacctattctcatggcctgcttgtctgttacgttcacaattattcatgttgcttgaaccacagctgtcagaatagagttttcttcgctccttctttttcgcattcattctcccgcgaaggagcgtgaacaaatattgacattactcattaatggttacctgaccacctctctacttccagaggccgttatgtgtactcgtatttcatgtgcatcgagatgagcagtagcttctcctagacccattcccgaacaccatagacgcccatattcctttacatcggccgctcccagtccacgttctccagccactgcatgaaatcgttatcgtgcccgaggaaaggcatctcgatgcccatcccaaaattcgtgtcgttaatcatctgcatatccagcgggtctgtcatctgccaatcgtgatgaggcgctgcctctcccgtcattatatccatttccatctgggtcagatggtgctgttgctcatgctgagtcggtatgactggcagtcgatcggtggaacttggagggctcaagatcttatctaggatacgtgtgatgaccttgcgaccctgctcgctgaccatataagaaccatctgaaggatcaatgtccccaagccgcgctgcgaacaccgacaaatcctgaatggtccggcttcttggcaagagagggttcttcggataattaggcagttgttcttgtttcagtagttcaactgcgatgacagcagcactgcgtaatccttgggcagagagcagaaagtacatgtcagactggaagattgaggaaatgtccgtccgcttgcttatctgcatgatgtcgttgaatatctccacggctacttggatcagcttatccgagctcgcgccagtctttcggattaagacacgctggagaaggagttcgtttcctcggaaacactgccggcatgaaaactgatacagtgtctcgagcggtgacctccgtcgccccgcatcatggtcaccaaagtcgataggatcacttgagagatttcggacaaattgcggtagcgtcagctcgtattctgctgtctggcggtgaatttcatcagcacgccgcagcgtctcttctcttgtgtagcgtccaagtgctagatcgagcacatcttcacgtattggtgagaaaccaagccatattttcagccaagtggcccgcgagaactttccgctcgtgttgaagccgtgttcatctagagatgcaacgatccgcttgatctcttccggctccgcaatcatttggtcgtaagttacatccaatggaggaaccaggttgcagtatcgatgggatagacgattaggccgcccgagatatgatgatgtaccaacatcggaagaatacgctcctgtcagagtacgcctgcgcgtctgctccaggaagaaggggaggtggggtttgccttgcttgacatcaatatgaagtcccatggctactacagcattgatgagctccccgctttcacgatacgccgcgaaactgcctacgccgcggagcgtctcagtcaacactccgttttcagagagaagccacaagaacaggtcatccaccgattcggtctcccgacaaaactctagacatgtagacgctatcgagctcattttccgcgctattacgggctttgagaccttgtgctgggtgaataggagatcagaccggctgagggtgctggcacattgcccgatgctggcggcgattaagccgatgacctcccatcgtatgttctggccagtcgcttgcagcgcccagcccttataatcagtattttcattcactgatatcgttgtcaaggtgttacgccacagtaactcggacagacgacgcatcttttccggattccttttcttcagtgtatctgaatgtgtcatccacaagcctgtgagccattgcttcatgaccggctcgatacacacaatgccaacgccgtgaccaatgtcgtagaaccgatttatgaagtcatggatcagagtcgagtccttcaggaaagaaaggagctgacatccccggttgatgtgatcatctgtgatgtgcacacgggccaatttgatgccttcatccagatcggtcgaggcaacgccaagattggggatttcggaaaagatactcatgtaattggtagacccgaaaaagccggtgttcttacgatagggtccaacttcacaccgtaatcctcgcaggggaggtgccgaggcggcgcggttgaacaattcagctacctgcgccgtgtcttccgggccactcttccggggcagttcacgacgaacaaattttggttcgtgcgactccggtggctcaatagatgggtacacccacggaggactatcctcatttgtcgttgtagatggtgtagggggagccagttctgcagatgacttgtctgacgacgatcgattctatgagatgttactataattgtttgcgcgcgcaatatgacaatcatcaaatcatttcaatccttaacccaatttctcatcgccaatagtcgattcgggagcgaagagtctgattaagatagcagatatgaacaatctcatgtccacatctcacaacatgaacatccaggcatcactcaatcactcacttactttcgtcaatggatttggatggtaaacacatttgtcggcgcattttcgcctcacacaccgactacacgtcggcactacatgatcacatcgtaacttgctcttcctgtacgcgtcagtgtcagcgacgacggagacggtggctcttgaaggcagcaggaggaagacgccatcatacctgcaaggctcgcaggactggagcttcccgttgcgtcgatatttcccatttagtgcttggttcgattgcgcgctccgtaaatcaattatctgcccgcccgatcgtgggttcatcctcgttggcgtcggagctacgatgttcatttgccaagacctgcggggtgcggttcgtaagatggcagcctaaggcaatgctagagttgttgggtgactcaaaatcggatatggtcagcaagatgcaacggcctccttccattttagaagggagctttgtgtgtcactgcgttgagactccac

SEQ ID NO: 37447 - DNA, 2379 bp, Muscodor strobelii
  misc_feature: SGI cDNA ID NO. 572995
  misc_feature: Encodes the peptide sequence at SEQ ID NO 37448
atgaacatcgtagctccgacgccaacgaggatgaacccacgatcgggcgggcagataattgatttacggagcgcgcaatcgaaccaagcactaaatgggaaatatcgacgcaacgggaagctccagtcctgcgagccttgcaggaagagcaagttacgatgtgatcatgtagtgccgacgtgtagtcggtgtgtgaggcgaaaatgcgccgacaaatgtgtttaccatccaaatccattgacgaaaaatcgatcgtcgtcagacaagtcatctgcagaactggctccccctacaccatctacaacgacaaatgaggatagtcctccgtgggtgtacccatctattgagccaccggagtcgcacgaaccaaaatttgttcgtcgtgaactgccccggaagagtggcccggaagacacggcgcaggtagctgaattgttcaaccgcgccgcctcggcacctcccctgcgaggattacggtgtgaagttggaccctatcgtaagaacaccggctttttcgggtctaccaattacatgagtatcttttccgaaatccccaatcttggcgttgcctcgaccgatctggatgaaggcatcaaattggcccgtgtgcacatcacagatgatcacatcaaccggggatgtcagctcctttctttcctgaaggactcgactctgatccatgacttcataaatcggttctacgacattggtcacggcgttggcattgtgtgtatcgagccggtcatgaagcaatggctcacaggcttgtggatgacacattcagatacactgaagaaaaggaatccggaaaagatgcgtcgtctgtccgagttactgtggcgtaacaccttgacaacgatatcagtgaatgaaaatactgattataagggctgggcgctgcaagcgactggccagaacatacgatgggaggtcatcggcttaatcgccgccagcatcgggcaatgtgccagcaccctcagccggtctgatctcctattcacccagcacaaggtctcaaagcccgtaatagcgcggaaaatgagctcgatagcgtctacatgtctagagttttgtcgggagaccgaatcggtggatgacctgttcttgtggcttctctctgaaaacggagtgttgactgagacgctccgcggcgtaggcagtttcgcggcgtatcgtgaaagcggggagctcatcaatgctgtagtagccatgggacttcatattgatgtcaagcaaggcaaaccccacctccccttcttcctggagcagacgcgcaggcgtactctgacaggagcgtattcttccgatgttggtacatcatcatatctcgggcggcctaatcgtctatcccatcgatactgcaacctggttcctccattggatgtaacttacgaccaaatgattgcggagccggaagagatcaagcggatcgttgcatctctagatgaacacggcttcaacacgagcggaaagttctcgcgggccacttggctgaaaatatggcttggtttctcaccaatacgtgaagatgtgctcgatctagcacttggacgctacacaagagaagagacgctgcggcgtgctgatgaaattcaccgccagacagcagaatacgagctgacgctaccgcaatttgtccgaaatctctcaagtgatcctatcgactttggtgaccatgatgcggggcgacggaggtcaccgctcgagacactgtatcagttttcatgccggcagtgtttccgaggaaacgaactccttctccagcgtgtcttaatccgaaagactggcgcgagctcggataagctgatccaagtagccgtggagatattcaacgacatcatgcagataagcaagcggacggacatttcctcaatcttccagtctgacatgtactttctgctctctgcccaaggattacgcagtgctgctgtcatcgcagttgaactactgaaacaagaacaactgcctaattatccgaagaaccctctcttgccaagaagccggaccattcaggatttgtcggtgttcgcagcgcggcttggggacattgatccttcagatggttcttatatggtcagcgagcagggtcgcaaggtcatcacacgtatcctagataagatcttgagccctccaagttccaccgatcgactgccagtcataccgactcagcatgagcaacagcaccatctgacccagatggaaatggatataatgacgggagaggcagcgcctcatcacgattggcagatgacagacccgctggatatgcagatgattaacgacacgaattttgggatgggcatcgagatgcctttcctcgggcacgataacgatttcatgcagtggctggagaacgtggactgggagcggccgatgtaa

SEQ ID NO: 37448 - protein, 792 aa, Muscodor strobelii
  misc_feature: SGI Peptide ID NO. 572995
  misc_feature (42)..(83): Pfam Id: PF00172 Pfam Desc: Fungal Zn(2)-Cys(6) binuclear cluster domain
  misc_feature (360)..(465): Pfam Id: PF04082 Pfam Desc: Fungal specific transcription factor domain
  misc_feature (388)..(465): Pfam Id: PF04082 Pfam Desc: Fungal specific transcription factor domain
  misc_feature (281)..(786): NCBI GI: 242815883 Blast Desc: conserved [Talaromyces stipitatus ATCC 10500] gi|218714997|gb|EED14420.1| conserved [Talaromyces stipitatus ATCC 10500]
  misc_feature (36)..(710): NCBI GI: 259482069 Blast Desc: TPA: Zn(II)2Cys6 transcription factor (Eurofung) [Aspergillus nidulans FGSC A4]
  misc_feature (36)..(790): NCBI GI: 121712194 Blast Desc: chromatin structure remodeling complex protein RSC3, [Aspergillus clavatus NRRL 1] gi|119401864|gb|EAW12286.1| chromatin structure remodeling complex protein RSC3, [Aspergillus
  misc_feature (36)..(792): NCBI GI: 145236427 Blast Desc: An06g00330 [Aspergillus niger] gi|134075315|emb|CAK44949.1| protein product [Aspergillus niger]
  misc_feature (36)..(789): NCBI GI: 240105005 Blast Desc: Fungal specific transcription factor, [Coccidioides posadasii C735 delta SOWgp]
  misc_feature (27)..(710): NCBI GI: 70999368 Blast Desc: C6 transcription factor [Aspergillus fumigatus Af293] gi|66852040|gb|EAL92365.1| C6 transcription factor, [Aspergillus fumigatus Af293] gi|159127419|gb|EDP52534.1| C6 transcription
  misc_feature (36)..(709): NCBI GI: 119195165 Blast Desc: CIMG_01957 [Coccidioides immitis RS]
  misc_feature (36)..(676): NCBI GI: 242815338 Blast Desc: conserved [Talaromyces stipitatus ATCC 10500] gi|218714887|gb|EED14310.1| conserved [Talaromyces stipitatus ATCC 10500]
  misc_feature (36)..(714): NCBI GI: 255957189 Blast Desc: Pc21g23810 [Penicillium chrysogenum Wisconsin 54-1255] gi|211591058|emb|CAP97278.1| Pc21g23810 [Penicillium chrysogenum Wisconsin 54-1255]
  misc_feature (36)..(756): NCBI GI: 242779229 Blast Desc: C6 transcription factor, [Talaromyces stipitatus ATCC 10500] gi|218723021|gb|EED22439.1| C6 transcription factor, [Talaromyces stipitatus ATCC 10500]
MNIVAPTPTRMNPRSGGQIIDLRSAQSNQALNGKYRRNGKLQSCEPCRKSKLRCDHVVPTCSRCVRRKCADKCVYHPNPLTKNRSSSDKSSAELAPPTPSTTTNEDSPPWVYPSIEPPESHEPKFVRRELPRKSGPEDTAQVAELFNRAASAPPLRGLRCEVGPYRKNTGFFGSTNYMSIFSEIPNLGVASTDLDEGIKLARVHITDDHINRGCQLLSFLKDSTLIHDFINRFYDIGHGVGIVCIEPVMKQWLTGLWMTHSDTLKKRNPEKMRRLSELLWRNTLTTISVNENTDYKGWALQATGQNIRWEVIGLIAASIGQCASTLSRSDLLFTQHKVSKPVIARKMSSIASTCLEFCRETESVDDLFLWLLSENGVLTETLRGVGSFAAYRESGELINAVVAMGLHIDVKQGKPHLPFFLEQTRRRTLTGAYSSDVGTSSYLGRPNRLSHRYCNLVPPLDVTYDQMIAEPEEIKRIVASLDEHGFNTSGKFSRATWLKIWLGFSPIREDVLDLALGRYTREETLRRADEIHRQTAEYELTLPQFVRNLSSDPIDFGDHDAGRRRSPLETLYQFSCRQCFRGNELLLQRVLIRKTGASSDKLIQVAVEIFNDIMQISKRTDISSIFQSDMYFLLSAQGLRSAAVIAVELLKQEQLPNYPKNPLLPRSRTIQDLSVFAARLGDIDPSDGSYMVSEQGRKVITRILDKILSPPSSTDRLPVIPTQHEQQHHLTQMEMDIMTGEAAPHHDWQMTDPLDMQMINDTNFGMGIEMPFLGHDNDFMQWLENVDWERPM

SEQ ID NO: 37449 - DNA, 4441 bp, Muscodor strobelii
  misc_feature: SGI EST ID NO. CUFF.89809.1
  misc_feature: Variant of the nucleotide sequence at SEQ ID NO 37447
gtggagtctcaacgcagtgacacacaaagctcccttctaaaatggaaggaggccgttgcatcttgctgaccatatccgattttgagtcacccaacaactctagcattgccttaggctgccatcttacgaaccgcaccccgcaggtcttggcaaatgaacatcgtagctccgacgccaacgaggatgaacccacgatcgggcgggcagataattgatttacggagcgcgcaatcgaaccaagcactaaatgggaaatatcgacgcaacgggaagctccagtcctgcgagccttgcaggaagagcaagttacgatgtgatcatgtagtgccgacgtgtagtcggtgtgtgaggcgaaaatgcgccgacaaatgtgtttaccatccaaatccattgacgaaaaatcgatcgtcgtcagacaagtcatctgcagaactggctccccctacaccatctacaacgacaaatgaggatagtcctccgtgggtgtacccatctattgagccaccggagtcgcacgaaccaaaatttgttcgtcgtgaactgccccggaagagtggcccggaagacacggcgcaggtagctgaattgttcaaccgcgccgcctcggcacctcccctgcgaggattacggtgtgaagttggaccctatcgtaagaacaccggctttttcgggtctaccaattacatgagtatcttttccgaaatccccaatcttggcgttgcctcgaccgatctggatgaaggcatcaaattggcccgtgtgcacatcacagatgatcacatcaaccggggatgtcagctcctttctttcctgaaggactcgactctgatccatgacttcataaatcggttctacgacattggtcacggcgttggcattgtgtgtatcgagccggtcatgaagcaatggctcacaggcttgtggatgacacattcagatacactgaagaaaaggaatccggaaaagatgcgtcgtctgtccgagttactgtggcgtaacaccttgacaacgatatcagtgaatgaaaatactgattataagggctgggcgctgcaagcgactggccagaacatacgatgggaggtcatcggcttaatcgccgccagcatcgggcaatgtgccagcaccctcagccggtctgatctcctattcacccagcacaaggtctcaaagcccgtaatagcgcggaaaatgagctcgatagcgtctacatgtctagagttttgtcgggagaccgaatcggtggatgacctgttcttgtggcttctctctgaaaacggagtgttgactgagacgctccgcggcgtaggcagtttcgcggcgtatcgtgaaagcggggagctcatcaatgctgtagtagccatgggacttcatattgatgtcaagcaaggcaaaccccacctccccttcttcctggagcagacgcgcaggcgtactctgacaggagcgtattcttccgatgttggtacatcatcatatctcgggcggcctaatcgtctatcccatcgatactgcaacctggttcctccattggatgtaacttacgaccaaatgattgcggagccggaagagatcaagcggatcgttgcatctctagatgaacacggcttcaacacgagcggaaagttctcgcgggccacttggctgaaaatatggcttggtttctcaccaatacgtgaagatgtgctcgatctagcacttggacgctacacaagagaagagacgctgcggcgtgctgatgaaattcaccgccagacagcagaatacgagctgacgctaccgcaatttgtccgaaatctctcaagtgatcctatcgactttggtgaccatgatgcggggcgacggaggtcaccgctcgagacactgtatcagttttcatgccggcagtgtttccgaggaaacgaactccttctccagcgtgtcttaatccgaaagactggcgcgagctcggataagctgatccaagtagccgtggagatattcaacgacatcatgcagataagcaagcggacggacatttcctcaatcttccagtctgacatgtactttctgctctctgcccaaggattacgcagtgctgctgtcatcgcagttgaactactgaaacaagaacaactgcctaattatccgaagaaccctctcttgccaagaagccggaccattcaggatttgtcggtgttcgcagcgcggcttggggacattgatccttcagatggttcttatatggtcagcgagcagggtcgcaaggtcatcacacgtatcctagataagatcttgagccctccaagttccaccgatcgactgccagtcataccgactcagcatgagcaacagcaccatctgacccagatggaaatggatataatgacgggagaggcagcgcctcatcacgattggcagatgacagacccgctggatatgcagatgattaacgacacgaattttgggatgggcatcgagatgcctttcctcgggcacgataacgatttcatgcagtggctggagaacgtggactgggagcggccgatgtaaaggaatatgggcgtctatggtgttcgggaatgggtctaggagaagctactgctcatctcgatgcacatgaaatacgagtacacataacggcctctggaagtagagaggtggtcaggtaaccattaatgagtaatgtcaatatttgttcacgctccttcgcgggagaatgaatgcgaaaaagaaggagcgaagaaaactctattctgacagctgtggttcaagcaacatgaataattgtgaacgtaacagacaagcaggccatgagaataggttgttgggtgggtggttgggcttactcttgccgtagatatgaacggatataacttgctaatcacgtcggtttaataccttggcgattccaagtttgcaatttgccatctcgagttggtcgctccgttgacctgaaagctagcttggccactacggcgtccgactcgaagctattcgtctttatagtaggacagatcaaggagctccccgagactaaccgtgctggcgagctggcagattgactggaacggctttgggcaccgttattgcgccgagccaatctctgggcgtatgacgttggcgggacgaggataaaaggcattctttgaacgatgatattgacgtcgttaccgctaggagcttgactgaagatttgccacagttccaatcacatacgagtgtactgagggatatcaagcaaatcgtcaaggcggcaagctaagttggcaaggctggacgttcaggcgtactgctattgtgcttgagaagcaatccgccatactcgccgctgaatattctggtagaatggcgcgcacatacctagtctagggtgacataggaggccaaggtcagagcaggagcgcgcgagtacggctttcagattttattttagtaggcatgtgtcatttctttcagttctatgacgactcatcgatgtcgcagtcttagttgcttgagtagatcaaggacgaaaattgcgagcctcgtcgaagactatccaccgtgaaacgaggagtgtagaaataccccagtgctccgtaaacgccacatgctggacgaccaaatgatgcgagtaagacccccaaaacgccgagaaagcagaatttggaacagtatagatgagagcagtccaatcacttccaaccgccaaaggcacgatcgagctcctcaccctgatcgacggccatctcgctggcgccctcgcgctcggcaatgctcatctcggcaaattggctagacacgtccccgccatcggatgccgcaggcagagagcctggcttcctctcgggctcgagcaacctggcatcactgtctagccacccaggggcgacgcggcgcttctcggcgagctcacgggcgcggatgcgctcgtcgagctggcgcaactcgcgatcggcgtcctcctgcatctgggtgatgtgcgcgcgcagggcgttgcaagaggcgatgatgtcgtcgggatgagcggcatggccagactgggagacgacatattttggcttctcatctgtagcgccagttatgcctgtggatgatggcggtaatgttgacggcatgttcttgtatgtgtagggcaaggtggcggcagtgggtaaagtgacaaatggcgagactgttagtggaacctgcgccaggagcggatgtgtgcctggaaaagtgtgagcgcgatgtcttgccgcatcatgacagcttgtggaatacgagatggaacatacggtcgtcgcgcatagtcaccattgtgtctatgaggtgttatatagatgagctcaacgcaaaaaaagaatgtcttgtcatgaggtgtacatttgatgttgaggccaactgtactgagtctgaatttggtcgtgagacgaggttgagagtttgagcgaaatgcgacgggtgatgtgatgtttagtggtgcacctgcaggttgcgg

SEQ ID NO: 37450 - DNA, 219 bp, Muscodor strobelii
  misc_feature: SGI cDNA ID NO. 572996
  misc_feature: Encodes the peptide sequence at SEQ ID NO 37451
atgcctagcaacgtattcagcggtatcttcagctcaaagaagtcctcaggaacgtcgaagcttgatacaagctcattcagagactcctcgtcaacatactcatacgatcctaaagacgcggagactcaacggcagcttgctaagcagcaagctaaagaagagaaagtcagaaagctcatggaacaagcttaccagaaccaaatgcgaatagtggcctaa

SEQ ID NO: 37451 - protein, 72 aa, Muscodor strobelii
  misc_feature: SGI Peptide ID NO. 572996
MPSNVFSGIFSSKKSSGTSKLDTSSFRDSSSTYSYDPKDAETQRQLAKQQAKEEKVRKLMEQAYQNQMRIVA

SEQ ID NO: 37452 - DNA, 862 bp, Muscodor strobelii
  misc_feature: SGI EST ID NO. CUFF.89918.1
  misc_feature: Variant of the nucleotide sequence at SEQ ID NO 37450
actacatgtacatgcaaggggttgaagacatgtatataatcggccatggagtttcgtcagatgagaagtcagtatcatccatttccatccgctcagactcaccagcaagcttcaatagagccagtttataagcagcagtttcaacttcgtggcatactttgacactacttgataacctatattgaaattccgaatttgcagtcactcagtcacttgatcatttgtcaagttacaaacaattccgaaatgcctagcaacgtattcagcggtatcttcagctcaaagaagtcctcaggaacgtcgaagcttgatacaagctcattcagagactcctcgtcaacatactcatacgatcctaaagacgcggagactcaacggcagcttgctaagcagcaagctaaagaagagaaagtcagaaagctcatggaacaagcttaccagaaccaaatgcgaatagtggcctaacaacaatcttcgatcagcaccaaaataagtgcgtgattggtataacaatggggcggttttcttcagcgagatgattttctggtgtttggagttacatgcggttagatggctgcgacctgttgggattatgcacaatggagggcgggattatatcgcatcaggttttgtcgaggctgcaataaggttaatatctagtcctattggacaggtcgtacgcgatgctgagcaattcctccgaaaagtgaaatatattcgggagttaccatatcttgaagcctataagatgcgtttgttccatgatcaattttccaagtcgtatattgtcagcgttgcgatgcttcctcactgcatgtcactaatatacgatcgtaattagattatgctgtgccacgaatag

SEQ ID NO: 37453 - DNA, 249 bp, Muscodor strobelii
  misc_feature: SGI cDNA ID NO. 572997
  misc_feature: Encodes the peptide sequence at SEQ ID NO 37454
atgcctagcaacgtattcagcggtatcttcagctcaaagaagtcctcaggaacgtcgaagcttgatacaagctcattcagagactcctcgtcaacatactcatacgatcctaaagacgcggagactcaacggcagcttgctaagcagcaagctaaagaagagaaagtcagaaagctcatggaacgtagggaagccattgcagcagatgcgaattggcctaacaacaatcttcgatcagcaccaaaataa

SEQ ID NO: 37454 - protein, 82 aa, Muscodor strobelii
  misc_feature: SGI Peptide ID NO. 572997
MPSNVFSGIFSSKKSSGTSKLDTSSFRDSSSTYSYDPKDAETQRQLAKQQAKEEKVRKLMERREAIAADANWPNNNLRSAPK

SEQ ID NO: 37455 - DNA, 864 bp, Muscodor strobelii
  misc_feature: SGI EST ID NO. CUFF.89918.0
  misc_feature: Variant of the nucleotide sequence at SEQ ID NO 37453
actacatgtacatgcaaggggttgaagacatgtatataatcggccatggagtttcgtcagatgagaagtcagtatcatccatttccatccgctcagactcaccagcaagcttcaatagagccagtttataagcagcagtttcaacttcgtggcatactttgacactacttgataacctatattgaaattccgaatttgcagtcactcagtcacttgatcatttgtcaagttacaaacaattccgaaatgcctagcaacgtattcagcggtatcttcagctcaaagaagtcctcaggaacgtcgaagcttgatacaagctcattcagagactcctcgtcaacatactcatacgatcctaaagacgcggagactcaacggcagcttgctaagcagcaagctaaagaagagaaagtcagaaagctcatggaacgtagggaagccattgcagcagatgcgaattggcctaacaacaatcttcgatcagcaccaaaataagtgcgtgattggtataacaatggggcggttttcttcagcgagatgattttctggtgtttggagttacatgcggttagatggctgcgacctgttgggattatgcacaatggagggcgggattatatcgcatcaggttttgtcgaggctgcaataaggttaatatctagtcctattggacaggtcgtacgcgatgctgagcaattcctccgaaaagtgaaatatattcgggagttaccatatcttgaagcctataagatgcgtttgttccatgatcaattttccaagtcgtatattgtcagcgttgcgatgcttcctcactgcatgtcactaatatacgatcgtaattagattatgctgtgccacgaatag

SEQ ID NO: 37456 - DNA, 504 bp, Muscodor strobelii
  misc_feature: SGI cDNA ID NO. 572998
  misc_feature: Encodes the peptide sequence at SEQ ID NO 37457
atgcgcgatgccactggtggcgaactcgatatcctgatcaacaacgccgcagtcttcggcctcatgccgctcgcggatgtgcagatcgaggatgcaaagcaagtcttcgatgccaatgtgtttggtgcacttgcggttacacaggcatttctgccactgcttatacaggccaagggactcgttgtaaatgtgagcagtatctcggctttcatgtgcccgccatggcaaggtgtctatgccgcgagtaaagcggcgctcgtggcccttggtcatacaatgagaatcgaatttgcgcccctgaacgtccgtgttgttaccattgtctcgggtggtgtggatactgggttaaaggcattgccttctcttgtaccggaaagaagttggtatcggtcgcttgcaccatccattgaaggtaacgaaatgtcaaaaggctattcaagcatgccgccagcggatcctgaattccaaaacgatgctgcacttggatggccacagaaagagtag

SEQ ID NO: 37457 - protein, 167 aa, Muscodor strobelii
  misc_feature: SGI Peptide ID NO. 572998
  misc_feature (4)..(98): Pfam Id: PF00106 Pfam Desc: short chain dehydrogenase
  misc_feature (1)..(157): NCBI GI: 242774205 Blast Desc: short-chain dehydrogenase/reductase, [Talaromyces stipitatus ATCC 10500] gi|218722013|gb|EED21431.1| short-chain dehydrogenase/reductase, [Talaromyces stipitatus ATCC 10500]
  misc_feature (1)..(157): NCBI GI: 121700480 Blast Desc: short-chain dehydrogenase/reductase, [Aspergillus clavatus NRRL 1] gi|119396647|gb|EAW07079.1| short-chain dehydrogenase/reductase, [Aspergillus clavatus NRRL 1]
  misc_feature (4)..(152): NCBI GI: 121712469 Blast Desc: oxidoreductase, short-chain dehydrogenase/reductase family [Aspergillus clavatus NRRL 1] gi|119401998|gb|EAW12420.1| oxidoreductase, short-chain dehydrogenase/reductase family NRRL
  misc_feature (6)..(160): NCBI GI: 115389730 Blast Desc: conserved [Aspergillus terreus NIH2624] gi|114194766|gb|EAU36466.1| conserved [Aspergillus terreus NIH2624]
  misc_feature (5)..(142): NCBI GI: 169782478 Blast Desc: [Aspergillus oryzae RIB40] gi|83774445|dbj|BAE64568.1| protein product [Aspergillus oryzae]
  misc_feature (5)..(142): NCBI GI: 238492093 Blast Desc: short-chain dehydrogenases/reductase, [Aspergillus flavus NRRL3357] gi|220695777|gb|EED52119.1| short-chain dehydrogenases/reductase, [Aspergillus flavus NRRL3357]
  misc_feature (5)..(154): NCBI GI: 212531875 Blast Desc: short-chain dehydrogenase/reductase, [Penicillium marneffei ATCC 18224] gi|210071458|gb|EEA25547.1| short-chain dehydrogenase/reductase, [Penicillium marneffei ATCC 18224]
  misc_feature (4)..(152): NCBI GI: 67525637 Blast Desc: AN3276.2 [Aspergillus nidulans FGSC A4] gi|40744064|gb|EAA63244.1| AN3276.2 [Aspergillus nidulans FGSC A4] gi|259485757|tpe|CBF83048.1| TPA: oxidoreductase, short-chain
  misc_feature (3)..(154): NCBI GI: 256727397 Blast Desc: NECHADRAFT_90830 [Nectria haematococca mpVI 77-13-4]
  misc_feature (4)..(149): NCBI GI: 169602937 Blast Desc: SNOG_04473 [Phaeosphaeria nodorum SN15] gi|111067113|gb|EAT88233.1| SNOG_04473 [Phaeosphaeria nodorum SN15]
  misc_feature (7)..(129): SWISSPROT Homolog: EC 1.1.1.101 Acylglycerone-phosphate reductase
MRDATGGELDILINNAAVFGLMPLADVQIEDAKQVFDANVFGALAVTQAFLPLLIQAKGLVVNVSSISAFMCPPWQGVYAASKAALVALGHTMRIEFAPLNVRVVTIVSGGVDTGLKALPSLVPERSWYRSLAPSIEGNEMSKGYSSMPPADPEFQNDAALGWPQKE

SEQ ID NO: 37458 - DNA, 1863 bp, Muscodor strobelii
  misc_feature: SGI cDNA ID NO. 572999
  misc_feature: Elevated expression when VOC is produced
  misc_feature: Encodes the peptide sequence at SEQ ID NO 37459
atgtcgacctccgataatagtatcgaggtgaagaaccctcacaacgagtccgagaaatacaatcaggtcgacaccgccgagcatgtcaacctcaacgccaataaagagggaaaaatccagaatcctctaaagggaattccgcgggagcaactcatgcgtgatgtcgaagccttctgccaggagaagggtctcgaggagcaccttctcgtgatgaggaagggcgcccttgtcgcacaaaacccccacgctttcgacgagatcgatggcgaagaggcgttgacagaagaggagaagcatgctttgacccacgaggcactacacaaatggaacctcccgtggcgactatatctcaccatcgtcacctgctccatcggcgctgccgtccagggttgggaccagactggtatcaatggtgcgaccattttctatccagcaatctttggtattcccagagacaatatgggagttttgctcgaaggtactatcaactctgctccctacatttcgactgctgtcctcggttgctggctctctgatcccctgaacaactttttcggtcgtcgtggtactatcttcatctcggctcaattcctcatctggcctgtcattggctccggcttcgtcactaactggcaggaactgcttgtcactcgtcttctcatgggtatcggtatgggtatcaagggctcgaccgtcccaatcttcgctgccgaaaactcacctgctgccgtgcgtggcgctcttgtcatgtcttggcagatgtggacggcgttcggtattttcctcggtactgtcatcaatgtcgctgtctattacagtcctatcaactggcgtttgatgctgggagctcctttcatccctgctgtgcctcttgcacttttgatttacttgtgccctgagtcgcccagatggttgatgaagaagaaccgatacgctaaggcctggacatcattgatgatcttgagacacaaccccattcaggcagctcgcgacatgtactctgtccacgcacagattatgattgagcaggaagttgttggtaacagcacttaccttacccgtgccattgagctcttcaccattccccgtatccgccgtgccactattgctgctttcaccgtcatgttggcccagcaactttgcggtatcaacattattgctttctactcaaccaccgtcttcaaggctgctggcttcaacgattatcaagctttgctcacttcgcttggtttcggtgccgtcaactggctctttgccttccccgccttcttcaccatcgacagtttcggtcgccgcgctctacttctgttcactttcccgaacatgttctggtcgttgctcgctgctgcgctctctaatctggctaccggcaccaccaagctcgccctcgtcgccaccttcgtttacatcttcgccgctttctactctcccggcgaaggtcccgtcccattcgcctactccgccgaagtcttccctctatctcatcgtgaggtcggtatggcttttgccgtcgctacatgtctgggctgggctgccgtccttggtatcacgttccctctcattctggaccagcttgatgtcatcggtgctttcggtctgtatgctggcttcaatgtcctggcattcgtcatgatcttcttcctgctacccgagaccaagcagcgcactctcgaggagctcgactatgtctttgccgtgcccaaccgcacttttgcccattatcagcttaccaaggctgcaccgtggtggatcaagcgatacgtctttttcaaccgctccgccaagctcgagcctctatacactcaagatgacattgatgtgcgacaggctgttctggctgttgagagatccgagaaggtctaa

SEQ ID NO: 37459 - protein, 620 aa, Muscodor strobelii
  misc_feature: SGI Peptide ID NO. 572999
  misc_feature (122)..(516): Pfam Id: PF07690 Pfam Desc: Major Facilitator Superfamily
  misc_feature (117)..(564): Pfam Id: PF00083 Pfam Desc: Sugar (and other) transporter
  misc_feature (122)..(303): Pfam Id: PF07690 Pfam Desc: Major Facilitator Superfamily
  misc_feature (18)..(608): NCBI GI: 171680719 Blast Desc: protein product [Podospora anserina] gi|170939987|emb|CAP65213.1| protein product [Podospora anserina]
  misc_feature (2)..(610): NCBI GI: 116200746 Blast Desc: CHGG_10918 [Chaetomium globosum CBS 148.51] gi|88175632|gb|EAQ83100.1| CHGG_10918 [Chaetomium globosum CBS 148.51]
  misc_feature (27)..(605): NCBI GI: 256729052 Blast Desc: [Nectria haematococca mpVI 77-13-4]
  misc_feature (9)..(610): NCBI GI: 261354002 Blast Desc: polyol transporter 5 [Verticillium albo-atrum VaMs.102]
  misc_feature (5)..(605): NCBI GI: 85089851 Blast Desc: NCU09287 [Neurospora crassa OR74A] gi|28919468|gb|EAA28903.1| NCU09287 [Neurospora crassa OR74A]
  misc_feature (21)..(603): NCBI GI: 39949426 Blast Desc: MGG_08776 [Magnaporthe grisea 70-15] gi|145009328|gb|EDJ94039.1| MGG_08776 [Magnaporthe grisea 70-15]
  misc_feature (6)..(600): NCBI GI: 46138829 Blast Desc: FG10929.1 [Gibberella zeae PH-1]
  misc_feature (13)..(605): NCBI GI: 46107894 Blast Desc: FG00830.1 [Gibberella zeae PH-1]
  misc_feature (13)..(603): NCBI GI: 256734642 Blast Desc: [Nectria haematococca mpVI 77-13-4]
  misc_feature (10)..(619): NCBI GI: 154299617 Blast Desc: BC1G_10771 [Botryotinia fuckeliana B05.10] gi|150857263|gb|EDN32455.1| BC1G_10771 [Botryotinia fuckeliana B05.10]
  misc_feature: Useful for introducing or modulating the production of volatile compounds
MSTSDNSIEVKNPHNESEKYNQVDTAEHVNLNANKEGKIQNPLKGIPREQLMRDVEAFCQEKGLEEHLLVMRKGALVAQNPHAFDEIDGEEALTEEEKHALTHEALHKWNLPWRLYLTIVTCSIGAAVQGWDQTGINGATIFYPAIFGIPRDNMGVLLEGTINSAPYISTAVLGCWLSDPLNNFFGRRGTIFISAQFLIWPVIGSGFVTNWQELLVTRLLMGIGMGIKGSTVPIFAAENSPAAVRGALVMSWQMWTAFGIFLGTVINVAVYYSPINWRLMLGAPFIPAVPLALLIYLCPESPRWLMKKNRYAKAWTSLMILRHNPIQAARDMYSVHAQIMIEQEVVGNSTYLTRAIELFTIPRIRRATIAAFTVMLAQQLCGINIIAFYSTTVFKAAGFNDYQALLTSLGFGAVNWLFAFPAFFTIDSFGRRALLLFTFPNMFWSLLAAALSNLATGTTKLALVATFVYIFAAFYSPGEGPVPFAYSAEVFPLSHREVGMAFAVATCLGWAAVLGITFPLILDQLDVIGAFGLYAGFNVLAFVMIFFLLPETKQRTLEELDYVFAVPNRTFAHYQLTKAAPWWIKRYVFFNRSAKLEPLYTQDDIDVRQAVLAVERSEKV

SEQ ID NO: 37460 - DNA, 3856 bp, Muscodor strobelii
  misc_feature: SGI EST ID NO. CUFF.89609.0
  misc_feature: Variant of the nucleotide sequence at SEQ ID NO 37458
cgaggggagcatggttttctgcaggtttacgctcgtccaggactagcgggccattgattcacagacaatggtgcttggatgtctccattgttctttaaatgtgggcttcggtcattcaattcgaagaattcctggaggggtgaggtgggactttcgccatggggattgtcgaggtctggggattgcctgcttattatttagcccatatggggatcgatctacacagctgctcgcccagcaagcgtcccagtcatataagacaaagacccgtgctcctcccctcccgatcccttcttgttctactcttgccttctcgtccattactcaagaggtgaagccccgggggatccttttttcgcttctctattagacaggtttagtcttgcttgattgccctcacaacttgtcgccatgtcgacctccgataatagtatcgaggtgaagaaccctcacaacgagtccgagaaatacaatcaggtcgacaccgccgagcatgtcaacctcaacgccaataaagagggaaaaatccagaatcctctaaagggaattccgcgggagcaactcatgcgtgatgtcgaagccttctgccaggagaagggtctcgaggagcaccttctcgtgatgaggaagggcgcccttgtcgcacaaaacccccacgctttcgacgagatcgatggcgaagaggcgttgacagaagaggagaagcatgctttgacccacgaggcactacacaaatggaacctcccgtggcgactatatctcaccatcgtcacctgctccatcggcgctgccgtccagggttgggaccagactggtatcaatggtgcgaccattttctatccagcaatctttggtattcccagagacaatatgggagttttgctcgaaggtactatcaactctgctccctacatttcgactgctgtcctcggttgctggctctctgatcccctgaacaactttttcggtcgtcgtggtactatcttcatctcggctcaattcctcatctggcctgtcattggctccggcttcgtcactaactggcaggaactgcttgtcactcgtcttctcatgggtatcggtatgggtatcaagggctcgaccgtcccaatcttcgctgccgaaaactcacctgctgccgtgcgtggcgctcttgtcatgtcttggcagatgtggacggcgttcggtattttcctcggtactgtcatcaatgtcgctgtctattacagtcctatcaactggcgtttgatgctgggagctcctttcatccctgctgtgcctcttgcacttttgatttacttgtgccctgagtcgcccagatggttgatgaagaagaaccgatacgctaaggcctggacatcattgatgatcttgagacacaaccccattcaggcagctcgcgacatgtactctgtccacgcacagattatgattgagcaggaagttgttggtaacagcacttaccttacccgtgccattgagctcttcaccattccccgtatccgccgtgccactattgctgctttcaccgtcatgttggcccagcaactttgcggtatcaacattattgctttctactcaaccaccgtcttcaaggctgctggcttcaacgattatcaagctttgctcacttcgcttggtttcggtgccgtcaactggctctttgccttccccgccttcttcaccatcgacagtttcggtcgccgcgctctacttctgttcactttcccgaacatgttctggtcgttgctcgctgctgcgctctctaatctggctaccggcaccaccaagctcgccctcgtcgccaccttcgtttacatcttcgccgctttctactctcccggcgaaggtcccgtcccattcgcctactccgccgaagtcttccctctatctcatcgtgaggtcggtatggcttttgccgtcgctacatgtctgggctgggctgccgtccttggtatcacgttccctctcattctggaccagcttgatgtcatcggtgctttcggtctgtatgctggcttcaatgtcctggcattcgtcatgatcttcttcctgctacccgagaccaagcagcgcactctcgaggagctcgactatgtctttgccgtgcccaaccgcacttttgcccattatcagcttaccaaggctgcaccgtggtggatcaagcgatacgtctttttcaaccgctccgccaagctcgagcctctatacactcaagatgacattgatgtgcgacaggctgttctggctgttgagagatccgagaaggtctaaacttgcctatattaccaaggacattatttgctcattcagacggatgtgacggatatagtcacgaacttgcattatgcttccaaagtgttggctctatcaagatgaatagatagctacactccaatacccctttagagataccagatagttcatgtcaatctatcattgttataatagttattactcgctcctatattttgtgtgctggtaatgaagtggaaaacaactcgtttttaagtgacattgatggacatttcagaacgcggcgtgtaagggtttgttttatgttgttccagtgcaacgtggctcagaatctttagaacaaatgattgtggccccttcgcggaaccgaaagtgcttttcggacccgacaactctattaccaccccgagtattagtcacagcactagtactggaccacagcacatggctctaataaatacatacactatagccaatgacttgcacgatatcttcaagcattgccaaattgcattcgttattttcatttcatttataatgccgctaaagactgtgctcataacagggtgtagccaagggggtgctggcgaggctctggctagagaattccgagccagaggacaccgggtctttgcaacatgtcgagggcgtccgacagcccagcattttctgacagacatcggaattgaacccttacagttggatgtcacatcgtccacctcgatatcagctgctgcatccgccatgcgcgatgccactggtggcgaactcgatatcctgatcaacaacgccgcagtcttcggcctcatgccgctcgcggatgtgcagatcgaggatgcaaagcaagtcttcgatgccaatgtgtttggtgcacttgcggttacacaggcatttctgccactgcttatacaggccaagggactcgttgtaaatgtgagcagtatctcggctttcatgtgcccgccatggcaaggtgtctatgccgcgagtaaagcggcgctcgtggcccttggtcatacaatgagaatcgaatttgcgcccctgaacgtccgtgttgttaccattgtctcgggtggtgtggatactgggttaaaggcattgccttctcttgtaccggaaagaagttggtatcggtcgcttgcaccatccattgaaggtaacgaaatgtcaaaaggctattcaagcatgccgccagcggagtatgcaaaggcggtcgcaaatgatattcttcagcctcatccaagacccctgttgtggaaagggacttttgcttggctggtttggatgttgacttggttgggttgggtcggattgatggacggcggacagataaaacggagcggactgaatcggatcagatcagcatttcaactaaagcagtcctgaattccaaaacgatgctgcacttggatggccacagaaagagtagcgaaagaccaatgataccctcccacctccgatgttcctaaatattatgaaatggtgctcgtatagacttatcgagttcggcaatgccaaaagagagattgttgacagcacaagtcgatctgaccaacacccaggagacacattcgaagtgctgcgagtagacacagcaaat

SEQ ID NO: 37461 - DNA, 957 bp, Muscodor strobelii
  misc_feature: SGI cDNA ID NO. 573000
  misc_feature: Reduced expression when VOC is produced
  misc_feature: Encodes the peptide sequence at SEQ ID NO 37462
gacggtgccgagaccatgtcaggaagaccggagatcgatcgtcccgtgctgaaagacctgttgatcggaagcttagccgttgatactattcgctggggctgcaaagtcacagccatcaatcccatctccggttctgagcaatggacagtccaacttgacgatggatcgagcctagtcttcgatcttgtggtgggcgcagacggcgcttggtctcgcacacgttctctcctcacagacaagcaaccattctactcgagtatcacggccctcgacgtctgcatccacgacgtcgaccgggttgcgcccaaagtatcaagattcgtcgggatgggaaattgcttcatttttgctgaggaccgtgccatgcttttccagcgcaacggccagggccgggccaggtgctatgcgtgtgtccgcacccctgacttaaccaccccgcctaccgctagaggtctgctgggaatgagtaagcaaggtgacgactcccgcgacgtcgactggacggacccccggaacagggaggcctttgtcgagaaatacttcggggattggtttgcggacgccaaggagaccctgcttaccatgacagaacaacctgtctaccgaccattgtacatgcttcccgtgggactcaggtgggagccgcgtccggggttgacagtccttggcgacgcggcacaccttatgactccatttgctggtgtcggggtcaacgtcgcgctcatggatgcgcttgagcttgcccaaggcctaatcggatgtgtagagtcgggaagtgtagatggccagagtctcgccagtatgctacggcgttatgaacagggcatgtttgcgcgctcaagcaaggatgccggcgatactgaagcggctatgcgcattgagttcaaagagaatggcggcgaggaaatgattcggataatgggagggagatcgcctgaagacccagaattcaagtga

SEQ ID NO: 37462 - protein, 318 aa, Muscodor strobelii
  misc_feature: SGI Peptide ID NO. 573000
  misc_feature (223)..(252): Pfam Id: PF01494 Pfam Desc: FAD binding domain
  misc_feature (4)..(304): NCBI GI: 156049711 Blast Desc: SS1G_08562 [Sclerotinia sclerotiorum 1980] gi|154692961|gb|EDN92699.1| SS1G_08562 [Sclerotinia sclerotiorum 1980]
  misc_feature (4)..(303): NCBI GI: 145241462 Blast Desc: An09g00530 [Aspergillus niger] gi|134077915|emb|CAL00313.1| protein product [Aspergillus niger]
  misc_feature (4)..(302): NCBI GI: 242811478 Blast Desc: monooxygenase, [Talaromyces stipitatus ATCC 10500] gi|218714096|gb|EED13519.1| monooxygenase, [Talaromyces stipitatus ATCC 10500]
  misc_feature (4)..(304): NCBI GI: 154309097 Blast Desc: BC1G_07443 [Botryotinia fuckeliana B05.10] gi|150852486|gb|EDN27678.1| BC1G_07443 [Botryotinia fuckeliana B05.10]
  misc_feature (9)..(304): NCBI GI: 154312037 Blast Desc: BC1G_06052 [Botryotinia fuckeliana B05.10] gi|150850702|gb|EDN25895.1| BC1G_06052 [Botryotinia fuckeliana B05.10]
  misc_feature (9)..(302): NCBI GI: 156060047 Blast Desc: SS1G_02161 [Sclerotinia sclerotiorum 1980] gi|154699570|gb|EDN99308.1| SS1G_02161 [Sclerotinia sclerotiorum 1980]
  misc_feature (4)..(312): NCBI GI: 169603273 Blast Desc: SNOG_04644 [Phaeosphaeria nodorum SN15] gi|160706361|gb|EAT88404.2| SNOG_04644 [Phaeosphaeria nodorum SN15]
  misc_feature (9)..(303): NCBI GI: 229073018 Blast Desc: Monooxygenase FAD-binding [Bacillus cereus F65185] gi|228710136|gb|EEL62116.1| Monooxygenase FAD-binding [Bacillus cereus F65185]
  misc_feature (9)..(308): NCBI GI: 256671493 Blast Desc: monooxygenase [Streptomyces sp. AA4]
  misc_feature (7)..(307): NCBI GI: 229192892 Blast Desc: Monooxygenase FAD-binding [Bacillus cereus ATCC 10876] gi|228590502|gb|EEK48364.1| Monooxygenase FAD-binding [Bacillus cereus ATCC 10876]
  misc_feature (12)..(273): SWISSPROT Homolog: EC 1.14.13.90 Zeaxanthin epoxidase
  misc_feature: Useful for introducing or modulating the production of volatile compounds
DGAETMSGRPEIDRPVLKDLLIGSLAVDTIRWGCKVTAINPISGSEQWTVQLDDGSSLVFDLVVGADGAWSRTRSLLTDKQPFYSSITALDVCIHDVDRVAPKVSRFVGMGNCFIFAEDRAMLFQRNGQGRARCYACVRTPDLTTPPTARGLLGMSKQGDDSRDVDWTDPRNREAFVEKYFGDWFADAKETLLTMTEQPVYRPLYMLPVGLRWEPRPGLTVLGDAAHLMTPFAGVGVNVALMDALELAQGLIGCVESGSVDGQSLASMLRRYEQGMFARSSKDAGDTEAAMRIEFKENGGEEMIRIMGGRSPEDPEFK

SEQ ID NO: 37463 - DNA, 1068 bp, Muscodor strobelii
  misc_feature: SGI EST ID NO. CUFF.89626.0
  misc_feature: Variant of the nucleotide sequence at SEQ ID NO 37461
ggtgccgagaccatgtcaggaagaccggagatcgatcgtcccgtgctgaaagacctgttgatcggaagcttagccgttgatactattcgctggggctgcaaagtcacagccatcaatcccatctccggttctgagcaatggacagtccaacttgacgatggatcgagcctagtcttcgatcttgtggtgggcgcagacggcgcttggtctcgcacacgttctctcctcacagacaagcaaccattctactcgagtatcacggccctcgacgtctgcatccacgacgtcgaccgggttgcgcccaaagtatcaagattcgtcgggatgggaaattgcttcatttttgctgaggaccgtgccatgcttttccagcgcaacggccagggccgggccaggtgctatgcgtgtgtccgcacccctgacttaaccaccccgcctaccgctagaggtctgctgggaatgagtaagcaaggtgacgactcccgcgacgtcgactggacggacccccggaacagggaggcctttgtcgagaaatacttcggggattggtttgcggacgccaaggagaccctgcttaccatgacagaacaacctgtctaccgaccattgtacatgcttcccgtgggactcaggtgggagccgcgtccggggttgacagtccttggcgacgcggcacaccttatgactccatttgctggtgtcggggtcaacgtcgcgctcatggatgcgcttgagcttgcccaaggcctaatcggatgtgtagagtcgggaagtgtagatggccagagtctcgccagtatgctacggcgttatgaacagggcatgtttgcgcgctcaagcaaggatgccggcgatactgaagcggctatgcgcattgagttcaaagagaatggcggcgaggaaatgattcggataatgggagggagatcgcctgaagacccagaattcaagtgagctactcatcgatgcttgtacctttctacaatagcacaatgagaacgtgctttatgtcttagattatagaaagacagctttacttcgtattaattaccatctcatctctcccta

SEQ ID NO: 37464 - DNA, 1155 bp, Muscodor strobelii
  misc_feature: SGI cDNA ID NO. 573001
  misc_feature: Reduced expression when VOC is produced
  misc_feature: Encodes the peptide sequence at SEQ ID NO 37465
atggcacctgtccgccccagtggaggggctcgccacaatgccgacttcatcaaaagcttcgcggagcaagaggcccagaggcgagatgcgcggcggaccgtccggctaacggccacacagcgcgccgcacgccgcgagaaactgcgacagatacgcttcctcacgccggcggacgccaagtgcacccaagtcaatattgctggcatgctgcgggagtggaaaagatattgcgactctgccaagctggggccatggctcaacgcaatccaaaaagccgaccgagcgactgccatggacttcctcgaccacctgtgcgagaactataacattacttcgtggggcacgtcctgggagtattttcggcagtacaagcagctgtacgctagaaaggccggcagacacatggatctcaacgacagtaaagaggttcaaaggtggcatgatgttgcattggtgcccaaataccgcctccgcgcgcctaatatgatcgacaagcaagtggccgactggaacgacctgctagtcctccagacattcaatatcgcttatgacacgagcatttgtcctggcgaacggcatcgcgcaaaccggtcaggatgtaaccttttccttgcgtgtactggatgccgacctgcagaaatcgtggataatgagaaaaagagacctaaggatggctcctgggaagagctctacggtcccaaagccatccacccccacgacagggacaaggcgatgcgccatgggctggtccacttcgatgacgagtatatcgccacgcaggccagaaggtgcgaggatcccgccgaggacaaaccactggatgaggacgccagggtgctagaagagatgctctcagccgagaccaccggccgcgggcgcccgaaggcgctctgctacgaagacatttcaatgatggttgtccgtcacccggtcacgggcaaggacgtgcacgtgatggcagtcaagtttatccaccacaaaggtgcggataataagccaaagccaacaattttcttcttcacacttactcggatgctgatcttctgtctgatcaccgtcattgccagcattgcgatagatgacggcgcgttcgacgccccgagccttaccagcatgagggccgtattcgaggtcaagaatacggggcccgcttaa

SEQ ID NO: 37465 - protein, 384 aa, Muscodor strobelii
  misc_feature: SGI Peptide ID NO. 573001
  misc_feature (12)..(382): NCBI GI: 261360462 Blast Desc: conserved [Verticillium albo-atrum VaMs.102]
  misc_feature (54)..(376): NCBI GI: 156050801 Blast Desc: SS1G_07988 [Sclerotinia sclerotiorum 1980] gi|154692388|gb|EDN92126.1| SS1G_07988 [Sclerotinia sclerotiorum 1980]
  misc_feature (54)..(376): NCBI GI: 156041054 Blast Desc: SS1G_11505 [Sclerotinia sclerotiorum 1980] gi|154695889|gb|EDN95627.1| SS1G_11505 [Sclerotinia sclerotiorum 1980]
  misc_feature (75)..(376): NCBI GI: 156035779 Blast Desc: SS1G_13093 [Sclerotinia sclerotiorum 1980] gi|154698498|gb|EDN98236.1| SS1G_13093 [Sclerotinia sclerotiorum 1980]
  misc_feature (142)..(376): NCBI GI: 156044628 Blast Desc: [Sclerotinia sclerotiorum 1980] gi|154694806|gb|EDN94544.1| [Sclerotinia sclerotiorum 1980]
  misc_feature (89)..(376): NCBI GI: 156045243 Blast Desc: [Sclerotinia sclerotiorum 1980] gi|154694205|gb|EDN93943.1| [Sclerotinia sclerotiorum 1980]
  misc_feature (28)..(383): NCBI GI: 121710534 Blast Desc: conserved [Aspergillus clavatus NRRL 1] gi|119401033|gb|EAW11457.1| conserved [Aspergillus clavatus NRRL 1]
  misc_feature (44)..(383): NCBI GI: 255943407 Blast Desc: Pc18g06450 [Penicillium chrysogenum Wisconsin 54-1255] gi|211587205|emb|CAP94869.1| Pc18g06450 [Penicillium chrysogenum Wisconsin 54-1255]
  misc_feature (295)..(376): NCBI GI: 156048468 Blast Desc: [Sclerotinia sclerotiorum 1980] gi|154693362|gb|EDN93100.1| [Sclerotinia sclerotiorum 1980]
  misc_feature (43)..(367): NCBI GI: 70996458 Blast Desc: conserved [Aspergillus fumigatus Af293] gi|66850619|gb|EAL90946.1| conserved [Aspergillus fumigatus Af293]
  misc_feature: Useful for introducing or modulating the production of volatile compounds
MAPVRPSGGARHNADFIKSFAEQEAQRRDARRTVRLTATQRAARREKLRQIRFLTPADAKCTQVNIAGMLREWKRYCDSAKLGPWLNAIQKADRATAMDFLDHLCENYNITSWGTSWEYFRQYKQLYARKAGRHMDLNDSKEVQRWHDVALVPKYRLRAPNMIDKQVADWNDLLVLQTFNIAYDTSICPGERHRANRSGCNLFLACTGCRPAEIVDNEKKRPKDGSWEELYGPKAIHPHDRDKAMRHGLVHFDDEYIATQARRCEDPAEDKPLDEDARVLEEMLSAETTGRGRPKALCYEDISMMVVRHPVTGKDVHVMAVKFIHHKGADNKPKPTIFFFTLTRMLIFCLITVIASIAIDDGAFDAPSLTSMRAVFEVKNTGPA

SEQ ID NO: 37466 - DNA, 2724 bp, Muscodor strobelii
  misc_feature: SGI EST ID NO. CUFF.89815.1
  misc_feature: Variant of the nucleotide sequence at SEQ ID NO 37464
cgcgactcttgggcgcctccctggccaagccgtctcaaatttcctgtcagtcagcattctcaaatccaggttgtctttcgcgcggagctcgtccaggcacacccagtcagcaagtcaaaatggaatcactcgccggaccctcctcgtcactcgtctctcgtttcttcgaactcgtgctcgtctcgccaaccacaaatccagggtcaacaacatggcacctgtccgccccagtggaggggctcgccacaatgccgacttcatcaaaagcttcgcggagcaagaggcccagaggcgagatgcgcggcggaccgtccggctaacggccacacagcgcgccgcacgccgcgagaaactgcgacagatacgcttcctcacgccggcggacgccaagtgcacccaagtcaatattgctggcatgctgcgggagtggaaaagatattgcgactctgccaagctggggccatggctcaacgcaatccaaaaagccgaccgagcgactgccatggacttcctcgaccacctgtgcgagaactataacattacttcgtggggcacgtcctgggagtattttcggcagtacaagcagctgtacgctagaaaggccggcagacacatggatctcaacgacagtaaagaggttcaaagggtcaggacatctctgcattgacacgccactgttctgctaactgcaaatgaccttgcagtggcatgatgttgcattggtgcccaaataccgcctccgcgcgcctaatatgatcgacaagcaagtggccgactggaacgacctgctagtcctccagacattcaatatcgcttatgacacgagcatttgtcctggcgaacggcatcgcgcaaaccggtcaggatgtaaccttttccttgcgtgtactggatgccgacctgcagaaatcgtggataatgagaaaaagagacctaaggatggctcctgggaagagctctacggtcccaaagccatccacccccacgacagggacaaggcgatgcgccatgggctggtccacttcgatgacgagtatatcgccacgcaggccagaaggtgcgaggatcccgccgaggacaaaccactggatgaggacgccagggtgctagaagagatgctctcagccgagaccaccggccgcgggcgcccgaaggcgctctgctacgaagacatttcaatgatggttgtccgtcacccggtcacgggcaaggacgtgcacgtgatggcagtcaagtttatccaccacaaaggtgcggataataagccaaagccaacaattttcttcttcacacttactcggatgctgatcttctgtctgatcaccgtcattgccagcattgcgatagatgacggcgcgttcgacgccccgagccttaccagcatgagggccgtattcgaggtcaagaatacggggcccgcttaagtgcacgccgcttcgctggaagaaggagtggctcaagcggcccatattcctccgatttaacggccccaacctatccaaagacgaggcccttcagaactccactctacgagacgatatggcacggctatcgctggacgctgggcaggagaagcccatgcagcctaaagactggcgccgcggcgcggccaacgaggcgaatgggaaagcgcctgatgccgtccgggatcaaatgatgcggcacgacccaaagtgggccacgttcaatagcgcgtacatcaacgccaaggtcaaatatcacctccagaatgcggtcatccatgagccgcaggaggacgcgctgatcgagatgctcacgcatatcagcgtcacgcgcgacccacgcgccgggcgggatatagtccccgacgaggtctggcgggatatgccgcctgatcccgaaattgtcgagctggagcagcggagggagacgctcaaggggggccagtaccgcatccaaggccgggattacgaacaagaaatacgagacctcaccaaggagatcaggagcaaaaaagcacagcgtgtgaaggcgatcctcaaggactatcgcgacgattacttctacaaccgtcctacctgggatatcgagagacaggcgcgtggggaggaagaagacgaggagtatgtcgaaccggctatcgatcttcagatacccgagcgggcgcagctggccgagattctctgccatcagccggaggatctgagctacggagatcttgccagccttcgtattcaggccgccgagctgtgggtggccttatgtggcaagcgagaaacggccactggcaggcgtatccggcagagggcacgacctgaggcttcggtgagagaggagccccctgcactggacccgtttccgctccttatgcagaagaaacaatgccctcgatgtataggtgatgagaggctgtcgtacgagacaagaacattcctattctgtcgacctgctgtcatgattgaccacttcgatcgcgaacatttggtagggatgaaagagaacgagaggcgcaatttgattttctgccatcatccgaaatgcagagaagaagggttgaaactggagagtttggatcatttcagggcccatgtgaagagcgtccacggtgtcgaacttcgacggagcgaccgtgttaaatcttttccaaagtcttcttgttaatcagtcactgttttttgtttttgtatttttagctgattgcctcgtctaattatctacttttttaaagcgttagatctgtcttagatttccccttgttttttg

SEQ ID NO: 37467 - DNA, 1083 bp, Muscodor strobelii
  misc_feature: SGI cDNA ID NO. 573002
  misc_feature: Encodes the peptide sequence at SEQ ID NO 37468
atggcacggctatcgctggacgctgggcaggagaagcccatgcagcctaaagactggcgccgcggcgcggccaacgaggcgaatgggaaagcgcctgatgccgtccgggatcaaatgatgcggcacgacccaaagtgggccacgttcaatagcgcgtacatcaacgccaaggtcaaatatcacctccagaatgcggtcatccatgagccgcaggaggacgcgctgatcgagatgctcacgcatatcagcgtcacgcgcgacccacgcgccgggcgggatatagtccccgacgaggtctggcgggatatgccgcctgatcccgaaattgtcgagctggagcagcggagggagacgctcaaggggggccagtaccgcatccaaggccgggattacgaacaagaaatacgagacctcaccaaggagatcaggagcaaaaaagcacagcgtgtgaaggcgatcctcaaggactatcgcgacgattacttctacaaccgtcctacctgggatatcgagagacaggcgcgtggggaggaagaagacgaggagtatgtcgaaccggctatcgatcttcagatacccgagcgggcgcagctggccgagattctctgccatcagccggaggatctgagctacggagatcttgccagccttcgtattcaggccgccgagctgtgggtggccttatgtggcaagcgagaaacggccactggcaggcgtatccggcagagggcacgacctgaggcttcggtgagagaggagccccctgcactggacccgtttccgctccttatgcagaagaaacaatgccctcgatgtataggtgatgagaggctgtcgtacgagacaagaacattcctattctgtcgacctgctgtcatgattgaccacttcgatcgcgaacatttggtagggatgaaagagaacgagaggcgcaatttgattttctgccatcatccgaaatgcagagaagaagggttgaaactggagagtttggatcatttcagggcccatgtgaagagcgtccacggtgtcgaacttcgacggagcgaccgtgttaaatcttttccaaagtcttcttgttaa

SEQ ID NO: 37468 - protein, 360 aa, Muscodor strobelii
  misc_feature: SGI Peptide ID NO. 573002
  misc_feature (1)..(255): NCBI GI: 261360462 Blast Desc: conserved [Verticillium albo-atrum VaMs.102]
  misc_feature (121)..(347): NCBI GI: 116207680 Blast Desc: [Chaetomium globosum CBS 148.51] gi|88183730|gb|EAQ91198.1| [Chaetomium globosum CBS 148.51]
  misc_feature (1)..(263): NCBI GI: 156035779 Blast Desc: SS1G_13093 [Sclerotinia sclerotiorum 1980] gi|154698498|gb|EDN98236.1| SS1G_13093 [Sclerotinia sclerotiorum 1980]
  misc_feature (1)..(263): NCBI GI: 156041054 Blast Desc: SS1G_11505 [Sclerotinia sclerotiorum 1980] gi|154695889|gb|EDN95627.1| SS1G_11505 [Sclerotinia sclerotiorum 1980]
  misc_feature (1)..(263): NCBI GI: 156050801 Blast Desc: SS1G_07988 [Sclerotinia sclerotiorum 1980] gi|154692388|gb|EDN92126.1| SS1G_07988 [Sclerotinia sclerotiorum 1980]
  misc_feature (225)..(350): NCBI GI: 256720366 Blast Desc: NECHADRAFT_89113 [Nectria haematococca mpVI 77-13-4]
  misc_feature (1)..(344): NCBI GI: 154287344 Blast Desc: [Ajellomyces capsulatus NAm1] gi|150408108|gb|EDN03649.1| [Ajellomyces capsulatus NAm1]
  misc_feature (1)..(346): NCBI GI: 261201894 Blast Desc: FluG domain-containing protein [Ajellomyces dermatitidis SLH14081] gi|239590258|gb|EEQ72839.1| FluG domain-containing protein [Ajellomyces dermatitidis SLH14081]
  misc_feature (1)..(346): NCBI GI: 239611973 Blast Desc: FluG domain-containing protein [Ajellomyces dermatitidis ER-3]
  misc_feature (1)..(359): NCBI GI: 226278871 Blast Desc: FluG domain-containing protein [Paracoccidioides brasiliensis Pb01]
MARLSLDAGQEKPMQPKDWRRGAANEANGKAPDAVRDQMMRHDPKWATFNSAYINAKVKYHLQNAVIHEPQEDALIEMLTHISVTRDPRAGRDIVPDEVWRDMPPDPEIVELEQRRETLKGGQYRIQGRDYEQEIRDLTKEIRSKKAQRVKAILKDYRDDYFYNRPTWDIERQARGEEEDEEYVEPAIDLQIPERAQLAEILCHQPEDLSYGDLASLRIQAAELWVALCGKRETATGRRIRQRARPEASVREEPPALDPFPLLMQKKQCPRCIGDERLSYETRTFLFCRPAVMIDHFDREHLVGMKENERRNLIFCHHPKCREEGLKLESLDHFRAHVKSVHGVELRRSDRVKSFPKSSC

SEQ ID NO: 37469 - DNA, 2724 bp, Muscodor strobelii; identical to SEQ ID NO: 37466
  misc_feature: SGI EST ID NO. CUFF.89815.1
  misc_feature: Variant of the nucleotide sequence at SEQ ID NO 37467

SEQ ID NO: 37470 - DNA, 1608 bp, Muscodor strobelii
  misc_feature: SGI cDNA ID NO. 573003
  misc_feature: Encodes the peptide sequence at SEQ ID NO 37471
atgattatcaccaattgttctccgattgtaattgagtctggctcgctttctggactatgtcttccgaatgacacgagagcgttccttggaatcccttacgcagcaccacccctgggagacctccgctggcgaccgccacagcctgtcacaccttggtcgggtgtgcgttcagtagataggttctctgctgggtgtatccagtccccaccatcgaacacttcgatctattatgatcccgacaatgaagtcttcagtgaagattgtctgtatgttaacgtcttcactggcggggagagcagtcatgagaagagacctgtgctggtatggttccattggggagcttatgttatgggatctggctccaacgcaatgcaccatggatataaacttgcttccaaaggcattacagtcgtaactgtaaacaatcggctgggacgactgggaaatcttgcacacgaggaacttacagcggagtctggtcatcacgcgtcaggcaactacggtatcatggaccagatcgctgtgctacaatgggtgaagcggaatattcaagcttttgggggagatccggaaaacgtcacaattggaggtggctcggccggaggtgcctctactcacgtgctgcgcacctcaactttagcaagtggcctattctcgaaagctatctgcgaaagcggaccgggattggcaccgattcttgacgggaaaggtagcattgctgcctatactacattggccgcaggtgagaaagctggtgcagaattattgagcgttctaggagtttcgtctattgctgaattacgcaatatctcagctgccgatatcctagccgctcatctgcctagtaccgaaggcgcctggacttctcctcttaggccgaatatcaccacgggagtgaatgtgtatgatacagcatatcccattgtcgacggttatgtaattccagaatcaccacttactgcatttgcttcgggaagagtcattgacgttcccctccttgccgggaatccagtgaacgacggaactgtgcttccacatcttactacgctggctgactatcacgcattcctcaacgaaacttttgggacctatgccggagatgcactcgagatttatcccgcctcgacggacgcggaagcttataattcatctttcaatcttcttgtggaccaagtgttcgtatacgcgacgtggaaggcagcacaattgcaagccgagaagctagagtcgccatcgtggtactatcaaaatttccgcgcgccgccaatcccgcataatgcgaacgtgtctgaaaaagactacgcgggcgctttccatctctccggtgtcacatatgcttttggaaacctggaggaatggcgtcagtgggactggactggcgaagactgggcgctatcagctgagatactagatagttacgtgcagttcgtgacaaatgggactccctttgacgaaaacaaacgagatatcgatatgtggccctctctgaggtcgaacggcagtctgataaaggcgtgggatattggcggtggtcgcgttgaggccgtggcacctcgacttcttgaaatcactgcattttgggaccgtttctatgagattagttcttag

SEQ ID NO: 37471 - protein, 535 aa, Muscodor strobelii
  misc_feature: SGI Peptide ID NO. 573003
  misc_feature (2)..(527): Pfam Id: PF00135 Pfam Desc: Carboxylesterase
  misc_feature (9)..(336): Pfam Id: PF00135 Pfam Desc: Carboxylesterase
  misc_feature (7)..(533): NCBI GI: 116208598 Blast Desc: CHGG_03592 [Chaetomium globosum CBS 148.51] gi|88184189|gb|EAQ91657.1| CHGG_03592 [Chaetomium globosum CBS 148.51]
  misc_feature (9)..(535): NCBI GI: 118471224 Blast Desc: para-nitrobenzyl esterase [Mycobacterium smegmatis str. MC2 155] gi|118172511|gb|ABK73407.1| para-nitrobenzyl esterase [Mycobacterium smegmatis str. MC2 155]
  misc_feature (9)..(493): NCBI GI: 148557162 Blast Desc: carboxylesterase, type B [Sphingomonas wittichii RW1] gi|148502352|gb|ABQ70606.1| Carboxylesterase, type B [Sphingomonas wittichii RW1]
  misc_feature (9)..(494): NCBI GI: 146342432 Blast Desc: carboxylesterase, type B [Bradyrhizobium sp. ORS278] gi|146195238|emb|CAL79263.1| Carboxylesterase, type B [Bradyrhizobium sp. ORS278]
  misc_feature (8)..(494): NCBI GI: 116621204 Blast Desc: carboxylesterase, type B [Solibacter usitatus Ellin6076] gi|116224366|gb|ABJ83075.1| Carboxylesterase, type B [Candidatus Solibacter usitatus Ellin6076]
  misc_feature (13)..(495): NCBI GI: 284035585 Blast Desc: Carboxylesterase [Spirosoma linguale DSM 74] gi|283814878|gb|ADB36716.1| Carboxylesterase [Spirosoma linguale DSM 74]
  misc_feature (9)..(511): NCBI GI: 284036447 Blast Desc: Carboxylesterase [Spirosoma linguale DSM 74] gi|283815740|gb|ADB37578.1| Carboxylesterase [Spirosoma linguale DSM 74]
  misc_feature (5)..(482): NCBI GI: 110597430 Blast Desc: Carboxylesterase, type B [Chlorobium ferrooxidans DSM 13031] gi|110340974|gb|EAT59445.1| Carboxylesterase, type B [Chlorobium ferrooxidans DSM 13031]
  misc_feature (9)..(531): NCBI GI: 255709998 Blast Desc: lipase/esterase [uncultured bacterium]
  misc_feature (26)..(531): NCBI GI: 116688206 Blast Desc: carboxylesterase, type B [Burkholderia cenocepacia HI2424] gi|116646295|gb|ABK06936.1| Carboxylesterase, type B [Burkholderia cenocepacia HI2424]
  misc_feature (25)..(494): SWISSPROT Homolog: EC 3.1.1.1 Carboxylesterase
MIITNCSPIVIESGSLSGLCLPNDTRAFLGIPYAAPPLGDLRWRPPQPVTPWSGVRSVDRFSAGCIQSPPSNTSIYYDPDNEVFSEDCLYVNVFTGGESSHEKRPVLVWFHWGAYVMGSGSNAMHHGYKLASKGITVVTVNNRLGRLGNLAHEELTAESGHHASGNYGIMDQIAVLQWVKRNIQAFGGDPENVTIGGGSAGGASTHVLRTSTLASGLFSKAICESGPGLAPILDGKGSIAAYTTLAAGEKAGAELLSVLGVSSIAELRNISAADILAAHLPSTEGAWTSPLRPNITTGVNVYDTAYPIVDGYVIPESPLTAFASGRVIDVPLLAGNPVNDGTVLPHLTTLADYHAFLNETFGTYAGDALEIYPASTDAEAYNSSFNLLVDQVFVYATWKAAQLQAEKLESPSWYYQNFRAPPIPHNANVSEKDYAGAFHLSGVTYAFGNLEEWRQWDWTGEDWALSAEILDSYVQFVTNGTPFDENKRDIDMWPSLRSNGSLIKAWDIGGGRVEAVAPRLLEITAFWDRFYEISS

SEQ ID NO: 37472 - DNA, 733 bp, Muscodor strobelii
  misc_feature: SGI EST ID NO. CUFF.89641.0
  misc_feature: Variant of the nucleotide sequence at SEQ ID NO 37470
cctcaacgaaacttttgggacctatgccggagatgcactcgagatttatcccgcctcgacggacgcggaagcttataattcatctttcaatcttcttgtggaccaagtgttcgtatacgcgacgtggaaggcagcacaattgcaagccgagaagctagagtcgccatcgtggtactatcaaaatttccgcgcgccgccaatcccgcataatgcgaacgtgtctgaaaaagactacgcgggcgctttccatctctccggtgtcacatatgcttttggaaacctggaggaatggcgtcagtgggactggactggcgaagactgggcgctatcagctgagatactagatagttacgtgcagttcgtgacaaatgggactccctttgacgaaaacaaacgagatatcgatatgtggccctctctgaggtcgaacggcagtctgataaaggcgtgggatattggcggtggtcgcgttgaggccgtggcacctcgacttcttgaaatcactgcattttgggaccgtttctatgagattagttcttagatgcgcaaaattgaagcatcctggtagctgcataggagatgaacgaccggcccaatagattttgcatgaagcagatgaagtcttatactcaggatatggtctcacttccttggagtttctcaggattggacaagatgcgtccttgtactgcttactccctgatcggaaagaccttgcttaaaaatgacaaac

SEQ ID NO: 37473 - DNA, 1497 bp, Muscodor strobelii
  misc_feature: SGI cDNA ID NO. 573004
  misc_feature: Encodes the peptide sequence at SEQ ID NO 37474
atggattttagtacaattctccaaacgatacagaagagtggcactgtagcgtttccagacaacgggaacagtatcgagtatgctcaatctctagacgcgcaagatcctctggggcacctccgcaccgagttcatattcccaaccaagagatccatgagaagcgtgacgcacaagaataatgcgcttaacggcacaaacggcataaagggcaccaatggcaccaatggcattggctacggcggcgatgagaatgtggtctatttctgcgggaactcgctcgggttgcagccgaagtgtcttcgcgccagtatcgacgcgcatcttcagacatgggcttcaattggcgtgtatggacatttcaaaactctgccggagtcaccactcccctcctggcaggacatggccgagtcatgcgccgcgaagatggcacccatcgtcggcgccaagccgagtgaggtcatcgcaatgaacaccttatcagtaaaccttcacttactgatggcgagcttttatcggccttcggagaagcggcacaagattatcctcgagtggaagccatttccaagcgattattatgccatcgagtcccatataagttggcatgggcttgatccgcgcaggtcgatggtcgagatccatcctgatcaatcacattacatttctactgagcatatactcgccaagatcgacgagcacgcagaggaaacagcactgctactcctaccaggcttacagtactatagtggtcagctcttcgatatgccgaggatcacggcacacgcccaagcccgagggatcgttgtggggtgggatcttgctcatgccgcaggtaatgtgcccttgtcattgcacgattggggtgtagacttcgctgcttggtgtacatacaagtacataaatgctggcccaggcgcgatggctggcgccttcgttcacgagaagcatggcggtgtcgcaaagactgtgaatgctgaaggggtcgaggagctacaatttcgccatcggctgcagggatggtacggcactgataagagcgttcgattcgagatggccaagaccttccaacctgcttctggggcagccggttggcagctcagtaatcccagtggtatcgatctggccagtttgaacgctgcgctggaggtttacggcaaaacaaccgtcgaagaggcacgaaagaaaagtctagtgctcaccgcatacgcggaatggttgcttgaagaaatattaagagaggagtcgaaaattaagacggatgaacaacttcctgcattcgagatcattacacctcgaaagcccaacgagcggggtgcacagctgtgtgccttactacgggagggtttgcttgaaaaggtcagtgaggcattcgaggaaggcggcgtcgtcgtcgatcagcggaaaccagatgtgattcgagtagcacccgtgccgttatataacagtttcgaggacgtttggacgtgcgttgatgcccttcgaagggtcgtgatagcatga

SEQ ID NO: 37474 - protein, 498 aa, Muscodor strobelii
  misc_feature: SGI Peptide ID NO. 573004
  misc_feature (1)..(496): NCBI GI: 261361128 Blast Desc: kynureninase [Verticillium albo-atrum VaMs.102]
  misc_feature (1)..(493): NCBI GI: 46120364 Blast Desc: FG04829.1 [Gibberella zeae PH-1]
  misc_feature (16)..(498): NCBI GI: 39944710 Blast Desc: MGG_10969 [Magnaporthe grisea 70-15] gi|221272012|sp|A4UBV5.1|KYNU_MAGGR RecName: Full=Kynureninase; AltName: Full=L-kynurenine hydrolase; AltName: Full=Biosynthesis
  misc_feature (2)..(496): NCBI GI: 85091828 Blast Desc: NCU09183 [Neurospora crassa OR74A] gi|74615253|sp|Q7S332.1|KYNU2_NEUCR RecName: Full=Kynureninase 2; AltName: Full=L-kynurenine hydrolase 2; AltName: of nicotinic 5-2
  misc_feature (18)..(489): NCBI GI: 156049033 Blast Desc: SS1G_08223 [Sclerotinia sclerotiorum 1980] gi|221272015|sp|A7ESB8.1|KYNU_SCLS1 RecName: Full=Kynureninase; AltName: Full=L-kynurenine hydrolase; AltName: Full=Biosynthesis
  misc_feature (12)..(493): NCBI GI: 169771699 Blast Desc: [Aspergillus oryzae RIB40] gi|121803569|sp|Q2UJE8.1|KYNU2_ASPOR RecName: Full=Kynureninase 2; AltName: Full=L-kynurenine hydrolase 2; AltName: of nicotinic
  misc_feature (12)..(493): NCBI GI: 238485714 Blast Desc: kynureninase, [Aspergillus flavus NRRL3357] gi|220698974|gb|EED55313.1| kynureninase, [Aspergillus flavus NRRL3357]
  misc_feature (17)..(493): NCBI GI: 171681066 Blast Desc: protein product [Podospora anserina] gi|170940491|emb|CAP65719.1| protein product [Podospora anserina]
  misc_feature (18)..(496): NCBI GI: 154317132 Blast Desc: BC1G_03468 [Botryotinia fuckeliana B05.10] gi|221272010|sp|A6RSP5.1|KYNU_BOTFB RecName: Full=Kynureninase; AltName: Full=L-kynurenine hydrolase; AltName: Full=Biosynthesis
  misc_feature (9)..(497): NCBI GI: 212538249 Blast Desc: kynureninase, [Penicillium marneffei ATCC 18224] gi|210069022|gb|EEA23113.1| kynureninase, [Penicillium marneffei ATCC 18224]
  misc_feature (16)..(498): SWISSPROT Homolog: EC 3.7.1.3 Kynureninase
MDFSTILQTIQKSGTVAFPDNGNSIEYAQSLDAQDPLGHLRTEFIFPTKRSMRSVTHKNNALNGTNGIKGTNGTNGIGYGGDENVVYFCGNSLGLQPKCLRASIDAHLQTWASIGVYGHFKTLPESPLPSWQDMAESCAAKMAPIVGAKPSEVIAMNTLSVNLHLLMASFYRPSEKRHKIILEWKPFPSDYYAIESHISWHGLDPRRSMVEIHPDQSHYISTEHILAKIDEHAEETALLLLPGLQYYSGQLFDMPRITAHAQARGIVVGWDLAHAAGNVPLSLHDWGVDFAAWCTYKYINAGPGAMAGAFVHEKHGGVAKTVNAEGVEELQFRHRLQGWYGTDKSVRFEMAKTFQPASGAAGWQLSNPSGIDLASLNAALEVYGKTTVEEARKKSLVLTAYAEWLLEEILREESKIKTDEQLPAFEIITPRKPNERGAQLCALLREGLLEKVSEAFEEGGVVVDQRKPDVIRVAPVPLYNSFEDVWTCVDALRRVVIA

SEQ ID NO: 37475 - DNA, 1777 bp, Muscodor strobelii
  misc_feature: SGI EST ID NO. CUFF.89645.0
  misc_feature: Variant of the nucleotide sequence at SEQ ID NO 37473
gcaccattcagatataatatgtgaaaggattatgcaaatttcacccttttgaggaagagtattgtgatcttcgccggtaattctgcgtcttacagttgcgaaagcctacagcatggattttagtacaattctccaaacgatacagaagagtggcactgtagcgtttccagacaacgggaacagtatcgagtatgctcaatctctagacgcgcaagatcctctggggcacctccgcaccgagttcatattcccaaccaagagatccatgagaagcgtgacgcacaagaataatgcgcttaacggcacaaacggcataaagggcaccaatggcaccaatggcattggctacggcggcgatgagaatgtggtctatttctgcgggaactcgctcgggttgcagccgaagtgtcttcgcgccagtatcgacgcgcatcttcagacatgggcttcaattggcgtgtatggacatttcaaaactctgccggagtcaccactcccctcctggcaggacatggccgagtcatgcgccgcgaagatggcacccatcgtcggcgccaagccgagtgaggtcatcgcaatgaacaccttatcagtaaaccttcacttactgatggcgagcttttatcggccttcggagaagcggcacaagattatcctcgagtggaagccatttccaagcgattattatgccatcgagtcccatataagttggcatgggcttgatccgcgcaggtcgatggtcgagatccatcctgatcaatcacattacatttctactgagcatatactcgccaagatcgacgagcacgcagaggaaacagcactgctactcctaccaggcttacagtactatagtggtcagctcttcgatatgccgaggatcacggcacacgcccaagcccgagggatcgttgtggggtgggatcttgctcatgccgcaggtaatgtgcccttgtcattgcacgattggggtgtagacttcgctgcttggtgtacatacaagtacataaatgctggcccaggcgcgatggctggcgccttcgttcacgagaagcatggcggtgtcgcaaagactgtgaatgctgaaggggtcgaggagctacaatttcgccatcggctgcagggatggtacggcactgataagagcgttcgattcgagatggccaagaccttccaacctgcttctggggcagccggttggcagctcagtaatcccagtggtatcgatctggccagtttgaacgctgcgctggaggtttacggcaaaacaaccgtcgaagaggcacgaaagaaaagtctagtgctcaccgcatacgcggaatggttgcttgaagaaatattaagagaggagtcgaaaattaagacggatgaacaacttcctgcattcgagatcattacacctcgaaagcccaacgagcggggtgcacagctgtgtgccttactacgggagggtttgcttgaaaaggtcagtgaggcattcgaggaaggcggcgtcgtcgtcgatcagcggaaaccagatgtgattcgagtagcacccgtgccgttatataacagtttcgaggacgtttggacgtgcgttgatgcccttcgaagggtcgtgatagcatgaatgatgagagacggcgatggcacgactatggacggatccctggatgtactcaccttagaacatattattgctaataactaatgaaggtgatattccaatatagatagtgtcaggatctacgtagaaatttacatcctcttatcggcctcgactggccatttagcgtcg

SEQ ID NO: 37476 - DNA, 1182 bp, Muscodor strobelii
  misc_feature: SGI cDNA ID NO. 573005
  misc_feature: Reduced expression when VOC is produced
  misc_feature: Encodes the peptide sequence at SEQ ID NO 37477
atggataacaaagtacttcgggttggaatcattggaggaggcgacgttgcacagatcgtgcacatccccacgctgttgtttctctccaaactatacaaaatcgtgcttctgtgcgacgtatccgagcgaactgcaaagcattgcgctgagaagttcagcataccacgcgcaaccacgaacccggaggatatcttcagtagttccgatatcgacgttgtatttattcttacctcggatgaatatcatggcccatatgctatacgtgcacttcaagcaggaaaacatgtgctcgtcgagaagccgcttacgctcagcttgcctgcggcgcaagaaattcttgaagcagaacgtacagcgccaaatggagcacgggtctttgtcggatatatgagacgatacgcgccgagtctgaaagctttcaaacgcgagatatctactatctccagcatcaagtatgctcgcgttagggacatcattggtccaaatgcctacttcatcagccagtctggaacggaaccgcagaaatggcatgatgacatagcagcagaagctaaacaagatcgccaaaggcgactagccaagttactggagcaggcatggggaacgccgttcaacgagctcagtaccgagcagatggactactgctgtttactcgctaccctcgggagccacggattaggggtgatgcgcgatgtactaggtggtctaccagaagaagtcctggcttcgactgacaatgctcgctggtatacgatcatgttcgactataagaaccgatctagctcccaagatcacttcacctgtctatatgagatgggcctgaacaatgtgccccgcttcgattcagaggtcgcagtttatggcgaaaacaaatcggtcgttattcggtatgatacgccctttgtcaagggtcttggcataacagttgaggttgatgagcagaatgagcatggggaaaaatgccacaggtcattacagacatcttacgaggatgcttacacagcagaattgagggagctgtatgaatgtgtagccaacggcaagcccatcatgacgacaacagctgatgctcttgaggatgtcagactcttgaagatgatcatggaaaagtacccagaacataaaaaacagacgaagaatggcacgccaggatcaacaaatttccttccatcggggccgtaa

SEQ ID NO: 37477 - protein, 393 aa, Muscodor strobelii
  misc_feature: SGI Peptide ID NO. 573005
  misc_feature (6)..(129): Pfam Id: PF01408 Pfam Desc: Oxidoreductase family, NAD-binding Rossmann fold
  misc_feature (1)..(393): NCBI GI: 256726343 Blast Desc: NECHADRAFT_94735 [Nectria haematococca mpVI 77-13-4]
  misc_feature (5)..(370): NCBI GI: 212535832 Blast Desc: NAD binding Rossmann fold oxidoreductase, [Penicillium marneffei ATCC 18224] gi|210070471|gb|EEA24561.1| NAD binding Rossmann fold oxidoreductase, [Penicillium marneffei ATCC 18224]
  misc_feature (5)..(370): NCBI GI: 242794109 Blast Desc: NAD binding Rossmann fold oxidoreductase, [Talaromyces stipitatus ATCC 10500] gi|218718893|gb|EED18313.1| NAD binding Rossmann fold oxidoreductase, [Talaromyces stipitatus ATCC 10500]
  misc_feature (4)..(377): NCBI GI: 261357206 Blast Desc: myo-inositol 2-dehydrogenase [Verticillium albo-atrum VaMs.102]
  misc_feature (3)..(380): NCBI GI: 240105355 Blast Desc: Oxidoreductase family, NAD-binding Rossmann fold containing protein [Coccidioides posadasii C735 delta SOWgp]
  misc_feature (3)..(383): NCBI GI: 255940750 Blast Desc: Pc16g08230 [Penicillium chrysogenum Wisconsin 54-1255] gi|211585767|emb|CAP93493.1| Pc16g08230 [Penicillium chrysogenum Wisconsin 54-1255]
  misc_feature (3)..(380): NCBI GI: 119194323 Blast Desc: CIMG_01536 [Coccidioides immitis RS]
  misc_feature (2)..(369): NCBI GI: 256728950 Blast Desc: NECHADRAFT_40437 [Nectria haematococca mpVI 77-13-4]
  misc_feature (3)..(369): NCBI GI: 134117069 Blast Desc: CNBK1350 [Cryptococcus neoformans var. neoformans B-3501A] gi|50255379|gb|EAL18114.1| CNBK1350 [Cryptococcus neoformans var. neoformans B-3501A]
  misc_feature (3)..(369): NCBI GI: 58260566 Blast Desc: [Cryptococcus neoformans var. neoformans JEC21] gi|57229774|gb|AAW46176.1| conserved [Cryptococcus neoformans var. neoformans JEC21]
  misc_feature: Useful for introducing or modulating the production of volatile compounds
MDNKVLRVGIIGGGDVAQIVHIPTLLFLSKLYKIVLLCDVSERTAKHCAEKFSIPRATTNPEDIFSSSDIDVVFILTSDEYHGPYAIRALQAGKHVLVEKPLTLSLPAAQEILEAERTAPNGARVFVGYMRRYAPSLKAFKREISTISSIKYARVRDIIGPNAYFISQSGTEPQKWHDDIAAEAKQDRQRRLAKLLEQAWGTPFNELSTEQMDYCCLLATLGSHGLGVMRDVLGGLPEEVLASTDNARWYTIMFDYKNRSSSQDHFTCLYEMGLNNVPRFDSEVAVYGENKSVVIRYDTPFVKGLGITVEVDEQNEHGEKCHRSLQTSYEDAYTAELRELYECVANGKPIMTTTADALEDVRLLKMIMEKYPEHKKQTKNGTPGSTNFLPSGP

SEQ ID NO: 37478 - DNA, 1828 bp, Muscodor strobelii
  misc_feature: SGI EST ID NO. CUFF.89656.0
  misc_feature: Variant of the nucleotide sequence at SEQ ID NO 37476
catggtgatactcaggagaatcaagtagcttctattttagtgacacattctgccgcagtacttgatcatcccagttcatcatctggattgagccaatccttcgggtttggttaacttctaaaagtttatcaccgatacataacttcgcaacatcttatccgcacgagacaatggataacaaagtacttcgggttggaatcattggaggaggcgacgttgcacagatcgtgcacatccccacgctgttgtttctctccaaactatacaaaatcgtgcttctgtgcgacgtatccgagcgaactgcaaagcattgcgctgagaagttcagcataccacgcgcaaccacgaacccggaggatatcttcagtagttccgatatcgacgttgtatttattcttacctcggatgaatatcatggcccatatgctatacgtgcacttcaagcaggaaaacatgtgctcgtcgagaagccgcttacgctcagcttgcctgcggcgcaagaaattcttgaagcagaacgtacagcgccaaatggagcacgggtctttgtcggatatatgagacgatacgcgccgagtctgaaagctttcaaacgcgagatatctactatctccagcatcaagtatgctcgcgttagggacatcattggtccaaatgcctacttcatcagccagtctggaacggaaccgcagaaatggcatgatgacatagcagcagaagctaaacaagatcgccaaaggcgactagccaagttactggagcaggcatggggaacgccgttcaacgagctcagtaccgagcagatggactactgctgtttactcgctaccctcgggagccacggattaggggtgatgcgcgatgtactaggtggtctaccagaagaagtcctggcttcgactgacaatgctcgctggtatacgatcatgttcgactataagaaccgatctagctcccaagatcacttcacctgtctatatgagatgggcctgaacaatgtgccccgcttcgattcagaggtcgcagtttatggcgaaaacaaatcggtcgttattcggtatgatacgccctttgtcaagggtcttggcataacagttgaggttgatgagcagaatgagcatggggaaaaatgccacaggtcattacagacatcttacgaggatgcttacacagcagaattgagggagctgtatgaatgtgtagccaacggcaagcccatcatgacgacaacagctgatgctcttgaggatgtcagactcttgaagatgatcatggaaaagtacccagaacataaaaaacagacgaagaatggcacgccaggatcaacaaatttccttccatcggggccgtaaggaggcattcatgaccagtcgacaagtcgaaagacatgatggcaagatgacgagatggtacttacacagctagagaataagtaaagttccgttcacaatctcccatgctcgcagcctggtgcgtagtcgtcgatctctgtggatttcaaacttttggcttgtcggagaaaacaagagaatgatgtataagcgcgaacaggccgttagaggtggggtatcggactaccgcctaggacaaatagtttgttgaagccatcaagaccctgcatacctcttgtatatcgaaaaaatgtctaccatcggcaattctatagcaatagtgctgcgcttcaatgtgtgttttgagcctcatcaaattgagagagtgcgaacaaatgagatggaatgaagactttagcttctccttaatgtgtggcgctgcaccatgctagctttagtgtacaatgggagtgtttaagacgtcccatattgacgcg

SEQ ID NO: 37479 - DNA, 1353 bp, Muscodor strobelii
  misc_feature: SGI cDNA ID NO. 573006
  misc_feature: Encodes the peptide sequence at SEQ ID NO 37480
atgtcgtgtatgcgagttctcgacacggccacctatgaattaagagataccacaagcattagggactttgcgcaagatggatacgccatactctcgcacacttggagcaagaagggggaaattgcgtacaacacgttatcaactcagatcgacaaactcaaacatgggaaacgaccgttgaactcggagtctgcagacaagatccaaggtgcttgcgagactgcccgcaacgaaggattgaagtggatttggattgactcctgttgcattgacaaaagttcgactcaagagacgaatgagtctataaatgctatgcttctttggtatcgcaatgctaagttgtgcgtcacctatctgtatgacgtggagaagagagacaatgccaacgataaggaaatgtttcaacgcgcacccaaagtgaagaaacaagaggaggaggaggatccggaggacaaattggattcgccaaggtggttctcacgcggatggtgtttgcaagagctcctagcgccaaaggtcctgaagttttatgacatgaactgggagtttttgggagaaaaaagcaagctctctgtcgccctctcgagcctcaccggtatacatgaggggtatctcacgggcaggatgaactacttggatgcctgcatcgccgtcaagatgagttggatggccaatcgctcgactacgagggcagaagatgtatcgtatagcttattagggatactgggcgtgcgcatggatgtagactatggcgaaggcgggccgaaggccttcttacgcctacaggagactgtcatgaatgacgagattatggacgagtctctcttcgcctggaagatggccaagccgaatgacgaggcgcgatatgcgtcctcgccagacttcgacgacaatgagtggggtctcctagccgcatcccctcagtggttccagaagagcggcgatttgcgtgcccctcggaggtcgcgcgcctttacgcgagataagcaacagcatggcgtccgaggtcctatcagtcgcgacatgtataacaagagagcaaaactgacacaggcggctggcttcttcaatattattgggcaacccctagcggcaagggcgatgaacaatcgggcaaaggaggacttcaccctacgcttgaactgtacaaacgccataggcgagaacgctgaggttcatctccgtcctagaccggcagaaaagataagttggagggggaacgatatgcataaaaagcctttcatcgagtgtaagaggattcgatgcaccgaacttgggtttatcgagaaaccaataaagcaaggcatgggcgacggcatagtattccaaccaacaccaggacgatccggatga

SEQ ID NO: 37480 - protein, 450 aa, Muscodor strobelii
  misc_feature: SGI Peptide ID NO. 573006
  misc_feature (28)..(167): Pfam Id: PF06985 Pfam Desc: Heterokaryon incompatibility protein (HET)
  misc_feature (1)..(401): NCBI GI: 46119876 Blast Desc: FG04807.1 [Gibberella zeae PH-1]
  misc_feature (4)..(321): NCBI GI: 238493477 Blast Desc: conserved [Aspergillus flavus NRRL3357] gi|220696469|gb|EED52811.1| conserved [Aspergillus flavus NRRL3357]
  misc_feature (4)..(326): NCBI GI: 85092369 Blast Desc: NCU04912 [Neurospora crassa OR74A] gi|28920765|gb|EAA30124.1| [Neurospora crassa OR74A]
  misc_feature (4)..(322): NCBI GI: 256728051 Blast Desc: NECHADRAFT_83471 [Nectria haematococca mpVI 77-13-4]
  misc_feature (4)..(313): NCBI GI: 189192070 Blast Desc: HET domain containing protein [Pyrenophora tritici-repentis Pt-1C-BFP] gi|187973980|gb|EDU41479.1| HET domain containing protein [Pyrenophora tritici-repentis
  misc_feature (4)..(313): NCBI GI: 171680418 Blast Desc: protein product [Podospora anserina] gi|170939836|emb|CAP65061.1| protein product [Podospora anserina]
  misc_feature (28)..(329): NCBI GI: 145608538 Blast Desc: MGG_06555 [Magnaporthe grisea 70-15] gi|145016004|gb|EDK00494.1| MGG_06555 [Magnaporthe grisea 70-15]
  misc_feature (4)..(335): NCBI GI: 119477302 Blast Desc: HET domain protein [Neosartorya fischeri NRRL 181] gi|119407408|gb|EAW17357.1| HET domain protein [Neosartorya fischeri NRRL 181]
  misc_feature (4)..(335): NCBI GI: 46128083 Blast Desc: FG08419.1 [Gibberella zeae PH-1]
  misc_feature (28)..(316): NCBI GI: 115397489 Blast Desc: conserved [Aspergillus terreus NIH2624] gi|114192527|gb|EAU34227.1| conserved [Aspergillus terreus NIH2624]
MSCMRVLDTATYELRDTTSIRDFAQDGYAILSHTWSKKGEIAYNTLSTQIDKLKHGKRPLNSESADKIQGACETARNEGLKWIWIDSCCIDKSSTQETNESINAMLLWYRNAKLCVTYLYDVEKRDNANDKEMFQRAPKVKKQEEEEDPEDKLDSPRWFSRGWCLQELLAPKVLKFYDMNWEFLGEKSKLSVALSSLTGIHEGYLTGRMNYLDACIAVKMSWMANRSTTRAEDVSYSLLGILGVRMDVDYGEGGPKAFLRLQETVMNDEIMDESLFAWKMAKPNDEARYASSPDFDDNEWGLLAASPQWFQKSGDLRAPRRSRAFTRDKQQHGVRGPISRDMYNKRAKLTQAAGFFNIIGQPLAARAMNNRAKEDFTLRLNCTNAIGENAEVHLRPRPAEKISWRGNDMHKKPFIECKRIRCTELGFIEKPIKQGMGDGIVFQPTPGRSG

SEQ ID NO: 37481 - DNA, 1386 bp, Muscodor strobelii
  misc_feature: SGI cDNA ID NO. 573007
  misc_feature: Elevated expression when VOC is produced
  misc_feature: Encodes the peptide sequence at SEQ ID NO 37482
atgtccgcaatgccccgccgccagaaagcgtgcattccttgtgcggagtctaaacggagatgcgataaaacgctccccgaatgccaacggtgtatcgacaaagacgtcgattgcgcttacccgcagcccaaaagacgacgtcgggatttcccgacgacgattgagtctcatgccactgagacgtttctcaatataccagatgatgagggggagcaccatccagatactggaacacttagcgatccaagtcagaccattcgtgccagttataggacaaatcctaatgctgttgcggcaaatggtattgagttcggatactgggactccacggctgccgaccatcttgatgcagcctttgttggagacgttacgatgccttacttgagtccagcaataccaactttccctagcccgtggctagatcgggaactacaaatgggcaacaatgatatatcgaaagatcacaaactttctgcaccattctttctgagggacgagacatttgtcgtacatcataaacctgaagagccggagtgcatcactacggttgagatggagcctttcgtgggggaaattgagaaaatgctccatgcctgggtgacgactggatctaatagtttcattcatcgtaggctgtacgataaaggcatgcctacatgcgtccaggatgctttcacaactttcgcagcatacgccaaccgaacgccagcaacaaaggagatagtactacaaatagcagacgaccgagcatcttcgctcgcccgtcatgccctacggcccgccgagaacggcgtgcaagagatctgggcccatttagctcgcgtgcacgccatgtttgtctatgttttcatacggctatatgatggatctgtgagattacgagcgtctacagaacaccaactccccgttcttcggtcgtggttgatgcagatgtgggaaacagtaaagcgccaccgatgggaaaattatccctcagtaaaatacgggagaaggccagcgctgggaccatccgctgacttccatagcgaccacgacactgcaatggagatctggcaattatggattctgaccgaaagtgttcgacggacatatctcgttatcgataccgtcctcaacacctttaagatcatgacggtaggctgggcacaatgtgagggctacgtcatgttcacagtacgccgaggtttatggaccgcagactccgcaatgaaatggtttaacttatgtgaacgtggcgacgcccctttgatggtgcccggtttggctcccggacccgtcgtagctaagtatcctgctgaagagtttgacgacttcgcgaagctctgctggtcatttgtcttaggcacagataagatccagagctgggttgataaaggcagtggttga

SEQ ID NO: 37482 - protein, 461 aa, Muscodor strobelii
  misc_feature: SGI Peptide ID NO. 573007
  misc_feature (9)..(47): Pfam Id: PF00172 Pfam Desc: Fungal Zn(2)-Cys(6) binuclear cluster domain
  misc_feature (195)..(458): NCBI GI: 212535290 Blast Desc: aldo/keto reductase, [Penicillium marneffei ATCC 18224] gi|210070200|gb|EEA24290.1| aldo/keto reductase, [Penicillium marneffei ATCC 18224]
  misc_feature (147)..(461): NCBI GI: 116195774 Blast Desc: CHGG_04485 [Chaetomium globosum CBS 148.51] gi|88180398|gb|EAQ87866.1| CHGG_04485 [Chaetomium globosum CBS 148.51]
  misc_feature (1)..(456): NCBI GI: 256720318 Blast Desc: NECHADRAFT_56119 [Nectria haematococca mpVI 77-13-4]
  misc_feature (6)..(458): NCBI GI: 256721824 Blast Desc: NECHADRAFT_53241 [Nectria haematococca mpVI 77-13-4]
  misc_feature (5)..(459): NCBI GI: 256721547 Blast Desc: NECHADRAFT_78504 [Nectria haematococca mpVI 77-13-4]
  misc_feature (7)..(385): NCBI GI: 46115286 Blast Desc: FG03485.1 [Gibberella zeae PH-1]
  misc_feature (11)..(461): NCBI GI: 171680960 Blast Desc: protein product [Podospora anserina] gi|170940438|emb|CAP65665.1| protein product [Podospora anserina]
  misc_feature (158)..(456): NCBI GI: 212544784 Blast Desc: RNA polymerase II mediator complex component Srb8, [Penicillium marneffei ATCC 18224] gi|210065515|gb|EEA19609.1| RNA polymerase II mediator complex component Srb8, [Penicillium
  misc_feature (184)..(456): NCBI GI: 242813475 Blast Desc: TSTA_101720 [Talaromyces stipitatus ATCC 10500] gi|218714513|gb|EED13936.1| TSTA_101720 [Talaromyces stipitatus ATCC 10500]
  misc_feature (8)..(461): NCBI GI: 154274522 Blast Desc: [Ajellomyces capsulatus NAm1] gi|150414552|gb|EDN09914.1| [Ajellomyces capsulatus NAm1]
  misc_feature: Useful for introducing or modulating the production of volatile compounds
MSAMPRRQKACIPCAESKRRCDKTLPECQRCIDKDVDCAYPQPKRRRRDFPTTIESHATETFLNIPDDEGEHHPDTGTLSDPSQTIRASYRTNPNAVAANGIEFGYWDSTAADHLDAAFVGDVTMPYLSPAIPTFPSPWLDRELQMGNNDISKDHKLSAPFFLRDETFVVHHKPEEPECITTVEMEPFVGEIEKMLHAWVTTGSNSFIHRRLYDKGMPTCVQDAFTTFAAYANRTPATKEIVLQIADDRASSLARHALRPAENGVQEIWAHLARVHAMFVYVFIRLYDGSVRLRASTEHQLPVLRSWLMQMWETVKRHRWENYPSVKYGRRPALGPSADFHSDHDTAMEIWQLWILTESVRRTYLVIDTVLNTFKIMTVGWAQCEGYVMFTVRRGLWTADSAMKWFNLCERGDAPLMVPGLAPGPVVAKYPAEEFDDFAKLCWSFVLGTDKIQSWVDKGSG

SEQ ID NO: 37483 - DNA, 1525 bp, Muscodor strobelii
  misc_feature: SGI EST ID NO. CUFF.89677.0
  misc_feature: Variant of the nucleotide sequence at SEQ ID NO 37481
gtgcatcagtattctgcgaatttcgcggagcaattgtctaaacaatccttagcaacctgatctaagccccgtgcgcgcgctataaggtatcaaaatgtccgcaatgccccgccgccagaaagcgtgcattccttgtgcggagtctaaacggagatgcgataaaacgctccccgaatgccaacggtgtatcgacaaagacgtcgattgcgcttacccgcagcccaaaagacgacgtcgggatttcccgacgacgattgagtctcatgccactgagacgtttctcaatataccagatgatgagggggagcaccatccagatactggaacacttagcgatccaagtcagaccattcgtgccagttataggacaaatcctaatgctgttgcggcaaatggtattgagttcggatactgggactccacggctgccgaccatcttgatgcagcctttgttggagacgttacgatgccttacttgagtccagcaataccaactttccctagcccgtggctagatcgggaactacaaatgggcaacaatgatatatcgaaagatcacaaactttctgcaccattctttctgagggacgagacatttgtcgtacatcataaacctgaagagccggagtgcatcactacggttgagatggagcctttcgtgggggaaattgagaaaatgctccatgcctgggtgacgactggatctaatagtttcattcatcgtaggctgtacgataaaggcatgcctacatgcgtccaggatgctttcacaactttcgcagcatacgccaaccgaacgccagcaacaaaggagatagtactacaaatagcagacgaccgagcatcttcgctcgcccgtcatgccctacggcccgccgagaacggcgtgcaagagatctgggcccatttagctcgcgtgcacgccatgtttgtctatgttttcatacggctatatgatggatctgtgagattacgagcgtctacagaacaccaactccccgttcttcggtcgtggttgatgcagatgtgggaaacagtaaagcgccaccgatgggaaaattatccctcagtaaaatacgggagaaggccagcgctgggaccatccgctgacttccatagcgaccacgacactgcaatggagatctggcaattatggattctgaccgaaagtgttcgacggacatatctcgttatcgataccgtcctcaacacctttaagatcatgacggtaggctgggcacaatgtgagggctacgtcatgttcacagtacgccgaggtttatggaccgcagactccgcaatgaaatggtttaacttatgtgaacgtggcgacgcccctttgatggtgcccggtttggctcccggacccgtcgtagctaagtatcctgctgaagagtttgacgacttcgcgaagctctgctggtcatttgtcttaggcacagataagatccagagctgggttgataaaggcagtggttgaacgagccagcacatattgtggatgtagaaaaatgtgaacaatgag

SEQ ID NO: 37484 - DNA, 1029 bp, Muscodor strobelii
  misc_feature: SGI cDNA ID NO. 573008
  misc_feature: Encodes the peptide sequence at SEQ ID NO 37485
atgtcttcgaattccccagtcaaaattgtcctcggaacgcatacaatcggttccaagacagcaaaccctggaattgcccactttgatgagccggaagaagtcaagcagcttctcgatacattttacgatcgagggcacaggttcattgataccggcagtaattatcctggctctgaactacggcttggcgctgctggcgctccctcacgcttcactattatcagcaaagttcgcgatggtccaccaggatctcatgagccatccaaaattgaagctagcattgcccagtcgctcgaagaacttcagaccacaagtgtggacactatgatgctgcatgtacctgaccgcgagacgccattcgaggatgctgccaaagcaatcaacaaggcatatcaagaggggaagttcaagcgcttcggtttgtcgaactacacagctgcggaagttcagaaattcatcgacatttgcgaagccaatggctacgtcaaaccgacggtatacgagggacactacaatgccattttcaggagtggcgagaaggagttatttccgcttcttcgcaagcataatattccgtttatgggctatagtcccgcggccgggggtctcttctcggggcatgcgggaacctcgacatcgtcgaaacgttgggacaacgatgtgagcttccctaaacataccttgcaggctcttattaacaaatatatccctattgtccagaacttaatcgggaagaattatagcggcgcctatggtcatcctttgatccaagcctcggtcggtccaattgtagctgccgcagaaaagcatggcatcagcggccatgccgccgctttgagatggacagcttttcatagcattttaagtggcgaacatggcgacgctatcgttttcactgtgtcgaagatggagcagttgcatcagactctcgatgccttcgatgcagggccgctccctttggatctggcagaagctttctctgccttgtttgacaatacggaggctccaaacctgccataccatctctaa

SEQ ID NO: 37485 - protein, 342 aa, Muscodor strobelii
  misc_feature: SGI Peptide ID NO. 573008
  misc_feature (18)..(328): Pfam Id: PF00248 Pfam Desc: Aldo/keto reductase family
  misc_feature (30)..(206): Pfam Id: PF00248 Pfam Desc: Aldo/keto reductase family
  misc_feature (2)..(342): NCBI GI: 116195776 Blast Desc: CHGG_04486 [Chaetomium globosum CBS 148.51] gi|88180399|gb|EAQ87867.1| CHGG_04486 [Chaetomium globosum CBS 148.51]
  misc_feature (44)..(342): NCBI GI: 212535290 Blast Desc: aldo/keto reductase, [Penicillium marneffei ATCC 18224] gi|210070200|gb|EEA24290.1| aldo/keto reductase, [Penicillium marneffei ATCC 18224]
  misc_feature (1)..(333): NCBI GI: 212541014 Blast Desc: aldo/keto reductase, [Penicillium marneffei ATCC 18224] gi|210067961|gb|EEA22053.1| aldo/keto reductase, [Penicillium marneffei ATCC 18224]
  misc_feature (3)..(330): NCBI GI: 242799919 Blast Desc: aldo/keto reductase, [Talaromyces stipitatus ATCC 10500] gi|218716824|gb|EED16245.1| aldo/keto reductase, [Talaromyces stipitatus ATCC 10500]
  misc_feature (25)..(342): NCBI GI: 256724268 Blast Desc: NECHADRAFT_53519 [Nectria haematococca mpVI 77-13-4]
  misc_feature (1)..(342): NCBI GI: 169772957 Blast Desc: [Aspergillus oryzae RIB40] gi|83768808|dbj|BAE58945.1| protein product [Aspergillus oryzae]
  misc_feature (31)..(334): NCBI GI: 115402295 Blast Desc: [Aspergillus terreus NIH2624] gi|114189070|gb|EAU30770.1| [Aspergillus terreus NIH2624]
  misc_feature (5)..(335): NCBI GI: 255944591 Blast Desc: Pc20g05270 [Penicillium chrysogenum Wisconsin 54-1255] gi|211587798|emb|CAP85856.1| Pc20g05270 [Penicillium chrysogenum Wisconsin 54-1255]
  misc_feature (7)..(335): NCBI GI: 255943257 Blast Desc: Pc18g05700 [Penicillium chrysogenum Wisconsin 54-1255] gi|211587130|emb|CAP94794.1| Pc18g05700 [Penicillium chrysogenum Wisconsin 54-1255]
  misc_feature (8)..(223): NCBI GI: 242799924 Blast Desc: aldo/keto reductase, [Talaromyces stipitatus ATCC 10500] gi|218716825|gb|EED16246.1| aldo/keto reductase, [Talaromyces stipitatus ATCC 10500]
  misc_feature (5)..(186): SWISSPROT Homolog: EC 1.1.1.91 Aryl-alcohol dehydrogenase (NADP(+))
MSSNSPVKIVLGTHTIGSKTANPGIAHFDEPEEVKQLLDTFYDRGHRFIDTGSNYPGSELRLGAAGAPSRFTIISKVRDGPPGSHEPSKIEASIAQSLEELQTTSVDTMMLHVPDRETPFEDAAKAINKAYQEGKFKRFGLSNYTAAEVQKFIDICEANGYVKPTVYEGHYNAIFRSGEKELFPLLRKHNIPFMGYSPAAGGLFSGHAGTSTSSKRWDNDVSFPKHTLQALINKYIPIVQNLIGKNYSGAYGHPLIQASVGPIVAAAEKHGISGHAAALRWTAFHSILSGEHGDAIVFTVSKMEQLHQTLDAFDAGPLPLDLAEAFSALFDNTEAPNLPYHL

SEQ ID NO: 37486 - DNA, 972 bp, Muscodor strobelii
  misc_feature: SGI cDNA ID NO. 573009
  misc_feature: Encodes the peptide sequence at SEQ ID NO 37487
atgtcgaccaccaataaaatgaagatcgtctgcggtaccatgtccttcgggaaagaggggactcgtggtttccctcatatcaacagcgtggaggaggcgggtaaggttctcgacgtattccagcgccacggtcacaccgagctagactccgcacgtgcctacggtgagggtagtacagaagaactgctcggtgatttgagctggcagaagcgaggcctcaagatggacaccaaactgtacccgactgcgggtcacgcattggagaagactgcaggttatacgcacaagcctgaggatgtccgacgaggactactcgacagcttgaaagcactgaaagccgacaagatcgagatgttttatctccacgggcctgatcgcaaacatccctacgaggacaccctccgcgctgtcaatgagctgcaccaggaaggttatttcaatcgatttggagtgagcaatttcatggcttgggaggtggcacagatgtgtgaaattgcaaggcgttacggctggattcagcccactgcatatgaagggcattatcacgctcttcagcgtaacgtcgaggccgaattgttcccatgccttcgctactacggtatctcgttttatgtgtactcccctcttgcaagcgggttcttgacaggacgctttgatcgcggaaaagagatcaccaacttccacctgaagcatctctggaatccccagtattatgacgcgctagacatcatcaagccagctgcacagaaacatggactaaccattgccgagactgctctccgctggcttgtccaccattcgaacttgcagaccgaactgtctgatgctattatccttggtgcagggagcgtcaagaacttagaggctaatctgactgatcttgaaaagggtcctctacccgaagatgttgtgaaagctctgaacgatgcttggcttgcatgcaaaggtgccgcaaggccttaccactactga

SEQ ID NO: 37487 - protein, 323 aa, Muscodor strobelii
  misc_feature: SGI Peptide ID NO. 573009
  misc_feature (17)..(312): Pfam Id: PF00248 Pfam Desc: Aldo/keto reductase family
  misc_feature (93)..(312): Pfam Id: PF00248 Pfam Desc: Aldo/keto reductase family
  misc_feature (1)..(321): NCBI GI: 121719372 Blast Desc: aldo/keto reductase [Aspergillus clavatus NRRL 1] gi|119404583|gb|EAW14959.1| aldo/keto reductase [Aspergillus clavatus NRRL 1]
  misc_feature (7)..(322): NCBI GI: 156060625 Blast Desc: SS1G_02454 [Sclerotinia sclerotiorum 1980] gi|154699859|gb|EDN99597.1| SS1G_02454 [Sclerotinia sclerotiorum 1980]
  misc_feature (2)..(322): NCBI GI: 154314088 Blast Desc: BC1G_04987 [Botryotinia fuckeliana B05.10] gi|150849133|gb|EDN24326.1| BC1G_04987 [Botryotinia fuckeliana B05.10]
  misc_feature (1)..(321): NCBI GI: 169765019 Blast Desc: [Aspergillus oryzae RIB40] gi|83764835|dbj|BAE54979.1| protein product [Aspergillus oryzae]
  misc_feature (5)..(323): NCBI GI: 242760726 Blast Desc: oxidoreductase, [Talaromyces stipitatus ATCC 10500] gi|218723244|gb|EED22661.1| oxidoreductase, [Talaromyces stipitatus ATCC 10500]
  misc_feature (1)..(321): NCBI GI: 145231374 Blast Desc: An02g00310 [Aspergillus niger] gi|134056071|emb|CAK96246.1| protein product [Aspergillus niger]
  misc_feature (5)..(321): NCBI GI: 154309975 Blast Desc: BC1G_06908 [Botryotinia fuckeliana B05.10] gi|150851696|gb|EDN26889.1| BC1G_06908 [Botryotinia fuckeliana B05.10]
  misc_feature (5)..(321): NCBI GI: 156039233 Blast Desc: SS1G_11753 [Sclerotinia sclerotiorum 1980] gi|154697490|gb|EDN97228.1| SS1G_11753 [Sclerotinia sclerotiorum 1980]
  misc_feature (1)..(323): NCBI GI: 212539211 Blast Desc: aldo/keto reductase, [Penicillium marneffei ATCC 18224] gi|210069503|gb|EEA23594.1| aldo/keto reductase, [Penicillium marneffei ATCC 18224]
  misc_feature (1)..(321): NCBI GI: 169595960 Blast Desc: SNOG_00727 [Phaeosphaeria nodorum SN15] gi|111071102|gb|EAT92222.1| SNOG_00727 [Phaeosphaeria nodorum SN15]
  misc_feature (1)..(297): SWISSPROT Homolog: EC 1.1.1.65 Pyridoxine 4-dehydrogenase
MSTTNKMKIVCGTMSFGKEGTRGFPHINSVEEAGKVLDVFQRHGHTELDSARAYGEGSTEELLGDLSWQKRGLKMDTKLYPTAGHALEKTAGYTHKPEDVRRGLLDSLKALKADKIEMFYLHGPDRKHPYEDTLRAVNELHQEGYFNRFGVSNFMAWEVAQMCEIARRYGWIQPTAYEGHYHALQRNVEAELFPCLRYYGISFYVYSPLASGFLTGRFDRGKEITNFHLKHLWNPQYYDALDIIKPAAQKHGLTIAETALRWLVHHSNLQTELSDAIILGAGSVKNLEANLTDLEKGPLPEDVVKALNDAWLACKGAARPYHY

SEQ ID NO: 37488 - DNA, 1266 bp, Muscodor strobelii
  misc_feature: SGI cDNA ID NO. 573010
  misc_feature: Encodes the peptide sequence at SEQ ID NO 37489
atggcttctacatatgaagaacccccgccacactttctgtcagggaagagggtcatcgtggctggcgccggaatggctggcctcgctttcgtgacagcaatgggaaaactttgggactcatcgatagaaccgcccgtcttcgacctgtttgagcgcgatcttgaagacatcagccttcagagggaggggtactcgctatcgctcaacggagacgaccgtaacagcggactttacgctttaaaaaagttaggacttctcgatgctactctcgaccatgctattctgcgagtagaagggcagggcagcttcacgatgtggacgcatgaattcaagccgatgctcaccgtgcgaccgaagcctccatctgatctgccgacaggaggaatacgcatcgcgcgaaaggacctgcggcgtgttttagttgacgctgcatctgagactgtgaatgtccaatggggaagaacctgtaaatccgcgagccgccttgagaacggacggatgcgcgttcaagtggtggtggaggagacaggcgaggagacgtacgaagactgtgatctactcgtcgctgcggatggggcatcaagcaagattagaagttgctttcgaccaaacgatgatctacagttcgcaggggccgttcaaatgggaggaaatgctaaattcgaaaacggaattccgcctcctcatgatgtcaattggggtgtcgtactcaccggatgtggcgtttcttgtttcttctctccagttgatcatcatactcttgtctgggcactgagcattcgtgagcagacacccagggccaagtacaacaatggcaatactgaacacgtccgcaaaatgctggaggaggcgagggacctaggcaagacgattacggagcctttcggtaccatcgtcgacgccactgacccctcatctacactcgtgttgaatgctagagacaaacagccattctctcacgacttacagatagggccagtacttttcttaggagacagtaaccatgccgtgagcccatttgccggtaatggagcaaatttggccctccaagatggttgggatcttgcagaacagttctgcagatccactaatctggaaaaagctgcagcatcttacgataaactgtctatgcctcgggccatagcgactatcaagacgtcgcattcgcgaatacacataggtcacgtcgtgggttttcagtactggatgtatcgctgtctgttttccttcgctgggaccatgttgaaaatcttaggcaaggcgtaa

SEQ ID NO: 37489 - protein, 421 aa, Muscodor strobelii
  misc_feature: SGI Peptide ID NO. 573010
  misc_feature (15)..(387): Pfam Id: PF01494 Pfam Desc: FAD binding domain
  misc_feature (8)..(420): NCBI GI: 256724714 Blast Desc: NECHADRAFT_48339 [Nectria haematococca mpVI 77-13-4]
  misc_feature (11)..(419): NCBI GI: 171679970 Blast Desc: protein product [Podospora anserina] gi|170939611|emb|CAP64838.1| protein product [Podospora anserina]
  misc_feature (8)..(400): NCBI GI: 256728186 Blast Desc: NECHADRAFT_16238 [Nectria haematococca mpVI 77-13-4]
  misc_feature (11)..(398): NCBI GI: 46126211 Blast Desc: FG07483.1 [Gibberella zeae PH-1]
  misc_feature (8)..(419): NCBI GI: 119192520 Blast Desc: CIMG_00637 [Coccidioides immitis RS]
  misc_feature (12)..(415): NCBI GI: 258573891 Blast Desc: [Uncinocarpus reesii 1704] gi|237901393|gb|EEP75794.1| [Uncinocarpus reesii 1704]
  misc_feature (8)..(419): NCBI GI: 240106058 Blast Desc: FAD binding domain containing protein [Coccidioides posadasii C735 delta SOWgp]
  misc_feature (9)..(410): NCBI GI: 242774064 Blast Desc: monooxygenase, [Talaromyces stipitatus ATCC 10500] gi|218721986|gb|EED21404.1| monooxygenase, [Talaromyces stipitatus ATCC 10500]
  misc_feature (9)..(405): NCBI GI: 212537317 Blast Desc: monooxygenase, [Penicillium marneffei ATCC 18224] gi|210068556|gb|EEA22647.1| monooxygenase, [Penicillium marneffei ATCC 18224]
  misc_feature (13)..(370): NCBI GI: 148554358 Blast Desc: monooxygenase, FAD-binding [Sphingomonas wittichii RW1] gi|148499548|gb|ABQ67802.1| monooxygenase, FAD-binding [Sphingomonas wittichii RW1]
  misc_feature (17)..(399): SWISSPROT Homolog: EC 1.14.13.90 Zeaxanthin epoxidase
MASTYEEPPPHFLSGKRVIVAGAGMAGLAFVTAMGKLWDSSIEPPVFDLFERDLEDISLQREGYSLSLNGDDRNSGLYALKKLGLLDATLDHAILRVEGQGSFTMWTHEFKPMLTVRPKPPSDLPTGGIRIARKDLRRVLVDAASETVNVQWGRTCKSASRLENGRMRVQVVVEETGEETYEDCDLLVAADGASSKIRSCFRPNDDLQFAGAVQMGGNAKFENGIPPPHDVNWGVVLTGCGVSCFFSPVDHHTLVWALSIREQTPRAKYNNGNTEHVRKMLEEARDLGKTITEPFGTIVDATDPSSTLVLNARDKQPFSHDLQIGPVLFLGDSNHAVSPFAGNGANLALQDGWDLAEQFCRSTNLEKAAASYDKLSMPRAIATIKTSHSRIHIGHVVGFQYWMYRCLFSFAGTMLKILGKA

SEQ ID NO: 37490 - DNA, 2063 bp, Muscodor strobelii
  misc_feature: SGI EST ID NO. CUFF.89683.0
  misc_feature: Variant of the nucleotide sequence at SEQ ID NO 37488
atttcccttttcaacgatgaggacattactagtattactaccaaccttgcgtcgtatttcgttttcggacctcgggggtctaccattagcgaagccagtcaattgtcggcttaggctgcaatattaagatgaagacctgaatcggctcacgtccgtccatcatgaatgtacaacaaatcctgacagggcttgaaaaaatattgctgcctataagccacatgttaaaaggaaagagactaatgaaatattgatcatcataagaagcagactatctcgcaccggttccatgtgtccgtacaatttacagaacatcagcacgcatccaatcccgagcaactatggcttctacatatgaagaacccccgccacactttctgtcagggaagagggtcatcgtggctggcgccggaatggctggcctcgctttcgtgacagcaatgggaaaactttgggactcatcgatagaaccgcccgtcttcgacctgtttgagcgcgatcttgaagacatcagccttcagagggaggggtactcgctatcgctcaacggagacgaccgtaacagcggactttacgctttaaaaaagttaggacttctcgatgctactctcgaccatgctattctgcgagtagaagggcagggcagcttcacgatgtggacgcatgaattcaagccgatgctcaccgtgcgaccgaagcctccatctgatctgccgacaggaggaatacgcatcgcgcgaaaggacctgcggcgtgttttagttgacgctgcatctgagactgtgaatgtccaatggggaagaacctgtaaatccgcgagccgccttgagaacggacggatgcgcgttcaagtggtggtggaggagacaggcgaggagacgtacgaagactgtgatctactcgtcgctgcggatggggcatcaagcaagattagaagttgctttcgaccaaacgatgatctacagttcgcaggggccgttcaaatgggaggaaatgctaaattcgaaaacggaattccgcctcctcatgatgtcaattggggtgtcgtactcaccggatgtggcgtttcttgtttcttctctccagttgatcatcatactcttgtctgggcactgagcattcgtgagcagacacccagggccaagtacaacaatggcaatactgaacacgtccgcaaaatgctggaggaggcgagggacctaggcaagacgattacggagcctttcggtaccatcgtcgacgccactgacccctcatctacactcgtgttgaatgctagagacaaacagccattctctcacgacttacagatagggccagtacttttcttaggagacagtaaccatgccgtgagcccatttgccggtaatggagcaaatttggccctccaagatggttgggatcttgcagaacagttctgcagatccactaatctggaaaaagctgcagcatcttacgataaactgtctatgcctcgggccatagcgactatcaagacgtcgcattcgcgaatacacataggtcacgtcgtgggttttcagtactggatgtatcgctgtctgttttccttcgctgggaccatgttgaaaatcttaggcaaggcgtaatcttatcttattcagagctcacttcaagaccagaagggcacatgccctcgtttctaggtgtggtttactatgtgcaagtcgcattgacaatgtatcaaggaaatgtattatgtatcctagcgatggaactggcaaatgaacaacgctcccattacatgtctccattcgagaatcaagcgacctgaatctagactctatgtcagttcggcaccactgctgggacactggctggtttttagcaatcaacaactcaaaaagttcgcgccgctacttcaaacacctacttatacggacatcatgtttggggtcacgcagctcaccatcgctattaatgaaacactcatgtacaggacatatagccggtttgtagacagccaagaataggttcattgagaatctacgactcggttgatgagaaatatggccatgttcaatttacactaaaaaatgttaatttac

SEQ ID NO: 37491 - DNA, 1032 bp, Muscodor strobelii
  misc_feature: SGI cDNA ID NO. 573011
  misc_feature: Encodes the peptide sequence at SEQ ID NO 37492
atgacggcaagttctagcaatacaaagcaggccgtcgccagcatcttcaactcggcgctcgctgcccctgggattggagccgcttgggagctcggcattctcgatgtactacatgaaaagcagcagctgaacatagaagaatattctgcaaaatatgaactacatctcccctctatccaaggccttgtcagtgtcctggttgctgtcaacgtcttgaagcgggaccagaacgagatagtcccaggacccctatttgaagacacgtataaggccaagtcactcttccactggatgacacttggccaaggcaatttatttacgcggatgcaatacatcttgcgtaacgagaatcgcacgggagaatattacgctcgagactcagctgccatctcgtatgcgtgccgggacatcaacgcacaatacattgacccgacgttctgggctgccgtggtagcactcaatttcaaattctctaaaatagtcgacctcggctgcggtagtggaggacggttgatgcagtttcttgaccgctatcctataatcaagggcatcggcgtcgatatcgccgtaccttcaatgaaagttgccagggacgaagcacaagctcacagctacggcaatcgactcgcattcatacagggtgacgtctttcagctgagctttcgtgaggagttcgccgacgttgacctcctctgctgttttatgatgggtcatgatttctggccacgtcaaaactgtgtcgagacattgcgccggatccgcgactctttccccaaagctcgtcgattcttccttggagatactactagggtcttcttgaatggcggagatcctcaatacccaatcgcagaggcagatgcacctgttttcactttaggttttgagttcgcccatgccatgatgggtgtgactattccaagcatggacgattgggatggcgtcttcgccgagggcggttggcgctgtgtgaaaaggcatttgacagatgttgatccgccgttctgggtcatctttgagcttgaacacacgtga

SEQ ID NO: 37492 - protein, 343 aa, Muscodor strobelii
  misc_feature: SGI Peptide ID NO. 573011
  misc_feature (161)..(257): Pfam Id: PF08241 Pfam Desc: Methyltransferase domain
  misc_feature (161)..(228): Pfam Id: PF08241 Pfam Desc: Methyltransferase domain
  misc_feature (7)..(341): NCBI GI: 189211648 Blast Desc: methyltransferase MppJ [Pyrenophora tritici-repentis Pt-1C-BFP] gi|189211670|ref|XP_001942164.1| methyltransferase MppJ [Pyrenophora tritici-repentis Pt-1C-BFP] methyltransferase
  misc_feature (4)..(341): NCBI GI: 52222860 Blast Desc: methyltransferase MppJ [Streptomyces hygroscopicus]
  misc_feature (2)..(340): NCBI GI: 256817389 Blast Desc: SgriT_30066 [Streptomyces griseoflavus Tu4000]
  misc_feature (12)..(340): NCBI GI: 280961156 Blast Desc: Methyltransferase type 11 [Frankia sp. EuI1c] gi|270734715|gb|EFA62912.1| Methyltransferase type 11 [Frankia sp. EuI1c]
  misc_feature (90)..(326): NCBI GI: 284046284 Blast Desc: Methyltransferase type 12 [Conexibacter woesei DSM 14684] gi|283950505|gb|ADB53249.1| Methyltransferase type 12 [Conexibacter woesei DSM 14684]
  misc_feature (103)..(267): NCBI GI: 158530275 Blast Desc: methyltransferase [Streptomyces refuineus subsp. thermotolerans]
  misc_feature (54)..(267): NCBI GI: 159796251 Blast Desc: LmbW [Streptomyces lincolnensis]
  misc_feature (54)..(267): NCBI GI: 487713 Blast Desc: lmbW [Streptomyces lincolnensis]
  misc_feature (25)..(245): NCBI GI: 167742867 Blast Desc: Bpse14_32632 [Burkholderia pseudomallei 14]
  misc_feature (25)..(245): NCBI GI: 167898474 Blast Desc: Bpse7_32366 [Burkholderia pseudomallei 7894] gi|167906825|ref|ZP_02494030.1| BpseN_31645 [Burkholderia pseudomallei NCTC 13177] gi|237507795|ref|ZP_04520510.1| family
MTASSSNTKQAVASIFNSALAAPGIGAAWELGILDVLHEKQQLNIEEYSAKYELHLPSIQGLVSVLVAVNVLKRDQNEIVPGPLFEDTYKAKSLFHWMTLGQGNLFTRMQYILRNENRTGEYYARDSAAISYACRDINAQYIDPTFWAAVVALNFKFSKIVDLGCGSGGRLMQFLDRYPIIKGIGVDIAVPSMKVARDEAQAHSYGNRLAFIQGDVFQLSFREEFADVDLLCCFMMGHDFWPRQNCVETLRRIRDSFPKARRFFLGDTTRVFLNGGDPQYPIAEADAPVFTLGFEFAHAMMGVTIPSMDDWDGVFAEGGWRCVKRHLTDVDPPFWVIFELEHT

SEQ ID NO: 37493 - DNA, 227 bp, Muscodor strobelii
  misc_feature: SGI EST ID NO. CUFF.89693.0
  misc_feature: Variant of the nucleotide sequence at SEQ ID NO 37491
tagcaatacaaagcaggccgtcgccagcatcttcaactcggcgctcgctgcccctgggattggagccgcttgggagctcggcattctcgatgtactacatgaaaagcagcagctgaacatagaagaatattctgcaaaatatgaactacatctcccctctatccaaggccttgtcagtgtcctggttgctgtcaacgtcttgaagcgggaccagaacgagatagtcc

SEQ ID NO: 37494 - DNA, 1140 bp, Muscodor strobelii
  misc_feature: SGI cDNA ID NO. 573012
  misc_feature: Encodes the peptide sequence at SEQ ID NO 37495
atggcaaaatttcctccacctcctaccaaagctgtcgactgggcaagccacggcaatcagttcatcgaagtaaatggccatatcgagtcgacatattcgatggctaccaaatgctggacacccttgcgtttcgtgcccgatccttacatgcgcgtgcatggcatggcaccaggcttgaactatggacagcaagtaattgaaggcctcaaggcatctcgagggcccggggaccacgaggtatcagtttttcgaccggatgctcacgcgctacgcatgcaacactctgccgacgtggtctcgataccgcgcatccctgtcgacatgttcgaacaggcttgtcgctcagccgttgcccataatgccgattttgttccaccccacgacaccggcggtgcagcgtatgtgcgaccgctactttacggttcaagcccccatctgatgatgtggccgccggaagactataccttctgcgtctatgttgtccccgttgggggcagtccaaatgcgaagccagtgaacgcaataatcttggatgaattcgatcgttcggcacccaaaggcaccggtcatgctaagcttggtgggaattacgcaccagtctttcggtggtcagaggctacaaagaaagaaggctatggcatgatacttcacgtcgacagtgctaagcacgaggagattgacgaattcagtacatgcggctttattggcgtcaagtccaatgggctagatgacgtgacccttgtcgtgccagattcagagtgcatcatcgagagtgttaccagttccagcgtgctggccatcgcgcaacgatggggctggaacgttgagaaacgccccgtccagttcacagagcttggtgattttgacgaggtcatggctgctggtacgtttctgagtctcgtcccgatacgctctatcactcgtcgaagaagagttggggcaattctagagggtccaaaagtgagctttgcttctggatcggatataatcacatacatggctgagactcaagaaggaggcccggtgcacagaagcctttttacctatctccgggaaattcagcgagttcaggtccaggatgagttcaagtggcgtttcacagtaacggaggaggacttgaaaaagtgcattgtgcactag

SEQ ID NO: 37495 - protein, 379 aa, Muscodor strobelii
  misc_feature: SGI Peptide ID NO. 573012
  misc_feature (43)..(325): Pfam Id: PF01063 Pfam Desc: Aminotransferase class IV
  misc_feature (43)..(199): Pfam Id: PF01063 Pfam Desc: Aminotransferase class IV
  misc_feature (1)..(372): NCBI GI: 189211646 Blast Desc: branched-chain-amino-acid aminotransferase 5 [Pyrenophora tritici-repentis Pt-1C-BFP] gi|189211672|ref|XP_001942165.1| branched-chain-amino-acid 5 5 5
  misc_feature (1)..(372): NCBI GI: 46122637 Blast Desc: FG05696.1 [Gibberella zeae PH-1]
  misc_feature (2)..(377): NCBI GI: 171695708 Blast Desc: protein product [Podospora anserina] gi|170948096|emb|CAP60260.1| protein product [Podospora anserina]
  misc_feature (2)..(376): NCBI GI: 39968065 Blast Desc: MGG_02125 [Magnaporthe grisea 70-15] gi|145013009|gb|EDJ97650.1| MGG_02125 [Magnaporthe grisea 70-15]
  misc_feature (4)..(374): NCBI GI: 156036256 Blast Desc: SS1G_12816 [Sclerotinia sclerotiorum 1980] gi|154698222|gb|EDN97960.1| SS1G_12816 [Sclerotinia sclerotiorum 1980]
  misc_feature (1)..(378): NCBI GI: 116181200 Blast Desc: CHGG_01228 [Chaetomium globosum CBS 148.51] gi|88185525|gb|EAQ92993.1| CHGG_01228 [Chaetomium globosum CBS 148.51]
  misc_feature (4)..(375): NCBI GI: 154308438 Blast Desc: branched-chain-amino-acid aminotransferase [Botryotinia fuckeliana B05.10] gi|150852820|gb|EDN28012.1| branched-chain-amino-acid aminotransferase [Botryotinia B05.10]
  misc_feature (4)..(370): NCBI GI: 242805580 Blast Desc: branched-chain amino acid aminotransferase [Talaromyces stipitatus ATCC 10500] gi|218715186|gb|EED14608.1| branched-chain amino acid aminotransferase [Talaromyces ATCC
  misc_feature (12)..(365): NCBI GI: 169782554 Blast Desc: [Aspergillus oryzae RIB40] gi|83774483|dbj|BAE64606.1| protein product [Aspergillus oryzae]
  misc_feature (1)..(368): NCBI GI: 189193681 Blast Desc: branched-chain-amino-acid aminotransferase [Pyrenophora tritici-repentis Pt-1C-BFP] gi|187978743|gb|EDU45369.1| branched-chain-amino-acid Pt-1C-BFP]
  misc_feature (14)..(364): SWISSPROT Homolog: EC 2.6.1.42 Branched-chain-amino-acid transaminase
  misc_feature: Useful for introducing or modulating the production of volatile compounds
  misc_feature: Useful for fungicidal and/or biocontrol applications
  misc_feature: Useful for production of fusel alcohols
MAKFPPPPTKAVDWASHGNQFIEVNGHIESTYSMATKCWTPLRFVPDPYMRVHGMAPGLNYGQQVIEGLKASRGPGDHEVSVFRPDAHALRMQHSADVVSIPRIPVDMFEQACRSAVAHNADFVPPHDTGGAAYVRPLLYGSSPHLMMWPPEDYTFCVYVVPVGGSPNAKPVNAIILDEFDRSAPKGTGHAKLGGNYAPVFRWSEATKKEGYGMILHVDSAKHEEIDEFSTCGFIGVKSNGLDDVTLVVPDSECIIESVTSSSVLAIAQRWGWNVEKRPVQFTELGDFDEVMAAGTFLSLVPIRSITRRRRVGAILEGPKVSFASGSDIITYMAETQEGGPVHRSLFTYLREIQRVQVQDEFKWRFTVTEEDLKKCIVH

SEQ ID NO: 37496 - DNA, 1074 bp, Muscodor strobelii
  misc_feature: SGI cDNA ID NO. 573013
  misc_feature: Encodes the peptide sequence at SEQ ID NO 37497
atggctgcagctcaacctattctcattcgcgcagacgatgaatggtcgcctcttcaggctgtcatcgttggtcgagcagaacactcagcattcccttcagagccataccacatgatggcagcaaccatgccctcagaaaatctagccaacttcaagccatccaaccccttcccaccgaatattcttacaaaggcagaagaagagcttgaaaactttgtagatattctgaaaaggcaaggaatacgtgtgtatcgtcccaacaaggtcaattgggtaaagaccaagggatacaccgggtctatgccacgagatggcttgatgacagtgggctcagtgctcattgaagctccctttgcctggaactgccgtcgccatgagatcggccttgcgtattctgatattctctccgatctgagcagcaatggctcagtcaccatttgccgagcaccattgattactggtcataacacgctatacgacggtctacggtgcgacagtgacttcaaagaacagcattgggcaatcaacaactcgaggcctgcattcgacgcagctgatttcatgcgatttggcaaggtaattattgggcagctgagccatgtgacaaatcggaagggagtggattatttgaaggctctggtccccgaaggctactctgtcgagattctcaacaccactgatgagcacgccatgcatatagatgcaaccctcctcccacttcgcgagggccttctggtgtataatcctgagcgcgtatccgagcaagaacttaggttacacgaagtgtttcgcgaatggacgttgcacgcgtatcctttcaaaccaaagccccgggagggcagcagcccccctctctacatgtgcagcccatggctagttttgaacgctcttagcttggacgagaaacgaatcattgttgaggcccatgacaaggagttcgcttcttggcttgaaacactggggatggagccaatcatgtgcccgtttcagcatgtcaacagcattggaggctcttttcactgtgctactgttgatctcgtcagaaatgcggccaataactacgagagtgcctaa

SEQ ID NO: 37497 - protein, 357 aa, Muscodor strobelii
  misc_feature: SGI Peptide ID NO. 573013
  misc_feature (13)..(348): Pfam Id: PF02274 Pfam Desc: Amidinotransferase
  misc_feature (1)..(349): NCBI GI: 238841177 Blast Desc: lysine amidinotransferase [Microsporum canis CBS 113480]
  misc_feature (1)..(348): NCBI GI: 240109228 Blast Desc: Amidinotransferase family protein [Coccidioides posadasii C735 delta SOWgp]
  misc_feature (1)..(348): NCBI GI: 258571754 Blast Desc: conserved [Uncinocarpus reesii 1704] gi|237904950|gb|EEP79351.1| conserved [Uncinocarpus reesii 1704]
  misc_feature (1)..(348): NCBI GI: 119182294 Blast Desc: CIMG_06186 [Coccidioides immitis RS]
  misc_feature (6)..(349): NCBI GI: 85084916 Blast Desc: NCU07176 [Neurospora crassa OR74A] gi|28918492|gb|EAA28165.1| [Neurospora crassa OR74A] gi|28950240|emb|CAD71107.1| related to l-arginine:lysine crassa]
  misc_feature (14)..(351): NCBI GI: 254390861 Blast Desc: lysine amidinotransferase [Streptomyces clavuligerus ATCC 27064] gi|197704559|gb|EDY50371.1| lysine amidinotransferase [Streptomyces clavuligerus ATCC 27064]
  misc_feature (14)..(350): NCBI GI: 5919222 Blast Desc: AF186235_1 L-arginine:lysine amidinotransferase [Pseudomonas syringae pv. phaseolicola] gi|74132210|gb|AAZ99811.1| AmtA [Pseudomonas syringae pv. lysine
  misc_feature (14)..(350): NCBI GI: 71733435 Blast Desc: L-arginine:lysine amidinotransferase, [Pseudomonas syringae pv. phaseolicola 1448A] gi|71553988|gb|AAZ33199.1| L-arginine:lysine amidinotransferase, [Pseudomonas syringae pv.
  misc_feature (13)..(350): NCBI GI: 253987594 Blast Desc: l-arginine:lysine amidinotransferase, [Photorhabdus asymbiotica] gi|253779044|emb|CAQ82204.1| l-arginine:lysine amidinotransferase, [Photorhabdus asymbiotica]
  misc_feature (13)..(351): NCBI GI: 37524180 Blast Desc: plu0158 [Photorhabdus luminescens subsp. laumondii TTO1] gi|36783603|emb|CAE12453.1| protein product [Photorhabdus luminescens subsp. laumondii TTO1]
  misc_feature (13)..(351): SWISSPROT Homolog: EC 2.1.4.1 Glycine amidinotransferase
MAAAQPILIRADDEWSPLQAVIVGRAEHSAFPSEPYHMMAATMPSENLANFKPSNPFPPNILTKAEEELENFVDILKRQGIRVYRPNKVNWVKTKGYTGSMPRDGLMTVGSVLIEAPFAWNCRRHEIGLAYSDILSDLSSNGSVTICRAPLITGHNTLYDGLRCDSDFKEQHWAINNSRPAFDAADFMRFGKVIIGQLSHVTNRKGVDYLKALVPEGYSVEILNTTDEHAMHIDATLLPLREGLLVYNPERVSEQELRLHEVFREWTLHAYPFKPKPREGSSPPLYMCSPWLVLNALSLDEKRIIVEAHDKEFASWLETLGMEPIMCPFQHVNSIGGSFHCATVDLVRNAANNYESA

SEQ ID NO: 37498 - DNA, 522 bp, Muscodor strobelii
  misc_feature: SGI EST ID NO. CUFF.89702.0
  misc_feature: Variant of the nucleotide sequence at SEQ ID NO 37496
tggcaaggtaattattgggcagctgagccatgtgacaaatcggaagggagtggattatttgaaggctctggtccccgaaggctactctgtcgagattctcaacaccactgatgagcacgccatgcatatagatgcaaccctcctcccacttcgcgagggccttctggtgtataatcctgagcgcgtatccgagcaagaacttaggttacacgaagtgtttcgcgaatggacgttgcacgcgtatcctttcaaaccaaagccccgggagggcagcagcccccctctctacatgtgcagcccatggctagttttgaacgctcttagcttggacgagaaacgaatcattgttgaggcccatgacaaggagttcgcttcttggcttgaaacactggggatggagccaatcatgtgcccgtttcagcatgtcaacagcattggaggctcttttcactgtgctactgttgatctcgtcagaaatgcggccaataactacgagagtgcctaagaatatgtagatcgaaa

SEQ ID NO: 37499 - DNA, 1593 bp, Muscodor strobelii
  misc_feature: SGI cDNA ID NO. 573014
  misc_feature: Encodes the peptide sequence at SEQ ID NO 37500
atgtacgaaactctcattgagatgctcggtgccatcacggtggcaattttggcctggaagtggattatcgagccagtttttctctcgccacttgcagcgatcccagctgcgcatcccatcgcccatcttacatcactatggatacagtggcaccgctttcacggtagtgactttcaagcaatctcggcagctttcgaaaccaagggctcatatgtgcgccttgggcctcgagagctggcagttaacgacattgaagctatcagctgtgtctggggaatcggcgccgcagctcttgacaaacacccgtcttatgactattggaagacacaaagaaccctgaacacttttacgtctgtgcgagccagtgaacaccgacgtcgtcgccgccgcattcaaggtgtacacaagcgatcatacttggctaaatcacctcatatccatgcggttatgaaagttcttatgattgatcgcttattgccgctgctgtctgaagtatccacatcacaagatggagttactaatgtcctgcctattggacaggccattatcctggattgcacctctgcttttgctttcggcttgccccttgctcataactttattcttgacatagaagctcgtcagaattggataagattatttaatatcagctttccaaccagctcccagccttcgttctggctacgagaacatccaaaactatccaacgcattgtcattcttgcgtattcctctcgtatccgataccgtcgagagagcccgtcgtgagtttgaggcttgggcattacccaaggtcgatgctgccgaggtggtcataaacaaccataataagggtcatcccattgcacctggagagctacccgttctatataacgctatccgcacagatctaacagcaggggagaaaaatacacctggtaccatcaatgagacaagcttccagctcagttctggacagcgaagagagctagcgagtgaatgcctcgaccatatcgctttcacaagcgaggcattcagcactgtcttcacatacatgatctacgagatctcacgaaattgggatgtccaagaggagatgcgcaccgaattgcgatccgtttgtgtggatggagatatcccaacttctgaaaccctcgatcgtctcccgctgctcggcgccgtcatcaaggagtgtctccgtctacgcaatacgtcccctaacgccgatccgcgcatcactcctgctcatcactcgtgccgcattgggcgtatcctaggtgttctgcccggaacgcgtgtttgtagctacggttggtgtctccatcgaaatccagacgtctatgcagaccccctagcctggaaccccaagcgctggctgcaaggtggatgtggagacgcagccttagctcacaaatggttctttgcctttggtgcaggcagtagagactgtgttgggcagaatttggctttggagctgttccgaatgtctcttgctacgatttatacaaaatatgctacctcaatatcggatgagaccgaataccccggttctaacacgcccatgaaacctgatctcagcgacaggcttttcatcaagtttgagaagcctatttga

SEQ ID NO: 37500 - protein, 530 aa, Muscodor strobelii
  misc_feature: SGI Peptide ID NO. 573014
  misc_feature (40)..(526): Pfam Id: PF00067 Pfam Desc: Cytochrome P450
  misc_feature (339)..(482): Pfam Id: PF00067 Pfam Desc: Cytochrome P450
  misc_feature (47)..(528): NCBI GI: 238841176 Blast Desc: conserved [Microsporum canis CBS 113480]
  misc_feature (86)..(528): NCBI GI: 119182298 Blast Desc: CIMG_06188 [Coccidioides immitis RS]
  misc_feature (111)..(484): NCBI GI: 240109230 Blast Desc: Cytochrome P450 family protein [Coccidioides posadasii C735 delta SOWgp]
  misc_feature (6)..(527): NCBI GI: 238486362 Blast Desc: cytochrome P450 monooxygenase, [Aspergillus flavus NRRL3357] gi|220699298|gb|EED55637.1| cytochrome P450 monooxygenase, [Aspergillus flavus NRRL3357]
  misc_feature (10)..(527): NCBI GI: 145231268 Blast Desc: An01g15110 [Aspergillus niger] gi|134056030|emb|CAK37464.1| protein product [Aspergillus niger]
  misc_feature (17)..(527): NCBI GI: 259489292 Blast Desc: TPA: cytochrome P450, (Eurofung) [Aspergillus nidulans FGSC A4]
  misc_feature (9)..(527): NCBI GI: 255940870 Blast Desc: Pc16g08850 [Penicillium chrysogenum Wisconsin 54-1255] gi|211585827|emb|CAP93555.1| Pc16g08850 [Penicillium chrysogenum Wisconsin 54-1255]
  misc_feature (11)..(527): NCBI GI: 159130664 Blast Desc: cytochrome P450 monooxygenase, [Aspergillus fumigatus A1163]
  misc_feature (11)..(527): NCBI GI: 146322440 Blast Desc: cytochrome P450 monooxygenase [Aspergillus fumigatus Af293] gi|129557018|gb|EAL88149.2| cytochrome P450 monooxygenase, [Aspergillus fumigatus Af293]
  misc_feature (8)..(528): NCBI GI: 242802567 Blast Desc: cytochrome P450 monooxygenase, [Talaromyces stipitatus ATCC 10500] gi|218717342|gb|EED16763.1| cytochrome P450 monooxygenase, [Talaromyces stipitatus ATCC 10500]
  misc_feature (237)..(530): SWISSPROT Homolog: EC 1.14.13.21 Flavonoid 3'-monooxygenase
MYETLIEMLGAITVAILAWKWIIEPVFLSPLAAIPAAHPIAHLTSLWIQWHRFHGSDFQAISAAFETKGSYVRLGPRELAVNDIEAISCVWGIGAAALDKHPSYDYWKTQRTLNTFTSVRASEHRRRRRRIQGVHKRSYLAKSPHIHAVMKVLMIDRLLPLLSEVSTSQDGVTNVLPIGQAIILDCTSAFAFGLPLAHNFILDIEARQNWIRLFNISFPTSSQPSFWLREHPKLSNALSFLRIPLVSDTVERARREFEAWALPKVDAAEVVINNHNKGHPIAPGELPVLYNAIRTDLTAGEKNTPGTINETSFQLSSGQRRELASECLDHIAFTSEAFSTVFTYMIYEISRNWDVQEEMRTELRSVCVDGDIPTSETLDRLPLLGAVIKECLRLRNTSPNADPRITPAHHSCRIGRILGVLPGTRVCSYGWCLHRNPDVYADPLAWNPKRWLQGGCGDAALAHKWFFAFGAGSRDCVGQNLALELFRMSLATIYTKYATSISDETEYPGSNTPMKPDLSDRLFIKFEKPI

SEQ ID NO: 37501 - DNA, 1242 bp, Muscodor strobelii
  misc_feature: SGI EST ID NO. CUFF.89708.0
  misc_feature: Variant of the nucleotide sequence at SEQ ID NO 37499
ctggaagtggattatcgagccagtttttctctcgccacttgcagcgatcccagctgcgcatcccatcgcccatcttacatcactatggatacagtggcaccgctttcacggtagtgactttcaagcaatctcggcagctttcgaaaccaagggctcatatgtgcgccttgggcctcgagagctggcagttaacgacattgaagctatcagctgtgtctggggaatcggcgccgcagctcttgacaaacacccgtcttatgactattggaagacacaaagaaccctgaacacttttacgtctgtgcgagccagtgaacaccgacgtcgtcgccgccgcattcaaggtgtacacaagcgatcatacttggctaaatcacctcatatccatgcggttatgaaagttcttatgattgatcgcttattgccgctgctgtctgaagtatccacatcacaagatggagttactaatgtcctgcctattggacaggccattatcctggattgcacctctgcttttgctttcggcttgccccttgctcataactttattcttgacatagaagctcgtcagaattggataagattatttaatatcagctttccaaccagctcccagccttcgttctggctacgagaacatccaaaactatccaacgcattgtcattcttgcgtattcctctcgtatccgataccgtcgagagagcccgtcgtgagtttgaggcttgggcattacccaaggtcgatgctgccgaggtggtcataaacaaccataataagggtcatcccattgcacctggagagctacccgttctatataacgctatccgcacagatctaacagcaggggagaaaaatacacctggtaccatcaatgagacaagcttccagctcagttctggacagcgaagagagctagcgagtgaatgcctcgaccatatcgctttcacaagcgaggcattcagcactgtcttcacatacatgatctacgagatctcacgaaattgggatgtccaagaggagatgcgcaccgaattgcgatccgtttgtgtggatggagatatcccaacttctgaaaccctcgatcgtctcccgctgctcggcgccgtcatcaaggagtgtctccgtctacgcaatacgtcccctaacgccgatccgcgcatcactcctgctcatcactcgtgccgcattgggcgtatcctaggtgttctgcccggaacgcgtgtttgtagctacggttggtg

SEQ ID NO: 37502 - DNA, 1974 bp, Muscodor strobelii
  misc_feature: SGI cDNA ID NO. 573015
  misc_feature: Encodes the peptide sequence at SEQ ID NO 37503
atggaggtgccaacctccgatctcgagcaaatctggcattggaataaaaacgtcccaacacccatcgacttatgtgttcatgctttagtgcgagatgtcgtcgacagacaacaacacgcgaccgcgatttgtgcttgggatgggactttaacgtacgggcagctggacgtgcttgccactagtttggcatatcgtcttattgatatgggagttcggcctggcataggctggattataccgctgtgctttgagaagtctatgtggacggttgtcgccatgctcggtgtgctgaagacaggcgcggcatttgtcctccttgacccataccatccagaggagcgtctacaggctataagtaggcaagtcggtgcaaatattgttgtatcatcaactgttaaggcagacttgagcaagcgtttagtatcgcatgtggtcgttgtatctcctgatctcttcacgcgtgtccacgattggccgtccacgacactcgttctcccttgctcgtcatctacagcatatgtggtcttcacctcaggcagtacggggacgccgaaggccgcagttataacacaccagaacctctcgtcagctttgcaacaccaaaagcaagcaatgggaatttcggaatcatcgcgtgtatacgaattctcctcgtatagttttgatgcagctatcggtaacacctttgctacacttataggcggtgggtgtatatgcgtgccaagcgacgacgacagacgggacaatcttgtccggagtatcatatcgcttgaagcaaacgtcatagacattactccttcagttgcaatgctcttatcgccggagactgtaccgtgtcttaagacgattatacttggcggagatgccttgcaagtccgcgacgtacttcgctggtggggaaaagcgcatgtcatgagtctctatggaccgtgcgagtgtacgcccactagtacaatcaatcacagcccatcgtcgccggaagaggcaattcgcataggaaagggggctggtctagtaacctggattgtggatccggaggaccatgactcactgatgccgctcggtctcgtcggcgaacttattctcgaagggccccttgtgggctacggctatctcaacgaaaaggagaagacggcagcgtcattcatcgatgaccctaaatggctattgcagggcgcgcctggacggactggaaggcgtggccgtctctacaaaacaggcgatttagtacgatatgatgatgagggcagcttggtattcatcggtcgcaaagatacacaagtcaagattcatgggcagcgtatcgaactcggtgagattgaacacgtgctgcgaaatcatacgagtgtcgatgatgccatagtggtgttgtcggaaaacaaggacgcttgggagcaatgcattgctggattcgtgacccttcgagtcccgaatgccaatttcacacagacgggggaccggtgcctgagcactgagctattcagtaacaaaaatacatgcacagcccccgaacaacagcggatgggaagggtacaagaggaacttctcgagattttgcaggccaagttgccaccttacatgattccccacgaaatacaagtcctagataagatgccattgaataagcatttcaagatcgatcgcaaagcactctcagaaaggatcaaaggtcgaagaatggaagcagatctggcgcgagccccagaggcgatgactagtattgagagtcagctgcgggacatatgggcagatgcgcttcgactagatcctgccgccatcgagctcagccacgatttcaataccctcggaggtgattctgtcatggccatgaaggtggtccacgaggcccgcaattgtggccttgagctcaccgtagcgaatattctccaaacccagagtttgcgcaacgtagcccagcatacgatcctttcagctgatggccaacccgcagaacaatgccgatctgaatcctga

SEQ ID NO: 37503 - protein, 657 aa, Muscodor strobelii
  misc_feature: SGI Peptide ID NO. 573015
  misc_feature (51)..(455): Pfam Id: PF00501 Pfam Desc: AMP-binding enzyme
  misc_feature (576)..(641): Pfam Id: PF00550 Pfam Desc: Phosphopantetheine attachment site
  misc_feature (1)..(629): NCBI GI: 119501491 Blast Desc: nonribosomal peptide synthase, [Neosartorya fischeri NRRL 181] gi|119415668|gb|EAW25605.1| nonribosomal peptide synthase, [Neosartorya fischeri NRRL 181]
  misc_feature (3)..(644): NCBI GI: 62086799 Blast Desc: non-ribosomal peptide synthetase [Hypocrea virens]
  misc_feature (3)..(652): NCBI GI: 62086799 Blast Desc: non-ribosomal peptide synthetase [Hypocrea virens]
  misc_feature (2)..(630): NCBI GI: 145235661 Blast Desc: An03g06010 [Aspergillus niger] gi|134058166|emb|CAK38360.1| protein product [Aspergillus niger]
  misc_feature (7)..(484): NCBI GI: 70720930 Blast Desc: non-ribosomal peptide synthetase [Epichloe festucae]
  misc_feature (7)..(640): NCBI GI: 70720930 Blast Desc: non-ribosomal peptide synthetase [Epichloe festucae]
  misc_feature (8)..(641): NCBI GI: 256725477 Blast Desc: NECHADRAFT_106280 [Nectria haematococca mpVI 77-13-4]
  misc_feature (7)..(637): NCBI GI: 256725477 Blast Desc: NECHADRAFT_106280 [Nectria haematococca mpVI 77-13-4]
  misc_feature (7)..(651): NCBI GI: 62086799 Blast Desc: non-ribosomal peptide synthetase [Hypocrea virens]
  misc_feature (7)..(641): NCBI GI: 256725477 Blast Desc: NECHADRAFT_106280 [Nectria haematococca mpVI 77-13-4]
  misc_feature (23)..(642): SWISSPROT Homolog: EC 5.1.1.11 Phenylalanine racemase (ATP-hydrolyzing)
MEVPTSDLEQIWHWNKNVPTPIDLCVHALVRDVVDRQQHATAICAWDGTLTYGQLDVLATSLAYRLIDMGVRPGIGWIIPLCFEKSMWTVVAMLGVLKTGAAFVLLDPYHPEERLQAISRQVGANIVVSSTVKADLSKRLVSHVVVVSPDLFTRVHDWPSTTLVLPCSSSTAYVVFTSGSTGTPKAAVITHQNLSSALQHQKQAMGISESSRVYEFSSYSFDAAIGNTFATLIGGGCICVPSDDDRRDNLVRSIISLEANVIDITPSVAMLLSPETVPCLKTIILGGDALQVRDVLRWWGKAHVMSLYGPCECTPTSTINHSPSSPEEAIRIGKGAGLVTWIVDPEDHDSLMPLGLVGELILEGPLVGYGYLNEKEKTAASFIDDPKWLLQGAPGRTGRRGRLYKTGDLVRYDDEGSLVFIGRKDTQVKIHGQRIELGEIEHVLRNHTSVDDAIVVLSENKDAWEQCIAGFVTLRVPNANFTQTGDRCLSTELFSNKNTCTAPEQQRMGRVQEELLEILQAKLPPYMIPHEIQVLDKMPLNKHFKIDRKALSERIKGRRMEADLARAPEAMTSIESQLRDIWADALRLDPAAIELSHDFNTLGGDSVMAMKVVHEARNCGLELTVANILQTQSLRNVAQHTILSADGQPAEQCRSES

SEQ ID NO: 37504 - DNA, 1221 bp, Muscodor strobelii
  misc_feature: SGI EST ID NO. CUFF.89721.0
  misc_feature: Variant of the nucleotide sequence at SEQ ID NO 37502
gcccactagtacaatcaatcacagcccatcgtcgccggaagaggcaattcgcataggaaagggggctggtctagtaacctggattgtggatccggaggaccatgactcactgatgccgctcggtctcgtcggcgaacttattctcgaagggccccttgtgggctacggctatctcaacgaaaaggagaagacggcagcgtcattcatcgatgaccctaaatggctattgcagggcgcgcctggacggactggaaggcgtggccgtctctacaaaacaggcgatttagtacgatatgatgatgagggcagcttggtattcatcggtcgcaaagatacacaagtcaagattcatgggcagcgtatcgaactcggtgagattgaacacgtgctgcgaaatcatacgagtgtcgatgatgccatagtggtgttgtcggaaaacaaggacgcttgggagcaatgcattgctggattcgtgacccttcgagtcccgaatgccaatttcacacagacgggggaccggtgcctgagcactgagctattcagtaacaaaaatacatgcacagcccccgaacaacagcggatgggaagggtacaagaggaacttctcgagattttgcaggccaagttgccaccttacatgattccccacgaaatacaagtcctagataagatgccattgaataagcatttcaagatcgatcgcaaagcactctcagaaaggatcaaaggtcgaagaatggaagcagatctggcgcgagccccagaggcgatgactagtattgagagtcagctgcgggacatatgggcagatgcgcttcgactagatcctgccgccatcgagctcagccacgatttcaataccctcggaggtgattctgtcatggccatgaaggtggtccacgaggcccgcaattgtggccttgagctcaccgtagcgaatattctccaaacccagagtttgcgcaacgtagcccagcatacgatcctttcagctgatggccaacccgcagaacaatgccgatctgaatcctgatgtaattcgaagttgagggattggtcagatttatgagggatgctgcagaaacggccgagtcaagggtgtgtgtctcgggaaagatggagaggattctggatctgtgcgactaaaggagcctttgaatctgaggatatatctataatctgataatcatgaggccgccccatcagaatacgagaatagat

SEQ ID NO: 37505 - DNA, 1503 bp, Muscodor strobelii
  misc_feature: SGI cDNA ID NO. 573016
  misc_feature: Reduced expression when VOC is produced
  misc_feature: Encodes the peptide sequence at SEQ ID NO 37506
atggatgggtccgagttgtccgagagtgtgccgctgctggccgtcataaactccgacaatagctggatagcggagatcaagttgctcttccagtattcgattcctcttgtcgtaacttatctcctccagtattcgagctacatcatcctcaccttcatggcaggccatttgggcgctcacgatctagctgcggccagcataggcatgacgaccatgaacattatcggctatgccatcttcgagggcatggccactgcactggacacgctttgttcccaagtatacggaaccggaaacatcagggacgtcggcctccaggtccagcgcatgttgattctgatggccctcgccgccgtacccgtcgcggccatctgggctgcgtcgccctggatcctacccttgtttttacagaggggccagggcgatttagccgcggcagctggtacgttcctccgtgtgaacatcattggtataccaggttacgcatcgtttgaagcactgaagcggtttctccaagcccaagaaagcttcagggcagcgaccgtggtccttcttatctgcactccctgcaacgcctttctcagctggctattcgggttgaagctaggcatgggcctcccgggtgcggccctggggatcgccctgactaacaccttacgacctatattattacttatctacatcgtctcacctctcgggagatggtctcatcaatgctgggatgggttttcctccgctgcgttatctggcttcaagccgatggtcagactcgcctccgcgagctgctctgtcaacctagccgagtggggagctttgcagattctgatgtttaccacggcccgcctagggaccaacaacttagcggcgcagacgatcttgacgactatttcggtcatgctctggcatgttcccttctcgttgagcatcagcacaactacgcgtatcgggcacctgattggcgccggtcggccacaaaaagctcgtcgcacggctctcttctacgctgcggtgttcctcgttgttgggtgtttcgacggcaccattatattcttgttccggcgcagtatcctcgagttcctcttgaacagtgacgatctaatggtcctcgacggcaacaactcggaggtttacaccatcgcggccgcgaccatggtgttcgtcagtatctaccacgtgtttgattcattcatctgtttcacaaacggtgttcttcgaggtttagcccgacaatccttcgccgcgtgtgttgtcataggagtaaattattccgctgcggtaccattagccgtctggctagaacttggctctcctgcgctggggcttgaaggcgtctggattggcatcgggatcggcatggtattaatcgcaagcattgaaagtggttacatgacattccttgactggcaagactgcgttgacaatgttcgtcagcgtgaatgctttttagatggaagggcggaaaactgccaaacagagacattgcaagatggagccgactcttaa

SEQ ID NO: 37506 - protein, 500 aa, Muscodor strobelii
  misc_feature: SGI Peptide ID NO. 573016
  misc_feature (35)..(197): Pfam Id: PF01554 Pfam Desc: MatE
  misc_feature (260)..(431): Pfam Id: PF01554 Pfam Desc: MatE
  misc_feature (4)..(479): NCBI GI: 46130666 Blast Desc: FG08937.1 [Gibberella zeae PH-1]
  misc_feature (2)..(479): NCBI GI: 256723652 Blast Desc: NECHADRAFT_97317 [Nectria haematococca mpVI 77-13-4]
  misc_feature (2)..(479): NCBI GI: 226508862 Blast Desc: LOC100274589 [Zea mays] gi|194708706|gb|ACF88437.1| [Zea mays]
  misc_feature (7)..(479): NCBI GI: 261356059 Blast Desc: conserved [Verticillium albo-atrum VaMs.102]
  misc_feature (2)..(479): NCBI GI: 46114496 Blast Desc: FG03090.1 [Gibberella zeae PH-1]
  misc_feature (25)..(479): NCBI GI: 189208754 Blast Desc: conserved [Pyrenophora tritici-repentis Pt-1C-BFP] gi|187976803|gb|EDU43429.1| conserved [Pyrenophora tritici-repentis Pt-1C-BFP]
  misc_feature (25)..(479): NCBI GI: 169598906 Blast Desc: SNOG_02262 [Phaeosphaeria nodorum SN15] gi|111069354|gb|EAT90474.1| SNOG_02262 [Phaeosphaeria nodorum SN15]
  misc_feature (19)..(479): NCBI GI: 238845380 Blast Desc: multidrug and toxin extrusion protein 1 [Microsporum canis CBS 113480]
  misc_feature (21)..(480): NCBI GI: 261193369 Blast Desc: MATE efflux family protein subfamily [Ajellomyces dermatitidis SLH14081] gi|239588695|gb|EEQ71338.1| MATE efflux family protein subfamily [Ajellomyces dermatitidis SLH14081]
  misc_feature (21)..(480): NCBI GI: 239613983 Blast Desc: MATE efflux family protein subfamily [Ajellomyces dermatitidis ER-3]
  misc_feature: Useful for introducing or modulating the production of volatile compounds
MDGSELSESVPLLAVINSDNSWIAEIKLLFQYSIPLVVTYLLQYSSYIILTFMAGHLGAHDLAAASIGMTTMNIIGYAIFEGMATALDTLCSQVYGTGNIRDVGLQVQRMLILMALAAVPVAAIWAASPWILPLFLQRGQGDLAAAAGTFLRVNIIGIPGYASFEALKRFLQAQESFRAATVVLLICTPCNAFLSWLFGLKLGMGLPGAALGIALTNTLRPILLLIYIVSPLGRWSHQCWDGFSSAALSGFKPMVRLASASCSVNLAEWGALQILMFTTARLGTNNLAAQTILTTISVMLWHVPFSLSISTTTRIGHLIGAGRPQKARRTALFYAAVFLVVGCFDGTIIFLFRRSILEFLLNSDDLMVLDGNNSEVYTIAAATMVFVSIYHVFDSFICFTNGVLRGLARQSFAACVVIGVNYSAAVPLAVWLELGSPALGLEGVWIGIGIGMVLIASIESGYMTFLDWQDCVDNVRQRECFLDGRAENCQTETLQDGADS

SEQ ID NO: 37507 - DNA, 2338 bp, Muscodor strobelii
  misc_feature: SGI EST ID NO. CUFF.89792.0
  misc_feature: Variant of the nucleotide sequence at SEQ ID NO 37505
gcttcatacacacattcaaacatgatggtgacttttcatataggaaggtacgcctcagtaatgtgggtgacccatcacttgtgccaaatggcacatgactcggataccacaacggattcccattctccgaaactcttcccatagttcatttctcccctcttcctttaaaacgatatatcaatcacactcctttccaacacctgtcgcagaacgcgctgactccgactcttctagaaaaggggcaggacggtcagcttatatcacagcgtatcggtgtctgtgcgccttatcatcagcacattccgtcacaagcccagtcataaaattacgccgcgttcaattttgttccatgtgaacctctagctgttttatatatcactctcctgaacacacgctgacaagggactttaggtgattcgctcctattgaggctgcgtgagtcgcccgacacgatttccactccccctatgccgccatacaaagcaccagcaatggatgggtccgagttgtccgagagtgtgccgctgctggccgtcataaactccgacaatagctggatagcggagatcaagttgctcttccagtattcgattcctcttgtcgtaacttatctcctccagtattcgagctacatcatcctcaccttcatggcaggccatttgggcgctcacgatctagctgcggccagcataggcatgacgaccatgaacattatcggctatgccatcttcgagggcatggccactgcactggacacgctttgttcccaagtatacggaaccggaaacatcagggacgtcggcctccaggtccagcgcatgttgattctgatggccctcgccgccgtacccgtcgcggccatctgggctgcgtcgccctggatcctacccttgtttttacagaggggccagggcgatttagccgcggcagctggtacgttcctccgtgtgaacatcattggtataccaggttacgcatcgtttgaagcactgaagcggtttctccaagcccaagaaagcttcagggcagcgaccgtggtccttcttatctgcactccctgcaacgcctttctcagctggctattcgggttgaagctaggcatgggcctcccgggtgcggccctggggatcgccctgactaacaccttacgacctatattattacttatctacatcgtctcacctctcgggagatggtctcatcaatgctgggatgggttttcctccgctgcgttatctggcttcaagccgatggtcagactcgcctccgcgagctgctctgtcaacctagccgagtggggagctttgcagattctgatgtttaccacggcccgcctagggaccaacaacttagcggcgcagacgatcttgacgactatttcggtcatgctctggcatgttcccttctcgttgagcatcagcacaactacgcgtatcgggcacctgattggcgccggtcggccacaaaaagctcgtcgcacggctctcttctacgctgcggtgttcctcgttgttgggtgtttcgacggcaccattatattcttgttccggcgcagtatcctcgagttcctcttgaacagtgacgatctaatggtcctcgacggcaacaactcggaggtttacaccatcgcggccgcgaccatggtgttcgtcagtatctaccacgtgtttgattcattcatctgtttcacaaacggtgttcttcgaggtttagcccgacaatccttcgccgcgtgtgttgtcataggagtaaattattccgctgcggtaccattagccgtctggctagaacttggctctcctgcgctggggcttgaaggcgtctggattggcatcgggatcggcatggtattaatcgcaagcattgaaagtggttacatgacattccttgactggcaagactgcgttgacaatgttcgtcagcgtgaatgctttttagatggaagggcggaaaactgccaaacagagacattgcaagatggagccgactcttaattgtccaaatcatggaaacctgtttgatatgtatcgttgtagccaccgtgcttgtaagcatgtcggtatgatagaatatccccgggtgataaagcaatagattccgcaactgcagcatggtcgcacacatctttagaatagcgacgctgtaaatccgagttttaaatgtggcttgtgtgtaagagacgccgtgcatgagctcgatcatgccaataccagctgcgaaacgcggcgcgaatcaacgagtgacagatttacgcatattcctacctgttatattgtgttattagctcggataccattcgtatggttaataggttaccatggttaagacaatatttgca

SEQ ID NO: 37508 - DNA, 1626 bp, Muscodor strobelii
  misc_feature: SGI cDNA ID NO. 573017
  misc_feature: Encodes the peptide sequence at SEQ ID NO 37509
atgctgtggtcactccttttcacgtttctctttgcttgggccagggctgtgtacggtatcacggtcacctcgtcgactgcttcctatgtcgtcgataccgcaagctcgtacaacttcgttgtgacgatttcacgcagcacgtgtgacatcacttcgctgaagttttacggaactgaataccagtaccagagcactggaagtcacatcgcatccggcctgggtagcggtacatccgtctcgtacacaactagcccgtccggcgacactgtgatcttcgcctgcaagcagagcagttccagcttcgatctgacccattacatggtcttcaaaaatggcgaagccaatatctatatgggaaccaacatcaactctgagccatccgtcggcgagctgagattcatcttcagactgactggtctgactcaatcctacccttacgccactgtttccaacactgctggcggcactgccatcgagggaagcgacgtgtacaccgtcagcggccagacacgctccaagttctactcctctgagcgattcattgatgaccgcgtctactgtgccactgactctggcgcttccgtccacgcatgttgggttcgacctaaccatcaagcaactgagaagagcagcggcggtccgttcttccgcgacatcgacctcaacgaaggcggagactatcagtccgtgacatactacatgaactccggccatgtccagaccgaatcttaccgcacaggtttccatggcccttacgtcttctcgatgactcgcagcggtatcccatcatacagctcatatgacctcagcttcttcgattctcttagcggtctgacgaactatgtccccgtgtccggaaagagaggttacgtcaagggaactgctacaggcgtgtcttcaagcttccccattgttgtccactggtacaacagcgcctaccagttctgggcatacgcctcgtcttcgggggcttatacttctcctcccatgcccgcaggctcgtacaccatgaaactgtatcaagatgagttccttgccgcgacttcgagcgcaaccgtatccgctggttcgaccgcgacggtgaacatcgctgcgaccagcaccgttctgacagcctcgcgaacgacaatcttcaaaatgggagactacgatggtcaaccaacaggtttcttgaacgctgccaaccagctgcgcatgcacccatctgactcacggatgtcaaactggagcccaggaaccgtatccagttcgtcgccaggctcattccccatggctatcttcgtagccgtcaacaacggtcagaagatcagtttctcgctctccagcgccgtcacgactacctccacgctccgcatcgcgacaactctctcatttgccggtggccgtccccagcctgtcgtcaacagctatacatgcaccgctcctgcagcgcccacgaagattgatagccgtggtgtgactagaggtgcgtatagagggtatggtgaggtttatgaatactctattcccgcgaatacgctggtcagtggcacgaacactgttacgattaatgtcatttcgggctcgagcggcgatgcgtttttgagccctaatgttattattgatgctattgagctcttccattag

SEQ ID NO: 37509 - protein, 541 aa, Muscodor strobelii
  misc_feature: SGI Peptide ID NO. 573017
  misc_feature (18)..(277): Pfam Id: PF09284 Pfam Desc: Rhamnogalacturonase B, N-terminal
  misc_feature (10)..(541): NCBI GI: 46108214 Blast Desc: FG00989.1 [Gibberella zeae PH-1]
  misc_feature (23)..(541): NCBI GI: 256735184 Blast Desc: polysaccharide lyase family 4 [Nectria haematococca mpVI 77-13-4]
  misc_feature (5)..(533): NCBI GI: 255955049 Blast Desc: Pc21g12480 [Penicillium chrysogenum Wisconsin 54-1255] gi|211589988|emb|CAP96145.1| Pc21g12480 [Penicillium chrysogenum Wisconsin 54-1255]
  misc_feature (1)..(541): NCBI GI: 2494820 Blast Desc: RHGB_ASPAC RecName: Full=Rhamnogalacturonase B; AltName: Full=Rhamnogalacturonan lyase; AltName: Full=RGase B; AltName: Full=RHG B; Flags: Precursor gi|558315|gb|AAA64368.1| B
  misc_feature (22)..(541): NCBI GI: 49258320 Blast Desc: RHGB_ASPAC RecName: Full=Rhamnogalacturonase B; AltName: Full=Rhamnogalacturonan lyase; AltName: Full=RGase B; AltName: Full=RHG B; Flags: Precursor gi|558315|gb|AAA64368.1| B
  misc_feature (6)..(541): NCBI GI: 70982073 Blast Desc: rhamnogalacturonase B [Aspergillus fumigatus Af293] gi|66844188|gb|EAL84527.1| rhamnogalacturonase B, [Aspergillus fumigatus Af293] gi|159122201|gb|EDP47323.1| rhamnogalacturonase
  misc_feature (4)..(541): NCBI GI: 119487144 Blast Desc: rhamnogalacturonase B, [Neosartorya fischeri NRRL 181] gi|119410584|gb|EAW20530.1| rhamnogalacturonase B, [Neosartorya fischeri NRRL 181]
  misc_feature (8)..(541): NCBI GI: 67541943 Blast Desc: RHGB_ASPAC Rhamnogalacturonase B precursor (Rhamnogalacturonan lyase) (RGase B) (RHG B) [Aspergillus nidulans FGSC A4] gi|40742197|gb|EAA61387.1| RHGB_ASPAC B lyase)
  misc_feature (6)..(541): NCBI GI: 121714469 Blast Desc: rhamnogalacturonase B, [Aspergillus clavatus NRRL 1] gi|119402999|gb|EAW13419.1| rhamnogalacturonase B, [Aspergillus clavatus NRRL 1]
  misc_feature (22)..(537): NCBI GI: 145248804 Blast Desc: An14g01130 [Aspergillus niger] gi|134081411|emb|CAK46452.1| protein product [Aspergillus niger]
MLWSLLFTFLFAWARAVYGITVTSSTASYVVDTASSYNFVVTISRSTCDITSLKFYGTEYQYQSTGSHIASGLGSGTSVSYTTSPSGDTVIFACKQSSSSFDLTHYMVFKNGEANIYMGTNINSEPSVGELRFIFRLTGLTQSYPYATVSNTAGGTAIEGSDVYTVSGQTRSKFYSSERFIDDRVYCATDSGASVHACWVRPNHQATEKSSGGPFFRDIDLNEGGDYQSVTYYMNSGHVQTESYRTGFHGPYVFSMTRSGIPSYSSYDLSFFDSLSGLTNYVPVSGKRGYVKGTATGVSSSFPIVVHWYNSAYQFWAYASSSGAYTSPPMPAGSYTMKLYQDEFLAATSSATVSAGSTATVNIAATSTVLTASRTTIFKMGDYDGQPTGFLNAANQLRMHPSDSRMSNWSPGTVSSSSPGSFPMAIFVAVNNGQKISFSLSSAVTTTSTLRIATTLSFAGGRPQPVVNSYTCTAPAAPTKIDSRGVTRGAYRGYGEVYEYSIPANTLVSGTNTVTINVISGSSGDAFLSPNVIIDAIELFH

SEQ ID NO: 37510 - DNA, 3283 bp, Muscodor strobelii
  misc_feature: SGI EST ID NO. CUFF.89739.0
  misc_feature: Variant of the nucleotide sequence at SEQ ID NO 37508
ggaggggccaaggtatatatcattcggtattcgtcgcaattttggatgtctatctattgtcctcgattctctggctctattcgtaagaccagaagagcatatcgactgaaagggatctgtgcttactacaagcctgatgaaacactatatcgtgatatatgaaatgagaggactcttggattaagtctcgcaattttcatgtttactgttgggcgtctgaatttgaagggttcgaaaaggtctggtgcctgccaagacatgtcgattggtggaaacggaagcgaacaaatgcttccgacttcatatgcgggaaaccttgtggagagttggttatcccggtgggacgcgtacatggtcaagcttcttcacaagcgattccgccaataacccgacccttgcatgatccacgcttttggagtaaatgccacctcgctcaaaagcatctccgagtgctcggcgtaaagatctcgaaacgtcaacctaggccgaactcgtagacggaacatcttggccataccgaaaaatgaaaaatcataacatggagcggcgacatcatcaccgccgctctcatatacatagggcattggtcccgtgtcgagggtctggatgattgtggtcttcacggcgttaacctcatcgcaagtgttgaaggaagaagcttgatcgtctggctatcctgaagttgcccaacatgctgtggtcactccttttcacgtttctctttgcttgggccagggctgtgtacggtatcacggtcacctcgtcgactgcttcctatgtcgtcgataccgcaagctcgtacaacttcgttgtgacgatttcacgcagcacgtgtgacatcacttcgctgaagttttacggaactgaataccagtaccagagcactggaagtcacatcgcatccggcctgggtagcggtacatccgtctcgtacacaactagcccgtccggcgacactgtgatcttcgcctgcaagcagagcagttccagcttcgatctgacccattacatggtcttcaaaaatggcgaagccaatatctatatgggaaccaacatcaactctgagccatccgtcggcgagctgagattcatcttcagactgactggtctgactcaatcctacccttacgccactgtttccaacactgctggcggcactgccatcgagggaagcgacgtgtacaccgtcagcggccagacacgctccaagttctactcctctgagcgattcattgatgaccgcgtctactgtgccactgactctggcgcttccgtccacgcatgttgggttcgacctaaccatcaagcaactgagaagagcagcggcggtccgttcttccgcgacatcgacctcaacgaaggcggagactatcagtccgtgacatactacatgaactccggccatgtccagaccgaatcttaccgcacaggtttccatggcccttacgtcttctcgatgactcgcagcggtatcccatcatacagctcatatgacctcagcttcttcgattctcttagcggtctgacgaactatgtccccgtgtccggaaagagaggttacgtcaagggaactgctacaggcgtgtcttcaagcttccccattgttgtccactggtacaacagcgcctaccagttctgggcatacgcctcgtcttcgggggcttatacttctcctcccatgcccgcaggctcgtacaccatgaaactgtatcaagatgagttccttgccgcgacttcgagcgcaaccgtatccgctggttcgaccgcgacggtgaacatcgctgcgaccagcaccgttctgacagcctcgcgaacgacaatcttcaaaatgggagactacgatggtcaaccaacaggtttcttgaacgctgccaaccagctgcgcatgcacccatctgactcacggatgtcaaactggagcccaggaaccgtatccagttcgtcgccaggctcattccccatggctatcttcgtagccgtcaacaacggtcagaagatcagtttctcgctctccagcgccgtcacgactacctccacgctccgcatcgcgacaactctctcatttgccggtggccgtccccagcctgtcgtcaacagctatacatgcaccgctcctgcagcgcccacgaagattgatagccgtggtgtgactagaggtgcgtatagagggtatggtgaggtttatgaatactctattcccgcgaatacgctggtcagtggcacgaacactgttacgattaatgtcatttcgggctcgagcggcgatgcgtttttgagccctaatgttattattgatgctattgagctcttccattagggaagtttcgctgagaagcaaattggggaatgcggtgggtttgggttgtagatatttgaaatacatattttgtcacatggcgagatagtgcaaacttgaattatatgtgtgatggtatgattgtagataaagtctggttgcctaagtgtggtttattctctcttctttcacaattgcatggttgatagaatacattattcctttcccaatgaccaatctcagatgatttgcgatgcaattcccgttacaagtaggcatctatactccatacttcaaaaagtattgacatgtcccacaatcgcgtgtcttgtgcttcataaatatcgatggtcaaggcgcacattcacacgtaatcatttgaatctcagctagctagcatggaccaactcaacccccagatgcggcgtgtgtacgtgcgtgcgtgtaccatcgtcatcgtgagtgagataggcccgctcgtagggcgagccttgcctgggtagtagccagccgcatgaacacgtgcgaccgaacctcataaggtgggcgctgacgagcttggggcaatcgttcggatccgacggacactgacctcgtgttcacttttcctgatcttgcatggaaatcggacggcggcgtatcatgaagagaagggaatcttcagcctcactaagtagagctgccggcgattgttgtatgtaaggctatcgatttctttttcgctatgcattcatttgctgagtgcgctgaggagcgtgattcgaaacttccatggcctgttttctagaaatgccaagatcagctcaaaaggaccaggacaggcaaagggacaggacttccgcccgcccggcatgtgccgtttcagaatgtgcaagggtgcgaataccaggttaccactgaccgggccagccagatcgacagcttgcagtgacctcagtcgatcattagagacatccttggttttttccgtcttacccctgaaggttc

SEQ ID NO: 37511 - DNA, 597 bp, Muscodor strobelii
  misc_feature: SGI cDNA ID NO. 573018
  misc_feature: Encodes the peptide sequence at SEQ ID NO 37512
atggcgaccaatccatacgaagtcgagcacaacatctcagactcaaacagcaagacgccccaccgccgacgcccagacatgtcaagtttcgatgcacacctacaccagctcaccgacccctccacaacgcacacccacgccggtccaacacctgtcgacatggccggcctcttccacctcgtgcaagaccaactcgcgactctacaagaagacgcgcccacagatcagaaccgccagttcctcagggatcttatcacccagctcgaagacgacgccagggccccgccagcccaggtggacggcgtcgaccagatgtacctcgacaccctcgagcgtgtaccgaagaagcagctgttggcagataaagatggcacgtgtcctatctgcgccgagaagtatctggatgatccgtatccgcttgttgttgagctgccttgctctggtaagcatacgtatgatttggagtgtgtgggtccgtggttgcggagtaagggcacatgtcctatgtgtcgacataatcttacgaagaagaaatcgttcgagatcacaaaagacgaggaggaggaggatgaggacgttgatggactctatggatga

SEQ ID NO: 37512 - protein, 198 aa, Muscodor strobelii
  misc_feature: SGI Peptide ID NO. 573018
  misc_feature (1)..(198): NCBI GI: 85095777 Blast Desc: NCU07060 [Neurospora crassa OR74A] gi|28921625|gb|EAA30913.1| conserved [Neurospora crassa OR74A]
  misc_feature (1)..(198): NCBI GI: 116202519 Blast Desc: CHGG_09144 [Chaetomium globosum CBS 148.51] gi|88177662|gb|EAQ85130.1| CHGG_09144 [Chaetomium globosum CBS 148.51]
  misc_feature (6)..(181): NCBI GI: 145608608 Blast Desc: MGG_12816 [Magnaporthe grisea 70-15] gi|145016058|gb|EDK00548.1| MGG_12816 [Magnaporthe grisea 70-15]
  misc_feature (1)..(184): NCBI GI: 46128503 Blast Desc: FG08629.1 [Gibberella zeae PH-1]
  misc_feature (4)..(174): NCBI GI: 156034190 Blast Desc: SS1G_13398 [Sclerotinia sclerotiorum 1980] gi|154698801|gb|EDN98539.1| SS1G_13398 [Sclerotinia sclerotiorum 1980]
  misc_feature (27)..(174): NCBI GI: 171682420 Blast Desc: protein product [Podospora anserina] gi|170941169|emb|CAP66819.1| protein product [Podospora anserina]
  misc_feature (6)..(198): NCBI GI: 238487788 Blast Desc: conserved [Aspergillus flavus NRRL3357] gi|220700011|gb|EED56350.1| conserved [Aspergillus flavus NRRL3357]
  misc_feature (4)..(174): NCBI GI: 154310813 Blast Desc: BC1G_06385 [Botryotinia fuckeliana B05.10] gi|150851184|gb|EDN26377.1| BC1G_06385 [Botryotinia fuckeliana B05.10]
  misc_feature (6)..(198): NCBI GI: 169769881 Blast Desc: [Aspergillus oryzae RIB40] gi|83767269|dbj|BAE57408.1| protein product [Aspergillus oryzae]
  misc_feature (6)..(178): NCBI GI: 189192777 Blast Desc: conserved [Pyrenophora tritici-repentis Pt-1C-BFP] gi|187978291|gb|EDU44917.1| conserved [Pyrenophora tritici-repentis Pt-1C-BFP]
MATNPYEVEHNISDSNSKTPHRRRPDMSSFDAHLHQLTDPSTTHTHAGPTPVDMAGLFHLVQDQLATLQEDAPTDQNRQFLRDLITQLEDDARAPPAQVDGVDQMYLDTLERVPKKQLLADKDGTCPICAEKYLDDPYPLVVELPCSGKHTYDLECVGPWLRSKGTCPMCRHNLTKKKSFEITKDEEEEDEDVDGLYG

SEQ ID NO: 37513 - DNA, 1718 bp, Muscodor strobelii
  misc_feature: SGI EST ID NO. CUFF.89747.0
  misc_feature: Variant of the nucleotide sequence at SEQ ID NO 37511
ggcggggcatctgattgcttggatctcaaacggcttcgcatcgaagcttcaatttacaacgcatttcctctcacgaaacagcattgctgagcagcatcaacttaatctatttgaccacttcctgaaagtttcttgccatttttctccctttcaacataccttagcagtctcacacttggctgccacagatatcgcccacgatggcgaccaatccatacgaagtcgagcacaacatctcagactcaaacagcaagacgccccaccgccgacgcccagacatgtcaagtttcgatgcacacctacaccagctcaccgacccctccacaacgcacacccacgccggtccaacacctgtcgacatggccggcctcttccacctcgtgcaagaccaactcgcgactctacaagaagacgcgcccacagatcagaaccgccagttcctcagggatcttatcacccagctcgaagacgacgccagggccccgccagcccaggtggacggcgtcgaccagatgtacctcgacaccctcgagcgtgtaccgaagaagcagctgttggcagataaagatggcacgtgtcctatctgcgccgagaagtatctggatgatccgtatccgcttgttgttgagctgccttgctctggtaagcatacgtatgatttggagtgtgtgggtccgtggttgcggagtaagggcacatgtcctatgtgtcgacataatcttacgaagaagaaatcgttcgagatcacaaaagacgaggaggaggaggatgaggacgttgatggactctatggatgagaatgcgaggactggttgatgagtttatgcattggtacggtacatggcgaggagttggtgataccctgttgctgcgctagctatgaggcgtagagctatgcatcagcacaatcttgaggagacaggatgattataagcctatttagagtctatctgtcgcgacccgatacgaggcttggtatagaatacagcgcgtgtcattcctctccgctagagaatattaaacctcataatctcatccatgcccctcactcaaggcttcccagctttaggcgcactcccaccaccactcttcttggtctgtcctccatgcggcctatcctcctcctttcccttgccagcatcggcgaagcccttgtccgcgggactgttttgcagcggattgttcttgccctgttgcttcgcgccctgtgatgccgcgttcttggctgcttctggagatgtcttgtctgggttgaacgcagcatcgccgtgagctgccgctgtctccccgtcctctccgcttgctgtgtactcgggtgatttgggcttgagggattcgcggtcttggtcgtctttgtaggcgctgcgtagggctgtttggtggaatgtacgcggagagaaggtttggcgtggtgaggcgagggctgagcgccggatgatggtgcgtgagatactcgccattgtaattggtgtaattctgttaggtgagaagaggttcttggtggtgttgtagcttgactggcgcagataccacaatgaacagttgcagagcttggagatgtgcgtgtgtgatgcgcggaagattcaattggatcaagtacagcttgtgattacgctgcaagacctaattgattattgataggttgcaattgtttgaagacagatgattcgcaaacaatggaattcagtaacggaagagagcacatgatcatggtgacg

SEQ ID NO: 37514 - DNA, 411 bp, Muscodor strobelii
  misc_feature: SGI cDNA ID NO. 573019
  misc_feature: Reduced expression when VOC is produced
  misc_feature: Encodes the peptide sequence at SEQ ID NO 37515
atggcgagtatctcacgcaccatcatccggcgctcagccctcgcctcaccacgccaaaccttctctccgcgtacattccaccaaacagccctacgcagcgcctacaaagacgaccaagaccgcgaatccctcaagcccaaatcacccgagtacacagcaagcggagaggacggggagacagcggcagctcacggcgatgctgcgttcaacccagacaagacatctccagaagcagccaagaacgcggcatcacagggcgcgaagcaacagggcaagaacaatccgctgcaaaacagtcccgcggacaagggcttcgccgatgctggcaagggaaaggaggaggataggccgcatggaggacagaccaagaagagtggtggtgggagtgcgcctaaagctgggaagccttga

SEQ ID NO: 37515 - protein, 136 aa, Muscodor strobelii
  misc_feature: SGI Peptide ID NO. 573019
  misc_feature (2)..(132): NCBI GI: 189201393 Blast Desc: conserved [Pyrenophora tritici-repentis Pt-1C-BFP] gi|187984132|gb|EDU49620.1| conserved [Pyrenophora tritici-repentis Pt-1C-BFP]
  misc_feature (22)..(128): NCBI GI: 39977221 Blast Desc: [Magnaporthe grisea 70-15] gi|145016057|gb|EDK00547.1| [Magnaporthe grisea 70-15]
  misc_feature (9)..(136): NCBI GI: 256733527 Blast Desc: NECHADRAFT_99624 [Nectria haematococca mpVI 77-13-4]
  misc_feature (3)..(91): NCBI GI: 46128505 Blast Desc: FG08630.1 [Gibberella zeae PH-1]
  misc_feature (36)..(128): NCBI GI: 156046811 Blast Desc: [Sclerotinia sclerotiorum 1980] gi|154693884|gb|EDN93622.1| [Sclerotinia sclerotiorum 1980]
  misc_feature (6)..(134): NCBI GI: 169619914 Blast Desc: SNOG_13157 [Phaeosphaeria nodorum SN15] gi|111058364|gb|EAT79484.1| SNOG_13157 [Phaeosphaeria nodorum SN15]
  misc_feature (4)..(103): NCBI GI: 154313968 Blast Desc: [Botryotinia fuckeliana B05.10] gi|150849073|gb|EDN24266.1| [Botryotinia fuckeliana B05.10]
  misc_feature (7)..(103): NCBI GI: 145244683 Blast Desc: An11g06690 [Aspergillus niger] gi|134079337|emb|CAK96966.1| protein product [Aspergillus niger]
  misc_feature (39)..(112): NCBI GI: 121712182 Blast Desc: conserved [Aspergillus clavatus NRRL 1] gi|119401858|gb|EAW12280.1| conserved [Aspergillus clavatus NRRL 1]
  misc_feature (39)..(108): NCBI GI: 115400485 Blast Desc: [Aspergillus terreus NIH2624] gi|114191497|gb|EAU33197.1| [Aspergillus terreus NIH2624]
  misc_feature: Useful for introducing or modulating the production of volatile compounds
MASISRTIIRRSALASPRQTFSPRTFHQTALRSAYKDDQDRESLKPKSPEYTASGEDGETAAAHGDAAFNPDKTSPEAAKNAASQGAKQQGKNNPLQNSPADKGFADAGKGKEEDRPHGGQTKKSGGGSAPKAGKP

SEQ ID NO: 37516 - DNA, 774 bp, Muscodor strobelii
  misc_feature: SGI cDNA ID NO. 573020
  misc_feature: Elevated expression when VOC is produced
  misc_feature: Encodes the peptide sequence at SEQ ID NO 37517
atgcgttcttcagtgattctcctgttagcacccgtcgcgttcgcttcgcagcagcgcaagatcggttatggactgagccgatctagccagtctggctccggaaacgtgttgctcaacatcctcgacgcgacatgcggtatcggcaaggaagtctgtgaggagggctgcatgcctcaaggcgatgtgtgctgtgatgatggcaccaacacctactgcaatgctggctactactgcaccccagacgcctgttgccctgaaggcgagacctgctctggcggcggcggtccggcggtctgtgaagaaggcatcgaatgcggtgacttctgcatcccaattgacggtacatgctgcgacaacgccggcaactactgtcctgacttcggaacctgtctgactggcggctattgctgtgacctcggagatacgtgcgatggcgacgagagcacgttcacctcaaccaccttcaccactccgacgaccacctcggacttcagcagcgagaccacatcttccgatgacttcaccttcaccacggatgaacccaccaccacgtcggctgacgactccacgtcaactgacttcggcttcacattccctactggggacgctaccaccaccgacaacagcgatacctcagctactactaatggtcagaccgtcactgtcaccagcgcgcccagttcgtctgtctctcagcaagctggtggccatttcaccatggacggccgcatggttgccggtggcttggccgtcgccgccgctcttgtgatctaa

SEQ ID NO: 37517 - protein, 257 aa, Muscodor strobelii
  misc_feature: SGI Peptide ID NO. 573020
  misc_feature (43)..(130): NCBI GI: 164425521 Blast Desc: NCU05609 [Neurospora crassa OR74A] gi|157070959|gb|EAA31335.2| [Neurospora crassa OR74A]
  misc_feature (1)..(133): NCBI GI: 256727717 Blast Desc: [Nectria haematococca mpVI 77-13-4]
  misc_feature (42)..(136): NCBI GI: 39974077 Blast Desc: [Magnaporthe grisea 70-15] gi|145018248|gb|EDK02527.1| [Magnaporthe grisea 70-15]
  misc_feature (43)..(194): NCBI GI: 116202809 Blast Desc: [Chaetomium globosum CBS 148.51] gi|88177807|gb|EAQ85275.1| [Chaetomium globosum CBS 148.51]
  misc_feature (44)..(124): NCBI GI: 171682562 Blast Desc: protein product [Podospora anserina] gi|170941240|emb|CAP66890.1| protein product [Podospora anserina]
  misc_feature (44)..(148): NCBI GI: 171682562 Blast Desc: protein product [Podospora anserina] gi|170941240|emb|CAP66890.1| protein product [Podospora anserina]
  misc_feature (3)..(136): NCBI GI: 261359333 Blast Desc: conserved [Verticillium albo-atrum VaMs.102]
  misc_feature (43)..(95): NCBI GI: 67538240 Blast Desc: AN5290.2 [Aspergillus nidulans FGSC A4] gi|40743260|gb|EAA62450.1| AN5290.2 [Aspergillus nidulans FGSC A4] gi|259485274|tpe|CBF82163.1| TPA: GPI anchored rich protein
  misc_feature (48)..(90): NCBI GI: 164425521 Blast Desc: NCU05609 [Neurospora crassa OR74A] gi|157070959|gb|EAA31335.2| [Neurospora crassa OR74A]
  misc_feature: Useful for introducing or modulating the production of volatile compounds
MRSSVILLLAPVAFASQQRKIGYGLSRSSQSGSGNVLLNILDATCGIGKEVCEEGCMPQGDVCCDDGTNTYCNAGYYCTPDACCPEGETCSGGGGPAVCEEGIECGDFCIPIDGTCCDNAGNYCPDFGTCLTGGYCCDLGDTCDGDESTFTSTTFTTPTTTSDFSSETTSSDDFTFTTDEPTTTSADDSTSTDFGFTFPTGDATTTDNSDTSATTNGQTVTVTSAPSSSVSQQAGGHFTMDGRMVAGGLAVAAALVI

SEQ ID NO: 37518 - DNA, 2098 bp, Muscodor strobelii
  misc_feature: SGI EST ID NO. CUFF.89750.1
  misc_feature: Variant of the nucleotide sequence at SEQ ID NO 37516
gcaaaatagtgcccgactaaagatactaagtggtgtggtgcccgtgctaggcatccatggtggaggacaaggcagacttcgagcaggagataatctcgcgatctattctgagagtcatatctcctgagctgggaattgagtcctcatcaaaagtgtaaatcgacgaagtgctttgaggttattgcggcaacaattttgcgttggatcacacgaatttgcacatgaacgtccacgcatactcagcgagtccatatactcagccacttaggtcttctaagaaccagactcacaagatcatatttgcggctggaaatgccaagctgggctgaaactaaagtgcaaggaacagaatgaaagggtcgagagtctcgttcgtaggagctaccctgatccaaaaaggtgaaagaggaggcaaattttgaccaccaagaggatcttgattgggtaattaagccaagtcgtatttcgcatcggcataacccacgagacacgtcgagaagccgtcagtggtcctttgcaatgaaatccaccgatccagtgcaatccatgtggccagccggggcgtgggcggcgcagatcacgacgaactaggattgatgccaggtctaaaccgcttggcatatattcacaaggcaaacccatctcaacaaacttccttcggttcactgtcaggaagcggtagcttggtcttggctgccaagtcagaaatgagctgaaggaggcagaaaaaattatatacacgggcgtccgccagtttggcctttgatatcctgggagatgtctctgccatccgtcgatttcagtcgcttcgtctgtctctcgctttctcccagacaaatttccataccacatcagacaacatgcgttcttcagtgattctcctgttagcacccgtcgcgttcgcttcgcagcagcgcaagatcggttatggactgagccgatctagccagtctggctccggaaacgtgttgctcaacatcctcgacgcgacatgcggtatcggcaaggaagtctgtgaggagggctgcatgcctcaaggcgatgtgtgctgtgatgatggcaccaacacctactgcaatgctggctactactgcaccccagacgcctgttgccctgaaggcgagacctgctctggcggcggcggtccggcggtctgtgaagaaggcatcgaatgcggtgacttctgcatcccaattgacggtacatgctgcgacaacgccggcaactactgtcctgacttcggaacctgtctgactggcggctattgctgtgacctcggagatacgtgcgatggcgacgagagcacgttcacctcaaccaccttcaccactccgacgaccacctcggacttcagcagcgagaccacatcttccgatgacttcaccttcaccacggatgaacccaccaccacgtcggctgacgactccacgtcaactgacttcggcttcacattccctactggggacgctaccaccaccgacaacagcgatacctcagctactactaatggtcagaccgtcactgtcaccagcgcgcccagttcgtctgtctctcagcaagctggtggccatttcaccatggacggccgcatggttgccggtggcttggccgtcgccgccgctcttgtgatctaatcaggcattgtctcgcttggatagttttcggttcgatcggaaacacttgcaaggatcacaactaggtcgactcaagaaattggcaactcatttgactggctggatggcgtcgcatttgatagattagctcatatacccaacatggtggcagcttcgcactcaccttaatatacccaaattgacatcatcgatagaacattcgtccgctcatgcgcctatgtgatttagtcaaagatacataggtttcattcgagactgtagtgatgaagggaagtggaagtgaggcttgacgattactcagattttataaaatggcacacagtccatttcatatgcatacgccacctacagtgataggcgccccttctatgccaaagtggctacaactaacacacggctttgggtaacgcatacatgtagcctatgtaactgatatagctctctttattgcgtgtcgcattatg

SEQ ID NO: 37519 - DNA, 1704 bp, Muscodor strobelii
  misc_feature: SGI cDNA ID NO. 573021
  misc_feature: Encodes the peptide sequence at SEQ ID NO 37520
atggatgagtccaaacaactcaatgaggaggctacccctcccgaaaaacactcatccgaagcaccagccgtcacttcacccccagaaagcaaggccgacgatgaaatccagtacccatcaggtcctcgactctggctcgtgataatatcactctgtctagccgtcttcctcgtcgccttagatcaaacaatcatcgcacccgccctcggagccatcaccggtgaattcaacagcgtcaaagacatcggctggtatggtagttcatatctcctaaccagcaccgctttgatcccgctatacggcaaaatctaccgcgtgttccacatcaaattcacgttcatcggagccgttgcgattttcgaattaggtagtttggtcacggctgttgcgcctacatctacagcgtttatcattgggcgtgctattgcgggtattggaaacgctgggatattctccggagctgtggtcatcctgtcgttttcgcttccgttgcggaaaaggcctattgcctatggcgcgtttggtgggatttggggaattgcttcggttgcgggaccgctgcttggtggtgcttttactgatcatcttacgtggcgatggtgtttctatatcaatctgcccatcggaggcgcatctgtcgtagtcatacttctgttcctgaacatctcacgcgtcaacaatcccgacaatgtctcatttctgtcgcgaatcttggatctcggtctgattggagcaggtatcctcgtcccaggtatcatcatgcttcttctggcactgcaatggggaggcgctgagttcccctggaacaactctcgcatcattggcctcttcgtaggcgccggtgtaatcgctcttatctttattggtatcgagaaatggcagcaagacaagggaattctaccgcctcgattcttcaaagaccgcaacatcgtatgcgcgatgatgatcgcatttttcttcggagcttctttctttccacttgtgtattatctgtccctatacttccaggccattaaaggggttacggccgtcgaggccggtatcaagcttcttcctctcctcatcgctgtggtgattagttcagctacatctgggggactgataagtgcaactggatattacaatcctgtccttctcgtaggcatggcgttgatggcaatcggtgatggtctcatcgcgacattcactatcgggacacctctcagtagatggtttgggtaccaagttgtcacaggtctgggcacaggggtcggatttcagatccctgtactcgtcgtccaaaacactgtgtcccaagagctcgtacctcagggtactgcatgcgttcagttctttcagtcccttggaggagcacttttcatcgctgttgcgcagacggtctttcagaatgggttgatcgatggcctacgtcaagatgcgccccaactcgatccgacgatcttcataaatagcggtgcgagcgatattccgggtgtcttggcagcactaggtcagtcgagtgcactggaagcagttttgacggcgtatctgcaaggtctgaggaatacgtattacatatcggccgcagctggtgctggagcctttcttgccggactgggactgcaatggaagaagatagagaagaagggacagaaaacatcacaatcagatatcgttgagcgtggccatgttggaggtggaaatcaacaaggacgaaaggaataa

SEQ ID NO: 37520 - protein, 567 aa, Muscodor strobelii
  misc_feature: SGI Peptide ID NO. 573021
  misc_feature (51)..(454): Pfam Id: PF07690 Pfam Desc: Major Facilitator Superfamily
  misc_feature (51)..(290): Pfam Id: PF07690 Pfam Desc: Major Facilitator Superfamily
  misc_feature (299)..(454): Pfam Id: PF07690 Pfam Desc: Major Facilitator Superfamily
  misc_feature (3)..(551): NCBI GI: 164422873 Blast Desc: NCU09640 [Neurospora crassa OR74A] gi|157069856|gb|EAA28935.2| conserved [Neurospora crassa OR74A]
  misc_feature (15)..(555): NCBI GI: 116202423 Blast Desc: CHGG_09096 [Chaetomium globosum CBS 148.51] gi|88177614|gb|EAQ85082.1| CHGG_09096 [Chaetomium globosum CBS 148.51]
  misc_feature (2)..(545): NCBI GI: 256734032 Blast Desc: [Nectria haematococca mpVI 77-13-4]
  misc_feature (3)..(563): NCBI GI: 171682174 Blast Desc: protein product [Podospora anserina] gi|170941046|emb|CAP66696.1| protein product [Podospora anserina]
  misc_feature (9)..(541): NCBI GI: 46128743 Blast Desc: FG08749.1 [Gibberella zeae PH-1]
  misc_feature (26)..(539): NCBI GI: 170940315 Blast Desc: protein product [Podospora anserina]
  misc_feature (1)..(548): NCBI GI: 121701463 Blast Desc: MFS toxin efflux pump (AflT), [Aspergillus clavatus NRRL 1] gi|119397139|gb|EAW07570.1| MFS toxin efflux pump (AflT), [Aspergillus clavatus NRRL 1]
  misc_feature (6)..(552): NCBI GI: 70995754 Blast Desc: MFS toxin efflux pump (AflT) [Aspergillus fumigatus Af293] gi|66850267|gb|EAL90594.1| MFS toxin efflux pump (AflT), [Aspergillus fumigatus Af293] gi|159131385|gb|EDP56498.1| MFS
  misc_feature (10)..(552): NCBI GI: 42820667 Blast Desc: AflT-like major facilitator superfamily protein, [Aspergillus fumigatus]
  misc_feature (1)..(551): NCBI GI: 212541604 Blast Desc: conserved [Penicillium marneffei ATCC 18224] gi|210068256|gb|EEA22348.1| conserved [Penicillium marneffei ATCC 18224]
MDESKQLNEEATPPEKHSSEAPAVTSPPESKADDEIQYPSGPRLWLVIISLCLAVFLVALDQTIIAPALGAITGEFNSVKDIGWYGSSYLLTSTALIPLYGKIYRVFHIKFTFIGAVAIFELGSLVTAVAPTSTAFIIGRAIAGIGNAGIFSGAVVILSFSLPLRKRPIAYGAFGGIWGIASVAGPLLGGAFTDHLTWRWCFYINLPIGGASVVVILLFLNISRVNNPDNVSFLSRILDLGLIGAGILVPGIIMLLLALQWGGAEFPWNNSRIIGLFVGAGVIALIFIGIEKWQQDKGILPPRFFKDRNIVCAMMIAFFFGASFFPLVYYLSLYFQAIKGVTAVEAGIKLLPLLIAVVISSATSGGLISATGYYNPVLLVGMALMAIGDGLIATFTIGTPLSRWFGYQVVTGLGTGVGFQIPVLVVQNTVSQELVPQGTACVQFFQSLGGALFIAVAQTVFQNGLIDGLRQDAPQLDPTIFINSGASDIPGVLAALGQSSALEAVLTAYLQGLRNTYYISAAAGAGAFLAGLGLQWKKIEKKGQKTSQSDIVERGHVGGGNQQGRKE

SEQ ID NO: 37521 - DNA, 1420 bp, Muscodor strobelii
  misc_feature: SGI EST ID NO. CUFF.89756.0
  misc_feature: Variant of the nucleotide sequence at SEQ ID NO 37519
gaaagggggacaatgatgacaactttgacgttggggtcgaaaagcagaacaggacttgagtgtctttaacctagaatcacggcgacttcacattgtttgcagtgggcggcgcacatacatttcgggtctgtggctctttgagtttggccgcaagatgacgttcacgacatgcctcggcaccagaggggaatacagggttcaatgaggtggtcttggcaatctccaaccttcagaaataaggctttgtctgggcaatttgcgcgacaacagcatggcaatggcaataatcagagcgtgaagcaaaagaaagagagacaaatacgacgacgattgtctcagacaacacaaggctaggttccctacggggtctatcgatgaccagttgatcctctattcaagccaccaggataacaataacaatcatatgggttccgactgagttgttcagacgaccgtccatgaggaaattgattaaatgcacctcaccctaatcctatcttaaccacatcgacagcgcatgagggtatgaagatggatgagtccaaacaactcaatgaggaggctacccctcccgaaaaacactcatccgaagcaccagccgtcacttcacccccagaaagcaaggccgacgatgaaatccagtacccatcaggtcctcgactctggctcgtgataatatcactctgtctagccgtcttcctcgtcgccttagatcaaacaatcatcgcacccgccctcggagccatcaccggtgaattcaacagcgtcaaagacatcggctggtatggtagttcatatctcctaaccagcaccgctttgatcccgctatacggcaaaatctaccgcgtgttccacatcaaattcacgttcatcggagccgttgcgattttcgaattaggtagtttggtcacggctgttgcgcctacatctacagcgtttatcattgggcgtgctattgcgggtattggaaacgctgggatattctccggagctgtggtcatcctgtcgttttcgcttccgttgcggaaaaggcctattgcctatggcgcgtttggtgggatttggggaattgcttcggttgcgggaccgctgcttggtggtgcttttactgatcatcttacgtggcgatggtgtttctatatcaatctgcccatcggaggcgcatctgtcgtagtcatacttctgttcctgaacatctcacgcgtcaacaatcccgacaatgtctcatttctgtcgcgaatcttggatctcggtctgattggagcaggtatcctcgtcccaggtatcatcatgcttcttctggcactgcaatggggaggcgctgagttcccctggaacaactctcgcatcattggcctcttcgtaggcgccggtgtaatcgctcttatctttattggtatcgagaaatggcagcaagaca

SEQ ID NO: 37522 - DNA, 2664 bp, Muscodor strobelii
  misc_feature: SGI cDNA ID NO. 573022
  misc_feature: Encodes the peptide sequence at SEQ ID NO 37523
atggcgtacacaatgccattgctcaatgaagccgattatgcagccattgtttctactctcatatcagggaatgcaatggtggcaaaggcactacctggtaagatcaaagacgtgccaattgatgacatgcctcaggatctattgctacagatattgaaacatgcatcccctagggatcaagttaccttggctattgcacatccaacggcgttcttacagacaatcaatgtctaccaacttgatgctgtagcaaagctcaaggatactaacaggaaagagagaccattgctgttggaagcgattccgaggctgagcatcgaaaattttcgagaggttttggaaacttatttggccgtaagcaatgactttttgcattctgatttcgctcctacttacaccagcttaccggacaaaactagacacgcaaactacctcctgcctccgcttcatgttgctatagagagtggacgcctggacattttctatcttctcttagaaagaggtgccaatcctcgccagtatggtcgcgtcaaaatgcctgggatgccacagacggctgttgtacaactctcgcctttcgaatatgcttggcagttattaacggctccgctctacttttatcctcctgaagtagccggggatcgcaagcgcgctctagtacaacaggagatggctatatttctcaacaagtatgacaggatgcaacctttcgaccctttgccaacccaaccagacatcgtacttacgaaaggtctcgatgcttgtatctttcacggattcggggcattggccgtggaaatcttcaagaactacgatggtgaatacagcagtatgggggatctagcgcgtcatttgtctgttctccaagttccggaaagatctatccaatgtgcatggcctgagggtacggctcttgtgagatatgtattcgaggaagtcgggactacctttgctgatgcagaccagcagccaaccaaacgatggtatcgtcgattgacagatgcaatgcgtggtgcgccattgccggtcgacaggacgaatagcttttcttctcgtcacatagacaatttcttcgtggccttcaatgcattgctcaaaagagatatccaaggtttcgtgcaggatgaagtgatctttctcgaagcgttcacggatagcgatgatcactggcactatctccaaaatgcgctcctagagacttccaagtatccagagctaaattacctgccgtctctatgtctgcgacaagcagtaaactggggcggtcggaatttacgccttcgtcaatggcttgttatagcaactagtgctgcggatgacggtactgctttgcgctttgctatacgacaccgcgataattcaacttttgcagctatcatcgactactatagagagactgggaagagtctggacgccaaaattagtagtgatatagatgtgcggacaaatcgaaagccgcctgcggagttcttcgaaactcctttgacttgggctctgcatgagaataactaccatcaagcggctaagctcttgtatctgggcgctgatcctggtcttgtggcggtgaatatcacagatcgagtacggactctacgatggattctcaatcaagatcctcttaacttcccatacgagcacttcgtttggggagagtacgatgggaacgatcacccagagactggaactcgacaggatattgcacaagcacaggatgattatacaggagaagatgataagcaggcacgtctatcgcatcgtctcaacaggacggttttcgaaatgaattacgtcttccgccgaatactcgacgatccaaatctcgctcctttgcctcccatagtagttaacatggacgatttatccgttcatgacgaaaattgggaatttgatgttccatccgcgccttctcagctaattaatgtgcctccagcgccttcacttccaaagcttgtgccttggttccggtatcgactgcctgcgtatatccgtcgatctgatgttctagcccccgtgcctccaaaccccgaggagatgcagagcatcagagctgctctagcgggccagcctcccaaaaagattaaggtagagaccatctggtctcgactatggaacacgggtgagcttcccgatcccgatcaagtccaagatattataaaactccttggatgggacaatgcgcctcgtgctcaaccacaagccacgccgaatcgacgcgtccctgggacacctcgtcggggccagtcttatggaacactactactacaaaatcccgtattcggaaacaggaatttgcgcgggagtgccagctacggacggttgccaactcctcctcctcctcctgggtcaagcccgccatatcctgtaacaccgccacaacagacgtcgccagataataaatgggagcgtactccggaccacgaactcagtgctttcagacaggcacttagggctggtaggggggaacgaccacccgcgcgccaggaaggacttttccggtccccgcaggcatcaccaggagatgacacggagatgggaggtgacacagagatggggggtgacacggagatgggggaaacatattcaataccaacggagcgccgtatatcaacgaggctacaggcgaatttgagatttaagaagattgtcggggttgttcattgctag

SEQ ID NO: 37523 - protein, 887 aa, Muscodor strobelii
  misc_feature: SGI Peptide ID NO. 573022
  misc_feature (144)..(176): Pfam Id: PF00023 Pfam Desc: Ankyrin repeat
MAYTMPLLNEADYAAIVSTLISGNAMVAKALPGKIKDVPIDDMPQDLLLQILKHASPRDQVTLAIAHPTAFLQTINVYQLDAVAKLKDTNRKERPLLLEAIPRLSIENFREVLETYLAVSNDFLHSDFAPTYTSLPDKTRHANYLLPPLHVAIESGRLDIFYLLLERGANPRQYGRVKMPGMPQTAVVQLSPFEYAWQLLTAPLYFYPPEVAGDRKRALVQQEMAIFLNKYDRMQPFDPLPTQPDIVLTKGLDACIFHGFGALAVEIFKNYDGEYSSMGDLARHLSVLQVPERSIQCAWPEGTALVRYVFEEVGTTFADADQQPTKRWYRRLTDAMRGAPLPVDRTNSFSSRHIDNFFVAFNALLKRDIQGFVQDEVIFLEAFTDSDDHWHYLQNALLETSKYPELNYLPSLCLRQAVNWGGRNLRLRQWLVIATSAADDGTALRFAIRHRDNSTFAAIIDYYRETGKSLDAKISSDIDVRTNRKPPAEFFETPLTWALHENNYHQAAKLLYLGADPGLVAVNITDRVRTLRWILNQDPLNFPYEHFVWGEYDGNDHPETGTRQDIAQAQDDYTGEDDKQARLSHRLNRTVFEMNYVFRRILDDPNLAPLPPIVVNMDDLSVHDENWEFDVPSAPSQLINVPPAPSLPKLVPWFRYRLPAYIRRSDVLAPVPPNPEEMQSIRAALAGQPPKKIKVETIWSRLWNTGELPDPDQVQDIIKLLGWDNAPRAQPQATPNRRVPGTPRRGQSYGTLLLQNPVFGNRNLRGSASYGRLPTPPPPPGSSPPYPVTPPQQTSPDNKWERTPDHELSAFRQALRAGRGERPPARQEGLFRSPQASPGDDTEMGGDTEMGGDTEMGETYSIPTERRISTRLQANLRFKKIVGVVHC

SEQ ID NO: 37524 - DNA, 408 bp, Muscodor strobelii
  misc_feature: SGI EST ID NO. CUFF.89762.0
  misc_feature: Variant of the nucleotide sequence at SEQ ID NO 37522
agtcttatggaacactactactacaaaatcccgtattcggaaacaggaatttgcgcgggagtgccagctacggacggttgccaactcctcctcctcctcctgggtcaagcccgccatatcctgtaacaccgccacaacagacgtcgccagataataaatgggagcgtactccggaccacgaactcagtgctttcagacaggcacttagggctggtaggggggaacgaccacccgcgcgccaggaaggacttttccggtccccgcaggcatcaccaggagatgacacggagatgggaggtgacacagagatggggggtgacacggagatgggggaaacatattcaataccaacggagcgccgtatatcaacgaggctacaggcgaatttgagatttaagaagattgtcg

SEQ ID NO: 37525 - DNA, 2988 bp, Muscodor strobelii
  misc_feature: SGI cDNA ID NO. 573023
  misc_feature: Encodes the peptide sequence at SEQ ID NO 37526
atgtcggaattccgcggcaggggtggccgtggtggccgtggtaccggccgtggcgacttcggtggtcggggtcgtggtgactctggcggccgcggacgtggtgagttccgtggcaggggccgtggtgacttctttgacgggcagggaggtcgagggcaaggcggcccaggccaaagccgaggaaaagggggaggtcgacccgacaaattcgaaggagaagctatggtctacagacttgctcccggtcgtcctgctcctttgcctgatgcggggatcaaaaaacttgaggatagcattctcaagcagcatggatctaacgatattgccacgaaattggaaaatatccagttatccggagcccaattcccttgccgtcccgcttttggctcccaaggaaacccggtcactctgtgggccaactatttcgcgctggagaaggtttccgcacagatgttgctcaagtattctctcaaagtcaagctagtagagaaggacacggacaagaagaaggacacaaagaagaaaggtcgtcaggcatcgaatgctccaaaaggtccagcggggagaaagctccgcaaaatcttgaccgaagcacttgacatggttgctggggacgtaaaatatgtcactgattacaagcaacaagtcatcgcaatccgaccattcgccttccctgcaggtcctgtggtcagggtgctataccaggacgagggtaaaaatgacgagttcgatgttgatttcggcaagcctatcaacctcgatcttcccggtctcttgcattatctttcctcttttcgcgaccctgcagcaagcaaatggccgaaattcgaggacgagctcaccgctctcacgattattgtcggctttcatgcccggctcgacctggatgccaactctgcccttggcagccgctttttccctctcaagaaggaaggagagcaaattacgctggatcaaaccgagctcaaccgtgtcattcgtggctattttcaaagcgttcgtcccgctaccggtcgtcttttactcaatgcaaatgttgcgcatggagtctttcggctgacaggaccagccaccaagttcattgaaaagcacatgcatgactacgcgaagattcacaatatacttgcgaagatgagattgagagtccattacaagatgttttacctcgacagtacaaaggctgtgaaatctcgcctggtccaaaaacttatttgcggtctagccactccagtagacgggaataaggacgaaccaaagcccaaggtgtccgtaattggggccaaggcacatgaagtgcagtttcatctcagagctccagcaccttctggtttcacccccaataccttcgtctacgtcaaagactacttcaagaagcgtaataagttgagacctgcgtatgtgcctgccgagctggtggatatccttgatggccagcctctccagcggaagaccactggggacgagacgaaagagatgatcaacttctcatgccgttcgccttttgcaaacgcgacttccattactactcttgggcgtcaagtacttgggctagacggtggcagtgggactcatcttgaagcattcggcatcacgattggaaagacgctacttactgtacaaggtcgcgaattgcccccaccccaaatcgtctacaatgatcaagcaaataaaaccaaatttgttaatgtgaaagagggcggatggaacatggactccgtgcgcttcacaaaaccaggaaagccaatcacgcgatgggcttggctacatctgcactggaatcaccggcgacacgacgaggttgctactcgagtcaagcagtggatgaacttcatgcggagtatgggtctctctatcgccgaagacccactgaacaaggtaaaggatgtcagagtaagtaccggccatggacaggatctgatggcccaactacgaccggcattccggaatctcaaacaatccaacactgtgtacctgtttgttgttcttcctgggaagaagacggatgtcgatatctacaacgccgtcaagaccttggctgagtctaagcaagaagacttcggtttcatcaccagctgcgtcttagagtcgagtctcttgaagcctggaccgaaggagcagctgttcgccaacctcggtttgaaagtaaacctcaaaatgggtggcatcaatcatacactccggagccctatcgacatcatgcgtgggggtcacaagacgatggtcgtaggatacgatgtcttacatccgactaatatcgccaatgcggagggaaagcccagtctagtggcattagtggcatccgtggatgatgacttggctcaatggccggccattctttggcgccaagacggcaaagtcgagatgctgaatcagaatttgctcgaagaaggcttccgcagtcgtctgaaactatttcacaataagcaccacgtactacccgagaacatcatcatctttcgcgatggcgtgtcagagggtcaattcagtcaggtcatcgagaaggaactaccatctatcaggaaagcttatgagggggcaccatactcgcgacccccgaagatcacaattgttgtatcggtgaagcgacaccagactcgcttttatcctacggacgagaagaatatggtaacatcacggaatatcaaaaacggaaccgtggtagatcgtacctcacgcccggcacgttacacggtcctgcttgacgagatcttccgaggcagatcagagaatgctgcgaacgagctagagaaactgacgtatgagatgtgccatctttttggccgggcaaccaaggccgtcagcatatgcccgcccgcatactatgcggatattgcctgtactcgcagtcgtgtgtatctatctgatgttttcgatggctcagatacccaatcgacaactacacatacaactcagagtaccgacaccgaggccagcgccaggaaaatcgatattcatcccaatcttgctgaggtcatgttctatatttag

SEQ ID NO: 37526 - protein, 995 aa, Muscodor strobelii
  misc_feature: SGI Peptide ID NO. 573023
  misc_feature (299)..(354): Pfam Id: PF08699 Pfam Desc: Domain of function (DUF1785)
  misc_feature (657)..(954): Pfam Id: PF02171 Pfam Desc: Piwi domain
  misc_feature (325)..(354): Pfam Id: PF08699 Pfam Desc: Domain of function (DUF1785)
  misc_feature (657)..(888): Pfam Id: PF02171 Pfam Desc: Piwi domain
  misc_feature (890)..(954): Pfam Id: PF02171 Pfam Desc: Piwi domain
  misc_feature (82)..(995): NCBI GI: 256733522 Blast Desc: NECHADRAFT_35861 [Nectria haematococca mpVI 77-13-4]
  misc_feature (76)..(995): NCBI GI: 39951260 Blast Desc: MGG_01294 [Magnaporthe grisea 70-15] gi|145020892|gb|EDK05021.1| MGG_01294 [Magnaporthe grisea 70-15]
  misc_feature (86)..(995): NCBI GI: 171682042 Blast Desc: protein product [Podospora anserina] gi|170940980|emb|CAP66630.1| protein product [Podospora anserina]
  misc_feature (69)..(995): NCBI GI: 46128749 Blast Desc: FG08752.1 [Gibberella zeae PH-1]
  misc_feature (76)..(995): NCBI GI: 164425994 Blast Desc: NCU04730 [Neurospora crassa OR74A] gi|157071157|gb|EAA31129.2| NCU04730 [Neurospora crassa OR74A]
  misc_feature (121)..(995): NCBI GI: 7248733 Blast Desc: AF217760_1 QDE2 [Neurospora crassa] gi|39979180|emb|CAE85552.1| post-transcriptional gene silencing protein QDE-2 [Neurospora crassa]
  misc_feature (82)..(995): NCBI GI: 116202223 Blast Desc: CHGG_08996 [Chaetomium globosum CBS 148.51] gi|88177514|gb|EAQ84982.1| CHGG_08996 [Chaetomium globosum CBS 148.51]
  misc_feature (112)..(995): NCBI GI: 15787604 Blast Desc: QDE2 protein [Blumeria graminis]
  misc_feature (86)..(995): NCBI GI: 240281741 Blast Desc: QDE2 protein [Ajellomyces capsulatus H143]
  misc_feature (86)..(995): NCBI GI: 225558782 Blast Desc: QDE2 protein [Ajellomyces capsulatus G186AR]
MSEFRGRGGRGGRGTGRGDFGGRGRGDSGGRGRGEFRGRGRGDFFDGQGGRGQGGPGQSRGKGGGRPDKFEGEAMVYRLAPGRPAPLPDAGIKKLEDSILKQHGSNDIATKLENIQLSGAQFPCRPAFGSQGNPVTLWANYFALEKVSAQMLLKYSLKVKLVEKDTDKKKDTKKKGRQASNAPKGPAGRKLRKILTEALDMVAGDVKYVTDYKQQVIAIRPFAFPAGPVVRVLYQDEGKNDEFDVDFGKPINLDLPGLLHYLSSFRDPAASKWPKFEDELTALTIIVGFHARLDLDANSALGSRFFPLKKEGEQITLDQTELNRVIRGYFQSVRPATGRLLLNANVAHGVFRLTGPATKFIEKHMHDYAKIHNILAKMRLRVHYKMFYLDSTKAVKSRLVQKLICGLATPVDGNKDEPKPKVSVIGAKAHEVQFHLRAPAPSGFTPNTFVYVKDYFKKRNKLRPAYVPAELVDILDGQPLQRKTTGDETKEMINFSCRSPFANATSITTLGRQVLGLDGGSGTHLEAFGITIGKTLLTVQGRELPPPQIVYNDQANKTKFVNVKEGGWNMDSVRFTKPGKPITRWAWLHLHWNHRRHDEVATRVKQWMNFMRSMGLSIAEDPLNKVKDVRVSTGHGQDLMAQLRPAFRNLKQSNTVYLFVVLPGKKTDVDIYNAVKTLAESKQEDFGFITSCVLESSLLKPGPKEQLFANLGLKVNLKMGGINHTLRSPIDIMRGGHKTMVVGYDVLHPTNIANAEGKPSLVALVASVDDDLAQWPAILWRQDGKVEMLNQNLLEEGFRSRLKLFHNKHHVLPENIIIFRDGVSEGQFSQVIEKELPSIRKAYEGAPYSRPPKITIVVSVKRHQTRFYPTDEKNMVTSRNIKNGTVVDRTSRPARYTVLLDEIFRGRSENAANELEKLTYEMCHLFGRATKAVSICPPAYYADIACTRSRVYLSDVFDGSDTQSTTTHTTQSTDTEASARKIDIHPNLAEVMFYI

SEQ ID NO: 37527 - DNA, 4027 bp, Muscodor strobelii
  misc_feature: SGI EST ID NO. CUFF.89769.0
  misc_feature: Variant of the nucleotide sequence at SEQ ID NO 37525
ctcaacttcacatcttttgcctggcatgatacctcagggaacttgtcctctgcttcaattgcattctttctaggtattgagacggtccctgtctaatatctaacatcattgccattaattagaatcaatacgtgaagcacaagtatcgagagcctccactgggtggcaggcatcgtcactaggagaggttcaatcataatacaggcattcctttgcttagctttgactcttccgggattgatcttgccaattccttcttcgcggaagctctgctagcactgcctaatccgctccgtttgttgacgaaagcttggctcaagcatcaacagtcaattgcaatcttcaacaccgcacccatattcaatcaagattgtccaaccagcaatctcaatttggggtttgtcctctaccaccaccgtcactccttcctcagtataactagcctgcctttgacttcatcctctggtgagggttcacatctcccacgtctcacgtctcacatcgatcttctctaccattcttaccttactctcatttgcttgaggtccaacaatgtcggaattccgcggcaggggtggccgtggtggccgtggtaccggccgtggcgacttcggtggtcggggtcgtggtgactctggcggccgcggacgtggtgagttccgtggcaggggccgtggtgacttctttgacgggcagggaggtcgagggcaaggcggcccaggccaaagccgaggaaaagggggaggtcgacccgacaaattcgaaggagaagctatggtctacagacttgctcccggtcgtcctgctcctttgcctgatgcggggatcaaaaaacttgaggatagcattctcaagcagcatggatctaacgatattgccacgaaattggaaaatatccagttatccggagcccaattcccttgccgtcccgcttttggctcccaaggaaacccggtcactctgtgggccaactatttcgcgctggagaaggtttccgcacagatgttgctcaagtattctctcaaagtcaagctagtagagaaggacacggacaagaagaaggacacaaagaagaaaggtcgtcaggcatcgaatgctccaaaaggtccagcggggagaaagctccgcaaaatcttgaccgaagcacttgacatggttgctggggacgtaaaatatgtcactgattacaagcaacaagtcatcgcaatccgaccattcgccttccctgcaggtcctgtggtcagggtgctataccaggacgagggtaaaaatgacgagttcgatgttgatttcggcaagcctatcaacctcgatcttcccggtctcttgcattatctttcctcttttcgcgaccctgcagcaagcaaatggccgaaattcgaggacgagctcaccgctctcacgattattgtcggctttcatgcccggctcgacctggatgccaactctgcccttggcagccgctttttccctctcaagaaggaaggagagcaaattacgctggatcaaaccgagctcaaccgtgtcattcgtggctattttcaaagcgttcgtcccgctaccggtcgtcttttactcaatgcaaatgttgcgcatggagtctttcggctgacaggaccagccaccaagttcattgaaaagcacatgcatgactacgcgaagattcacaatatacttgcgaagatgagattgagagtccattacaagatgttttacctcgacagtacaaaggctgtgaaatctcgcctggtccaaaaacttatttgcggtctagccactccagtagacgggaataaggacgaaccaaagcccaaggtgtccgtaattggggccaaggcacatgaagtgcagtttcatctcagagctccagcaccttctggtttcacccccaataccttcgtctacgtcaaagactacttcaagaagctgttcaactatgatgtggacccgaagtatcccgtcataaacgttggcagtaagttgagacctgcgtatgtgcctgccgagctggtggatatccttgatggccagcctctccagcggaagaccactggggacgagacgaaagagatgatcaacttctcatgccgttcgccttttgcaaacgcgacttccattactactcttgggcgtcaagtacttgggctagacggtggcagtgggactcatcttgaagcattcggcatcacgattggaaagacgctacttactgtacaaggtcgcgaattgcccccaccccaaatcgtctacaatgatcaagcaaataaaaccaaatttgttaatgtgaaagagggcggatggaacatggactccgtgcgcttcacaaaaccaggaaagccaatcacgcgatgggcttggctacatctgcactggaatcaccggcgacacgacgaggttgctactcgagtcaagcagtggatgaacttcatgcggagtatgggtctctctatcgccgaagacccactgaacaaggtaaaggatgtcagagtaagtaccggccatggacaggatctgatggcccaactacgaccggcattccggaatctcaaacaatccaacactgtgtacctgtttgttgttcttcctgggaagaagacggatgtcgatatctacaacgccgtcaagaccttggctgagtctaagcaagaagacttcggtttcatcaccagctgcgtcttagagtcgagtctcttgaagcctggaccgaaggagcagctgttcgccaacctcggtttgaaagtaaacctcaaaatgggtggcatcaatcatacactccggagccctatcgacatcatgcgtgggggtcacaagacgatggtcgtaggatacgatgtcttacatccgactaatatcgccaatgcggagggaaagcccagtctagtggcattagtggcatccgtggatgatgacttggctcaatggccggccattctttggcgccaagacggcaaagtcgagatgctgaatcagaatttgctcgaagaaggcttccgcagtcgtctgaaactatttcacaataagcaccacgtactacccgagaacatcatcatctttcgcgatggcgtgtcagagggtcaattcagtcaggtcatcgagaaggaactaccatctatcaggaaagcttatgagggggcaccatactcgcgacccccgaagatcacaattgttgtatcggtgaagcgacaccagactcgcttttatcctacggacgagaagaatatggtaacatcacggaatatcaaaaacggaaccgtggtagatcgtggcgttacgcaagctcccatgtgggactttttttgactgctcacaagggccttcaaggaaagtaatctcaaacccataatcacttcagtgtattgacttaatgcataggtacctcacgcccggcacgttacacggtcctgcttgacgagatcttccgaggcagatcagagaatgctgcgaacgagctagagaaactgacgtatgagatgtgccatctttttggccgggcaaccaaggccgtcagcatatgcccgcccgcatactatgcggatattgcctgtactcgcagtcgtgtgtatctatctgatgttttcgatggctcagatacccaatcgacaactacacatacaactcagagtaccgacaccgaggccagcgccaggaaaatcgatattcatcccaatcttgctgaggtcatgttctatatttagctcttcggcgtggggacgaccgaacagtacgttgcaggtgagggcaatgccaactattgcctcatcgacttcaacatcctggatgtcaatgcgatatcgccaataacaatgcagttgatggtatctacgagctagacaaagaaaatggcagaacccggaagtggaaaggaatagtgaaaaagaagaaaatagatacaaaaaagaatacagcaagcttcggagggaaaccattgtgtatgagagcgattcggaagaaaaatgttagtctagcgtgctaattgttgaagtacaataatatttgttagtgtataagttttcttagttgatgccgc

SEQ ID NO: 37528 - DNA, 528 bp, Muscodor strobelii
  misc_feature: SGI cDNA ID NO. 573024
  misc_feature: Encodes the peptide sequence at SEQ ID NO 37529
atggaagttacgaatcccgaaataccagctatcgaagccgatgatcatactgcctacatgaaatttgcgctttcactcgcaaccaggtcccctccaaaaccaacaaactaccgagtaggagccgttatagtagatatcaaggcgaacaagattctcgcgacgggatacacacttgagctaccagggaatacccacgcagaacaatgctgtctcgagaaattagctgagcagcatacagttccagcgacagagcttggtcaaaaactaccggacatcgcattatacacgacggtggagccatgctccaaaaggctgagcagcaacatgccttgtgtggagagaattctagctattagcaaatgtgtcaaaactgtttatgtcggagtacaagagcccgagacgtttgtggtgggcaactcaagtcggtctaagctggagaacgcaggtatccatgttgtgcatgttggaggactcgagaaggagattttggaggttgcgacagctggacatgagaaggaatcatcataa

SEQ ID NO: 37529 - protein, 175 aa, Muscodor strobelii
  misc_feature: SGI Peptide ID NO. 573024
  misc_feature (13)..(129): Pfam Id: PF00383 Pfam Desc: Cytidine and deoxycytidylate deaminase zinc-binding region
  misc_feature (11)..(172): NCBI GI: 171682182 Blast Desc: protein product [Podospora anserina] gi|170941050|emb|CAP66700.1| protein product [Podospora anserina]
  misc_feature (15)..(172): NCBI GI: 116202471 Blast Desc: CHGG_09120 [Chaetomium globosum CBS 148.51] gi|88177638|gb|EAQ85106.1| CHGG_09120 [Chaetomium globosum CBS 148.51]
  misc_feature (9)..(170): NCBI GI: 261359497 Blast Desc: diaminohydroxyphosphoribosylamino-pyrimidine deaminase [Verticillium albo-atrum VaMs.102]
  misc_feature (8)..(172): NCBI GI: 256733521 Blast Desc: [Nectria haematococca mpVI 77-13-4]
  misc_feature (11)..(173): NCBI GI: 46128753 Blast Desc: FG08754.1 [Gibberella zeae PH-1]
  misc_feature (8)..(172): NCBI GI: 189190780 Blast Desc: cytidine and deoxycytidylate deaminase zinc-binding domain containing protein [Pyrenophora tritici-repentis Pt-1C-BFP] gi|187973335|gb|EDU40834.1| cytidine and deaminase
  misc_feature (9)..(164): NCBI GI: 71000341 Blast Desc: DRAP deaminase [Aspergillus fumigatus Af293] gi|66852502|gb|EAL92827.1| DRAP deaminase, [Aspergillus fumigatus Af293] gi|159127878|gb|EDP52993.1| DRAP deaminase, [Aspergillus
  misc_feature (12)..(172): NCBI GI: 169607064 Blast Desc: SNOG_06585 [Phaeosphaeria nodorum SN15] gi|111065296|gb|EAT86416.1| SNOG_06585 [Phaeosphaeria nodorum SN15]
  misc_feature (20)..(172): NCBI GI: 119492758 Blast Desc: cytidine and deoxycytidylate deaminase zinc-binding domain protein [Neosartorya fischeri NRRL 181] gi|119411858|gb|EAW21801.1| cytidine and deoxycytidylate domain
  misc_feature (16)..(171): NCBI GI: 238496847 Blast Desc: DRAP deaminase, [Aspergillus flavus NRRL3357] gi|220694539|gb|EED50883.1| DRAP deaminase, [Aspergillus flavus NRRL3357]
  misc_feature (9)..(171): SWISSPROT Homolog: EC 3.5.4.26 Diaminohydroxyphosphoribosylaminopyrimidine deaminase
MEVTNPEIPAIEADDHTAYMKFALSLATRSPPKPTNYRVGAVIVDIKANKILATGYTLELPGNTHAEQCCLEKLAEQHTVPATELGQKLPDIALYTTVEPCSKRLSSNMPCVERILAISKCVKTVYVGVQEPETFVVGNSSRSKLENAGIHVVHVGGLEKEILEVATAGHEKESS

SEQ ID NO: 37530 - DNA, 900 bp, Muscodor strobelii
  misc_feature: SGI cDNA ID NO. 573025
  misc_feature: Encodes the peptide sequence at SEQ ID NO 37531
atggatgcgtccgatgaccttctcgagggcgagccacccaccatcgacccatatgaggtcttgggcctagagcgaactgccacagcagatcaagtgaaatctgcttatcgcaagctcgctttgaagaaccacccagataaggtgtccgaggacaaaaagaacgaggcacacgagacattccagtccattgcctttgcatacgccgtcctatccgacccgacccggcgcaagcgctacgacgaaacagggtcgacgagcgagtctatcgtagatgcagatggcttcagctggtcagacttctaccgtgaacagttccgcgacgccatctccaacgatgccatcgcaaggtttgaggcgcaatacaaaggctccgatgaagagaaagacgatattctagttgcctacgaagagcacgagggcgatatggatgcaatctacgagcatgtgatgcttagcaatgtgttgaaagacgacgagcgcttccgaagtattattgacgaggccattgccagcaaggatgttcctgtcttcaaagcatatacgaaggaaagcaagaagtctaagcaagcacgaatcaaggctgcaaaggacgaggctaatgaggcagaggagtatgcaaaggaacttggcgtacatgacaagctcttcggcaagaagggcgagaaggataagaagggcaagaagaaaggagacgaagatgccctggccgctctcatccgcggaagaggacaggatcgcaaacaagccgctgataacttcctcgataatctcgctgccaagtacggggccacatcgtcgagcgcgaagaagggcaagaaacgccgagccgagccggctgacgagccttcggaggaggcatttcaagcggcggctgcaaagcttaagaagcccaagaaatga

SEQ ID NO: 37531 - protein, 299 aa, Muscodor strobelii
  misc_feature: SGI Peptide ID NO. 573025
  misc_feature (16)..(80): Pfam Id: PF00226 Pfam Desc: DnaJ domain
  misc_feature (1)..(288): NCBI GI: 261359498 Blast Desc: chaperone protein dnaJ 6 [Verticillium albo-atrum VaMs.102]
  misc_feature (1)..(299): NCBI GI: 256734030 Blast Desc: NECHADRAFT_77734 [Nectria haematococca mpVI 77-13-4]
  misc_feature (1)..(299): NCBI GI: 46128755 Blast Desc: FG08755.1 [Gibberella zeae PH-1]
  misc_feature (5)..(298): NCBI GI: 116202469 Blast Desc: CHGG_09119 [Chaetomium globosum CBS 148.51] gi|88177637|gb|EAQ85105.1| CHGG_09119 [Chaetomium globosum CBS 148.51]
  misc_feature (5)..(292): NCBI GI: 171682180 Blast Desc: protein product [Podospora anserina] gi|170941049|emb|CAP66699.1| protein product [Podospora anserina]
  misc_feature (3)..(299): NCBI GI: 240110986 Blast Desc: DnaJ domain containing protein [Coccidioides posadasii C735 delta SOWgp]
  misc_feature (3)..(276): NCBI GI: 119190073 Blast Desc: CIMG_05084 [Coccidioides immitis RS]
  misc_feature (5)..(298): NCBI GI: 258565525 Blast Desc: [Uncinocarpus reesii 1704] gi|237907208|gb|EEP81609.1| [Uncinocarpus reesii 1704]
  misc_feature (1)..(288): NCBI GI: 238841825 Blast Desc: DnaJ domain-containing protein [Microsporum canis CBS 113480]
  misc_feature (1)..(288): NCBI GI: 154322915 Blast Desc: BC1G_00800 [Botryotinia fuckeliana B05.10] gi|150848134|gb|EDN23327.1| BC1G_00800 [Botryotinia fuckeliana B05.10]
MDASDDLLEGEPPTIDPYEVLGLERTATADQVKSAYRKLALKNHPDKVSEDKKNEAHETFQSIAFAYAVLSDPTRRKRYDETGSTSESIVDADGFSWSDFYREQFRDAISNDAIARFEAQYKGSDEEKDDILVAYEEHEGDMDAIYEHVMLSNVLKDDERFRSIIDEAIASKDVPVFKAYTKESKKSKQARIKAAKDEANEAEEYAKELGVHDKLFGKKGEKDKKGKKKGDEDALAALIRGRGQDRKQAADNFLDNLAAKYGATSSSAKKGKKRRAEPADEPSEEAFQAAAAKLKKPKK

SEQ ID NO: 37532 - DNA, 3831 bp, Muscodor strobelii
  misc_feature: SGI EST ID NO. CUFF.89780.0
  misc_feature: Variant of the nucleotide sequence at SEQ ID NO 37530
ggccattatacgcagttcggtggacactcatgtctctactgccagactagggagaccgatacctagtgaatgtgcaataatacaaagtcggaacacatcaagcatcagacgctttgaatgggaatcccgtatctcattatgatgattccttctcatgtccagctgtcgcaacctccaaaatctccttctcgagtcctccaacatgcacaacatggatacctgcgttctccagcttagaccgacttgagttgcccaccacaaacgtctcgggctcttgtactccgacataaacagttttgacacatttgctaatagctagaattctctccacacaaggcatgttgctgctcagccttttggagcatggctccaccgtcgtgtataatgcgatgtccggtagtttttgaccaagctctgtcgctggaactgtatgctgctcagctaatttctcgagacagcattgttctgcgtgggtattccctggtagctcaagtgtgtatcccgtcgcgagaatcttgttcgccttgatatctactataacggctcctactcggtagtttgttggttttggaggggacctggttgcgagtgaaagcgcaaatttcatgtaggcagtatgatcatcggcttcgatagctggtatttcgggattcgtaacttccatcgtgtatggtcaacacgcaattggttcctttgtcgtataatagagtgctatatcaagctgatttttacaaaattgctattctcatgctcaagagccttgcatcctgtcttagatgtgacgttttgcgcattccaggtccgacttgccccgcggcgactgccccgcgatgtgttttcagcagacccttgccgacaattaatgcaattcgaccctggacgcgtctcacgcgtcgctctatgtatgaatttctagctacaagcttcctataccatccacttcgaacaccatctcatcgattgaagctcgaatatccgcgaatctaatgacccgtcctgggtctagactataatcatcatggatgcgtccgatgaccttctcgagggcgagccacccaccatcgacccatatgaggtcttgggcctagagcgaactgccacagcagatcaagtgaaatctgcttatcgcaagctcgctttgaagaaccacccagataaggtgtccgaggacaaaaagaacgaggcacacgagacattccagtccattgcctttgcatacgccgtcctatccgacccgacccggcgcaagcgctacgacgaaacagggtcgacgagcgagtctatcgtagatgcagatggcttcagctggtcagacttctaccgtgaacagttccgcgacgccatctccaacgatgccatcgcaaggtttgaggcgcaatacaaaggctccgatgaagagaaagacgatattctagttgcctacgaagagcacgagggcgatatggatgcaatctacgagcatgtgatgcttagcaatgtgttgaaagacgacgagcgcttccgaagtattattgacgaggccattgccagcaaggatgttcctgtcttcaaagcatatacgaaggaaagcaagaagtctaagcaagcacgaatcaaggctgcaaaggacgaggctaatgaggcagaggagtatgcaaaggaacttggcgtacatgacaagctcttcggcaagaagggcgagaaggataagaagggcaagaagaaaggagacgaagatgccctggccgctctcatccgcggaagaggacaggatcgcaaacaagccgctgataacttcctcgataatctcgctgccaagtacggggccacatcgtcgagcgcgaagaagggcaagaaacgccgagccgagccggctgacgagccttcggaggaggcatttcaagcggcggctgcaaagcttaagaagcccaagaaatgattgccaggcactggcactcgacaatggcgcagatttgtattcatagtatccggcggcgttcctcgtttggtcataggcttggagttcaaggattgattcgaggaggatcgcaacgggataagactgattcaatacctagataatgaaatatgagactacgatgacttcattcgagatatcaaccggatttggttgtctgcctaaggtatgatttgttgtttatagtgatcttggcttgcgacacaactgctgtggggttgccgtccaggcagctcagccctccaaatgaattacaacaagaaccttgagttccacaatggccacactaatcgcgtcctaataccgctactcatttgtcctagccttggcttgtttgaaacattaccaatcctcgtactttgctcacatgaattcttgtcgcaagatcgatgtctacaaaatgagatgagtggtgtcgcaccgctggtctactatccccagtattgttttcacttgtcgccaaccataaacaaatggtgcccgctacgtgctgttgacattgcgaacctagagtgtcggcccggctttcaagatatcgatgtattctttgacctgaaccaccctgtgcgatgggttcgaatcacaggagtcgttgtcgcgatcgacgactactacggccgccgcgtctacacgattgacgatagtacgggacactgtatcgagtgcacacttgctgtgcctaaaccatccaagaccaccgatctggccgaattgactgcacgcaatgcgcgcctacacgagcggcctggcttcccagccgatgccaccaaggcaactagggcggccgaacccgagaaaagcaccaagggtccttccatcccaccccctccttcggatgtggatattggttccgtagtagatgtcaagggcagcatccagctcttccgaggccagaagcagattaagatccagaagctggtgcgagtacattccaccgaccaagaagtcttgttctgggacaagatacgggaattccgacgtgatacgctcagcggaccctgggttttaagcgatagagaagtgcgcaaatgcagaaagttacagcaagttgaggtcaccgacgccaaggagaagaggaagaaggacaagagagccgatgataggcaagggggtgactcgctcgctgttcgaagtagagagaagcatcagactcatcaccgaagtaaggatagtcttggaacagcctcgagggccatgaaagcagagcgcgctgcgagggcggagaagttgagggcccgtaaagacgaagaggctcagtacaacgcgttgggcctctaagtgtgagcttgcttcaacgtcacggccaactatgctcgtcgcgatgtcgtctatgcgaaaatggctcggctcatacataggggatgtctatatactgactatgctccgactgcaccgacctcgccatccgtcaagtcatctgctacggcccagcttttcaatgcccttcacgatgacacattggtgacccagcagtatggttactgtcacagagagatgggttggatatggcttgaacctgcatcatgaaagtaggttgtagggcgaacctcacaatagccgaattcgaacatatttaccgaaagcaagcatgtcgccctcgactggtctcagctcaggtgttcgagattagtcacgtcgtactttgtgttctttccctgcactggcacagggtggaaacatgcagcatccatgaggtagggtcggccagcattatggaagtctcagtctgagactgttcaacaaagtggcaagcacgaatgtcgcacgagttcgagctgaggctcagaactaccttccgtgcaacggagtttaggagtatcaggtaatctcagacatcttgtccaaccgcaattgacgtgtttctgccttttaac

SEQ ID NO: 37533 - DNA, 873 bp, Muscodor strobelii
  misc_feature: SGI cDNA ID NO. 573026
  misc_feature: Encodes the peptide sequence at SEQ ID NO 37534
atgagtggtgtcgcaccgctggtctactatccccagtattgttttcacttgtcgccaaccataaacaaatggtgcccgctacgtgctgttgacattgcgaacctagagtgtcggcccggctttcaagatatcgatgtattctttgacctgaaccaccctgtgcgatgggttcgaatcacaggagtcgttgtcgcgatcgacgactactacggccgccgcgtctacacgattgacgatagtacgggacactgtatcgagtgcacacttgctgtgcctaaaccatccaagaccaccgatctggccgaattgactgcacgcaatgcgcgcctacacgagcggcctggcttcccagccgatgccaccaaggcaactagggcggccgaacccgagaaaagcaccaagggtccttccatcccaccccctccttcggatgtggatattggttccgtagtagatgtcaagggcagcatccagctcttccgaggccagaagcagattaagatccagaagctggtgcgagtacattccaccgaccaagaagtcttgttctgggacaagatacgggaattccgacgtgatacgctcagcggaccctgggttttaagcgatagagaagtgcgcaaatgcagaaagttacagcaagttgaggtcaccgacgccaaggagaagaggaagaaggacaagagagccgatgataggcaagggggtgactcgctcgctgttcgaagtagagagaagcatcagactcatcaccgaagtaaggatagtcttggaacagcctcgagggccatgaaagcagagcgcgctgcgagggcggagaagttgagggcccgtaaagacgaagaggctcagtacaacgcgttgggcctctaa

SEQ ID NO: 37534 - protein, 290 aa, Muscodor strobelii
  misc_feature: SGI Peptide ID NO. 573026
  misc_feature (7)..(228): NCBI GI: 171682178 Blast Desc: protein product [Podospora anserina] gi|170941048|emb|CAP66698.1| protein product [Podospora anserina]
  misc_feature (10)..(290): NCBI GI: 46128757 Blast Desc: FG08756.1 [Gibberella zeae PH-1]
  misc_feature (10)..(271): NCBI GI: 116202467 Blast Desc: CHGG_09118 [Chaetomium globosum CBS 148.51] gi|88177636|gb|EAQ85104.1| CHGG_09118 [Chaetomium globosum CBS 148.51]
  misc_feature (1)..(209): NCBI GI: 256734029 Blast Desc: NECHADRAFT_36625 [Nectria haematococca mpVI 77-13-4]
  misc_feature (3)..(211): NCBI GI: 85096890 Blast Desc: NCU07078 [Neurospora crassa OR74A] gi|28921831|gb|EAA31107.1| [Neurospora crassa OR74A]
  misc_feature (1)..(237): NCBI GI: 39973703 Blast Desc: MGG_01002 [Magnaporthe grisea 70-15] gi|145018041|gb|EDK02320.1| MGG_01002 [Magnaporthe grisea 70-15]
  misc_feature (6)..(238): NCBI GI: 189190776 Blast Desc: OB-fold nucleic acid binding domain [Pyrenophora tritici-repentis Pt-1C-BFP] gi|187973333|gb|EDU40832.1| OB-fold nucleic acid binding domain [Pyrenophora tritici-repentis
  misc_feature (7)..(210): NCBI GI: 238496855 Blast Desc: OB-fold nucleic acid binding domain protein [Aspergillus flavus NRRL3357] gi|220694543|gb|EED50887.1| OB-fold nucleic acid binding domain protein [Aspergillus flavus NRRL3357]
  misc_feature (7)..(210): NCBI GI: 71001936 Blast Desc: OB-fold nucleic acid binding domain [Aspergillus fumigatus Af293] gi|66853287|gb|EAL93611.1| OB-fold nucleic acid binding domain [Aspergillus fumigatus Af293] conserved fumigatus
  misc_feature (7)..(210): NCBI GI: 121715966 Blast Desc: OB-fold nucleic acid binding domain protein [Aspergillus clavatus NRRL 1] gi|119403749|gb|EAW14166.1| OB-fold nucleic acid binding domain protein [Aspergillus clavatus NRRL 1]
MSGVAPLVYYPQYCFHLSPTINKWCPLRAVDIANLECRPGFQDIDVFFDLNHPVRWVRITGVVVAIDDYYGRRVYTIDDSTGHCIECTLAVPKPSKTTDLAELTARNARLHERPGFPADATKATRAAEPEKSTKGPSIPPPPSDVDIGSVVDVKGSIQLFRGQKQIKIQKLVRVHSTDQEVLFWDKIREFRRDTLSGPWVLSDREVRKCRKLQQVEVTDAKEKRKKDKRADDRQGGDSLAVRSREKHQTHHRSKDSLGTASRAMKAERAARAEKLRARKDEEAQYNALGL

SEQ ID NO: 37535 - DNA, 3831 bp, Muscodor strobelii; identical to SEQ ID NO: 37532
  misc_feature: SGI EST ID NO. CUFF.89780.0
  misc_feature: Variant of the nucleotide sequence at SEQ ID NO 37533

SEQ ID NO: 37536 - DNA, 2169 bp, Muscodor strobelii
  misc_feature: SGI cDNA ID NO. 573027
  misc_feature: Encodes the peptide sequence at SEQ ID NO 37537
atgacgacagaaccaacaaagcctaacaatgcggcgtcatcgaatatcttcggtgcccccattgccactgggaagcctccggccgtcttcgaagtacacaccgatcatcctgtacctcgcctaggtatctctagtccaggtccctatggtaccaacaaattctacgccaatttcttcctgggcagtcagacatcacctgcatacgtgcatccatattccttgacttgggcgaagggtcagggagccacgcacagttggggaattgcggtgtcgcatgttgaggccgaccagagagtatatggtcaaacacaagctgacacgggagcggcgcaatacttcataaatcctattgggatacagtcgttgtgtctttctgcactggaactcggctctcaaaccgtgctgaccaccgatacactcaatgctcattcggtcaacgtgaatctggctgttgatcaaaagtcgaagccgatcatcgtctttcctatggtgcaaggcatggggtttgtgacggccgtgtacaagggtggtacacctgtcatcaagacgggcgtgcttttcaagaccgtcactcgatcgacagttggacccaaacctggtgtcaccaagtacactatatatctcgaggatggcaaagtctggcatgtttacggttattctgcgaagggtgatcccttcgacttgaccgtggtcaataaccagatggcaaaagctggtgcgccgttcaacggtattgtgcaggttacgaaagacccaggcggtggcgctgagacaactatcgacgcagcagcaggtgcctaccccgtgggtgtcatggtatcaggcaccgcatctggctcaaccggcacgtacacgttctcataccacaaaggcgggatccctaatgtcaagttgttgatgtacgctttgcctcatcacttcgagtcattcgacagtgctactaagaaagccgtcactacgatcaagttgcagactacgacgaaaggcatggcattggctgtggttgcggatgcctggacaatggtagagcccaagatgccgatatcaatgggctttgcgccttgggatcccgctagtggtcccaagaactctctcaaggattcggcgatcaagaccattagtcctacggctttgaaggaattgtcgcagaatattgaccagcaggcgaaccaggactcaatgtactttagtggaaaggcattggccaagttcgctggactttgtttcgttgccaatgatcttctcaagaatccgacattagcacaaagtggactgaaagggttgaaagcggcttttacacgcttctctagtaacaagcaggcgttcccgctttattacgagtcggcctggggcggcgtcgtttcttcggcgacatacaagacaggcaacagcggcgcagatttcggcaatacgtactacaacgatcatcactttcattatggatatttcgtatacgccgccgccgtgattgggtatcttgatccttcgtggctcacgaaggacaacgtcgattatatcaacacattagtccgggactatgcaaacccatcagctgctgataaatattttcctgtgtcgaggaatttcgattggtaccatgggcacagttgggctcatggtttgtatgagactcttgatggaaaggatcaggagtcaagctcagaagacgcgatgtccgcatatgctatcaagatgtggggacgaaccatcaaagacgccaatatggaagcacgaggcaacctcatgctatcgatcatcgctcgctccctaaaccagtactacctgtacacgtcgaaaaacaccgtccaaccgtcaaagttcatcggcaatcgagtagccggtatcctattcgagaataaatgcgatcacacgacgtacttcgggaccaacaccgagtacatccagggtatacacatgctaccccttttaccgagctcgcgttttacaaggccggcggaattcgtgaagcaagagtgggcgacgtactttgacaagggccgcgccgataagatagagggaggctggaagggcatcctctatggtaatctggcgactattgatccgaagactgcgtggagcttcttcacgaataaggcttttgatcctggatggcttgatggtggggttagtttgacttggtatttggcttttgctgctgctttcatgtaa

SEQ ID NO: 37537 - protein, 722 aa, Muscodor strobelii
  misc_feature: SGI Peptide ID NO. 573027
  misc_feature (26)..(717): Pfam Id: PF03639 Pfam Desc: Glycosyl hydrolase family 81
  misc_feature (2)..(721): NCBI GI: 171682176 Blast Desc: protein product [Podospora anserina] gi|170941047|emb|CAP66697.1| protein product [Podospora anserina]
  misc_feature (12)..(721): NCBI GI: 261356537 Blast Desc: endo-1,3(4)-beta-glucanase [Verticillium albo-atrum VaMs.102]
  misc_feature (11)..(721): NCBI GI: 256734028 Blast Desc: NECHADRAFT_99620 [Nectria haematococca mpVI 77-13-4]
  misc_feature (11)..(721): NCBI GI: 46128759 Blast Desc: FG08757.1 [Gibberella zeae PH-1]
  misc_feature (20)..(719): NCBI GI: 145228869 Blast Desc: An01g03090 [Aspergillus niger] gi|134054835|emb|CAK43675.1| protein product [Aspergillus niger]
  misc_feature (3)..(721): NCBI GI: 261199236 Blast Desc: glycosyl hydrolase [Ajellomyces dermatitidis SLH14081] gi|239594227|gb|EEQ76808.1| glycosyl hydrolase [Ajellomyces dermatitidis SLH14081]
  misc_feature (12)..(721): NCBI GI: 240111062 Blast Desc: Glycosyl hydrolase family 81 protein [Coccidioides posadasii C735 delta SOWgp]
  misc_feature (12)..(721): NCBI GI: 111606537 Blast Desc: endo-1,3-beta-glucanase [Coccidioides posadasii]
  misc_feature (3)..(721): NCBI GI: 121702917 Blast Desc: endo-1,3-beta-glucanase Engl1 [Aspergillus clavatus NRRL 1] gi|119397866|gb|EAW08297.1| endo-1,3-beta-glucanase Engl1 [Aspergillus clavatus NRRL 1]
  misc_feature (12)..(721): NCBI GI: 119189881 Blast Desc: CIMG_04988 [Coccidioides immitis RS]
  misc_feature (19)..(719): SWISSPROT Homolog: EC 3.2.1.6 Endo-1,3(4)-beta-glucanase
MTTEPTKPNNAASSNIFGAPIATGKPPAVFEVHTDHPVPRLGISSPGPYGTNKFYANFFLGSQTSPAYVHPYSLTWAKGQGATHSWGIAVSHVEADQRVYGQTQADTGAAQYFINPIGIQSLCLSALELGSQTVLTTDTLNAHSVNVNLAVDQKSKPIIVFPMVQGMGFVTAVYKGGTPVIKTGVLFKTVTRSTVGPKPGVTKYTIYLEDGKVWHVYGYSAKGDPFDLTVVNNQMAKAGAPFNGIVQVTKDPGGGAETTIDAAAGAYPVGVMVSGTASGSTGTYTFSYHKGGIPNVKLLMYALPHHFESFDSATKKAVTTIKLQTTTKGMALAVVADAWTMVEPKMPISMGFAPWDPASGPKNSLKDSAIKTISPTALKELSQNIDQQANQDSMYFSGKALAKFAGLCFVANDLLKNPTLAQSGLKGLKAAFTRFSSNKQAFPLYYESAWGGVVSSATYKTGNSGADFGNTYYNDHHFHYGYFVYAAAVIGYLDPSWLTKDNVDYINTLVRDYANPSAADKYFPVSRNFDWYHGHSWAHGLYETLDGKDQESSSEDAMSAYAIKMWGRTIKDANMEARGNLMLSIIARSLNQYYLYTSKNTVQPSKFIGNRVAGILFENKCDHTTYFGTNTEYIQGIHMLPLLPSSRFTRPAEFVKQEWATYFDKGRADKIEGGWKGILYGNLATIDPKTAWSFFTNKAFDPGWLDGGVSLTWYLAFAAAFM

SEQ ID NO: 37538 - DNA, 2091 bp, Muscodor strobelii
  misc_feature: SGI EST ID NO. CUFF.89795.0
  misc_feature: Variant of the nucleotide sequence at SEQ ID NO 37536
ccggcggaattcgtgaagcaagagtgggcgacgtactttgacaagggccgcgccgataagatagagggaggctggaagggcatcctctatggtaatctggcgactattgatccgaagactgcgtggagcttcttcacgaataaggcttttgatcctggatggcttgatggtggggttagtttgacttggtatttggcttttgctgctgctttcatgtaacgatttttcaacacgatgacttacgacaatgatgatttttctttcgggattagctatatgggatgcgacttacgacatgactcatgagcactagaatatgaaattaggaaattggttcggctacggagttgtaaatcgctggattctgaataattaaagagtattattgagatagcatcgttacgcattatgttcatacatccaatttctcaacctgttttaaaccttattgtcaagttcagtcgccagtgacctggtcttgccgtgatcagggtaggctctagagacttctgcccgagtattgatggtcgccactcgtgcaattcattttcggtcattcgctgacgggatacgagatataacgaatgaacgggtactctgtatgttttcccgacttggaggcctagcagaggatataggtcttggctgctattatgaacggtagaggagcctgtttattgacctaagactctccaaggtcggcttagctgtgttgatccttttactgagtgagatggtatattctcggcattttggcgatgagcttgggtagtacgtcgggagtataagagatagagcgttgaggcgatgaaaagtgccgtgtgaagttactgtactagattgcccactgctctcgggcgatgcaccaagcattggcgctgtggtcaggttttttgggatcgataccaggcgttggacgaaggggaagggattgagtagctatttgcttcgattgattttcaattgtactggtattgtgttatggtcatgatttgcgaaaaggggtttactactgctgtcttacatgtaggcgtgtggttcgtctgtaatctgtacatttgctatgaaatccttaaattgggttttcagttacggattgtattagcgcagccgcttcagtgaaataatttctgtcttgccatttagtgctttgcccctgtaccaagatgcaaagcccagggcaccgaggtagatccattgacttcagccaccatactctaattactcgtacctagcgctaatgattcttttacacgagctgtcaatagccatccgtgttctcaatagccatccgtgttctattcgttgaaccccgttgaaagttaccttgaggctggaaatggcgggccagtgaactgttcgaacagatgggaggcatatctttgtcggaagcttagggaattgttactagctgactacctatatgttgactcgtctcttcgcgcgtgtctgagttatatgtgtttctcggacgttgtaaagtagtctcgataggaaaattgattgaatgctgtggaggatattaatgtttcgtgttcgctactcagtaataatgtccatgccaattcatggatatccttcccctcatatcagcaattttcacgtagtatctgaaatttccaaagtcgatgtaatagcagattcttgcaaaactatgtcttttggacttgggactcgttttcttggcctttggccgctggctgagctgtcaaccgaacggctccatagctgaacctaatgggctatcgacacatattcatcgacattcatcgccatattcaataaaactgaggttgggcttgttcacctacataggtcgagaaaatattaatcatctctggataatctccctcgccataacgttaccttacgcgatttattcatctagggcagcgactttcgattatgttcacaaagttcaaatggtacggatctagtgctagtcgtcgatatcgagtcgatatatcacccaggccactgtcaaaataaatgagatatctacatgtatcagcatttaattataccaccaatatagcctcattgcagtatctatataagatcaaacctgtgaatatatgttgcagaacttct

SEQ ID NO: 37539 - DNA, 2238 bp, Muscodor strobelii
  misc_feature: SGI cDNA ID NO. 573028
  misc_feature: Encodes the peptide sequence at SEQ ID NO 37540
atgacgacagaaccaacaaagcctaacaatgcggcgtcatcgaatatcttcggtgcccccattgccactgggaagcctccggccgtcttcgaagtacacaccgatcatcctgtacctcgcctaggtatctctagtccaggtccctatggtaccaacaaattctacgccaatttcttcctgggcagtcagacatcacctgcatacgtgcatccatattccttgacttgggcgaagggtcagggagccacgcacagttggggaattgcggtgtcgcatgttgaggccgaccagagagtatatggtcaaacacaagctgacacgggagcggcgcaatacttcataaatcctattgggatacagtcgttgtgtctttctgcactggaactcggctctcaaaccgtgctgaccaccgatacactcaatgctcattcggtcaacgtgaatctggctgttgatcaaaagtcgaagccgatcatcgtctttcctatggtgcaaggcatggggtttgtgacggccgtgtacaagggtggtacacctgtcatcaagacgggcgtgcttttcaagaccgtcactcgatcgacagttggacccaaacctggtgtcaccaagtacactatatatctcgaggatggcaaagtctggcatgtttacggttattctgcgaagggtgatcccttcgacttgaccgtggtcaataaccagatggcaaaagctggtgcgccgttcaacggtattgtgcaggttacgaaagacccaggcggtggcgctgagacaactatcgacgcagcagcaggtgcctaccccgtgggtgtcatggtatcaggcaccgcatctggctcaaccggcacgtacacgttctcataccacaaaggcgggatccctaatgtcaagttgttgatgtacgctttgcctcatcacttcgagtcattcgacagtgctactaagaaagccgtcactacgatcaagttgcagactacgacgaaaggcatggcattggctgtggttgcggatgcctggacaatggtagagcccaagatgccgatatcaatgggctttgcgccttgggatcccgctagtggtcccaagaactctctcaaggattcggcgatcaagaccattagtcctacggctttgaaggaattgtcgcagaatattgaccagcaggcgaaccaggactcaatgtactttagtggaaaggcattggccaagttcgctggactttgtttcgttgccaatgatcttctcaagaatccgacattagcacaaagtggactgaaagggttgaaagcggcttttacacgcttctctagtaacaagcaggcgttcccgctttattacgagtcggcctggggcggcgtcgtttcttcggcgacatacaagacaggcaacagcggcgcagatttcggcaatacgtactacaacgatcatcactttcattatggatatttcgtatacgccgccgccgtgattgggtatcttgatccttcgtggctcacgaaggacaacgtcgattatatcaacacattagtccgggactatgcaaacccatcagctgctgataaatattttcctgtgtcgaggaatttcgattggtaccatgggcacagttgggctcatggtttgtatgagactcttgatggaaaggatcaggagtcaagctcagaagacgcgatgtccgcatatgctatcaagatgtggggacgaaccatcaaagacgccaatatggaagcacgaggcaacctcatgctatcgatcatcgctcgctccctaaaccagtactacctgtacacgtcgaaaaacaccgtccaaccgtcaaagttcatcggcaatcgagtagccggtatcctattcgagaataaatgcgatcacacgacgtacttcgggaccaacaccgagtacatccagggtatacacatgctaccccttttaccgagctcgcgttttacaaggccggcggaattcgtgaagcaagagtgggcgacgtactttgacaagggccgcgccgataagatagagggaggctggaagggcatcctctatggtaatctggcgactattgatccgaagactgcgtggagcttcttcacgaataaggcttttgatcctggatggcttgatggtggggttagtttgacttggtatttggcttttgctgctggtgagtttcttcgcgctcctttgtcgtgttcttacatgagtttggcattagataattgcgttgtgtgtgctgattggtga

SEQ ID NO: 37540 - protein, 745 aa, Muscodor strobelii
  misc_feature: SGI Peptide ID NO. 573028
  misc_feature (26)..(717): Pfam Id: PF03639 Pfam Desc: Glycosyl hydrolase family 81
  misc_feature (2)..(719): NCBI GI: 171682176 Blast Desc: protein product [Podospora anserina] gi|170941047|emb|CAP66697.1| protein product [Podospora anserina]
  misc_feature (12)..(720): NCBI GI: 261356537 Blast Desc: endo-1,3(4)-beta-glucanase [Verticillium albo-atrum VaMs.102]
  misc_feature (11)..(720): NCBI GI: 256734028 Blast Desc: NECHADRAFT_99620 [Nectria haematococca mpVI 77-13-4]
  misc_feature (11)..(720): NCBI GI: 46128759 Blast Desc: FG08757.1 [Gibberella zeae PH-1]
  misc_feature (20)..(734): NCBI GI: 145228869 Blast Desc: An01g03090 [Aspergillus niger] gi|134054835|emb|CAK43675.1| protein product [Aspergillus niger]
  misc_feature (3)..(720): NCBI GI: 261199236 Blast Desc: glycosyl hydrolase [Ajellomyces dermatitidis SLH14081] gi|239594227|gb|EEQ76808.1| glycosyl hydrolase [Ajellomyces dermatitidis SLH14081]
  misc_feature (1)..(722): NCBI GI: 261359500 Blast Desc: endo-1,3(4)-beta-glucanase [Verticillium albo-atrum VaMs.102]
  misc_feature (3)..(720): NCBI GI: 121702917 Blast Desc: endo-1,3-beta-glucanase Engl1 [Aspergillus clavatus NRRL 1] gi|119397866|gb|EAW08297.1| endo-1,3-beta-glucanase Engl1 [Aspergillus clavatus NRRL 1]
  misc_feature (12)..(719): NCBI GI: 240111062 Blast Desc: Glycosyl hydrolase family 81 protein [Coccidioides posadasii C735 delta SOWgp]
  misc_feature (12)..(719): NCBI GI: 111606537 Blast Desc: endo-1,3-beta-glucanase [Coccidioides posadasii]
  misc_feature (19)..(720): SWISSPROT Homolog: EC 3.2.1.6 Endo-1,3(4)-beta-glucanase
MTTEPTKPNNAASSNIFGAPIATGKPPAVFEVHTDHPVPRLGISSPGPYGTNKFYANFFLGSQTSPAYVHPYSLTWAKGQGATHSWGIAVSHVEADQRVYGQTQADTGAAQYFINPIGIQSLCLSALELGSQTVLTTDTLNAHSVNVNLAVDQKSKPIIVFPMVQGMGFVTAVYKGGTPVIKTGVLFKTVTRSTVGPKPGVTKYTIYLEDGKVWHVYGYSAKGDPFDLTVVNNQMAKAGAPFNGIVQVTKDPGGGAETTIDAAAGAYPVGVMVSGTASGSTGTYTFSYHKGGIPNVKLLMYALPHHFESFDSATKKAVTTIKLQTTTKGMALAVVADAWTMVEPKMPISMGFAPWDPASGPKNSLKDSAIKTISPTALKELSQNIDQQANQDSMYFSGKALAKFAGLCFVANDLLKNPTLAQSGLKGLKAAFTRFSSNKQAFPLYYESAWGGVVSSATYKTGNSGADFGNTYYNDHHFHYGYFVYAAAVIGYLDPSWLTKDNVDYINTLVRDYANPSAADKYFPVSRNFDWYHGHSWAHGLYETLDGKDQESSSEDAMSAYAIKMWGRTIKDANMEARGNLMLSIIARSLNQYYLYTSKNTVQPSKFIGNRVAGILFENKCDHTTYFGTNTEYIQGIHMLPLLPSSRFTRPAEFVKQEWATYFDKGRADKIEGGWKGILYGNLATIDPKTAWSFFTNKAFDPGWLDGGVSLTWYLAFAAGEFLRAPLSCSYMSLALDNCVVCADW

SEQ ID NO: 37541 - DNA, 1491 bp, Muscodor strobelii
  misc_feature: SGI cDNA ID NO. 573029
  misc_feature: Encodes the peptide sequence at SEQ ID NO 37542
atggaacccacagctttaccaaaagttagacaagccctgcgcgcggcagtaggatatgaccgttctgaaaatggtgcgccaaatgagcacacctctctgttaggcggcaccaacggatccagcggaagcaatcaccacagccagacctacgagttcttcttcaattccaagcacacaccgggcactgatagccccaagccatgggtcaaataccccgcgcatgtgtggcatataacgaaggcgacgctattgagcagtccgctcaatattttgctcattgctgttccaattggaatcgttgctggagaagcacattgggatcccgttgccgtttttaccattaatttctttgcaatcgtaccattggccgctgtgctgtctttcgcgacagaggagatttctgccaacctaggagaggccttgggtggcttgctgaatgcaacatttggaaatgcagtcgaactcattgtcagcataattgctctgcgagaccaccagatcgaggtggtgaaatcgtctatgattgggtccattctttcgaatctgctgctggtcatgggtatgtgcttcttctttggaaacatttccaatatgagggatgcgaacggaatgggcagggagcagtccttcgcttctatcactgcgcagaccacagcttccctgatgacattgtctgccgcctccatgattcttcctggagctctatttatgatcgtcaatagagggcacaacgacgaagaccgtcgaagtatcaccttgtcactctcacgaggcactgctattatcctccttgtaatatatgttctctatctatggttccagctacgaactcatcacaatctgtttaactctacgcctaataatacgacttcctcgcctgcgcaagaagaagatggggctggagaagcaggacaacccgaatcacatgtggatgcagatggcgataataaggaagaatctgaaggggccatgagtccttggtctgctgccggtgtcctgatcgttactaccatattggtttccatctgtgccgactacctggtcgagagcatcgactcgctggttgatcgcgctggtatcagtcgtagcttcatcggtctcattctcattccgatcgttggtaacgcggcagaacacgtcacagctgtcatggtggccgtcaaggacaagatggatcttgccatgggcgttgctatcggttcgagcatccaaattgccatatttgtgacaccgtttttagtggtactcggctggatcatggatcgtgacatggacttacatttcgagacattcgagacagtggctttcgggatgtctgtcctggtcgtcatctacactgttcaagatggaaattcaaactacctcgaaggcgctatgttaatgagtctttaccttatgattgcgatcgcattcttcgtaacgccaagccagtatttcgacggagacacaaatatcggcggaagtatcgtccatgctcttggtttttcatga

SEQ ID NO: 37542 - protein, 496 aa, Muscodor strobelii
  misc_feature: SGI Peptide ID NO. 573029
  misc_feature (338)..(471): Pfam Id: PF01699 Pfam Desc: Sodium/calcium exchanger protein
  misc_feature (117)..(274): Pfam Id: PF01699 Pfam Desc: Sodium/calcium exchanger protein
  misc_feature (28)..(477): NCBI GI: 164424527 Blast Desc: NCU07075 [Neurospora crassa OR74A] gi|157070552|gb|EAA31104.2| NCU07075 [Neurospora crassa OR74A]
  misc_feature (22)..(485): NCBI GI: 256734027 Blast Desc: [Nectria haematococca mpVI 77-13-4]
  misc_feature (28)..(476): NCBI GI: 2995847 Blast Desc: calcium/proton exchanger [Neurospora crassa]
  misc_feature (28)..(493): NCBI GI: 154322921 Blast Desc: BC1G_00803 [Botryotinia fuckeliana B05.10] gi|150848137|gb|EDN23330.1| BC1G_00803 [Botryotinia fuckeliana B05.10]
  misc_feature (10)..(493): NCBI GI: 156064641 Blast Desc: SS1G_00328 [Sclerotinia sclerotiorum 1980] gi|154691190|gb|EDN90928.1| SS1G_00328 [Sclerotinia sclerotiorum 1980]
  misc_feature (8)..(474): NCBI GI: 171681984 Blast Desc: protein product [Podospora anserina] gi|170940951|emb|CAP66601.1| protein product [Podospora anserina]
  misc_feature (35)..(480): NCBI GI: 46128761 Blast Desc: FG08758.1 [Gibberella zeae PH-1]
  misc_feature (35)..(482): NCBI GI: 256725205 Blast Desc: NECHADRAFT_55186 [Nectria haematococca mpVI 77-13-4]
  misc_feature (20)..(493): NCBI GI: 225678051 Blast Desc: vacuolar calcium ion transporter [Paracoccidioides brasiliensis Pb03] gi|226287538|gb|EEH43051.1| vacuolar calcium ion transporter [Paracoccidioides brasiliensis Pb18]
  misc_feature (22)..(475): NCBI GI: 145228871 Blast Desc: An01g03100 [Aspergillus niger] gi|134054836|emb|CAK43676.1| protein product [Aspergillus niger]
MEPTALPKVRQALRAAVGYDRSENGAPNEHTSLLGGTNGSSGSNHHSQTYEFFFNSKHTPGTDSPKPWVKYPAHVWHITKATLLSSPLNILLIAVPIGIVAGEAHWDPVAVFTINFFAIVPLAAVLSFATEEISANLGEALGGLLNATFGNAVELIVSIIALRDHQIEVVKSSMIGSILSNLLLVMGMCFFFGNISNMRDANGMGREQSFASITAQTTASLMTLSAASMILPGALFMIVNRGHNDEDRRSITLSLSRGTAIILLVIYVLYLWFQLRTHHNLFNSTPNNTTSSPAQEEDGAGEAGQPESHVDADGDNKEESEGAMSPWSAAGVLIVTTILVSICADYLVESIDSLVDRAGISRSFIGLILIPIVGNAAEHVTAVMVAVKDKMDLAMGVAIGSSIQIAIFVTPFLVVLGWIMDRDMDLHFETFETVAFGMSVLVVIYTVQDGNSNYLEGAMLMSLYLMIAIAFFVTPSQYFDGDTNIGGSIVHALGFS

SEQ ID NO: 37543 - DNA, 3255 bp, Muscodor strobelii
  misc_feature: SGI EST ID NO. CUFF.89830.0
  misc_feature: Variant of the nucleotide sequence at SEQ ID NO 37541
cggaattatacacatcgtgatattcgagggtgccatttattctaactcgtaccttatcaccatcgtcgatatgcaacaaattactagtagtccgctgccaagaccaatagaggaggaggcctccgtgtgcattgcacagccactcttggcaaaacttgttttctggacccctctggaagcaccaatgagttgctgcaatgtaaatgcatgtgccaagaggagttacggctcctatgaaatgtgctgatgtgtgaacacatcctccgtgactgttgttactgtgatgtgctctggcatggacagaaggccagctccgcgacgtaacagtcactgattctgcgacacctttataagatgctactggctgctaataggacttgattcactgactcgatagtcgcgctgtgacgtactgtattggagaagctggggtcaaagctcaagctacccctgcagagaaagaatggaagctgccgctaactgacggggaggtacacacgtctttctcattctatcagcagccgcgagggctcgaggtactaaatacccagaggtcgtaccatatcaacgggaacgtgttctcagcggagagagcttcaagttggagcttcaacatcccagcatgcccagacgaatgcacagctccgtcattgacagtcgtggcgctctgtttcaggtcttcatttcgttcctccctgcttgtctgcacgagttctgcaaatatagtcgtgcgccgtggtgctgggattagaaaagccccagccaagcatcgtcatccaaatcgaatgactcgtcttttgctgcgtcagtgctactgtatgttccttcgcctgccaacgctcgccaagcctccttcttcctctcaactcataaactgagttcagatttgaagattactcgggtcttggccaatttgcatagccaataccaagaatcgtaacctccatgatctctggccgacggcgaaatcgctcagtccaattgtccaatcacacaaaggtcagttgatcaacagcactgcaaatgctagctccccaagcttgatcccagccgtaaggttggtgtcgcacgactcagcgtctaccctacgggccctatcgatctgctcgtctgctaaactcacacaaacctttctcttcatcgtttcggcttacagtaccttttgcatccgctatctcagccactgatcgcaataccgtcttaataaaactccgaaacggccgatagccaagacttctaacatttgtgtaatagacgactactgcggcgagcacccttctagactcctttggcaggttctttctacttagtaaacacgcgggtatcgatcacgagcgctacatattgtgctcagggttcgcaccgtcgggtatcaaagatgagcactttaccaaaagttagacaagccctgcgcgcggcagtaggatatgaccgttctgaaaatggtgcgccaaatgagcacacctctctgttaggcggcaccaacggatccagcggaagcaatcaccacagccagacctacgagttcttcttcaattccaagcacacaccgggcactgatagccccaagccatgggtcaaataccccgcgcatgtgtggcatataacgaaggcgacgctattgagcagtccgctcaatattttgctcattgctgttccaattggaatcgttgctggagaagcacattgggatcccgttgccgtttttaccattaatttctttgcaatcgtaccattggccgctgtgctgtctttcgcgacagaggagatttctgccaacctaggagaggccttgggtggcttgctgaatgcaacatttggaaatgcagtcgaactcattgtcagcataattgctctgcgagaccaccagatcgaggtggtgaaatcgtctatgattgggtccattctttcgaatctgctgctggtcatgggtatgtgcttcttctttggaaacatttccaatatgagggatgcgaacggaatgggcagggagcagtccttcgcttctatcactgcgcagaccacagcttccctgatgacattgtctgccgcctccatgattcttcctggagctctatttatgatcgtcaatagagggcacaacgacgaagaccgtcgaagtatcaccttgtcactctcacgaggcactgctattatcctccttgtaatatatgttctctatctatggttccagctacgaactcatcacaatctgtttaactctacgcctaataatacgacttcctcgcctgcgcaagaagaagatggggctggagaagcaggacaacccgaatcacatgtggatgcagatggcgataataaggaagaatctgaaggggccatgagtccttggtctgctgccggtgtcctgatcgttactaccatattggtttccatctgtgccgactacctggtcgagagcatcgactcgctggttgatcgcgctggtatcagtcgtagcttcatcggtctcattctcattccgatcgttggtaacgcggcagaacacgtcacagctgtcatggtggccgtcaaggacaagatggatcttgccatgggcgttgctatcggttcgagcatccaaattgccatatttgtgacaccgtttttagtggtactcggctggatcatggatcgtgacatggacttacatttcgagacattcgagacagtggctttcgggatgtctgtcctggtcgtcatctacactgttcaagatggaaattcaaactacctcgaaggcgctatgttaatgagtctttaccttatgattgcgatcgcattcttcgtaacgccaagccagtatttcgacggagacacaaatatcggcggaagtatcgtccatgctcttggtttttcatgatgcaattcattgcgcaagccattcaagcaacactattgcgccgccatagtagcgcgcaatttccaagctatcggtctacagagatacgattcatcttcacaatggcgaagtgataaccgccaattttcttgatcggtctgtagactggtctcgtatgtgtactagtagctgttataaagcggtccatcccagcgagtgcaaagactgacgtctcgtcgtacgatgaaggaagatcactgatcgcgcattgcgcttttttatgttattggtataggtagggtccggaatcataggatttaggagtaggaaaacaagcattgaaattttagtttgtatatcaagatccaaattctgcagtcgcagagacggaagatttttcggatcgttccgat

SEQ ID NO: 37544 - DNA, 1083 bp, Muscodor strobelii
  misc_feature: SGI cDNA ID NO. 573030
  misc_feature: Encodes the peptide sequence at SEQ ID NO 37545
atggcgactacgacagatactaagaactataagttcaatcattccatgcttcgggtgaaggaccctaaagagtccgttaagttctacgagttcctaggcatgagcctgatcaagaaactcgaattcccggaagcaaaattcgacctatacttcctagcatacgacggagccaaagctacctcccagggcaacagcacgttcgaccgtgaaggcgtggtcgagctgacgcacaactacggcaccgaggatgaccctaattacactgtcaacaatggcaacaaggagccgaaccgcgggtttggtcatatctgcatctcagtcgattatatcaaggctgcatgccagcgcattgaggacgcggggtacaagttccagaagaaacttaccgatggcagaatgaagcatattgccttcgctctggatccggatgggtgtgatctgaactatcagatatcagaaaatggtcctttgtctgaacacccgcggccccgcgagaagtcgtacaaaataactaacccgaaacctttctggctaccagattgggtcgagattatctcgaagaggattggaaccaagggcgcggatgatcctgaggagcaggatgctatcactgatcctggtacttatcgcatgaatcacaccatgatccgcgtcaaagacgcagagaagtcccttaagttctaccaggaagttctcggcatgacgctcttccgcaccagcgaacagtccgccgcaggtttcaacttgtatttccttggatatcccggcaacgagggcgtccccgagaatggatttacggccgagaaggagggtctgcttgagctcacgtggaactacggcaccgagaaggacgagaacttcaagtatcatgacggtaattctgagccgcagggcttcggacacatctgtgtttcggttgataatctggatgcggcgtgctcgagattcgaaggcatgaatacgaattggaagaagaggcttactgatggtcgcatgaagaacgttgcctttttgctcgacccggatagctactgggtcgagattgtgcagaatgagcgatttgctggcaaggagaatttttag

SEQ ID NO: 37545 - protein, 360 aa, Muscodor strobelii
  misc_feature: SGI Peptide ID NO. 573030
  misc_feature (210)..(348): Pfam Id: PF00903 Pfam Desc: Glyoxalase/Bleomycin resistance protein/Dioxygenase superfamily
  misc_feature (11)..(149): Pfam Id: PF00903 Pfam Desc: Glyoxalase/Bleomycin resistance protein/Dioxygenase superfamily
  misc_feature (1)..(360): NCBI GI: 116202059 Blast Desc: CHGG_08914 [Chaetomium globosum CBS 148.51] gi|88177432|gb|EAQ84900.1| CHGG_08914 [Chaetomium globosum CBS 148.51]
  misc_feature (1)..(360): NCBI GI: 256727104 Blast Desc: [Nectria haematococca mpVI 77-13-4]
  misc_feature (1)..(360): NCBI GI: 46135933 Blast Desc: FG09482.1 [Gibberella zeae PH-1]
  misc_feature (1)..(360): NCBI GI: 85097393 Blast Desc: lactoylglutathione lyase [Neurospora crassa OR74A] gi|28921932|gb|EAA31205.1| lactoylglutathione lyase [Neurospora crassa OR74A]
  misc_feature (1)..(360): NCBI GI: 145611166 Blast Desc: MGG_11543 [Magnaporthe grisea 70-15] gi|145018481|gb|EDK02760.1| MGG_11543 [Magnaporthe grisea 70-15]
  misc_feature (4)..(360): NCBI GI: 189201405 Blast Desc: lactoylglutathione lyase [Pyrenophora tritici-repentis Pt-1C-BFP] gi|187984138|gb|EDU49626.1| lactoylglutathione lyase [Pyrenophora tritici-repentis Pt-1C-BFP]
  misc_feature (4)..(359): NCBI GI: 169619922 Blast Desc: glyoxylase I [Phaeosphaeria nodorum SN15] gi|50295647|gb|AAT73077.1| glyoxylase I [Phaeosphaeria nodorum] gi|160703925|gb|EAT79488.2| glyoxylase I [Phaeosphaeria nodorum
  misc_feature (1)..(360): NCBI GI: 83267732 Blast Desc: glyoxalase I [Verticillium dahliae]
  misc_feature (4)..(360): NCBI GI: 119469226 Blast Desc: lactoylglutathione lyase [Neosartorya fischeri NRRL 181] gi|119406067|gb|EAW16018.1| lactoylglutathione lyase [Neosartorya fischeri NRRL 181]
  misc_feature (4)..(360): NCBI GI: 70991673 Blast Desc: lactoylglutathione lyase [Aspergillus fumigatus Af293] gi|66848318|gb|EAL88647.1| lactoylglutathione lyase [Aspergillus fumigatus Af293] gi|159124248|gb|EDP49366.1| lactoylglutathione
  misc_feature (1)..(352): SWISSPROT Homolog: EC 4.4.1.5 Lactoylglutathione lyase
MATTTDTKNYKFNHSMLRVKDPKESVKFYEFLGMSLIKKLEFPEAKFDLYFLAYDGAKATSQGNSTFDREGVVELTHNYGTEDDPNYTVNNGNKEPNRGFGHICISVDYIKAACQRIEDAGYKFQKKLTDGRMKHIAFALDPDGCDLNYQISENGPLSEHPRPREKSYKITNPKPFWLPDWVEIISKRIGTKGADDPEEQDAITDPGTYRMNHTMIRVKDAEKSLKFYQEVLGMTLFRTSEQSAAGFNLYFLGYPGNEGVPENGFTAEKEGLLELTWNYGTEKDENFKYHDGNSEPQGFGHICVSVDNLDAACSRFEGMNTNWKKRLTDGRMKNVAFLLDPDSYWVEIVQNERFAGKENF

SEQ ID NO: 37546 - DNA, 1603 bp, Muscodor strobelii
  misc_feature: SGI EST ID NO. CUFF.89799.0
  misc_feature: Variant of the nucleotide sequence at SEQ ID NO 37544
cgcggggtcttcgtcattttgtgctgaatcatcttcatgctgcagtatctcggcattttattcccagatgccgatcctgtttcctcacctctccgcattaacacgtcctatgcattcaatgcgcgcattgcaaagaattcaattacagcttactaccctacgacctgctgcactgatatcatctgggcgacgaacgtttgcaaatatggcgactacgacagatactaagaactataagttcaatcattccatgcttcgggtgaaggaccctaaagagtccgttaagttctacgagttcctaggcatgagcctgatcaagaaactcgaattcccggaagcaaaattcgacctatacttcctagcatacgacggagccaaagctacctcccagggcaacagcacgttcgaccgtgaaggcgtggtcgagctgacgcacaactacggcaccgaggatgaccctaattacactgtcaacaatggcaacaaggagccgaaccgcgggtttggtcatatctgcatctcagtcgattatatcaaggctgcatgccagcgcattgaggacgcggggtacaagttccagaagaaacttaccgatggcagaatgaagcatattgccttcgctctggatccggatgggtggtacgttattttttgacctcatttccaagccatcgtgctaacctttttgtagtaagtgatctgaactatcagatatcagaaaatggtcctttgtctgaacacccgcggccccgcgagaagtcgtacaaaataactaacccgaaacctttctggctaccagattgggtcgagattatctcgaagaggattggaaccaagggcgcggatgatcctgaggagcaggatgctatcactgatcctggtacttatcgcatgaatcacaccatgatccgcgtcaaagacgcagagaagtcccttaagttctaccaggaagttctcggcatgacgctcttccgcaccagcgaacagtccgccgcaggtttcaacttgtatttccttggatatcccggcaacgagggcgtccccgagaatggatttacggccgagaaggagggtctgcttgagctcacgtggaactacggcaccgagaaggacgagaacttcaagtatcatgacggtaattctgagccgcagggcttcggacacatctgtgtttcggttgataatctggatgcggcgtgctcgagattcgaaggcatgaatacgaattggaagaagaggcttactgatggtcgcatgaagaacgttgcctttttgctcgacccggatagctactgggtcgagattgtgcagaatgagcgatttgctggcaaggagaatttttaggccgggcgaggttgtggtgtgcgtcttgaggtcgtcgcttggtcaggttgtacgccatcggaagttgagacgattagcatgaatagacctactaatcttggtgtcgtgtaaagtgccgtgagcggccgatactcggcgaattgagtatggtttgtataatccgtacattatgtatcattgccccgtgctatgatgtgccttggaacatttagctatgacgaacacgtaaatgtattgatccatacccgttatatacatg

SEQ ID NO: 37547 - DNA, 1122 bp, Muscodor strobelii
  misc_feature: SGI cDNA ID NO. 573031
  misc_feature: Reduced expression when VOC is produced
  misc_feature: Encodes the peptide sequence at SEQ ID NO 37548
atggaaagcggcataccgacgccacccatagaagacacgatgaaggtatcgacaacacaagctccttcgcgtagaagcacaggatcgattgcgaagtctgtgaaaccgatacatcgtggaacgaaacgatcagctacatcacatcatgctcactctccagtacatgatcactcgcccacgtctccacatgctggaatagacagcaggcataagagggtatggaaagcttgtgagcgatgtaggatgaagaagaccaagtgtgacggagagtttccgtgcaagagatgtaaggacgatggcctcgtgtgtacagccgggactaggaagaagacagaatataaacaactaccgagaggctacgccgaagtgcttgaaaacacgcaatttgcattgatagctactgtgcacaagctctacgccatggtcagaagtggacaatcgtgggacttaggcgagcctgaattaaatgacagaggtcaaccggtcatacataatatcgcaaccaagcttggatgcattcgacccaacgcagacgccgacttgccaccgcatacagtattccccgaagatgaagctggtctagcaaagctagcagcagaattagaagttcaacagaaggatatcaaaagcgagacgccgatgatggagacgatcaattgcgacgccgaaacgagttgcacacgtacggaacgagcgagttcgtcggagttggaccattcagacttcgaacaggactacaggaaggctctcgtgagtgggcagcagaatctacagacattatcgccgcagagctttacgtcctcatatcacgaattcgagccgagctcggtaccaagcgatgtcgacccctcagcaagtctattcgccgtgcagtcgcccgctatacctacgtcctatcccacgtggcagatgagcagaccggcgccagtacaggtgcagcctcaatacatgtcgcagatggatatgaatatggcggaaatgatgctcagtcaaggtattgtggagtctgagttcggcacgattaagccacatatgataaatgtccccaatcctgaagttatgctgggcgttggcgaccccatgatatactctggtttcggaaatatggactccctgaggtga

SEQ ID NO: 37548 - protein, 373 aa, Muscodor strobelii
  misc_feature: SGI Peptide ID NO. 573031
  misc_feature (75)..(113): Pfam Id: PF00172 Pfam Desc: Fungal Zn(2)-Cys(6) binuclear cluster domain
  misc_feature (4)..(366): NCBI GI: 85112195 Blast Desc: NCU02142 [Neurospora crassa OR74A] gi|28926076|gb|EAA35064.1| conserved [Neurospora crassa OR74A]
  misc_feature (3)..(366): NCBI GI: 256733983 Blast Desc: NECHADRAFT_36008 [Nectria haematococca mpVI 77-13-4]
  misc_feature (1)..(366): NCBI GI: 46128249 Blast Desc: FG08502.1 [Gibberella zeae PH-1]
  misc_feature (4)..(365): NCBI GI: 171684525 Blast Desc: protein product [Podospora anserina] gi|170942223|emb|CAP67875.1| protein product [Podospora anserina]
  misc_feature (5)..(372): NCBI GI: 116193355 Blast Desc: CHGG_06395 [Chaetomium globosum CBS 148.51] gi|88182308|gb|EAQ89776.1| CHGG_06395 [Chaetomium globosum CBS 148.51]
  misc_feature (1)..(367): NCBI GI: 39943262 Blast Desc: MGG_03711 [Magnaporthe grisea 70-15] gi|145009692|gb|EDJ94348.1| MGG_03711 [Magnaporthe grisea 70-15]
  misc_feature (141)..(373): NCBI GI: 261352177 Blast Desc: conserved [Verticillium albo-atrum VaMs.102]
  misc_feature (29)..(211): NCBI GI: 156061301 Blast Desc: SS1G_02793 [Sclerotinia sclerotiorum 1980] gi|154700197|gb|EDN99935.1| SS1G_02793 [Sclerotinia sclerotiorum 1980]
  misc_feature (57)..(180): NCBI GI: 119195373 Blast Desc: CIMG_02061 [Coccidioides immitis RS]
  misc_feature (57)..(174): NCBI GI: 240104951 Blast Desc: Fungal Zn binuclear cluster domain containing protein [Coccidioides posadasii C735 delta SOWgp]
  misc_feature: Useful for introducing or modulating the production of volatile compounds
MESGIPTPPIEDTMKVSTTQAPSRRSTGSIAKSVKPIHRGTKRSATSHHAHSPVHDHSPTSPHAGIDSRHKRVWKACERCRMKKTKCDGEFPCKRCKDDGLVCTAGTRKKTEYKQLPRGYAEVLENTQFALIATVHKLYAMVRSGQSWDLGEPELNDRGQPVIHNIATKLGCIRPNADADLPPHTVFPEDEAGLAKLAAELEVQQKDIKSETPMMETINCDAETSCTRTERASSSELDHSDFEQDYRKALVSGQQNLQTLSPQSFTSSYHEFEPSSVPSDVDPSASLFAVQSPAIPTSYPTWQMSRPAPVQVQPQYMSQMDMNMAEMMLSQGIVESEFGTIKPHMINVPNPEVMLGVGDPMIYSGFGNMDSLR

SEQ ID NO: 37549 - DNA, 6053 bp, Muscodor strobelii
  misc_feature: SGI EST ID NO. CUFF.89979.0
  misc_feature: Variant of the nucleotide sequence at SEQ ID NO 37547
ctggtggcttggcttaagaatttaccacctaggctgtgaaatatagacgactcgcaatttgtatatagaagaccgtgactttcttcgctaatcaagtaacaaagcacaagtgctgtctaggcggtgggcgtgtacggcttggcagcctcggcgcgtgtattgatcgtggtctcaagctaggtagcctactgattccctttgaacctattcgcaatagctaggcaagagtaatgtagacaatacttagaatgtaagcctggcgataccaaccgcattgcagttcgtgaacgtttgggtaataagtttttaagtagatctatttgagctccggataggtgcgtaatgttctaaatctcatgtgctttgtattacctcgactcgatcagtaggcaatagccatcaaaagcaagcaggtaggtagactcatctctcttacatgtgcaattgaaagagctaagtacaacgtggcgccaagcgaattcgtagggcatgttcctggcctcttcctaatttaatggtaatagggttggctctcgctttgttgcagaattccaagaatcacaggattattcgcaatctgccaatcccaataacaccaatctcaacagctcatagcactaaccctaatagcattcgtgcgccctgcccagtagcgagaacaatcaagcaggagattagttgcgacgcgcgctccacgggaagaaattccacggtgtgtaatgatgatagcctgcaacataagctccatgagtcacgaatcacgagtcagcacagcttttcgtctgacatcactcgtttagggaaaaagaaaacttcactgtagatgagctatgtatgattaacccgactccgatgctattcgggtcttagcgaatatgcttttcgctagtgcagaagaggatacttttcgcgcgcgcgggtaacatggttaactataactgccaaagttatgagtgtacgtacatatgtaagtatgttaataatgtacatatgcgtgtatagtcaactagagacgcagggccgaggttcatagccgctctgaaacggtggatgagcgaagctaagtaagagacactgctgttttgaatgaatcggacgaatcccgatacttgtctgtcaaggactgtcccgcattcaaaacgagatcccgcactgcggatggggatgcataccctgctcggattgccctcgtacccggtgatgccctttcctagtacgtgacggatagcctttgtgtactcggcaaagctttcctatcagacccgaagaggcgacgctgaaacagttattctagtgacctgccggcggtcgaaagctttcaacaatttcttattcatggcgcaaaaatcatgggtttcgggatgcgaaagtgatccgctgtccgctaaatctgatccttgtctaggtaccgaagcccgaatgattgggtcttcaagggaccttgatggactagacgcccttggcctgggtaatcatgacatcttcaattctgggtgcctggtacgaaattgcccagctttctaggacaaccgaatggctacacagaaagggagacagacttgtatgtaatttgcgaatcgccagtctttacttggttcacagccacgttgcgatacgtgtcgtgggacttgaaatgtgtttccctttcggatgcgacaccattttcggggccgatacgcatatcttctgacataatgcgaagtccagcattattgagctgcctggcagatccataaatggcaagatttttgctcgtccgtcattattggccacggatacggaatattgcttgcgcaaagcttctaggagaacgtcctaaaaaaaaagtcatagaatagtaattgtcgctctattcgaattcgcaattggagtcgcaatcaaaagtgcatggagatttcccgagtagcgatgaggaaaatccaatatgaatgcttttcctcgcattatcttgtcttcctaccattgcttcttgattccacggcttctagcttgattgatgtcatgatgacagactgaccaatacttatcggttttaaggtcgacccattagcataggttcgactcactctactgtccacagcttctgttaatagttcgatagctctgtataaaatggtgtcttgcatccatttattcggccgacttttggcttcggggatcaatgtgggctgaaacgggtaaaaatcggaccaacaaggaaacggtgcttattaactgattggagtttcaagcgaataggagatggatgggttctgtgcagcgggttttccgcaaggagcaaacggtctattattcgtacaaatggggtccttgaccttatgctctcaatgcagagatctaggatgttggagagcagtgggaatagctctgatagttggagaatagaagcatcctttttcgactctagtgcttaatggtcaattaagaccctggatagcgctgagcaagttacaggagtcacaccgtcgcagtcgcattcgctcgcaggccgaggcgcatgttcggtccttcacagaacaccggccgcgtttcgctcacggcgcgcacccaacaaaacctgccggctattgttcactccatgaggccccccttgaggtatcaccgtacgatcttgagtaatggcatcttccagtgatggggcaactgatcgaaggtgatgctttgtttcccacgtccgcattagccatgggtttctcgcgcattcgataatgacttgtcggtccagtgttcgcagtcgtagcgatggctaaccattgcgaccttcataggtagcataatgctagaaaaggtgggcgggctaatgtacttctttattcctgtgtgacagattcgagcataactcgatgtgcaaatcggtgccgcattgctaatgcaatccgtaaactccgcatcattcatctgacagaaccgcacccgcgccggcttactgcgacccagcagccagaggatgggtgcccattgacactgagtgaagtatacgaatgtacttttcggtcactgcaagcccctagcttggcccttgatgaataattgggaatcctgttgattccatgaagcaacgtatgtacagcctgaatcgaagacgtgcaaaactgatagatgcgatattgcgccttgctggttcgctgggtggtcctagtaattcaaatgccagctatgagagaaggctcggcgacaataaaacttgacctgtctaatataagatgaagctatcaagtctctctcctccacagttgccctgcttttatgatacctattctgtgaccgtcactgcaagctacaaccctgccaacataatagcggtatacttgctttcaaactcatgttctagggccgatttattacgcctatactcataggaatcaacatatctatgaaaccaacaccataccgcagatctggaccaacggccatcctcatctcatttgtgttggcggacgtaccatccaaagcacaccaacaagcagaaaatatcaaagtcaaagcatcaaagctcctcacaaggggcttactataatatagtaccctgctcgcactgatcttggaattgttgaaacctggaagctaccacaatcgaccttgtcagccaccacgagtctttggcccacacccctcggacataaagctacccaccgcccaagctgcagattcggactctatctttcgccctacccatgcttggagcgagcgaaaagttgccgggcctaaaataatagaggagcacatcacataatcgtcactgtatgatgcatggaatcattattaatcctttgagagtaccatcctatattcactatttttctcgacttgcctccgttttctcggccgagcaattgtaacttaacaatttgttggaagagaagaaagaaactccttttcaaagattgacggcagcttcaataatcactcggagactttcactactttcactgctatcctccccactacgttaacgtataagtcaattgcccaaaatggaaagcggcataccgacgccacccatagaagacacgatgaaggtatcgacaacacaagctccttcgcgtagaagcacaggatcgattgcgaagtctgtgaaaccgatacatcgtggaacgaaacgatcagctacatcacatcatgctcactctccagtacatgatcactcgcccacgtctccacatgctggaatagacagcaggcataagagggtatggaaagcttgtgagcgatgtaggatgaagaagaccaagtgtgacggagagtttccgtgcaagagatgtaaggacgatggcctcgtgtgtacagccgggactaggaagaagacagaatataaacaactaccgagaggctacgccgaagtgcttgaaaacacgcaatttgcattgatagctactgtgcacaagctctacgccatggtcagaagtggacaatcgtgggacttaggcgagcctgaattaaatgacagaggtcaaccggtcatacataatatcgcaaccaagcttggatgcattcgacccaacgcagacgccgacttgccaccgcatacagtattccccgaagatgaagctggtctagcaaagctagcagcagaattagaagttcaacagaaggatatcaaaagcgagacgccgatgatggagacgatcaattgcgacgccgaaacgagttgcacacgtacggaacgagcgagttcgtcggagttggaccattcagacttcgaacaggactacaggaaggctctcgtgagtgggcagcagaatctacagacattatcgccgcagagctttacgtcctcatatcacgaattcgagccgagctcggtaccaagcgatgtcgacccctcagcaagtctattcgccgtgcagtcgcccgctatacctacgtcctatcccacgtggcagatgagcagaccggcgccagtacaggtgcagcctcaatacatgtcgcagatggatatgaatatggcggaaatgatgctcagtcaaggtattgtggagtctgagttcggcacgattaagccacatatgataaatgtccccaatcctgaagttatgctgggcgttggcgaccccatgatatactctggtttcggaaatatggactccctgaggtgacgctcttaggtatgtttcttcatacgaaaatgggaaacatgtcgcgcagcgaataatattatcatcccttgtgtgcacaactgcagcacaaaccatcgtcacggtacttgaacatcatggcatatattatcagcttctttttacgaatgatgcacggcgtttggacagaatgggaccttggactatcatattttgggatagagaaaggtctacaagcctgggggctaaaagggtgcggcgtatcaacggagccattcgaaggaatgtgtcgttggcacatcatacattgtattgtatttctgggtcgctttttgacctccgctcacacttgatgcaaggagggagcgctgaacaagggcaatgcacattgcattggtcgagtaatgacatttaattactggccgcaagtaatacgctgcggccagcctacaaggaaaactgtctatgatttgatgcagtgtcttcactatctctaatacggacataatacctacctattccccatgaatagtatttggaataggccatgtgccgcactcatggtcgaatccggccgcaaggttttattctcattagcccctcgccaatgcttcccatgaactgcgaatgtgatctacaagtaattccaaggtcgaacgtgtctgatcgaagagccacgctgtgaaaatcatgaggttaaccccgaaacttaggagaaggacatggggaatcatccatatctagcttgtgttcagtgggcggcctcatggccacacgcgaaaccccacgaatgatctgatatacccctcgaaccagttatctcaaataggaaatctgttgtaatcatgaagggccatctagaaagcagcttttcttaagctgacgaagaaagccaactgtttgccaagcttgcattgatagtgttacatttggctcacaaaaattctatggcgcttgaccctatgtgcgaggttattt

SEQ ID NO: 37550 - DNA, 1062 bp, Muscodor strobelii
  misc_feature: SGI cDNA ID NO. 573032
  misc_feature: Reduced expression when VOC is produced
  misc_feature: Encodes the peptide sequence at SEQ ID NO 37551
atggccgacacgaatcctggtggtcgcccaacgctcgtcaaggagccgccccttgacgagtctaaagctcctatcgagaacgcgctcgagcttacggagttgggtattatcggacctgatctcttcacaaatacacgtgagctttggcatccgcctggcgcgaggggattgtttggaggctgcgttattgcgcagacacttgctgcggcgcaacgcacagtaccatcagacttcacagtacattcataccactgcttcttcgtactagctggcgattctagtgtccccatcatctaccatgttgaacgcgtgcgcgaaggtcgctcattctgcacgcgaacagtacaagcgcggcaacggggacacgcaattttcacagtaacctgcagcttcgcgaggaacggcagcggcggcgcgagaaccgtgcagcacgcaagccccatgccggtcggagtgccagtgccgcctgacgacttcgaagagccgcggctcgacggcgcgaggagacagccgtttgaacactttcgatgtccgagggtagaagatctggacgaaccgcccgagaagaggaagatatggcaatgggtgcgcgccacggggaagatcagcgacgagggcggacaccaggcacatctatccgcgctcgcttatatgagcgactcgtatttcatcgggaccgtctctcgcattcatcacctatggcggttccccttccacccaaaagaactgaagcacctcgagccggaggtcagagcgcacttcgaaaagctgaatgactatcccggcaatggaggtatagaggcgctgaagggcaggccgagactgggcatgatggtcagcctagatcactcgatttactttcataatccactacagatccgcgctgatgagtggatgttcacggagatggagagccattgggcaggtgatggacggggtgtcgtcatgcagaaaatctacaacaaggaggggacgctattagccacagctatccaagagggcgttgtacgattgcgacaagacaaggacacagacaagaatgcgaagatagccaaattgtaa

SEQ ID NO: 37551 - protein, 353 aa, Muscodor strobelii
  misc_feature: SGI Peptide ID NO. 573032
  misc_feature (37)..(138): Pfam Id: PF02551 Pfam Desc: Acyl-CoA thioesterase
  misc_feature (165)..(335): Pfam Id: PF02551 Pfam Desc: Acyl-CoA thioesterase
  misc_feature (276)..(335): Pfam Id: PF02551 Pfam Desc: Acyl-CoA thioesterase
  misc_feature (9)..(341): NCBI GI: 85074705 Blast Desc: NCU00580 [Neurospora crassa OR74A] gi|28927533|gb|EAA36484.1| NCU00580 [Neurospora crassa OR74A] gi|38567326|emb|CAE76614.1| related to acyl-CoA thiolesterase
  misc_feature (9)..(350): NCBI GI: 256733569 Blast Desc: [Nectria haematococca mpVI 77-13-4]
  misc_feature (9)..(350): NCBI GI: 46128415 Blast Desc: FG08585.1 [Gibberella zeae PH-1]
  misc_feature (10)..(350): NCBI GI: 39971065 Blast Desc: MGG_02999 [Magnaporthe grisea 70-15] gi|149210615|ref|XP_001522682.1| MGCH7_ch7g780 [Magnaporthe grisea 70-15] gi|86196735|gb|EAQ71373.1| MGCH7_ch7g780 grisea
  misc_feature (9)..(350): NCBI GI: 171683993 Blast Desc: protein product [Podospora anserina] gi|170941957|emb|CAP67609.1| protein product [Podospora anserina]
  misc_feature (11)..(340): NCBI GI: 169598930 Blast Desc: SNOG_02275 [Phaeosphaeria nodorum SN15] gi|111069367|gb|EAT90487.1| SNOG_02275 [Phaeosphaeria nodorum SN15]
  misc_feature (9)..(350): NCBI GI: 242777850 Blast Desc: acyl-CoA thioesterase II [Talaromyces stipitatus ATCC 10500] gi|218722736|gb|EED22154.1| acyl-CoA thioesterase II [Talaromyces stipitatus ATCC 10500]
  misc_feature (11)..(333): NCBI GI: 12484151 Blast Desc: AF332879_1 acyl-CoA thioesterase [Cochliobolus heterostrophus]
  misc_feature (11)..(342): NCBI GI: 119186327 Blast Desc: CIMG_03211 [Coccidioides immitis RS] gi|240108608|gb|EER26782.1| acyl-CoA thioesterase, [Coccidioides posadasii C735 delta SOWgp]
  misc_feature (9)..(339): NCBI GI: 119494878 Blast Desc: acyl-CoA thioesterase II [Neosartorya fischeri NRRL 181] gi|119412402|gb|EAW22343.1| acyl-CoA thioesterase II [Neosartorya fischeri NRRL 181]
  misc_feature (15)..(346): SWISSPROT Homolog: EC 3.1.2.27 Choloyl-CoA hydrolase
  misc_feature: Useful for introducing or modulating the production of volatile compounds
MADTNPGGRPTLVKEPPLDESKAPIENALELTELGIIGPDLFTNTRELWHPPGARGLFGGCVIAQTLAAAQRTVPSDFTVHSYHCFFVLAGDSSVPIIYHVERVREGRSFCTRTVQARQRGHAIFTVTCSFARNGSGGARTVQHASPMPVGVPVPPDDFEEPRLDGARRQPFEHFRCPRVEDLDEPPEKRKIWQWVRATGKISDEGGHQAHLSALAYMSDSYFIGTVSRIHHLWRFPFHPKELKHLEPEVRAHFEKLNDYPGNGGIEALKGRPRLGMMVSLDHSIYFHNPLQIRADEWMFTEMESHWAGDGRGVVMQKIYNKEGTLLATAIQEGVVRLRQDKDTDKNAKIAKL

SEQ ID NO: 37552 - DNA, 2015 bp, Muscodor strobelii
  misc_feature: SGI EST ID NO. CUFF.89891.1
  misc_feature: Variant of the nucleotide sequence at SEQ ID NO 37550
ctcggatagacgcgacgacttggtcttcgagttcatctcattcttctaccaggccaatgaaatttcaacctatattgctttgattgcatttcctacgcttggtggatttcagaggtttcttgattgacctttggcgcagcgcacttttggacactccttcacatgaaataaccggtcgaatcagagagacaggctggacttttgatagaatcgacaagcgactcgcctatatctcgctttatcttgattctggtgccgaaagcagataatattcgcattttggcctgggatatcgcactcatcgggtaccggttatcgcaacgactgctgtagttgccgccctcgcctattgtcagcttccgcattaccgagctggacaaagcgaggccggttatcatcgaagtggcacaaatagctgcgggtagatatcggaatcgcagtttcgcgatcggagtcggcaacaggaaattaatatactgtctccctgtaactgcccgtcatggccgacacgaatcctggtggtcgcccaacgctcgtcaaggagccgccccttgacgagtctaaagctcctatcgagaacgcgctcgagcttacggagttgggtattatcggacctgtgagtcgcgtcccatattacctagcagagattaaatcgtacaacgtggtgtaaaagcagctagaaagatcagggagtatgagacggcgaggatagtgtggcaagggtattgtcgaggcggcgaaggacaagatgaggagtcaagaagacactgtcactaataggtctgacgtctaggatctcttcacaaatacacgtgagctttggcatccgcctggcgcgaggggattgtttggaggctgcgttattgcgcagacacttgctgcggcgcaacgcacagtaccatcagacttcacagtacattcataccactgcttcttcgtactagctggcgattctagtgtccccatcatctaccatgttgaacgcgtgcgcgaaggtcgctcattctgcacgcgaacagtacaagcgcggcaacggggacacgcaattttcacagtaacctgcagcttcgcgaggaacggcagcggcggcgcgagaaccgtgcagcacgcaagccccatgccggtcggagtgccagtgccgcctgacgacttcgaagagccgcggctcgacggcgcgaggagacagccgtttgaacactttcgatgtccgagggtagaagatctggacgaaccgcccgagaagaggaagatatggcaatgggtgcgcgccacggggaagatcagcgacgagggcggacaccaggcacatctatccgcgctcgcttatatgagcgactcgtatttcatcgggaccgtctctcgcattcatcacctatggcggttccccttccacccaaaagaactgaagcacctcgagccggaggtcagagcgcacttcgaaaagctgaatgactatcccggcaatggaggtatagaggcgctgaagggcaggccgagactgggcatgatggtcagcctagatcactcgatttactttcataatccactacagatccgcgctgatgagtggatgttcacggagatggagagccattgggcaggtgatggacggggtgtcgtcatgcagaaaatctacaacaaggaggggacgctattagccacagctatccaagagggcgttgtacgattgcgacaagacaaggacacagacaagaatgcgaagatagccaaattgtaaagctatgaaaacatgtatagaagttcagaagcgcatgacttgggagatagatgagacatagagcggaatgggaaggggactggcgtactttgctttctttcgaattgaagacgagtattggatgctctcgaactttagagagcacgacatgtcttagatgacaatttaattggactctattgtaacttaatgatatggctaaggcgatagatcgggcggttaggtagatgtgttctgacctacttgattacctatgcaagtctactatttacctgta

SEQ ID NO: 37553 - DNA, 285 bp, Muscodor strobelii
  misc_feature: SGI cDNA ID NO. 573033
  misc_feature: Encodes the peptide sequence at SEQ ID NO 37554
atgttctttgtcgcggcagcaaccttgtttgcatcttacatctacactagactgagatatctacgcttcacccaatatgaacatattccccaagttcggccgcatttgctctggggacatctgaaagcttttggtgaattaaccaagcgcggaaagccacatcgtcacccagatgaaatttttgaagagatgtggatgtctatcggccgtcctccagtgatgctagtggatctcaggcctattaacccgcctatggtcctcatccccagacacgacattgctgag

SEQ ID NO: 37554 - protein, 95 aa, Muscodor strobelii
  misc_feature: SGI Peptide ID NO. 573033
  misc_feature (2)..(95): NCBI GI: 256724246 Blast Desc: NECHADRAFT_97703 [Nectria haematococca mpVI 77-13-4]
  misc_feature (1)..(95): NCBI GI: 115401374 Blast Desc: [Aspergillus terreus NIH2624] gi|114190216|gb|EAU31916.1| [Aspergillus terreus NIH2624]
  misc_feature (13)..(95): NCBI GI: 255941984 Blast Desc: Pc16g14640 [Penicillium chrysogenum Wisconsin 54-1255] gi|211586384|emb|CAP94134.1| Pc16g14640 [Penicillium chrysogenum Wisconsin 54-1255]
  misc_feature (12)..(95): NCBI GI: 116200542 Blast Desc: CHGG_10816 [Chaetomium globosum CBS 148.51] gi|88175530|gb|EAQ82998.1| CHGG_10816 [Chaetomium globosum CBS 148.51]
  misc_feature (4)..(95): NCBI GI: 39957517 Blast Desc: MGG_09179 [Magnaporthe grisea 70-15] gi|145013386|gb|EDJ98027.1| MGG_09179 [Magnaporthe grisea 70-15]
  misc_feature (6)..(95): NCBI GI: 261356973 Blast Desc: cytochrome P450 52A11 [Verticillium albo-atrum VaMs.102]
  misc_feature (4)..(95): NCBI GI: 159128346 Blast Desc: cytochrome P450 monooxygenase, [Aspergillus fumigatus A1163]
  misc_feature (4)..(95): NCBI GI: 146323181 Blast Desc: cytochrome P450 monooxygenase [Aspergillus fumigatus Af293] gi|129556505|gb|EAL86483.2| cytochrome P450 monooxygenase, [Aspergillus fumigatus Af293]
  misc_feature (20)..(95): NCBI GI: 145252778 Blast Desc: An16g05940 [Aspergillus niger] gi|134083456|emb|CAK46934.1| protein product [Aspergillus niger]
  misc_feature (13)..(95): NCBI GI: 171676316 Blast Desc: protein product [Podospora anserina] gi|170936224|emb|CAP60883.1| protein product [Podospora anserina]
MFFVAAATLFASYIYTRLRYLRFTQYEHIPQVRPHLLWGHLKAFGELTKRGKPHRHPDEIFEEMWMSIGRPPVMLVDLRPINPPMVLIPRHDIAE

SEQ ID NO: 37555 - DNA, 1028 bp, Muscodor strobelii
  misc_feature: SGI EST ID NO. CUFF.89834.0
  misc_feature: Variant of the nucleotide sequence at SEQ ID NO 37553
gtcgcagatagcattacttgagtagccttgcgatatgagccccatctcaatgcggtcaaccagcgagcagtcgcaacccacaaagaagcaaattgtccccggagagccccgtgccgcttcaagttatactacaatgttgctggagcggtttgtcataagcttgtagacgaagtggctagatggatttttaattaggcagtttcttttgactttttgaccgctgtcagtgttcgtttctgacgatggttgttgtgtcccgtgcgtggaagggtgtcttcaactaatctcgctataaatagaggtagactatcatcttattggtcgccatacaatgtacaacaagttggccatcttcttgttagttaacaactgagttacggcaaggtattgtgattctgccaatcaggcactgatttacagcacggcatacaaagcgccttatctggtcattgacgacgggcacccgcgcaggtttgggtggtctgcatttgtgtcagaggtacctttgacatgccacactagcccccaatgctccctaagggatgggcaagaaaaagataggcgtcacacactgctctctatccgggcccttcagcgtcacattttctggacttcacttctttctcaacaaaaagagtcgcaagaggatgccgatagcacccacttggtaaatgtgactgatcacggagcaccaaaggacctgctttacgataatctatttcacctaccatatgagagcttcctacggtggactaaacttttctgactgtgttccgttgcagttcgtcgcggcggtacgatacaaaccaagcatgcattcaatgttctttgtcgcggcagcaaccttgtttgcatcttacatctacactagactgagatatctacgcttcacccaatatgaacatattccccaagttcggccgcatttgctctggggacatctgaaagcttttggtgaattaaccaagcgcggaaagccacatcgtcacccagatgaaatttttgaagagatgtggatgtctatcggc

SEQ ID NO: 37556 - DNA, 867 bp, Muscodor strobelii
  misc_feature: SGI cDNA ID NO. 573034
  misc_feature: Encodes the peptide sequence at SEQ ID NO 37557
atgagactacttctatgcgcacacttactggccgccacagtgcaggcgaccagtggatctttcaatgtgctgtcgttcaacgtcgcaggactacccgcaattctcaacaacaatgacgttcctggagacaaaacagccaacacagaaaccattggtgctaagttcgcccaatacggttatgatttgatccatgttcaagaagacttccactaccatgatcatctttacgcgacagacaaccacccctatcggacagatacatccggtgacgtgccgaaaggttcaggtcttaacacactatccaatctcccgtggaatacctatattcgcaaaacatgggcaacctgcagcttaggtagcggtgattgcttaacaccgaaaggcttcacattcatgcgactggttctccaagacggagtttcgacggtggatgtgtataacttgcacgccgacgctggcacaggaagcggagactacaaagcacgcaggagaaatattcaggaggtcgcagattatattgacgccatgagcgtcggccagccggttctagttttcggggataccaacagcagatacgcccggtcgggagacatgatccaaactttcataacgcagaatggactctcggacgcgtgggttcagctcattctcggtggcgctgcgcctacagctgataatggctgcggaaacccagccgagtctgctatttgcgaggttaaggataagatcttctatcgtagcggatcgagggttaccttgacagctacgtctttctcgtatgatacttcgaagttcttacaggcagatggtaacatcttgtctgatcataatcctgtttctgctactttttcttggtcaagtgtttga

SEQ ID NO: 37557 - protein, 288 aa, Muscodor strobelii
  misc_feature: SGI Peptide ID NO. 573034
  misc_feature (21)..(283): Pfam Id: PF03372 Pfam Desc: Endonuclease/Exonuclease/phosphatase family
  misc_feature (9)..(286): NCBI GI: 67516221 Blast Desc: AN0392.2 [Aspergillus nidulans FGSC A4] gi|40747335|gb|EAA66491.1| AN0392.2 [Aspergillus nidulans FGSC A4] gi|259489365|tpe|CBF89576.1| TPA: family protein [Aspergillus
  misc_feature (1)..(286): NCBI GI: 119497479 Blast Desc: endonuclease/exonuclease/phosphatase family protein [Neosartorya fischeri NRRL 181] gi|119413660|gb|EAW23601.1| endonuclease/exonuclease/phosphatase family protein [Neosartorya
  misc_feature (3)..(286): NCBI GI: 70990110 Blast Desc: endonuclease/exonuclease/phosphatase family protein [Aspergillus fumigatus Af293] gi|66847536|gb|EAL87866.1| endonuclease/exonuclease/phosphatase family protein [Aspergillus
  misc_feature (1)..(286): NCBI GI: 159124775 Blast Desc: endonuclease/exonuclease/phosphatase family protein [Aspergillus fumigatus A1163]
  misc_feature (17)..(286): NCBI GI: 39951489 Blast Desc: MGG_01387 [Magnaporthe grisea 70-15] gi|145020783|gb|EDK04912.1| MGG_01387 [Magnaporthe grisea 70-15]
  misc_feature (10)..(286): NCBI GI: 121703439 Blast Desc: endonuclease/exonuclease/phosphatase family protein [Aspergillus clavatus NRRL 1] gi|119398127|gb|EAW08558.1| endonuclease/exonuclease/phosphatase family protein [Aspergillus
  misc_feature (1)..(286): NCBI GI: 169776017 Blast Desc: [Aspergillus oryzae RIB40] gi|83771210|dbj|BAE61342.1| protein product [Aspergillus oryzae]
  misc_feature (1)..(286): NCBI GI: 238502697 Blast Desc: endonuclease/exonuclease/phosphatase family protein [Aspergillus flavus NRRL3357] gi|220691392|gb|EED47740.1| endonuclease/exonuclease/phosphatase family protein [Aspergillus
  misc_feature (17)..(287): NCBI GI: 116205379 Blast Desc: CHGG_10573 [Chaetomium globosum CBS 148.51] gi|88176701|gb|EAQ84169.1| CHGG_10573 [Chaetomium globosum CBS 148.51]
  misc_feature (3)..(286): NCBI GI: 169624612 Blast Desc: SNOG_15565 [Phaeosphaeria nodorum SN15] gi|111055820|gb|EAT76940.1| SNOG_15565 [Phaeosphaeria nodorum SN15]
MRLLLCAHLLAATVQATSGSFNVLSFNVAGLPAILNNNDVPGDKTANTETIGAKFAQYGYDLIHVQEDFHYHDHLYATDNHPYRTDTSGDVPKGSGLNTLSNLPWNTYIRKTWATCSLGSGDCLTPKGFTFMRLVLQDGVSTVDVYNLHADAGTGSGDYKARRRNIQEVADYIDAMSVGQPVLVFGDTNSRYARSGDMIQTFITQNGLSDAWVQLILGGAAPTADNGCGNPAESAICEVKDKIFYRSGSRVTLTATSFSYDTSKFLQADGNILSDHNPVSATFSWSSV

SEQ ID NO: 37558 - DNA, 1164 bp, Muscodor strobelii
  misc_feature: SGI cDNA ID NO. 573035
  misc_feature: Encodes the peptide sequence at SEQ ID NO 37559
atgttctcatcgtgggaatcgccgatcatatttcccttctcgtttcaaagtcacactctctcgttctcagactggatctcgctcatcacattggcattagcacctctcattgcccacgtggtaacggctgggccctcaccatcatatttaatccggaaaagacccaaatggcacgatcgcttggctcactatcatccagcctcaattctctggcgttacgcatccatagccgaccgccgcatccgcgcgagggactggagtgctgaagacttggccgcgactaacgccctattttggactgcccatggctgggatgggtcgcagaagatgatcgagcattcagtgccgtaccgtttgcttcttcccgattgcgatcgtgcgagattttggtctgtcgacatggccaagacagccattttcgcgctgcagggtttacagtctctttatgtgttagtcggcaccttctttggcgcccacgatttctctgccaatcttgctctcgacacgacctttgcaccgctagcggttatggggcttttgcggcttgccgccgctccttggcttacagataactacttgtttgccttccgccatgacacagctacccccttattgcaagatgaggacaacggcttgggtggtaagaagggggttgagttgcatatcgacgagtatgttaaccgatttcatccgacttcgtatctcccaagccgtgtctttctcgcagcattcgcgcttgcacaacttggcatccttgtgctcatcatcctgctcagtagtccggtgtgttggtccggctacccgtgtaaatacgggttcccttatgcggcctcaacgttactgcaaatcgcgttgtacttcatcgctatagccacctccgtcgtgctgtgcgtgtactatttctgccgaggtagaacagtgtcaactgtcatcccttgcatctcgtcaacttggtacaaagtccacagtgccatcatcgcgttattagggatggtgctattcgtcctctccgccgccgagacgcgccagacgccttgcggaaagttctcgaaactgccggggtacgtgggggatgttgcttcttgcagctatgaccagtggtacctgccgttgaattcgcttaagaacgattcgtacgtagggatcgctttcagtcagtcataa

SEQ ID NO: 37559 - protein, 387 aa, Muscodor strobelii
  misc_feature: SGI Peptide ID NO. 573035
  misc_feature (14)..(362): NCBI GI: 46139723 Blast Desc: FG11376.1 [Gibberella zeae PH-1]
  misc_feature (10)..(362): NCBI GI: 46139191 Blast Desc: FG11110.1 [Gibberella zeae PH-1]
  misc_feature (10)..(354): NCBI GI: 115388121 Blast Desc: [Aspergillus terreus NIH2624] gi|114195650|gb|EAU37350.1| [Aspergillus terreus NIH2624]
  misc_feature (11)..(381): NCBI GI: 169772205 Blast Desc: [Aspergillus oryzae RIB40] gi|238485168|ref|XP_002373822.1| conserved [Aspergillus flavus NRRL3357] gi|83768431|dbj|BAE58570.1| protein product oryzae]
MFSSWESPIIFPFSFQSHTLSFSDWISLITLALAPLIAHVVTAGPSPSYLIRKRPKWHDRLAHYHPASILWRYASIADRRIRARDWSAEDLAATNALFWTAHGWDGSQKMIEHSVPYRLLLPDCDRARFWSVDMAKTAIFALQGLQSLYVLVGTFFGAHDFSANLALDTTFAPLAVMGLLRLAAAPWLTDNYLFAFRHDTATPLLQDEDNGLGGKKGVELHIDEYVNRFHPTSYLPSRVFLAAFALAQLGILVLIILLSSPVCWSGYPCKYGFPYAASTLLQIALYFIAIATSVVLCVYYFCRGRTVSTVIPCISSTWYKVHSAIIALLGMVLFVLSAAETRQTPCGKFSKLPGYVGDVASCSYDQWYLPLNSLKNDSYVGIAFSQS

SEQ ID NO: 37560 - DNA, 1652 bp, Muscodor strobelii
  misc_feature: SGI EST ID NO. CUFF.89839.0
  misc_feature: Variant of the nucleotide sequence at SEQ ID NO 37558
cacagacggaaatttgacttcagctgtgtgctttggatgcatttcgaccaatcgttaatcacatcgacctagggtaaaacggctactagctgtatgcatcaaagtcgatcaggctgcgaagtcaatcattgtcgaatgtttggtgaaaaaagttggggctggtaggttcctaactcgttcatgtctcgaggggatccaacgacatatatcaagcacccattcgccactatgttcggacgttatagcttgaatatccgattcggttacctatgcgtgcttaataagtgaattcatcgacttgaaagcttcatagaaacgtgatgttctcatcgtgggaatcgccgatcatatttcccttctcgtttcaaagtcacactctctcgttctcagactggatctcgctcatcacattggcattagcacctctcattgcccacgtggtaacggctgggccctcaccatcatatttaatccggaaaagacccaaatggcacgatcgcttggctcactatcatccagcctcaattctctggcgttacgcatccatagccgaccgccgcatccgcgcgagggactggagtgctgaagacttggccgcgactaacgccctattttggactgcccatggctgggatgggtcgcagaagatgatcgagcattcagtgccgtaccgtttgcttcttcccgattgcgatcgtgcgagattttggtctgtcgacatggccaagacagccattttcgcgctgcagggtttacagtctctttatgtgttagtcggcaccttctttggcgcccacgatttctctgccaatcttgctctcgacacgacctttgcaccgctagcggttatggggcttttgcggcttgccgccgctccttggcttacagataactacttgtttgccttccgccatgacacagctacccccttattgcaagatgaggacaacggcttgggtggtaagaagggggttgagttgcatatcgacgagtatgttaaccgatttcatccgacttcgtatctcccaagccgtgtctttctcgcagcattcgcgcttgcacaacttggcatccttgtgctcatcatcctgctcagtagtccggtgtgttggtccggctacccgtgtaaatacgggttcccttatgcggcctcaacgttactgcaaatcgcgttgtacttcatcgctatagccacctccgtcgtgctgtgcgtgtactatttctgccgaggtagaacagtgtcaactgtcatcccttgcatctcgtcaacttggtacaaagtccacagtgccatcatcgcgttattagggatggtgctattcgtcctctccgccgccgagacgcgccagacgccttgcggaaagttctcgaaactgccggggtacgtgggggatgttgcttcttgcagctatgaccagtggtacctgccgttgaattcgcttaagaacgattcgtacgtagggatcgctttcagtcagtcataagatggatccacgggggccgaaaaccgtatttgggtgtacaatttcacagagggagcctgtctcttgcctcatcacgcagagtcatctcaagaggcggtgatagtacaaatatcgactgcgtagcggtagaccaatgagctcatacagtgatctgttgggcgaatactt

SEQ ID NO: 37561 - DNA, 462 bp, Muscodor strobelii
  misc_feature: SGI cDNA ID NO. 573036
  misc_feature: Elevated expression when VOC is produced
  misc_feature: Encodes the peptide sequence at SEQ ID NO 37562
atgcgtctcctccagcggcaaaccgacggaagcttaacgcttacccaacattccgacgacgacatcccgccttatgctatcctttcgtacacatggggagaagaagaggagaaggaggagacctttcgagagattatagaaggcgtcaccctccggaaatacgactacatacagaagaagggctaccggaaaatccattcctgcgcgaacgcagcggccaacgacaagctacaatacttttgggtcgattcttgctgcatcgacaagtcgagcagtgccgagcttcaagaggccatcacttctatgttccgatgcagcagagacttttattacggccaaactgggagttcgccttttgcagaagcagatggtttactagaggatggacgctataagagcttctcgccctgcgatatggacattatgctacggaacttcactacttccgatgctagttcctag

SEQ ID NO: 37562 - protein, 153 aa, Muscodor strobelii
  misc_feature: SGI Peptide ID NO. 573036
  misc_feature (25)..(104): Pfam Id: PF06985 Pfam Desc: Heterokaryon incompatibility protein (HET)
  misc_feature (1)..(104): NCBI GI: 169597563 Blast Desc: SNOG_01568 [Phaeosphaeria nodorum SN15] gi|111070097|gb|EAT91217.1| SNOG_01568 [Phaeosphaeria nodorum SN15]
  misc_feature (1)..(108): NCBI GI: 171685532 Blast Desc: protein product [Podospora anserina] gi|170942727|emb|CAP68380.1| protein product [Podospora anserina]
  misc_feature (1)..(108): NCBI GI: 154936832 Blast Desc: HNWD3 [Podospora anserina]
  misc_feature (1)..(104): NCBI GI: 169622501 Blast Desc: SNOG_14475 [Phaeosphaeria nodorum SN15] gi|111056895|gb|EAT78015.1| SNOG_14475 [Phaeosphaeria nodorum SN15]
  misc_feature (1)..(103): NCBI GI: 169604168 Blast Desc: SNOG_05094 [Phaeosphaeria nodorum SN15] gi|111066365|gb|EAT87485.1| SNOG_05094 [Phaeosphaeria nodorum SN15]
  misc_feature (2)..(123): NCBI GI: 154324074 Blast Desc: BC1G_00436 [Botryotinia fuckeliana B05.10] gi|150842665|gb|EDN17858.1| BC1G_00436 [Botryotinia fuckeliana B05.10]
  misc_feature (1)..(104): NCBI GI: 156056350 Blast Desc: SS1G_05528 [Sclerotinia sclerotiorum 1980] gi|154703311|gb|EDO03050.1| SS1G_05528 [Sclerotinia sclerotiorum 1980]
  misc_feature (1)..(124): NCBI GI: 171677728 Blast Desc: protein product [Podospora anserina] gi|154936838|emb|CAL30215.1| HET-E [Podospora anserina] gi|170936932|emb|CAP61591.1| protein product [Podospora anserina]
  misc_feature (1)..(118): NCBI GI: 156048476 Blast Desc: SS1G_08969 [Sclerotinia sclerotiorum 1980] gi|154693366|gb|EDN93104.1| SS1G_08969 [Sclerotinia sclerotiorum 1980]
  misc_feature (1)..(108): NCBI GI: 171693331 Blast Desc: protein product [Podospora anserina] gi|170946614|emb|CAP73416.1| protein product [Podospora anserina]
  misc_feature: Useful for introducing or modulating the production of volatile compounds
MRLLQRQTDGSLTLTQHSDDDIPPYAILSYTWGEEEEKEETFREIIEGVTLRKYDYIQKKGYRKIHSCANAAANDKLQYFWVDSCCIDKSSSAELQEAITSMFRCSRDFYYGQTGSSPFAEADGLLEDGRYKSFSPCDMDIMLRNFTTSDASS

SEQ ID NO: 37563 - DNA, 990 bp, Muscodor strobelii
  misc_feature: SGI cDNA ID NO. 573037
  misc_feature: Encodes the peptide sequence at SEQ ID NO 37564
atgccagcttatcagtcacatcaggaccagtctacatatagtagcagacagtttactgagctgcctgcggctaggcagcagcagaacgggctacctcagactccctctagcccgtggcaaccggcacggcaagatgctacttctcatcaacaactcccggctactatagacgagtttgctgctgaacataaacaaaaagaagcatcgcttaaagacgacctgaatcaggcacatcagcgagagaacgatgcgcaacggcggcttcatctagcgacggaagaactgcagcgtcttcaacgacaaaacgacatgttgaaagcactgtatcaagacacgtcagctcgccttactaagagtcaggcggcgtctaaagagttccaaagacagctagccgagatgaaggcatcttccctcgctgcccaattccagcagtatccaagccccagcccaagtgtcgaagagagtcgcggcctgtctgattccgacggtatgtccgataaagaaatctcgacacagtctatcgcaacggacgaggagccgccctacgacgacgagaaccgggtggtccagcctcataggccctcgagcgcggaatggtcaccgggtataccatcctcgcgacagacccgcagaagtgtgagcgccatagatatacacctcgatcggtgccatagcttcgagacctaccaagcaaagtggaaggtccttgatgaacatcctgatactcgactgagccaggacgctataccctggccggtcttatctggtcaaatgagagacgtgaatgaatctaacgtggaagcctttattagaaatatgttggaggcggcacccgatgaggaccaagatgccgttttgcatcgtcagagggagcgctgggacctgaaagctatgaaatacaggctgagagacacgcgcgaaagccgaggtctacggaaggcacttgaagttgttgcaagcacggttgcggaagatgcatggtactactga

SEQ ID NO: 37564 - protein, 329 aa, Muscodor strobelii
  misc_feature: SGI Peptide ID NO. 573037
MPAYQSHQDQSTYSSRQFTELPAARQQQNGLPQTPSSPWQPARQDATSHQQLPATIDEFAAEHKQKEASLKDDLNQAHQRENDAQRRLHLATEELQRLQRQNDMLKALYQDTSARLTKSQAASKEFQRQLAEMKASSLAAQFQQYPSPSPSVEESRGLSDSDGMSDKEISTQSIATDEEPPYDDENRVVQPHRPSSAEWSPGIPSSRQTRRSVSAIDIHLDRCHSFETYQAKWKVLDEHPDTRLSQDAIPWPVLSGQMRDVNESNVEAFIRNMLEAAPDEDQDAVLHRQRERWDLKAMKYRLRDTRESRGLRKALEVVASTVAEDAWYY

SEQ ID NO: 37565 - DNA, 2850 bp, Muscodor strobelii
  misc_feature: SGI EST ID NO. CUFF.89867.0
  misc_feature: Variant of the nucleotide sequence at SEQ ID NO 37563
ctttgtcacatccattgtactcagaatgagcgaatctgggggacctgggagtctgcacttagtaagatctgggcgaagatgccagcttatcagtcacatcaggaccagtctacatatagtagcagacagtttactgagctgcctgcggctaggcagcagcagaacgggctacctcagactccctctagcccgtggcaaccggcacggcaagatgctacttctcatcaacaactcccggctactatagacgagtttgctgctgaacataaacaaaaagaagcatcgcttaaagacgacctgaatcaggcacatcagcgagagaacgatgcgcaacggcggcttcatctagcgacggaagaactgcagcgtcttcaacgacaaaacgacatgttgaaagcactgtatcaagacacgtcagctcgccttactaagagtcaggcggcgtctaaagagttccaaagacagctagccgagatgaaggcatcttccctcgctgcccaattccagcagtatccaagccccagcccaagtgtcgaagagagtcgcggcctgtctgattccgacggtatgtccgataaagaaatctcgacacagtctatcgcaacggacgaggagccgccctacgacgacgagaaccgggtggtccagcctcataggccctcgagcgcggaatggtcaccgggtataccatcctcgcgacagacccgcagaagtgtgagcgccatagatatacacctcgatcggtgccatagcttcgagacctaccaagcaaagtggaaggtccttgatgaacatcctgatactcgactgagccaggacgctataccctggccggtcttatctggtcaaatgagagacgtgaatgaatctaacgtggaagcctttattagaaatatgttggaggcggcacccgatgaggaccaagatgccgttttgcatcgtcagagggagcgctgggacctgaaagctatgaaatacaggctgagagacacgcgcgaaagccgaggtctacggaaggcacttgaagttgttgcaagcacggttgcggaagatgcatggtactactgaaaacgaaaagagtgacgggaagctgaagcgccagtctcttgttatagctcacaaggctagggctccgcaataaccctgggatatgtggcttggggaagtatgccctgcatgtaataagttcttatgcgcgaaattcgacaattcccgggtgaaatgacgaactatatcatcgatctaaagaatactaagctgatttcacgtctcaatagataaatcatatacgtatctgataatagggccgcaccgtaaatgcagagtaattcacatctctgtgctctatcatgaagcgtatcaaagttcttaagacagatagtcattgtagcggacaaactctgacaaaatggccgtatttcttgcctacaccagttgatcttagtaatttaaggcttgttgggaactgctaggaactagcatcggaagtagtgaagttccgtagcataatgtccatatcgcagggcgagaagctcttatagcgtccatcctctagtaaaccatctgcttctgcaaaaggcgaactcccagtttggccgtaataaaagtctctgctgctgttcgttaccgattgtcacatttgacaagtatacgtagcattttgccgcactctggtaccatcggaacatagaagtgatggcctcttgaagctcggcactgctcgacttgtcgatgcagcaagaatcgacccaaaagtattgtagcttgtcgttggccgctgcgttcgcgcaggaatggattttccggtagcccttcttctgtatgtagtcgtatttccggagggtgacgccttctataatctctcgaaaggtctcctccttctcctcttcttctccccatgtgtacgaaaggatagcataaggcgggatgtcgtcgtcggaatgttgggtaagcgttaagcttccgtcggtttgccgctggaggagacgcatagtagctaatttgtctgtgaagccaagacaagatgtccgtgatgtaaagggtcgccatcgtagaacaggacgaggctgcgttaaataaggggtcggggcatgtcgtttaaggctaagagtgcatacctacgtaaccagctgtgctcaacctgcatctaaatgcagatgcacactatctaaaattagtcggccgtctcctttacctcctcgacagcgcgacatcttttttgcctatgttttgcccgctcgcacgttgaaggtatgcgcgtatgtcaagtacggtgtagttgatctcatgtttctccactctgtcatttctgcgtgtggataagcgaccagcgatcaacgatcgattatgcgtacaacactgttcaatcgctccgatcgaatagaaagagtatgctgcttcatgcgtcttcacgtcattgagattagaagccgggattatttccctcccagaaacagccacagacacgccatgtatcgtttggcactgtagctgtatatttagaggttgcacattcagggtagcggcaccctgactccgtaacctcaccacggagctctcagcgtattccagccttggcttcttgttagtcccctacctaagcagactcgggctcttttcccatactgatcagtgcccatgcacgataatagacagtctcgtgttgttacagctcctcagcctcgttctccgctagttacgtcaattcgtcgcgatcgtcgggcagcgcagattgattcccagggctgtgtcacgtgagcagtcatgtgtgagcgcgagtggtggtcgtggcagatgcgtagtcagtgtggagactggagggagtgttatagatgcgctgagggaccgctg

SEQ ID NO: 37566 - DNA, 951 bp, Muscodor strobelii
  misc_feature: SGI cDNA ID NO. 573038
  misc_feature: Elevated expression when VOC is produced
  misc_feature: Encodes the peptide sequence at SEQ ID NO 37567
atgtccacgtcggcccccctacatctgagctcaacgcccgatataacatacataacgcccgaccccttccaacccaaacccctcatcgccgacatccttcggacgcgcttctgcatacccgattccatcttcctcgtcgagggcgtcgacacagcatacacctcgaaatcaaaacgatggcgtgccgtttgcctattactcggagatggcgagctctgcatccaagcattgctgtccgctgagatgcacagatttgtcgaccaggacgaaatcgtgtttgggtcttatgtgaagctattggacctttctgtcgaatacaaagatgatggtgatagctttccggagtctggaccgggtgaggacagcgatgatgatgatgaacacggtcattcggcacagagcgggcgcatggtctgtctcgtcgttgagagcctgattgttgctggatggcacaatgccttgatcgatcgtccaatcatcgagtcaaaatgtgcggtagaagaggatattgactttatgggggatgaagacgatttagacatgattattccctctacaccactgcgcagtccagagcccgttcgtgaagataccgaaccaacggtgtcgcaaggcgaggcaaagctcctcgaagagctggcagatgccgacgatgactttgagacaatagcgacctccgagaaaaagagcaacgagaaccgttcagaagcagcaaccaacacgaaccaaaacataacacagcgggctatcaaggatccggcaaagcctatcaagttgacaaaactacgctcaatcccaaacctgccctacagacagaactggagcgtcaacctcctttgtgtcattgcagcaatcaccgaggtcgagcctgcgggtatggcgccatggacgcaaaagctgcaaagcaagcaaggcttacggacccatctactgacaaacaagtactcttga

SEQ ID NO: 37567 - protein, 316 aa, Muscodor strobelii
  misc_feature: SGI Peptide ID NO. 573038
  misc_feature (23)..(299): NCBI GI: 256730692 Blast Desc: NECHADRAFT_89611 [Nectria haematococca mpVI 77-13-4]
  misc_feature (15)..(255): NCBI GI: 261357097 Blast Desc: conserved [Verticillium albo-atrum VaMs.102]
  misc_feature (28)..(299): NCBI GI: 39977681 Blast Desc: MGG_06725 [Magnaporthe grisea 70-15] gi|145013758|gb|EDJ98399.1| MGG_06725 [Magnaporthe grisea 70-15]
  misc_feature (19)..(99): NCBI GI: 171688872 Blast Desc: protein product [Podospora anserina] gi|170944398|emb|CAP70508.1| protein product [Podospora anserina]
  misc_feature (22)..(99): NCBI GI: 116199795 Blast Desc: CHGG_08053 [Chaetomium globosum CBS 148.51] gi|88179332|gb|EAQ86800.1| CHGG_08053 [Chaetomium globosum CBS 148.51]
  misc_feature (248)..(299): NCBI GI: 46109654 Blast Desc: FG01709.1 [Gibberella zeae PH-1]
  misc_feature (248)..(300): NCBI GI: 261357097 Blast Desc: conserved [Verticillium albo-atrum VaMs.102]
  misc_feature (252)..(315): NCBI GI: 85076037 Blast Desc: NCU03514 [Neurospora crassa OR74A] gi|28916895|gb|EAA26634.1| [Neurospora crassa OR74A]
  misc_feature (252)..(315): NCBI GI: 10241489 Blast Desc: [Neurospora crassa]
  misc_feature (252)..(299): NCBI GI: 171688874 Blast Desc: protein product [Podospora anserina] gi|170944399|emb|CAP70509.1| protein product [Podospora anserina]
  misc_feature: Useful for introducing or modulating the production of volatile compounds
MSTSAPLHLSSTPDITYITPDPFQPKPLIADILRTRFCIPDSIFLVEGVDTAYTSKSKRWRAVCLLLGDGELCIQALLSAEMHRFVDQDEIVFGSYVKLLDLSVEYKDDGDSFPESGPGEDSDDDDEHGHSAQSGRMVCLVVESLIVAGWHNALIDRPIIESKCAVEEDIDFMGDEDDLDMIIPSTPLRSPEPVREDTEPTVSQGEAKLLEELADADDDFETIATSEKKSNENRSEAATNTNQNITQRAIKDPAKPIKLTKLRSIPNLPYRQNWSVNLLCVIAAITEVEPAGMAPWTQKLQSKQGLRTHLLTNKYS

SEQ ID NO: 37568 - DNA, 2607 bp, Muscodor strobelii
  misc_feature: SGI EST ID NO. CUFF.89873.0
  misc_feature: Variant of the nucleotide sequence at SEQ ID NO 37566
caacaacaaagtcgggagatttattcaagcccggattaattcaaaacttcgttttacaatacggtgagagcactaaggggattttaaggctccctggtagggattgccgtccttccagtatatccgagacgtaaattatcggattaaacgcggtcagaacgcgaaacaaagcctgttccttttcattgtcgggaggtgtgaatgactcactaagatgatagtcaatcattcgctaaatattgtcacatggtcggtgagatggaataaattggctctgcttacgttcataccacttttcttttcgttcctctatcctactcaattgccttgcttaatatcgtcactctaatattcacatcggaatcatcgcaagtagaaaatgttcaatctcaacgaaacgggcacacctaaactaccccagcagatggatggagcgaaactcaagtccacatctagcttcaaggcttactaggccgtgattgcaatagaaggcgcaatcatgacattgccggttcactggcaaaaaacctcatggttctggcagtgcgttttcatctttagaggaatcaagcccagccattcctggggggacttcgctggaagcaacaaagaaaaataatggagacaatatcaatgattctcgagtcagaatgcgaaacggccctatatctgagaacaaatatgaagctaatcgttcagatcgtagacgatttgcattcgatgagaacaaggtgcgatgaacttgtgtaagttgtctctcagtcagcttctatggccaatacgccggtatggcatagtgtaattgccacaatggcaatttgagctatatttatgatacgagttgtccgggctgtgggaactatagaggtataaagcggcaggtattgaaagaggctcctgtaaggtaaggtagagagctgatgctcagcaagtgatcgaggatatgccgaggagacagtgtatacacacctttgaataacggttgtggagaacctttgcggctgcgagccttgattggccctacctgtaggtagcttgaagcactaaaaccccgccgtttcccacccagccccgctagagtcagctcgacagtagatatgccctcgttaccgatccattgttgtcgttcattacactggccaatcttggggcagattccaatcaaaatccaatttacttattacttagaccgagcaaattctacaagaacgatgaacacgccaccaaaaaatcgatgtccacgtcggcccccctacatctgagctcaacgcccgatataacatacataacgcccgaccccttccaacccaaacccctcatcgccgacatccttcggacgcgcttctgcatacccgattccatcttcctcgtcgagggcgtcgacacagcatacacctcgaaatcaaaacgatggcgtgccgtttgcctattactcggagatggcgagctctgcatccaagcattgctgtccgctgagatgcacagatttgtcgaccaggacgaaatcgtgtttgggtcttatgtgaagctattggacctttctgtcgaatacaaagatgatggtgatagctttccggagtctggaccgggtgaggacagcgatgatgatgatgaacacggtcattcggcacagagcgggcgcatggtctgtctcgtcgttgagagcctgattgttgctggatggcacaatgccttgatcgatcgtccaatcatcgagtcaaaatgtgcggtagaagaggatattgactttatgggggatgaagacgatttagacatgattattccctctacaccactgcgcagtccagagcccgttcgtgaagataccgaaccaacggtgtcgcaaggcgaggcaaagctcctcgaagagctggcagatgccgacgatgactttgagacaatagcgacctccgagaaaaagagcaacgagaaccgttcagaagcagcaaccaacacgaaccaaaacataacacagcgggctatcaaggatccggcaaagcctatcaagttgacaaaactacgctcaatcccaaacctgccctacagacagaactggagcgtcaacctcctttgtgtcattgcagcaatcaccgaggtcgagcctgcgggtatggcgccatggacgcaaaagctgcaaagcaagcaaggcttacggacccatctactgacaaacaagtactcttgacggtctttctcgatgcgcagtcgttcaacccctcagttggaagtgtggtcctattactcggagttaagaatcatcgattcgacggcggttgtgtcaagaaatatgccagcgatcgaccaccggagggtggaggctggtggttggaaaatcccgtgcagctcgactggtgtaaatctgagactgagtacttgaggcgatggtgggttgagaacttccaagacggttgataacaagatagaactgctgccgtcgataacgcaatcttcttttggaagcatatgaatctgttcttagacgaggcgcttgcccttttgctcgctcttttgtagcactcgtggtagccagagtggagggtatcttcaacatggcgctacatgtagggacctcatagattgtcgcaagagacaagaattacctctact

SEQ ID NO: 37569 - DNA, 558 bp, Muscodor strobelii
  misc_feature: SGI cDNA ID NO. 573039
  misc_feature: Encodes the peptide sequence at SEQ ID NO 37570
atggccgccgccctcgcagacttgcccgctcctcagccccaacccgacttcgaccgcatttccggtgccatcagaatcgccgcaaacgagttgcagtcagcggctggcgaattcgcctactgcaccaacatgcctgtcgctcaagatggccagatattgcggcagattcttgattcggtgcaacagatcaacggacgcatgcagcaaatggagcagcggctcacacagcgcttcgagaacgtagaggatcatctcgggagactagaggatcgtttcgggagactggagatgcgtatgcagtcctcggactcgaacacgactgcccggttgatcaacgtctggatcacaaaaccgaaccagccgctcgcacctctcgtcaacatcaccactaacctcgttatcgacgactttcccgccacggtcgaagaaatcaacacgttgcccggtccccgagttgcaatcctcctggagcagctaggccagtcaacgtccggtaatattgcagagaagcggcgccgtctgaaggtcgcgtcaggcgccaccttgcatatctcttaa

SEQ ID NO: 37570 - protein, 185 aa, Muscodor strobelii
  misc_feature: SGI Peptide ID NO. 573039
  misc_feature (98)..(180): NCBI GI: 240276021 Blast Desc: conserved [Ajellomyces capsulatus H143]
MAAALADLPAPQPQPDFDRISGAIRIAANELQSAAGEFAYCTNMPVAQDGQILRQILDSVQQINGRMQQMEQRLTQRFENVEDHLGRLEDRFGRLEMRMQSSDSNTTARLINVWITKPNQPLAPLVNITTNLVIDDFPATVEEINTLPGPRVAILLEQLGQSTSGNIAEKRRRLKVASGATLHIS

SEQ ID NO: 37571 - DNA, 1274 bp, Muscodor strobelii
  misc_feature: SGI EST ID NO. CUFF.89875.0
  misc_feature: Variant of the nucleotide sequence at SEQ ID NO 37569
tgcggggcggcgcctctttttggacccgacacccctccaaaataaacacggccatggtgtcctgactcacacaaataaacaactatcctcaggcatcagcatcaagcattacttcaacgagtcttcccacctgcatcctcaacacaccaatcgtccctcgcccaaagaacattcgcccttcttacaaaatggccgccgccctcgcagacttgcccgctcctcagccccaacccgacttcgaccgcatttccggtgccatcagaatcgccgcaaacgagttgcagtcagcggctggcgaattcgcctactgcaccaacatgcctgtcgctcaagatggccagatattgcggcagattcttgattcggtgcaacagatcaacggacgcatgcagcaaatggagcagcggctcacacagcgcttcgagaacgtagaggatcatctcgggagactagaggatcgtttcgggagactggagatgcgtatgcagtcctcggactcgaacacgactgcccggttgatcaacgtctggatcacaaaaccgaaccagccgctcgcacctctcgtcaacatcaccactaacctcgttatcgacgactttcccgccacggtcgaagaaatcaacacgttgcccggtccccgagttgcaatcctcctggagcagctaggccagtcaacgtccggtaatattgcagagaagcggcgccgtctgaaggtcgcgtcaggcgccaccttgcatatctcttaaatgattgtggtaacagcccagtaccaagttcgacttgttgtcatcaataaccggtgccaagatattcttgtttctggtcatcgattcccaatatcgatttcccgtgttcgcgatagttctcttttgcaccttatcatgtgtcatgtttgcgatagtaatgttgccccaacgccggctcatgggtatgaggtaatgagggcgtttggctgattcgcgttgggcggttccttgtatttcttcccataagtgtatctagataagaggttgcaatgagagggagttctggtcaacacgatgtgattaaacggcgttatgtatatcaaaacaggagccatgcgcttattgtcacagctaaaacacaagtttgggtcgtactgcaaaccgatctcggttcggcatttgaatagtcacgggacattgttccagtcaaagatccaaaggtacccgtatataagaccacatggtgtgtcacctatgcgcttatctagatgtccgctgcatcttcccatagagcattagaacactgcg

SEQ ID NO: 37572 - DNA, 972 bp, Muscodor strobelii
  misc_feature: SGI cDNA ID NO. 573041
  misc_feature: Encodes the peptide sequence at SEQ ID NO 37573
atgcttacgaactctcgaggtactaaacgccgagcagcagatatccctctagacgtggagaatacggataacagcccgaagtcctcacagagagatccaccgccgccgcgacgcaccaccagattgcgcgcctcctcggcaggcacaaactgtacagcgcgagcaccaaaagccaagggcctccgtgccctcgcaattgctgccgatggtggcagacacggtgatcggccagtgccaagaccaagggaaataccacggccgtcacttaacccgcactcgaaagatgcagcaacggacttccgcacagatacggttgccaactccacgagtgccaaaagtatagatgcggatcgcgaccaacgaggctcgctggttccagaggctatgatgggtggtccagctcccttagtaccgaatgccctccatgatacagctccagccaggctcgtcggtaagctcgacccgattggcaaagtcgacacaacccgcgccgagcccggattacccctgcaagcgtacaatcgcgacaatgacgacggcgaggtgcacgaaataagtagcttgctcaaccatcgcatggccgacgaccagagcggtactgttgaactacaggtgcactggctcggcgagagccgaacgcaagctacgtgggaagccgaggaggaaatccagcgaggagcggaggaggcgctgtacgcgtattggagggctcggggagggcgccagagcgtgctcttccacaagcccaggaaccccccaaccgagaagtatcatgtcttcaagctgttacggcacaaaaaacagcaagggagcctccgattagaggttcaatgggttggccattcgaccgaagcccacgagaccacaatggagcccgagagcaagatcaggagcatcgccccgacactattagacgagtattggaggaaagccggtggccgtgcatgttgcctcgcggcgcggagtagatag

SEQ ID NO: 37573 - protein, 323 aa, Muscodor strobelii
  misc_feature: SGI Peptide ID NO. 573041
  misc_feature (183)..(237): Pfam Id: PF00385 Pfam Desc: 'chromo' (CHRromatin Organisation MOdifier) domain
  misc_feature (257)..(310): Pfam Id: PF00385 Pfam Desc: 'chromo' (CHRromatin Organisation MOdifier) domain
  misc_feature (184)..(307): NCBI GI: 46110525 Blast Desc: FG02144.1 [Gibberella zeae PH-1]
  misc_feature (181)..(313): NCBI GI: 256730107 Blast Desc: NECHADRAFT_101114 [Nectria haematococca mpVI 77-13-4]
  misc_feature (184)..(307): NCBI GI: 256728634 Blast Desc: NECHADRAFT_97011 [Nectria haematococca mpVI 77-13-4]
  misc_feature (167)..(308): NCBI GI: 39940376 Blast Desc: [Magnaporthe grisea 70-15] gi|145010700|gb|EDJ95356.1| [Magnaporthe grisea 70-15]
  misc_feature (183)..(314): NCBI GI: 256729555 Blast Desc: NECHADRAFT_84250 [Nectria haematococca mpVI 77-13-4]
  misc_feature (183)..(313): NCBI GI: 46117430 Blast Desc: FG04557.1 [Gibberella zeae PH-1]
  misc_feature (201)..(307): NCBI GI: 256721145 Blast Desc: NECHADRAFT_88862 [Nectria haematococca mpVI 77-13-4]
MLTNSRGTKRRAADIPLDVENTDNSPKSSQRDPPPPRRTTRLRASSAGTNCTARAPKAKGLRALAIAADGGRHGDRPVPRPREIPRPSLNPHSKDAATDFRTDTVANSTSAKSIDADRDQRGSLVPEAMMGGPAPLVPNALHDTAPARLVGKLDPIGKVDTTRAEPGLPLQAYNRDNDDGEVHEISSLLNHRMADDQSGTVELQVHWLGESRTQATWEAEEEIQRGAEEALYAYWRARGGRQSVLFHKPRNPPTEKYHVFKLLRHKKQQGSLRLEVQWVGHSTEAHETTMEPESKIRSIAPTLLDEYWRKAGGRACCLAARSR

SEQ ID NO: 37574 - DNA, 1773 bp, Muscodor strobelii
  misc_feature: SGI EST ID NO. CUFF.89973.0
  misc_feature: Variant of the nucleotide sequence at SEQ ID NO 37572
gctccttggaaagtcttgtactagtggatgtgctgagttgattacaaaggcggacgatgatgttatgcaataatgctgaaagcgctgtactgcctcattctgcaaacctgaactctactgtacataaagtacactgtacggaacggcagaattgtgatctgatacctacggtaaatggatcggactgcttagagtatgacgaatgatagcaaagccgtatgtacagtatgaagcgcctttaatgacatgatgtgatgttagctcgacgtggcttcggctgggcaataggtttagcacttgccattcgccgcgagatctggcgctatcaatcgctaggaagaccagaagaggcaacgaactccgacccttctaggtcacgtgtctagcgcgcgtcgtaacttggccaaaccttcgtgtcctgtccgcgactgaccgagtatggttctatcgccattcatcttgccacaatatatacagcattggtagtctcttgcgctaaaaaaaatacagcacactaccgacatcattttaatactcataccaccaccaatgaaaaggacatgcttacgaactctcgaggtactaaacgccgagcagcagatatccctctagacgtggagaatacggataacagcccgaagtcctcacagagagatccaccgccgccgcgacgcaccaccagattgcgcgcctcctcggcaggcacaaactgtacagcgcgagcaccaaaagccaagggcctccgtgccctcgcaattgctgccgatggtggcagacacggtgatcggccagtgccaagaccaagggaaataccacggccgtcacttaacccgcactcgaaagatgcagcaacggacttccgcacagatacggttgccaactccacgagtgccaaaagtatagatgcggatcgcgaccaacgaggctcgctggttccagaggctatgatgggtggtccaggtacttgtcttcccacgatcacacgtctggttcacctttgcggggcaattccactgattgaagaatacagctcccttagtaccgaatgccctccatgatacagctccagccaggctcgtcggtaagctcgacccgattggcaaagtcgacacaacccgcgccgagcccggattacccctgcaagcgtacaatcgcgacaatgacgacggcgaggtgcacgaaataagtagcttgctcaaccatcgcatggccgacgaccagagcggtactgttgaactacaggtgcactggctcggcgagagccgaacgcaagctacgtgggaagccgaggaggaaatccagcgaggagcggaggaggcgctgtacgcgtattggagggctcggggagggcgccagagcgtgctcttccacaagcccaggaaccccccaaccgagaagtatcatgtcttcaagctgttacggcacaaaaaacagcaagggagcctccgattagaggttcaatgggttggccattcgaccgaagcccacgagaccacaatggagcccgagagcaagatcaggagcatcgccccgacactattagacgagtattggaggaaagccggtggccgtgcatgttgcctcgcggcgcggagtagataggaaaacccgcgtccagtaggcagggatgctacaacgattcctccattagaggccggagtgtcatagaagacagtagcatgtgcccaataaatattgttgataaaccataggacctttgccattggccccctcggcattcgcgcaccgtgacgtaatagtagtgcagcgatg

SEQ ID NO: 37575 - DNA, 2742 bp, Muscodor strobelii
  misc_feature: SGI cDNA ID NO. 573042
  misc_feature: Encodes the peptide sequence at SEQ ID NO 37576
atggctgcccccaacgatggacagggcgaataccccccgcagcaatacggccaagatgctcagtacggcgcctacgatgaccagggcgctcccgcgcaacacgcccctgcagacaccggcaagaagaagaagagaggctatgccacgcaggcgttcgagtttggcagcggcgccaatgctgctgctggcggtgccccggcccccggcatgccgcccatgcctgggggttatggtggatatcagtcgccaggcttcgaacagcccgcctacggtgctccggcccctggcatgtacgatgctcagcaaccgtctccccaacaaccagcagctggtgggtatcagtcgcctgcaccctactacacaggtgctgccgccgccggcatgggccctctcaccgccaacatgtcgggcatgagccttggtcctcagcccggagcacaaccggcacagggccagcagggccagcaacagccccgtctggctctgaaccagctctatcccactgatctgaataaccagcctttcaacgtctccgagctggatctacctcctcctccatgcattctcccccctaatgctagcgttacccagtcaccacatgctaattgcccgcctaaatacgttcgatctacccttaatgcggtgcctactacacactccctcttgaagaagtccaagcttcctttctccctcgtcatccagccattcgctgctctgcatgatagcgacgacaacgtgcccgtggtgcaagaccaggtcattgcgcgatgccgaagatgcaggacatacatcaacccttacgtcgtgccttttgattgggatgccgccacccagaagagtgtcaaccgatgggatagacacgagctgaaccacgccgttgtcgagttcattgctccccaggagtacatggtccgcccgccccagcctcttgtctaccttttcctgtttgacgtgagctacgcctctgtgtcgactggcctacttgccacgagcgctcggaccatactggatagtcttaacaggatacctaatgccgatcgccgaacgcgccttggattcatcgccgtcgactcgagtctccactacttctctgtccccaaggacgaggatgagaacggcgagacaagtatgctcgtcgtgagtgacttggaggagccgttcttgccggtaccgcacgatcttctggtccctctgactgagagccggacaagcatcgagaacttcttgaccaaactgcccgaaatgttccagaacaaccagaacaacgggtcatgtatgggctcggcattgaaggcaggccacaagctcatctcgccactaggcgggaaaatcgtggtcttgagtgcatcgctccccaacatgggtaccggcaagctcgaaatgcgtgaggacaagaagctcttgggcacttctaaggaaagcggtcttttgcaaacagccaatagtttctacaagtccttcgcagtcgagtgttcaaagaaccaggtgtctatcgatatgtttctattctcgtcacagtatcaagatgtagcctcgttgagcaatctccctcgctataccggtggtcaaacctggttttatccaggcttcaacgccgggcgcgcggaagacgccatcaaatttgcgtccgagttcagtgacttcttgtcttcggagatcggtctcgaggctgttcttcgtgttcgtgcttcgactgggctgcgcatgaacaccttttacggcaatttcttcaacagatcctccgacctttgcgctttcccggctttcccgcgtgatcaatgctatgttgttgaagtggctatcgatgaaaccttgcagaagaacttcatctgtctccaggcaggcgtgctctacacgacatgcaatggagagcggcgcattcgtgtcatgaccctgtctctccctaccactactaacctggcagacatctacgcttctgcggaccagtgcgccatcaccacctttttcagtcacaaggctgttgagagggcgctgggcagtggattagatgcggcccgtgatgccttgcaagggaagatcattgaactattgcagacatttaagaaggaacttggtggcggtagtatgggcggcggcggcatgcaattcccagcgaatctacgcggcctacctgtcctgttcttgggattgatgaagaacgtcggtttgcggcgatcggcgcagatcccgtctgatctgaggtcggcggcgctatgccaactatctacactacccttgccattgctcatgcagtacatctatcctcgactttactcgctccacgacatgccggacaacgcaggtgtacctgatccagaaaccagtcagattgttctgccaccgcctttaaacctgtcatcagaacgctttgtatcatatggtctctatctcattgatgatggccagacacagttcctgtggatcggacgagatgcggtaccgcagttgctggccgacgtttttggcgtccaagacaggtcacaactccgtgtgggcaagagtacgttacccgagctggataacgactttaatgagcgagtgcgagcggtcgtgcacaagagcagggaccacctcgcgcgtggcgtcggtagtgtcattgtgcctcatctttacatagtccgagaggatggcgagccaagtctgaagctgtgggcccagacattactagtagaggatcgtgcagatcaagccatgagtcttgctcagtggatgggctccctgagggagaaagtcatgcaatag

SEQ ID NO: 37576 - protein, 913 aa, Muscodor strobelii
  misc_feature: SGI Peptide ID NO. 573042
  misc_feature (776)..(851): Pfam Id: PF00626 Pfam Desc: Gelsolin repeat
  misc_feature (554)..(637): Pfam Id: PF08033 Pfam Desc: Sec23/Sec24 beta-sandwich domain
  misc_feature (649)..(753): Pfam Id: PF04815 Pfam Desc: Sec23/Sec24 helical domain
  misc_feature (307)..(549): Pfam Id: PF04811 Pfam Desc: Sec23/Sec24 trunk domain
  misc_feature (38)..(911): NCBI GI: 116179626 Blast Desc: conserved [Chaetomium globosum CBS 148.51] gi|121792314|sp|Q2HH63.1|SEC24_CHAGB RecName: Full=Protein transport protein SEC24 gi|88184738|gb|EAQ92206.1| conserved CBS
  misc_feature (1)..(913): NCBI GI: 85093531 Blast Desc: NCU02391 [Neurospora crassa OR74A] gi|74628666|sp|Q7S4P3.1|SEC24_NEUCR RecName: Full=Protein transport protein sec-24 gi|28921161|gb|EAA30475.1| NCU02391
  misc_feature (1)..(913): NCBI GI: 145602672 Blast Desc: MGG_09564 [Magnaporthe grisea 70-15] gi|158514093|sp|A4QUL1.1|SEC24_MAGGR RecName: Full=Protein transport protein SEC24 gi|145011067|gb|EDJ95723.1| MGG_09564
  misc_feature (1)..(911): NCBI GI: 154294345 Blast Desc: BC1G_13945 [Botryotinia fuckeliana B05.10] gi|150844784|gb|EDN19977.1| BC1G_13945 [Botryotinia fuckeliana B05.10]
  misc_feature (3)..(913): NCBI GI: 189091816 Blast Desc: [Podospora anserina] gi|188219261|emb|CAP49241.1| protein product [Podospora anserina]
  misc_feature (3)..(911): NCBI GI: 74629365 Blast Desc: SEC24_PODAN RecName: Full=Protein transport protein SEC24 gi|27803018|emb|CAD60721.1| protein product [Podospora anserina]
  misc_feature (1)..(913): NCBI GI: 46124013 Blast Desc: FG06384.1 [Gibberella zeae PH-1]
  misc_feature (1)..(911): NCBI GI: 156039455 Blast Desc: SS1G_11864 [Sclerotinia sclerotiorum 1980] gi|154697601|gb|EDN97339.1| SS1G_11864 [Sclerotinia sclerotiorum 1980]
  misc_feature (1)..(913): NCBI GI: 256732885 Blast Desc: [Nectria haematococca mpVI 77-13-4]
  misc_feature (1)..(911): NCBI GI: 121700142 Blast Desc: protein transport protein Sec24, [Aspergillus clavatus NRRL 1] gi|158512640|sp|A1CUC3.1|SEC24_ASPCL RecName: Full=Protein transport protein sec24 gi|119396478|gb|EAW06910.1|
MAAPNDGQGEYPPQQYGQDAQYGAYDDQGAPAQHAPADTGKKKKRGYATQAFEFGSGANAAAGGAPAPGMPPMPGGYGGYQSPGFEQPAYGAPAPGMYDAQQPSPQQPAAGGYQSPAPYYTGAAAAGMGPLTANMSGMSLGPQPGAQPAQGQQGQQQPRLALNQLYPTDLNNQPFNVSELDLPPPPCILPPNASVTQSPHANCPPKYVRSTLNAVPTTHSLLKKSKLPFSLVIQPFAALHDSDDNVPVVQDQVIARCRRCRTYINPYVVPFDWDAATQKSVNRWDRHELNHAVVEFIAPQEYMVRPPQPLVYLFLFDVSYASVSTGLLATSARTILDSLNRIPNADRRTRLGFIAVDSSLHYFSVPKDEDENGETSMLVVSDLEEPFLPVPHDLLVPLTESRTSIENFLTKLPEMFQNNQNNGSCMGSALKAGHKLISPLGGKIVVLSASLPNMGTGKLEMREDKKLLGTSKESGLLQTANSFYKSFAVECSKNQVSIDMFLFSSQYQDVASLSNLPRYTGGQTWFYPGFNAGRAEDAIKFASEFSDFLSSEIGLEAVLRVRASTGLRMNTFYGNFFNRSSDLCAFPAFPRDQCYVVEVAIDETLQKNFICLQAGVLYTTCNGERRIRVMTLSLPTTTNLADIYASADQCAITTFFSHKAVERALGSGLDAARDALQGKIIELLQTFKKELGGGSMGGGGMQFPANLRGLPVLFLGLMKNVGLRRSAQIPSDLRSAALCQLSTLPLPLLMQYIYPRLYSLHDMPDNAGVPDPETSQIVLPPPLNLSSERFVSYGLYLIDDGQTQFLWIGRDAVPQLLADVFGVQDRSQLRVGKSTLPELDNDFNERVRAVVHKSRDHLARGVGSVIVPHLYIVREDGEPSLKLWAQTLLVEDRADQAMSLAQWMGSLREKVMQ

SEQ ID NO: 37577 - DNA, 2903 bp, Muscodor strobelii
  misc_feature: SGI EST ID NO. CUFF.89896.0
  misc_feature: Variant of the nucleotide sequence at SEQ ID NO 37575
aggggttatggtggatatcagtcgccaggcttcgaacagcccgcctacggtgctccggcccctggcatgtacgatgctcagcaaccgtctccccaacaaccagcagctggtgggtatcagtcgcctgcaccctactacacaggtgctgccgccgccggcatgggccctctcaccgccaacatgtcgggcatgagccttggtcctcagcccggagcacaaccggcacagggccagcagggccagcaacagccccgtctggctctgaaccagctctatcccactgatctgaataaccagcctttcaacgtctccgagctggatctacctcctcctccatgcattctcccccctaatgctagcgttacccagtcaccacatgctaattgcccgcctaaatacgttcgatctacccttaatgcggtgcctactacacactccctcttgaagaagtccaagcttcctttctccctcgtcatccagccattcgctgctctgcatgatagcgacgacaacgtgcccgtggtgcaagaccaggtcattgcgcgatgccgaagatgcaggacatacatcaacccttacgtcgtgtttctcgaccaaggccaccgctggagatgcaacatgtgcaatctcaccaacgacgtgccccaggccttttgattgggatgccgccacccagaagagtgtcaaccgatgggatagacacgagctgaaccacgccgttgtcgagttcattgctccccaggagtacatggtccgcccgccccagcctcttgtctaccttttcctgtttgacgtgagctacgcctctgtgtcgactggcctacttgccacgagcgctcggaccatactggatagtcttaacaggatacctaatgccgatcgccgaacgcgccttggattcatcgccgtcgactcgagtctccactacttctctgtccccaaggacgaggatgagaacggcgagacaagtatgctcgtcgtgagtgacttggaggagccgttcttgccggtaccgcacgatcttctggtccctctgactgagagccggacaagcatcgagaacttcttgaccaaactgcccgaaatgttccagaacaaccagaacaacgggtcatgtatgggctcggcattgaaggcaggccacaagctcatctcgccactaggcgggaaaatcgtggtcttgagtgcatcgctccccaacatgggtaccggcaagctcgaaatgcgtgaggacaagaagctcttgggcacttctaaggaaagcggtcttttgcaaacagccaatagtttctacaagtccttcgcagtcgagtgttcaaagaaccaggtgtctatcgatatgtttctattctcgtcacagtatcaagatgtagcctcgttgagcaatctccctcgctataccggtggtcaaacctggttttatccaggcttcaacgccgggcgcgcggaagacgccatcaaatttgcgtccgagttcagtgacttcttgtcttcggagatcggtctcgaggctgttcttcgtgttcgtgcttcgactgggctgcgcatgaacaccttttacggcaatttcttcaacagatcctccgacctttgcgctttcccggctttcccgcgtgatcaatgctatgttgttgaagtggctatcgatgaaaccttgcagaagaacttcatctgtctccaggcaggcgtgctctacacgacatgcaatggagagcggcgcattcgtgtcatgaccctgtctctccctaccactactaacctggcagacatctacgcttctgcggaccagtgcgccatcaccacctttttcagtcacaaggctgttgagagggcgctgggcagtggattagatgcggcccgtgatgccttgcaagggaagatcattgaactattgcagacatttaagaaggaacttggtggcggtagtatgggcggcggcggcatgcaattcccagcgaatctacgcggcctacctgtcctgttcttgggattgatgaagaacgtcggtttgcggcgatcggcgcagatcccgtctgatctgaggtcggcggcgctatgccaactatctacactacccttgccattgctcatgcagtacatctatcctcgactttactcgctccacgacatgccggacaacgcaggtgtacctgatccagaaaccagtcagattgttctgccaccgcctttaaacctgtcatcagaacgctttgtatcatatggtctctatctcattgatgatggccagacacagttcctgtggatcggacgagatgcggtaccgcagttgctggccgacgtttttggcgtccaagacaggtcacaactccgtgtgggcaagagtacgttacccgagctggataacgactttaatgagcgagtgcgagcggtcgtgcacaagagcagggaccacctcgcgcgtggcgtcggtagtgtcattgtgcctcatctttacatagtccgagaggatggcgagccaagtctgaagctgtgggcccagacattactagtagaggatcgtgcagatcaagccatgagtcttgctcagtggatgggctccctgagggagaaagtcatgcaatagaaggttcgaatgataggggtacctagaaatcttaggcatggctataaaagctgccgttgtggaaaataaacaagaacatatgagagccgctccaacgaagtccaaatgatcgatgataatagtgatgtatgacgaatctcttgacatcggcctttgttaagagtctggaggtcttagagcttggctgccgaacttgccgatatgtgtgctgtggttcctagcgaatcgacctatccgagtcgagggggcgtcccggtcggttaggtaggtagacaacaatgcatatttgcttaattatagacaccatgttggttcgcga

SEQ ID NO: 37578 - DNA, 1068 bp, Muscodor strobelii
  misc_feature: SGI cDNA ID NO. 573043
  misc_feature: Elevated expression when VOC is produced
  misc_feature: Encodes the peptide sequence at SEQ ID NO 37579
atgtctaggtccaacgctccaaacccttcggggtcccgaaagatttctttcaatgtcagcgagcagtatgacattcaggatgtggttggcgaaggcgcctacggcgtcgtttgctcggcgatacacaagccctcggggcagaaagtagcgatcaagaagataacaccttttgatcactccatgttctgtctgagaacactccgagaaatgaagctgctccgatacttcaatcatgagaacatcatttccatcttggacattcaaaaacctcggaattatgagtcctttcaagaggtttatctgatccaagaattaatggagactgacatgcatcgcgttattcgcacacaagatctctcggatgatcattgccagtatttcatctaccagaccctgcgcgctctcaaggcgatgcattctgcgaatgttttgcaccgagatctcaagcccagcaatctgctattgaacgctaactgcgatctcaaagtctgtgattttggtcttgcaagatcggctgcgtcgcaggaggacaactcgggattcatgaccgaatatgttgccactcgttggtaccgcgcaccggagattatgttgacatttaaggagtacacaaaggcgattgatgtatggtcggttggttgcatcttggccgagatgttaagcggcaagcccctgtttcctggaaaggactaccaccaccaattgacactgattttggacgtactgggaacccctactatggaggactattacggaatcaaatcgagacgtgctagggaatacatccgatctcttccgttcaagaagaaggtgccattcagaaccttgttccccaagacgtctgatctggcgctcgatctcctggagaaacttctagccttcaacccggttaagcgcatcacggttgaagacgctctgaagcacccatacctcgagccataccatgaccccgaggatgagcccacggctccacccattcccgaggaattcttcgacttcgacaagcacaaggacaatctcagcaaagaacagcttaagcagctcatataccaagagatcatgcggtag

SEQ ID NO: 37579 - protein, 355 aa, Muscodor strobelii
  misc_feature: SGI Peptide ID NO. 573043
  misc_feature (23)..(311): Pfam Id: PF00069 Pfam Desc: Protein kinase domain
  misc_feature (23)..(85): Pfam Id: PF07714 Pfam Desc: Protein tyrosine kinase
  misc_feature (139)..(264): Pfam Id: PF07714 Pfam Desc: Protein tyrosine kinase
  misc_feature (10)..(355): NCBI GI: 119194681 Blast Desc: mitogen-activated protein kinase [Coccidioides immitis RS] gi|240105207|gb|EER23400.1| mitogen-activated protein kinase, [Coccidioides posadasii C735 delta SOWgp]
  misc_feature (7)..(355): NCBI GI: 258567994 Blast Desc: mitogen-activated protein kinase [Uncinocarpus reesii 1704] gi|237906187|gb|EEP80588.1| mitogen-activated protein kinase [Uncinocarpus reesii 1704]
  misc_feature (10)..(355): NCBI GI: 226293381 Blast Desc: mitogen-activated protein kinase [Paracoccidioides brasiliensis Pb18]
  misc_feature (7)..(355): NCBI GI: 70992623 Blast Desc: MAP kinase MpkB [Aspergillus fumigatus Af293] gi|66848793|gb|EAL89122.1| MAP kinase MpkB [Aspergillus fumigatus Af293] gi|159124730|gb|EDP49848.1| MAP kinase MpkB/Fus3 fumigatus
  misc_feature (1)..(355): NCBI GI: 238840750 Blast Desc: mitogen-activated protein kinase [Microsporum canis CBS 113480]
  misc_feature (7)..(355): NCBI GI: 51968308 Blast Desc: mitogen-activated protein kinase [Bipolaris oryzae]
  misc_feature (7)..(355): NCBI GI: 6224710 Blast Desc: AF178977_1 mitogen-activated protein kinase [Cochliobolus heterostrophus]
  misc_feature (10)..(355): NCBI GI: 154277902 Blast Desc: mitogen-activated protein kinase [Ajellomyces capsulatus NAm1] gi|150413368|gb|EDN08751.1| mitogen-activated protein kinase [Ajellomyces capsulatus NAm1]
  misc_feature (7)..(355): NCBI GI: 169770233 Blast Desc: [Aspergillus oryzae RIB40] gi|238487378|ref|XP_002374927.1| MAP kinase FUS3/KSS1 [Aspergillus flavus NRRL3357] gi|83767445|dbj|BAE57584.1| protein
  misc_feature (7)..(355): NCBI GI: 145241049 Blast Desc: An08g10670 [Aspergillus niger] gi|134077700|emb|CAK45740.1| protein product [Aspergillus niger]
  misc_feature (1)..(355): SWISSPROT Homolog: EC 2.7.11.24 Mitogen-activated protein kinase
  misc_feature: Useful for introducing or modulating the production of volatile compounds
MSRSNAPNPSGSRKISFNVSEQYDIQDVVGEGAYGVVCSAIHKPSGQKVAIKKITPFDHSMFCLRTLREMKLLRYFNHENIISILDIQKPRNYESFQEVYLIQELMETDMHRVIRTQDLSDDHCQYFIYQTLRALKAMHSANVLHRDLKPSNLLLNANCDLKVCDFGLARSAASQEDNSGFMTEYVATRWYRAPEIMLTFKEYTKAIDVWSVGCILAEMLSGKPLFPGKDYHHQLTLILDVLGTPTMEDYYGIKSRRAREYIRSLPFKKKVPFRTLFPKTSDLALDLLEKLLAFNPVKRITVEDALKHPYLEPYHDPEDEPTAPPIPEEFFDFDKHKDNLSKEQLKQLIYQEIMR

SEQ ID NO: 37580 - DNA, 2484 bp, Muscodor strobelii
  misc_feature: SGI EST ID NO. CUFF.90201.0
  misc_feature: Variant of the nucleotide sequence at SEQ ID NO 37578
gataattaagaacgacagtcgatcttgaactctctcgcactgcgaatctcactacggcgctttttgcaccaatactactgtacatcattcggtattctctcatcttccaccacggagtacctatacctggacactgagtctggccttcaacagaacaaccccccgtagacttggtgtccattctggcacggaccctgtcttttctgtctcacaaatctaaccctcctggcgcagattccctggtgccagggcaaggcgacagggaaaagcaggtcacctcgcgcatagcggggtcctggccccatcttctccagtcggcggtccagtcgagccagtctaagtcgcggctgtcacagagcaggggacgtggtagcaccctttttcgcctgtctgggcataccgtgtggtgctcctcatccaaccgactgctctcgtctgcccgcgttggaacaaagagctctttagaaccaagcccaaccccaaatccagtgccagacgagccagagttgtcacccgaagagcatctgcttgctctagtgtcctgtaagctgctcctgcttgggaaattggaccgcatttctcgttcttttacacctttcacacctgttccacctccggaactccaacctgcagccggacttctctcacaataccccgcctcaggtctctcaaccgcactcaaccacttctcgcgacctgtcaaaccaccacctcaattcccgacagtcattacacctgcgcgtctcagccgacccaaacggccggcctcatttcattcgatctacgttctggttgccgactccaagtatagcggtctagtttgttgcccagtgcctggctttcttcattgacgacaaagacggtttacggccatcaccatcagctattcaaagcgagatcagaagcggaacaacaagagcaattgtgtctatcgttcttcaacctatataccgggactcgtgaggcgatctgtcgtcccaattcttcggtctctacctctttctcgggaaggatataggcaatcttatacccccagcgcgctgattgcttgaacctcgtacaccgttttcaaagcgttgcggtcttcttggccattgtctcctcggttttcgtggattcgcagagcgggccactttgttctacaacaatgtctaggtccaacgctccaaacccttcggggtcccgaaagatttctttcaatgtcagcgagcagtatgacattcaggatgtggttggcgaaggcgcctacggcgtcgtttgctcggcgatacacaagccctcggggcagaaagtagcgatcaagaagataacaccttttgatcactccatgttctgtctgagaacactccgagaaatgaagctgctccgatacttcaatcatgagaacatcatttccatcttggacattcaaaaacctcggaattatgagtcctttcaagaggtttatctgatccaagaattaatggagactgacatgcatcgcgttattcgcacacaagatctctcggatgatcattgccagtatttcatctaccagaccctgcgcgctctcaaggcgatgcattctgcgaatgttttgcaccgagatctcaagcccagcaatctgctattgaacgctaactgcgatctcaaagtctgtgattttggtcttgcaagatcggctgcgtcgcaggaggacaactcgggattcatgaccgaatatgttgccactcgttggtaccgcgcaccggagattatgttgacatttaaggagtacacaaaggcgattgatgtatggtcggttggttgcatcttggccgagatgttaagcggcaagcccctgtttcctggaaaggactaccaccaccaattgacactgattttggacgtactgggaacccctactatggaggactattacggaatcaaatcgagacgtgctagggaatacatccgatctcttccgttcaagaagaaggtgccattcagaaccttgttccccaagacgtctgatctggcgctcgatctcctggagaaacttctagccttcaacccggttaagcgcatcacggttgaagacgctctgaagcacccatacctcgagccataccatgaccccgaggatgagcccacggctccacccattcccgaggaattcttcgacttcgacaagcacaaggacaatctcagcaaagaacagcttaagcagctcatataccaagagatcatgcggtaggatcacatgaacggaaggaaagtggataaaccggttcccaagtcttgtctcatattttgatgttgtcttgcgtttttttagctagtttgtcttccctggaagtaagtagatacgacctcgatgtgtcattgcattttcagtagcttcagtaggtagatctagggtcaatgtgacactacattctagcgacttcattggtctttagcggcttcttgtgatatctgctattggcggaattgttgttatggttcattgaataatgaataaag

SEQ ID NO: 37581 - DNA, 2013 bp, Muscodor strobelii
  misc_feature: SGI cDNA ID NO. 573044
  misc_feature: Elevated expression when VOC is produced
  misc_feature: Encodes the peptide sequence at SEQ ID NO 37582
atgagcagctcgtacgacgagatactcgctgcctgcgagaagtcaatatcatacccaactgagctcttgcgctctagactctttaaatatgccctactggcatatcatgagttactggatgagcgagactcccatgtattccgaaaagaatcctcttcgaagcgaccttacaaaattcggatttgggactactacgatggtgaacgaggatttcggtcttcacctcacatttgtgaatctgttgcggatatacgtcaatatctcattaacaccaatcgtaaagatcctagacatcgacatgtatttctccggtcaccacactcgcgtgattgccttaacttgtcacgagaaatgttctgctttataatgaactttcatcaagttatggcccaattcttagatattgtactgaatttcggcaaaacccccggccagattatacccacggcatcccagcgctgcaggttttattttgaagatttcctggacacgcaggacgctgaacgggtttccgttccacaactgggccgctcgggactcgaaacgcggcactgctataacttgtgggcggtagaaagttcccaagcacaagaaaaacgggctccatgggagatccgacaggctggcatatatcattctttcgacctagaaaatgggaagtcaacatggattcatgtcaaagccaatgataacctagaagtgcgaattaaggaggctagcatagcttttcaacgccgacatgccaagtactctcagttacagggatcattttcaactacactttcgacacatatcatcatgttcgagtggtgtagcgagaactggtgccggtatctgaattactgggaagccgaacttgaaagggtgttaatcaaaatcaagaaagcaccaatcaataaagccgagaagcttcttacagatgcaaagcaattcctggctgatatggggccaccttcgcgccaaggttccttctctccaaacatgaagccagctacggcttcaagtagggtgacttcttggcggtcacttagaagtcctttatcaccaattcagacatcaacgaaatcgatgtggtctaatctaccatcgcccatatcaccgacaacaacaacatttggcaatatcatcactgaaaaatctggcaatgatcagactccagatctcgaacaaggtgaagaccctctaagggcactcaatgtacttcaggagttcaaatttgaagatctccaatacctccaccacatagcatcgaaacttcatgaggctgatatggttatgaacctcaacagcgagattattgttgaagtgaagaactatcttgagagagtagcacagagttctcaggatattgaggacggatgcaagggagcaatcgctgatttctcgcaacgtacaacggctatcctgcgaggtcttaacattgaccgagcccgtatctcgactctggctgctctgcttgaagacggcaaggcccttttcgatgcgacaacacagtttcgcaatatagaatttagcatgttatcagccgtgaggatggagaggatgacagaagacatgcatgaatcaaccaagaatatggaagaaatagcaggggtaacaggaaaagaaacctcatcgatgcatacgattacattagtaacgctcgtgttcctacccgggacatttgtagctgtaagatatgccataccctatatatgggaggctgcaaacaagagtctaactactactaactaccagacatttctcggcgctggcttctaccagtggccggacggaaagaatggggatgatgttgcagcgtttccgttgtttcgacccgcgtattttgaattatttgcagccattacatttcctcttactttcgttactgttatattttggtttctaggaccacttgtgtggcggcatgtctcacatactaagactctcaaactttggcgcaaaggtcgtcaggaaaatggacatgtagatgaagaggcgcagctaacatcgcttggtataacacaaccctag

SEQ ID NO: 37582 - protein, 670 aa, Muscodor strobelii
  misc_feature: SGI Peptide ID NO. 573044
  misc_feature (1)..(669): NCBI GI: 171679401 Blast Desc: protein product [Podospora anserina] gi|170939326|emb|CAP64554.1| protein product [Podospora anserina]
  misc_feature (1)..(627): NCBI GI: 212537493 Blast Desc: PMAA_093510 [Penicillium marneffei ATCC 18224] gi|210068644|gb|EEA22735.1| PMAA_093510 [Penicillium marneffei ATCC 18224]
  misc_feature (7)..(627): NCBI GI: 116197192 Blast Desc: CHGG_05194 [Chaetomium globosum CBS 148.51] gi|88181107|gb|EAQ88575.1| CHGG_05194 [Chaetomium globosum CBS 148.51]
  misc_feature (85)..(629): NCBI GI: 256723607 Blast Desc: NECHADRAFT_52101 [Nectria haematococca mpVI 77-13-4]
  misc_feature (104)..(629): NCBI GI: 46111065 Blast Desc: FG02414.1 [Gibberella zeae PH-1]
  misc_feature (4)..(558): NCBI GI: 46109784 Blast Desc: FG01774.1 [Gibberella zeae PH-1]
  misc_feature (101)..(492): NCBI GI: 145613746 Blast Desc: MGG_01394 [Magnaporthe grisea 70-15] gi|145020776|gb|EDK04905.1| MGG_01394 [Magnaporthe grisea 70-15]
  misc_feature (203)..(557): NCBI GI: 261353792 Blast Desc: conserved [Verticillium albo-atrum VaMs.102]
  misc_feature (119)..(621): NCBI GI: 256729537 Blast Desc: NECHADRAFT_84216 [Nectria haematococca mpVI 77-13-4]
  misc_feature (155)..(629): NCBI GI: 46122979 Blast Desc: FG05867.1 [Gibberella zeae PH-1]
  misc_feature: Useful for introducing or modulating the production of volatile compounds
MSSSYDEILAACEKSISYPTELLRSRLFKYALLAYHELLDERDSHVFRKESSSKRPYKIRIWDYYDGERGFRSSPHICESVADIRQYLINTNRKDPRHRHVFLRSPHSRDCLNLSREMFCFIMNFHQVMAQFLDIVLNFGKTPGQIIPTASQRCRFYFEDFLDTQDAERVSVPQLGRSGLETRHCYNLWAVESSQAQEKRAPWEIRQAGIYHSFDLENGKSTWIHVKANDNLEVRIKEASIAFQRRHAKYSQLQGSFSTTLSTHIIMFEWCSENWCRYLNYWEAELERVLIKIKKAPINKAEKLLTDAKQFLADMGPPSRQGSFSPNMKPATASSRVTSWRSLRSPLSPIQTSTKSMWSNLPSPISPTTTTFGNIITEKSGNDQTPDLEQGEDPLRALNVLQEFKFEDLQYLHHIASKLHEADMVMNLNSEIIVEVKNYLERVAQSSQDIEDGCKGAIADFSQRTTAILRGLNIDRARISTLAALLEDGKALFDATTQFRNIEFSMLSAVRMERMTEDMHESTKNMEEIAGVTGKETSSMHTITLVTLVFLPGTFVAVRYAIPYIWEAANKSLTTTNYQTFLGAGFYQWPDGKNGDDVAAFPLFRPAYFELFAAITFPLTFVTVIFWFLGPLVWRHVSHTKTLKLWRKGRQENGHVDEEAQLTSLGITQP

SEQ ID NO: 37583 - DNA, 2877 bp, Muscodor strobelii
  misc_feature: SGI EST ID NO. CUFF.89951.0
  misc_feature: Variant of the nucleotide sequence at SEQ ID NO 37581
gggctatgctcccaatgtgcagaaaattgaccactcaccaagacacgagtcccaaggttgatcggacaattgatccatttgaaccaatagtttacaaggcagatcagaatgcctattcagcatgtctcatcttaccgactacgaaaggacaagttagtggaatacctcaaagcacaatttcctaaggagaccattagtgtcactgtaagtattggaagccacacacgacccggcgggagaatgcctctagtatctaacaagatcaattaggtcggtcacgatacctttgactttgaactaacaaagaacctcaccacgacccactacgatgcgattgacgacttgcgagagaagcgagaagattagagcgcaatgtgcagttctactgttgtcacccgggcgggggcacatggggtgcaggttttgaatgtttgtgtgtgtacctaccgtttttcggacccagagccctgtaattaatgtactgtaccttggggtcgaattggcgcagcgagtcaacctcttattgcgccgtactctcgtgccgagtcagatctcaattcggaaaatgtaatatacacaattgcaatgagaccatctgaaagccactacccttactcctagtcgctgtcataaattcttgctcgtcttcgccacagagcggacgccttgttgcaaaagactttcgcggagccatataggctgtcacaggattgcaatcacagccttaggttgaattctgtaagttataaagtgtgctgcagaagatgatgattgaacgtggacgagatgataagctacacgtacataggttagagatcgcatgataactgcgaagatgagcagctcgtacgacgagatactcgctgcctgcgagaagtcaatatcatacccaactgagctcttgcgctctagactctttaaatatgccctactggcatatcatgagttactggatgagcgagactcccatgtattccgaaaagaatcctcttcgaagcgaccttacaaaattcggatttgggactactacgatggtgaacgaggatttcggtcttcacctcacatttgtgaatctgttgcggatatacgtcaatatctcattaacaccaatcgtaaagatcctagacatcgacatgtatttctccggtcaccacactcgcgtgattgccttaacttgtcacgagaaatgttctgctttataatgaactttcatcaagttatggcccaattcttagatattgtactgaatttcggcaaaacccccggccagattatacccacggcatcccagcgctgcaggttttattttgaagatttcctggacacgcaggacgctgaacgggtttccgttccacaactgggccgctcgggactcgaaacgcggcactgctataacttgtgggcggtagaaagttcccaagcacaagaaaaacgggctccatgggagatccgacaggctggcatatatcattctttcgacctagaaaatgggaagtcaacatggattcatgtcaaagccaatgataacctagaagtgcgaattaaggaggctagcatagcttttcaacgccgacatgccaagtactctcagttacagggatcattttcaactacactttcgacacatatcatcatgttcgagtggtgtagcgagaactggtgccggtatctgaattactgggaagccgaacttgaaagggtgttaatcaaaatcaagaaagcaccaatcaataaagccgagaagcttcttacagatgcaaagcaattcctggctgatatggggccaccttcgcgccaaggttccttctctccaaacatgaagccagctacggcttcaagtagggtgacttcttggcggtcacttagaagtcctttatcaccaattcagacatcaacgaaatcgatgtggtctaatctaccatcgcccatatcaccgacaacaacaacatttggcaatatcatcactgaaaaatctggcaatgatcagactccagatctcgaacaaggtgaagaccctctaagggcactcaatgtacttcaggagttcaaatttgaagatctccaatacctccaccacatagcatcgaaacttcatgaggctgatatggttatgaacctcaacagcgagattattgttgaagtgaagaactatcttgagagagtagcacagagttctcaggatattgaggacggatgcaagggagcaatcgctgatttctcgcaacgtacaacggctatcctgcgaggtcttaacattgaccgagcccgtatctcgactctggctgctctgcttgaagacggcaaggcccttttcgatgcgacaacacagtttcgcaatatagaatttagcatgttatcagccgtgaggatggagaggatgacagaagacatgcatgaatcaaccaagaatatggaagaaatagcaggggtaacaggaaaagaaacctcatcgatgcatacgattacattagtaacgctcgtgttcctacccgggacatttgtagctacatttctcggcgctggcttctaccagtggccggacggaaagaatggggatgatgttgcagcgtttccgttgtttcgacccgcgtattttgaattatttgcagccattacatttcctcttactttcgttactgttatattttggtttctaggaccacttgtgtggcggcatgtctcacatactaagactctcaaactttggcgcaaaggtcgtcaggaaaatggacatgtagatgaagaggcgcagctaacatcgcttggtataacacaaccctagagttagcaatgatgatgatgatgatgatgatgatgatgatatccttgaatgctgagtcgctatgagatatctgcagtgttagatcatgtcacaaa

SEQ ID NO: 37584 - DNA, 1947 bp, Muscodor strobelii
  misc_feature: SGI cDNA ID NO. 573045
  misc_feature: Elevated expression when VOC is produced
  misc_feature: Encodes the peptide sequence at SEQ ID NO 37585
atgagcagctcgtacgacgagatactcgctgcctgcgagaagtcaatatcatacccaactgagctcttgcgctctagactctttaaatatgccctactggcatatcatgagttactggatgagcgagactcccatgtattccgaaaagaatcctcttcgaagcgaccttacaaaattcggatttgggactactacgatggtgaacgaggatttcggtcttcacctcacatttgtgaatctgttgcggatatacgtcaatatctcattaacaccaatcgtaaagatcctagacatcgacatgtatttctccggtcaccacactcgcgtgattgccttaacttgtcacgagaaatgttctgctttataatgaactttcatcaagttatggcccaattcttagatattgtactgaatttcggcaaaacccccggccagattatacccacggcatcccagcgctgcaggttttattttgaagatttcctggacacgcaggacgctgaacgggtttccgttccacaactgggccgctcgggactcgaaacgcggcactgctataacttgtgggcggtagaaagttcccaagcacaagaaaaacgggctccatgggagatccgacaggctggcatatatcattctttcgacctagaaaatgggaagtcaacatggattcatgtcaaagccaatgataacctagaagtgcgaattaaggaggctagcatagcttttcaacgccgacatgccaagtactctcagttacagggatcattttcaactacactttcgacacatatcatcatgttcgagtggtgtagcgagaactggtgccggtatctgaattactgggaagccgaacttgaaagggtgttaatcaaaatcaagaaagcaccaatcaataaagccgagaagcttcttacagatgcaaagcaattcctggctgatatggggccaccttcgcgccaaggttccttctctccaaacatgaagccagctacggcttcaagtagggtgacttcttggcggtcacttagaagtcctttatcaccaattcagacatcaacgaaatcgatgtggtctaatctaccatcgcccatatcaccgacaacaacaacatttggcaatatcatcactgaaaaatctggcaatgatcagactccagatctcgaacaaggtgaagaccctctaagggcactcaatgtacttcaggagttcaaatttgaagatctccaatacctccaccacatagcatcgaaacttcatgaggctgatatggttatgaacctcaacagcgagattattgttgaagtgaagaactatcttgagagagtagcacagagttctcaggatattgaggacggatgcaagggagcaatcgctgatttctcgcaacgtacaacggctatcctgcgaggtcttaacattgaccgagcccgtatctcgactctggctgctctgcttgaagacggcaaggcccttttcgatgcgacaacacagtttcgcaatatagaatttagcatgttatcagccgtgaggatggagaggatgacagaagacatgcatgaatcaaccaagaatatggaagaaatagcaggggtaacaggaaaagaaacctcatcgatgcatacgattacattagtaacgctcgtgttcctacccgggacatttgtagctacatttctcggcgctggcttctaccagtggccggacggaaagaatggggatgatgttgcagcgtttccgttgtttcgacccgcgtattttgaattatttgcagccattacatttcctcttactttcgttactgttatattttggtttctaggaccacttgtgtggcggcatgtctcacatactaagactctcaaactttggcgcaaaggtcgtcaggaaaatggacatgtagatgaagaggcgcagctaacatcgcttggtataacacaaccctag

SEQ ID NO: 37585 - protein, 648 aa, Muscodor strobelii
  misc_feature: SGI Peptide ID NO. 573045
  misc_feature (1)..(647): NCBI GI: 171679401 Blast Desc: protein product [Podospora anserina] gi|170939326|emb|CAP64554.1| protein product [Podospora anserina]
  misc_feature (1)..(605): NCBI GI: 212537493 Blast Desc: PMAA_093510 [Penicillium marneffei ATCC 18224] gi|210068644|gb|EEA22735.1| PMAA_093510 [Penicillium marneffei ATCC 18224]
  misc_feature (7)..(605): NCBI GI: 116197192 Blast Desc: CHGG_05194 [Chaetomium globosum CBS 148.51] gi|88181107|gb|EAQ88575.1| CHGG_05194 [Chaetomium globosum CBS 148.51]
  misc_feature (85)..(607): NCBI GI: 256723607 Blast Desc: NECHADRAFT_52101 [Nectria haematococca mpVI 77-13-4]
  misc_feature (104)..(607): NCBI GI: 46111065 Blast Desc: FG02414.1 [Gibberella zeae PH-1]
  misc_feature (4)..(573): NCBI GI: 46109784 Blast Desc: FG01774.1 [Gibberella zeae PH-1]
  misc_feature (101)..(492): NCBI GI: 145613746 Blast Desc: MGG_01394 [Magnaporthe grisea 70-15] gi|145020776|gb|EDK04905.1| MGG_01394 [Magnaporthe grisea 70-15]
  misc_feature (119)..(599): NCBI GI: 256729537 Blast Desc: NECHADRAFT_84216 [Nectria haematococca mpVI 77-13-4]
  misc_feature (203)..(557): NCBI GI: 261353792 Blast Desc: conserved [Verticillium albo-atrum VaMs.102]
  misc_feature (155)..(607): NCBI GI: 46122979 Blast Desc: FG05867.1 [Gibberella zeae PH-1]
  misc_feature: Useful for introducing or modulating the production of volatile compounds
MSSSYDEILAACEKSISYPTELLRSRLFKYALLAYHELLDERDSHVFRKESSSKRPYKIRIWDYYDGERGFRSSPHICESVADIRQYLINTNRKDPRHRHVFLRSPHSRDCLNLSREMFCFIMNFHQVMAQFLDIVLNFGKTPGQIIPTASQRCRFYFEDFLDTQDAERVSVPQLGRSGLETRHCYNLWAVESSQAQEKRAPWEIRQAGIYHSFDLENGKSTWIHVKANDNLEVRIKEASIAFQRRHAKYSQLQGSFSTTLSTHIIMFEWCSENWCRYLNYWEAELERVLIKIKKAPINKAEKLLTDAKQFLADMGPPSRQGSFSPNMKPATASSRVTSWRSLRSPLSPIQTSTKSMWSNLPSPISPTTTTFGNIITEKSGNDQTPDLEQGEDPLRALNVLQEFKFEDLQYLHHIASKLHEADMVMNLNSEIIVEVKNYLERVAQSSQDIEDGCKGAIADFSQRTTAILRGLNIDRARISTLAALLEDGKALFDATTQFRNIEFSMLSAVRMERMTEDMHESTKNMEEIAGVTGKETSSMHTITLVTLVFLPGTFVATFLGAGFYQWPDGKNGDDVAAFPLFRPAYFELFAAITFPLTFVTVIFWFLGPLVWRHVSHTKTLKLWRKGRQENGHVDEEAQLTSLGITQP

SEQ ID NO: 37586 - DNA, 2877 bp, Muscodor strobelii; identical to SEQ ID NO: 37583
  misc_feature: SGI EST ID NO. CUFF.89951.0
  misc_feature: Variant of the nucleotide sequence at SEQ ID NO 37584

SEQ ID NO: 37587 - DNA, 2742 bp, Muscodor strobelii
  misc_feature: SGI cDNA ID NO. 573046
  misc_feature: Elevated expression when VOC is produced
  misc_feature: Encodes the peptide sequence at SEQ ID NO 37588
atggcgttgaaccatcaggaccccgcatatcatcaatatactcccaggtcacgagaagatactactatatgggaaagatgccagcatttcaacgaatggcttaactcgaactacgaaaaagagtgcggcgtcgacgggaagggggaccagaatccttatgtcgcttatcataagcttcaagagtactggactgacagtaggtgtcagtccatccttggccgttttcaaggacaagttgacttcaaaactttgcgccaaagtttcctgcgggttctttcaatccttgcaaatatctccacagagacccttacatgtattcattggatcgtagatttctatcagcaagatatcgatgatcataaccttcctttgcccgagtcttcccatccacgttcgcccttcagcaacagtcatgatggacgtgaaacatggaaacggttttggaatcaccaatgggagttcatacctctccagttcaaaaatgaaaaggggctcatcgacaaggcttatgggaatggactacacgatcgtcagattgttcctatcactattgagcaagtactttacgagagccttggtaggggagctcgggtttgcaaaatccgcccccatgcggccagtggtctttcagaaaagaagtcaatcgtcatgaaagactataggaaagatcgctattcgacagaatttcagaacgaggtaacaacatataggacaattgttaacatgaggaaaaaggggacactcaatgaaaatctgtttctcgactattacggttgcttcatgcaaggcgacagctgcattctcttgatggaatatgcggagaagggtagtttgttgaccttctgggccgacccctcgcatcttcctcgaacgagacaggaagctgttaacctctggtacgaccttgagcagctcgtcacaggcttgtcattccttcatcaaggaggtcttcataagtcgagcattcaccaggatatcaaacctggtaacattttcgtatcggaaaactctctaaaacctggtcaccttctcttccggttcggagattttggtatgactagccagtctacatacgcagagaacggtgagaccactggtccgtggaacagcggaacaaaaatgtactcgtcgccagaacttgcacaaatccacgagggcgtgataatgaaccgcgaagttggctggtcatccgatgtgttttcacttggatgtgtccttctagagtttgctgtgtggatgtctttgcatgaacgtggccgcgtcgcttttgaacaagagcgtgtcaaggccacaagcgatgaccaacgattcatagatgcaggttaccaaggtgccttccacaacggttatgaattactacctatagtaaagcagaagatactcgaggtatccgccatcggccaaactgatagctcgattgcacagctatgcagtcatatgatgaatttcattcaagaacaaatgcttcaccccaaagacacgcaccgcctcacagctcagcaactaacaacgcggttcttcgaggcgttggaaaaacaccgaccttccccaatatatcctaatggggcgtcagaccctctattatctccaaacccccgagactcgtcaatgtattcgacatcatctacgcctgcaagaacgaactctaccttcaagtactatgatcaggatgtcgataggtcctcacctggaaacggaagaatgttgaataatcacaacttgcacgattattcgcatacgggtggagcaagttcaaggactgtgtcgaacgaccatccggcgattgaccaacgcctaccagagaatgtttcgacctttgaaaggtcttctgttctaacagtcccacatatagactcctctcctcatagcctgacagcttatcttaacctcggcttatctcaacaagatacgagtttgtctaacgggtatgcacaatctataccatatgactcagactctgccctcagggcaccgaatccccgaccaccccctgaagatgtgccgatagacagtgttaacaacacactgagttggatatccaaagacaaagggaagcaagcggctaagccgtcctggattttgggttctcagaacgagctaagcggtcgtgacatttacttcgtaatcgataattcggcgtccatgtcgagacattggcctagcgtaaaggctaccgcgaaagccttgctctatatcacgaagagtgttgatccagatggtgtcgatatccgtatgaccaacggggacgccaaaccaaaaaaggtgaagaatctgaagggtctctttgaggattttgggtacttcaatgcacattgtccaaaagacagccacaagcaatgtaatatggaaggcgttctctcttcgactctcaacgaggccatttctaaagccaaaccgaagcgtctatcgctcacctccaagaagatcaaagggattagtgtgtatgttttgacaaacggtatctggacactgccgcgcactaatgcagtagttggtaaagagtctggcggtgtgaaccacgccattgatactgccataaaacgcctgagagacgacaatcaaatgagggattacctcaccattcaattcatccggtttggggatgatccaataggtataagccgtacggactacttagataacgagttgaacaaggattgggacatcgtcgacactgttgattgcactggcagtgtcgagaaaatgttgataggggctttaaagggcgacatcgatgactaa

SEQ ID NO: 37588 - protein, 913 aa, Muscodor strobelii
  misc_feature: SGI Peptide ID NO. 573046
  misc_feature (256)..(410): Pfam Id: PF00069 Pfam Desc: Protein kinase domain
  misc_feature (704)..(730): Pfam Id: PF00092 Pfam Desc: von Willebrand factor type A domain
  misc_feature (30)..(887): NCBI GI: 212537495 Blast Desc: conserved [Penicillium marneffei ATCC 18224] gi|210068645|gb|EEA22736.1| conserved [Penicillium marneffei ATCC 18224]
  misc_feature (53)..(906): NCBI GI: 189204520 Blast Desc: [Pyrenophora tritici-repentis Pt-1C-BFP] gi|187985694|gb|EDU51182.1| [Pyrenophora tritici-repentis Pt-1C-BFP]
  misc_feature (47)..(912): NCBI GI: 145613748 Blast Desc: MGG_01393 [Magnaporthe grisea 70-15] gi|145020777|gb|EDK04906.1| MGG_01393 [Magnaporthe grisea 70-15]
  misc_feature (86)..(913): NCBI GI: 116197192 Blast Desc: CHGG_05194 [Chaetomium globosum CBS 148.51] gi|88181107|gb|EAQ88575.1| CHGG_05194 [Chaetomium globosum CBS 148.51]
  misc_feature (29)..(532): NCBI GI: 256723608 Blast Desc: NECHADRAFT_52172 [Nectria haematococca mpVI 77-13-4]
  misc_feature (25)..(881): NCBI GI: 46122977 Blast Desc: FG05866.1 [Gibberella zeae PH-1]
  misc_feature (29)..(457): NCBI GI: 46111063 Blast Desc: FG02413.1 [Gibberella zeae PH-1]
  misc_feature (43)..(511): NCBI GI: 256729536 Blast Desc: NECHADRAFT_84215 [Nectria haematococca mpVI 77-13-4]
  misc_feature (30)..(456): NCBI GI: 46109786 Blast Desc: FG01775.1 [Gibberella zeae PH-1]
  misc_feature (40)..(428): NCBI GI: 256734727 Blast Desc: NECHADRAFT_75267 [Nectria haematococca mpVI 77-13-4]
  misc_feature: Useful for introducing or modulating the production of volatile compounds
MALNHQDPAYHQYTPRSREDTTIWERCQHFNEWLNSNYEKECGVDGKGDQNPYVAYHKLQEYWTDSRCQSILGRFQGQVDFKTLRQSFLRVLSILANISTETLTCIHWIVDFYQQDIDDHNLPLPESSHPRSPFSNSHDGRETWKRFWNHQWEFIPLQFKNEKGLIDKAYGNGLHDRQIVPITIEQVLYESLGRGARVCKIRPHAASGLSEKKSIVMKDYRKDRYSTEFQNEVTTYRTIVNMRKKGTLNENLFLDYYGCFMQGDSCILLMEYAEKGSLLTFWADPSHLPRTRQEAVNLWYDLEQLVTGLSFLHQGGLHKSSIHQDIKPGNIFVSENSLKPGHLLFRFGDFGMTSQSTYAENGETTGPWNSGTKMYSSPELAQIHEGVIMNREVGWSSDVFSLGCVLLEFAVWMSLHERGRVAFEQERVKATSDDQRFIDAGYQGAFHNGYELLPIVKQKILEVSAIGQTDSSIAQLCSHMMNFIQEQMLHPKDTHRLTAQQLTTRFFEALEKHRPSPIYPNGASDPLLSPNPRDSSMYSTSSTPARTNSTFKYYDQDVDRSSPGNGRMLNNHNLHDYSHTGGASSRTVSNDHPAIDQRLPENVSTFERSSVLTVPHIDSSPHSLTAYLNLGLSQQDTSLSNGYAQSIPYDSDSALRAPNPRPPPEDVPIDSVNNTLSWISKDKGKQAAKPSWILGSQNELSGRDIYFVIDNSASMSRHWPSVKATAKALLYITKSVDPDGVDIRMTNGDAKPKKVKNLKGLFEDFGYFNAHCPKDSHKQCNMEGVLSSTLNEAISKAKPKRLSLTSKKIKGISVYVLTNGIWTLPRTNAVVGKESGGVNHAIDTAIKRLRDDNQMRDYLTIQFIRFGDDPIGISRTDYLDNELNKDWDIVDTVDCTGSVEKMLIGALKGDIDD

SEQ ID NO: 37589 - DNA, 4015 bp, Muscodor strobelii
  misc_feature: SGI EST ID NO. CUFF.89924.0
  misc_feature: Variant of the nucleotide sequence at SEQ ID NO 37587
ttgtaaggcaacaaagtaggctgggaccctggctgaatgctacatgtgtaggtaggtatgtagacaaccaactctctgagggccgattgtccgtgtccagttcgtcccatcaacaattggatgcgtgatatgcagctcaaacttatttaataataaaccggtcagctctaatcccatcctcatgatacggcgcctttcttgcgacacttaaccctttcacgccctgctgctgtatttcaaagctgcttctggacaagcagctgtgacgagtaataactccttttccctgtcgatcccgcaatctaattcacgctgccaatggcggtcgttctttagattctcgtattgagacttcgccttcatatatattatcgcagtctttttgaccttccaaaacctatcaggcggcacgtgtcgcctccgtcgttcttttcttaattgttcacgcgttcctcgttcctggctcccaccgttctctaccatggcgttgaaccatcaggaccccgcatatcatcaatatactcccaggtcacgagaagatactactatatgggaaagatgccagcatttcaacgaatggcttaactcgaactacgaaaaagagtgcggcgtcgacgggaagggggaccagaatccttatgtcgcttatcataagcttcaagagtactggactgacagtaggtgtcagtccatccttggccgttttcaaggacaagttgacttcaaaactttgcgccaaagtttcctgcgggttctttcaatccttgcaaatatctccacagagacccttacatgtattcattggatcgtagatttctatcagcaagatatcgatgatcataaccttcctttgcccgagtcttcccatccacgttcgcccttcagcaacagtcatgatggacgtgaaacatggaaacggttttggaatcaccaatgggagttcatacctctccagttcaaaaatgaaaaggggctcatcgacaaggcttatgggaatggactacacgatcgtcagattgttcctatcactattgagcaagtactttacgagagccttggtaggggagctcgggtttgcaaaatccgcccccatgcggccagtggtctttcagaaaagaagtcaatcgtcatgaaagactataggaaagatcgctattcgacagaatttcagaacgaggtaacaacatataggacaattgttaacatgaggaaaaaggggacactcaatgaaaatctgtttctcgactattacggttgcttcatgcaaggcgacagctgcattctcttgatggaatatgcggagaagggtagtttgttgaccttctgggccgacccctcgcatcttcctcgaacgagacaggaagctgttaacctctggtacgaccttgagcagctcgtcacaggcttgtcattccttcatcaaggaggtcttcataagtcgagcattcaccaggatatcaaacctggtaacattttcgtatcggaaaactctctaaaacctggtcaccttctcttccggttcggagattttggtatgactagccagtctacatacgcagagaacggtgagaccactggtccgtggaacagcggaacaaaaatgtactcgtcgccagaacttgcacaaatccacgagggcgtgataatgaaccgcgaagttggctggtcatccgatgtgttttcacttggatgtgtccttctagagtttgctgtgtggatgtctttgcatgaacgtggccgcgtcgcttttgaacaagagcgtgtcaaggccacaagcgatgaccaacgattcatagatgcaggttaccaaggtgccttccacaacggttatgaattactacctatagtaaagcagaagatactcgaggtatccgccatcggccaaactgatagctcgattgcacagctatgcagtcatatgatgaatttcattcaagaacaaatgcttcaccccaaagacacgcaccgcctcacagctcagcaactaacaacgcggttcttcgaggcgttggaaaaacaccgaccttccccaatatatcctaatggggcgtcagaccctctattatctccaaacccccgagactcgtcaatgtattcgacatcatctacgcctgcaagaacgaactctaccttcaagtactatgatcaggatgtcgataggtcctcacctggaaacggaagaatgttgaataatcacaacttgcacgattattcgcatacgggtggagcaagttcaaggactgtgtcgaacgaccatccggcgattgaccaacgcctaccagagaatgtttcgacctttgaaaggtcttctgttctaacagtcccacatatagactcctctcctcatagcctgacagcttatcttaacctcggcttatctcaacaagatacgagtttgtctaacgggtatgcacaatctataccatatgactcagactctgccctcagggcaccgaatccccgaccaccccctgaagatgtgccgatagacagtgttaacaacacactgagttggatatccaaagacaaagggaagcaagcggctaagccgtcctggattttgggttctcagaacgagctaagcggtcgtgacatttacttcgtaatcgataattcggcgtccatgtcgagacattggcctagcgtaaaggctaccgcgaaagccttgctctatatcacgaagagtgttgatccagatggtgtcgatatccgtatgaccaacggggacgccaaaccaaaaaaggtgaagaatctgaagggtctctttgaggattttgggtacttcaatgcacattgtccaaaagacagccacaagcaatgtaatatggaaggcgttctctcttcgactctcaacgaggccatttctaaagccaaaccgaagcgtctatcgctcacctccaagaagatcaaagggattagtgtgtatgttttgacaaacggtatctggacactgccgcgcactaatgcagtagttggtaaagagtctggcggtgtgaaccacgccattgatactgccataaaacgcctgagagacgacaatcaaatgagggattacctcaccattcaattcatccggtttggggatgatccaataggtataagccgtacggactacttagataacgagttgaacaaggattgggacatcgtcgacactgttgattgcactggcagtgtcgagaaaatgttgataggggctttaaagggcgacatcgatgactaatcagctgataatagcgggaatatctgatactgcagagcatcgacgaccgatctactctcgagacccaagggcatgcttaatgcttcgatgactgatcgaacggatacctctatgagcagctatagtgaccatgcaagaaatcatacttcccgatgttccgccataaggaacaagtgaagaggaagttcctgcgctttatagtgttgcatggggtctccgagagcggcaaaactgatggggcaggatgagccaacgaagcccgtctaccaacgtgtgcgcctgaaaaataaagcgagaatcatacgattggtcaatgagaatttggatgacgtggacagtgcgatctcggtgccccagatcatctgagaaagcttcaatatgagatcaatgcattggctggagtttggcttgagtttaagctcggaatagtagactttcgagcttacgtgttgctgccatgcgatcttgatgggttcatatttgtctgtgtttctaatcatcattcccgggctatttatttttccctttcccttttagtcttttgtatcgttctacaggtgactcttatatatacccttccttatttcacctttctgcttattgcattcgcaatggaactatgtgcaatagtattcaccaacacttttctttccgccctcttaagacgttcaatatctgtatataacattagactaacatctgtacatacgataccacaatttcatgttgctatatagagcatgcacagttttgcattgctagctaccgttatacgacgagccagaatacata

SEQ ID NO: 37590 - DNA, 1332 bp, Muscodor strobelii
  misc_feature: SGI cDNA ID NO. 573047
  misc_feature: Encodes the peptide sequence at SEQ ID NO 37591
atggagtttcttggtgcggtcgccagcggtatcacgcttgttgcgttattcaaacacacattcgatgtcctagacctcattcacctttaccaaacccaagacgatgacttcgagaatcttcagttcgagttcaagctggaaaagtgccggctatacaattggggtgcagccttaaagcttaccgatgcttcgaatcatactcctttgaggggttggcgctccgaagctcttgtcacagagtgtctcgaacggataattcgtctcttcaatgacgcagacaaacttcgcgacgagtacggctgcttagaaatttcgccaacggatcttcttcgaattgagcagcacctgaaaaataacaagacaaacggcaatatcgctgcggcttttgacaactttcgaatcaaggtgtctggatccgggaaacagccgcccctccttatccgaaagacgaagtggattattcgagatcgcaagaagtgtcttattcttgtacagaagattagaacaaggattgacagtctcgagaaaatcactgaggaattgaccagtgtggtgaaactggagagcatgctccaggcgagggtcaatctgattccaaatatcgacactcttcttaggattgcgaatgtgtggaaggagtcacatcctcgggtttcatctgcagcagtcacacaggccgagagcttgtcgatgagctctggtaagcttcaagatatatcagattggcagacactggccggcagcgaggatacggattacatgtccactgcaagcctcgaggaaatgaccatcaccgagctaaaacatctagtcttacggtcaaatcaagaaatgttccagcttcgaacttcaattagcagtgacattgagcggctggcggaaagctcgagacgcgctgagaatgtaagccgcgtgatcacaattatcatgttcctatacctccctactgaattcatcaagacacactctatttttgactacgttacaggcaatatcattgtgttgactctcaccacggtcaatgttattgtggtgatgggtgcagtttatagacgtttccgttttttcaaccgcgcacagacgtcgagaactttgttgcatgatgacgcggcaccagatgcgcagcgatatggtccaattgctgccgacagcaaaataactgctctagaggccttaaaaattctcaaagacgccaaagttcaggtggtattcgttctgatgttcatggctgctctgctttttgacgtatacttgaccatacttccctccttcaactaccattctgggcaccctctgttagagcaaacggtagatcacccatacattttgtag

SEQ ID NO: 37591 - protein, 443 aa, Muscodor strobelii
  misc_feature: SGI Peptide ID NO. 573047
  misc_feature (2)..(204): NCBI GI: 46138171 Blast Desc: FG10600.1 [Gibberella zeae PH-1]
  misc_feature (2)..(197): NCBI GI: 256728996 Blast Desc: NECHADRAFT_79833 [Nectria haematococca mpVI 77-13-4]
  misc_feature (14)..(266): NCBI GI: 115385204 Blast Desc: [Aspergillus terreus NIH2624] gi|114196841|gb|EAU38541.1| [Aspergillus terreus NIH2624]
  misc_feature (5)..(204): NCBI GI: 156039651 Blast Desc: SS1G_11962 [Sclerotinia sclerotiorum 1980] gi|154697699|gb|EDN97437.1| SS1G_11962 [Sclerotinia sclerotiorum 1980]
  misc_feature (1)..(204): NCBI GI: 116197513 Blast Desc: CHGG_06912 [Chaetomium globosum CBS 148.51] gi|88178191|gb|EAQ85659.1| CHGG_06912 [Chaetomium globosum CBS 148.51]
  misc_feature (1)..(208): NCBI GI: 261201418 Blast Desc: conserved [Ajellomyces dermatitidis SLH14081] gi|239592168|gb|EEQ74749.1| conserved [Ajellomyces dermatitidis SLH14081]
  misc_feature (2)..(176): NCBI GI: 2739337 Blast Desc: small s protein [Podospora anserina]
  misc_feature (2)..(176): NCBI GI: 234864 Blast Desc: s gene 30 kDa polypeptide [Podospora anserina=fungus, Peptide, 289 aa]
  misc_feature (35)..(180): NCBI GI: 256728700 Blast Desc: NECHADRAFT_101905 [Nectria haematococca mpVI 77-13-4]
  misc_feature (4)..(221): NCBI GI: 256722211 Blast Desc: NECHADRAFT_86865 [Nectria haematococca mpVI 77-13-4]
MEFLGAVASGITLVALFKHTFDVLDLIHLYQTQDDDFENLQFEFKLEKCRLYNWGAALKLTDASNHTPLRGWRSEALVTECLERIIRLFNDADKLRDEYGCLEISPTDLLRIEQHLKNNKTNGNIAAAFDNFRIKVSGSGKQPPLLIRKTKWIIRDRKKCLILVQKIRTRIDSLEKITEELTSVVKLESMLQARVNLIPNIDTLLRIANVWKESHPRVSSAAVTQAESLSMSSGKLQDISDWQTLAGSEDTDYMSTASLEEMTITELKHLVLRSNQEMFQLRTSISSDIERLAESSRRAENVSRVITIIMFLYLPTEFIKTHSIFDYVTGNIIVLTLTTVNVIVVMGAVYRRFRFFNRAQTSRTLLHDDAAPDAQRYGPIAADSKITALEALKILKDAKVQVVFVLMFMAALLFDVYLTILPSFNYHSGHPLLEQTVDHPYIL

SEQ ID NO: 37592 - DNA, 2031 bp, Muscodor strobelii
  misc_feature: SGI EST ID NO. CUFF.89930.0
  misc_feature: Variant of the nucleotide sequence at SEQ ID NO 37590
ctcttgcaaaattttccagcatggagtttcttggtgcggtcgccagcggtatcacgcttgttgcgttattcaaacacacattcgatgtcctagacctcattcacctttaccaaacccaagacgatgacttcgagaatcttcagttcgagttcaagctggaaaagtgccggctatacaattggggtgcagccttaaagcttaccgatgcttcgaatcatactcctttgaggggttggcgctccgaagctcttgtcacagagtgtctcgaacggataattcgtctcttcaatgacgcagacaaacttcgcgacgagtacggctgcttagaaatttcgccaacggatcttcttcgaattgagcagcacctgaaaaataacaagacaaacggcaatatcgctgcggcttttgacaactttcgaatcaaggtgtctggatccgggaaacagccgcccctccttatccgaaagacgaagtggattattcgagatcgcaagaagtgtcttattcttgtacagaagattagaacaaggattgacagtctcgagaaaatcactgaggaattgaccagtgtggtgaaactggagagcatgctccaggcgagggtcaatctgattccaaatatcgacactcttcttaggattgcgaatgtgtggaaggagtcacatcctcgggtttcatctgcagcagtcacacaggccgagagcttgtcgatgagctctggtaagcttcaagatatatcagattggcagacactggccggcagcgaggatacggattacatgtccactgcaagcctcgaggaaatgaccatcaccgagctaaaacatctagtcttacggtcaaatcaagaaatgttccagcttcgaacttcaattagcagtgacattgagcggctggcggaaagctcgagacgcgctgagaatgtaagccgcgtgatcacaattatcatgttcctatacctccctactgaattcatcaagacacactctatttttgactacgttacaggcaatatcattgtgttgactctcaccacggtcaatgttattgtggtgatgggtgcagtttatagacgtttccgttttttcaaccgcgcacagacgtcgagaactttgttgcatgatgacgcggcaccagatgcgcagcgatatggtccaattgctgccgacagcaaaataactgctctagaggccttaaaaattctcaaagacgccaaagttcaggtggtattcgttctgatgttcatggctgctctgctttttgacgtatacttgaccatacttccctccttcaactaccattctgggcaccctctgttagagcaaacggtagatcacccatacattttgtaggcgacggatccctcaggattttcattagcggcagtctccaacctcactgagagccacccaaactacggggcctttgatggaattaaatggggtcccggctttgtgagtcgataaatcgccggtcagcactcgattattacgatatcagcgaaacgacttataggagtcgaaactacaacaccgccgaacgagggacccgggctcgttagtgatcgcaacaagcaaaaaagccccatacaaaagagatccatcacatcttagccattcgacggatcccttatcgaaccgggaagcctttctagcacccatttaagctaccgcaaatacgagtaatattcgggaggttatcgctagcgtcggaataggcacgagaagtcctaattagaaaaattgcactaacaaagcaaacgggtaaaaatggacttcatcgttgcaaatctacaaaacgtaatcgaccgaaaaatcatggtcactcgccagggttacttagcccttaaggtgttggaacaagctacggcagtacgccgctagcggtctacgtctgaatattcaattcgaataaggcttgtaatagctggataatgttaaacactgtcaattaatcaatcaatcaggcatacttgaatggtaaactcctcacacctaactatgactcatgaggcaatcccgacgaacctat

SEQ ID NO: 37593 - DNA, 1260 bp, Muscodor strobelii
  misc_feature: SGI cDNA ID NO. 573048
  misc_feature: Encodes the peptide sequence at SEQ ID NO 37594
atgtcatactacggctatcccgcctcaggaggatacgctcctccacagcagcagcaaccacaggtccacggcagctattaccctcctcaacaaccaagctacagcggctatcctcaacagtctccgcagtacgccaactacagccaggcgcctcctcctcaaccaaactacgctcactacgctccacaacaaccacagcatcacagtccatatcccggcaattcgactcaatacgcgcgtcctccatctaattcctacagccacggaagccatggcagctatcacgggccgccagcgccgccagccgggccgcaacacttcggtcatggcgcgcctacaggctacgctttccagtatagcaactgcagcggccgaagaaaagccctattggtcggcataaactatttcggacagcgaggtcagctgcgcgggtgcatcaacgacgtgaggaacatgtcggcttatctcgtcgaacactttggatacaagcgagaggacatggttatcttaaccgacgatcagcaaaatcccatgagccagcctaccaaacagaatctcctccgagcaatgcattggcttgtcaaagatgcacgaccgaacgactcattatttttccattactctggtcacggtggccaaacgaaggatctagatggcgacgaagacgacggctacgatgaggtcatctacccggtcgactttcgccaggttggacacattaccgatgacgagatgcacaggatcatggtgaaacctcttcaagcgggtgtacgactgacggcaatattcgactcgtgtcattccggtactgctttggatttgccctacatctactccacacaaggcattctcaaggagcccaacttggccaaggaggctggccaaggattgcttggagtcatatcgtcttacagccagggtgatctcggtggtgtcgcaaacaatattatgggtttcttcaagaaagctacaagtggagaggatgcccataaccgtactatggctacgaagacctctgcggcggatgttatcatgctttctggaagcaaagacgaccagacttctgcggatgccactattgctgctcaagctacgggcgcaatgtcatgggctttcattacagcactaaagaagaggcctcagcagagctatgtgcagctactcaacagcatccgggatgaactcgcaaatcgttattcgcagaagcctcagctctcttgcagccaccctcttaataccaacctcctatttgtgatgtaa

SEQ ID NO: 37594 - protein, 419 aa, Muscodor strobelii
  misc_feature: SGI Peptide ID NO. 573048
  misc_feature (126)..(416): Pfam Id: PF00656 Pfam Desc: Caspase domain
  misc_feature (5)..(419): NCBI GI: 189091870 Blast Desc: [Podospora anserina] gi|188219288|emb|CAP49268.1| protein product [Podospora anserina]
  misc_feature (5)..(411): NCBI GI: 85093564 Blast Desc: NCU02400 [Neurospora crassa OR74A] gi|74628665|sp|Q7S4N5.1|MCA1B_NEUCR RecName: Full=Metacaspase-1B; Flags: Precursor gi|28921170|gb|EAA30484.1| NCU02400 [Neurospora
  misc_feature (83)..(411): NCBI GI: 27803045 Blast Desc: protein product [Podospora anserina]
  misc_feature (28)..(412): NCBI GI: 154300330 Blast Desc: conserved [Botryotinia fuckeliana B05.10] gi|189081572|sp|A6SDT7.1|MCA1_BOTFB RecName: Full=Metacaspase-1; Flags: Precursor gi|150856677|gb|EDN31869.1| conserved fuckeliana
  misc_feature (62)..(412): NCBI GI: 156042390 Blast Desc: conserved [Sclerotinia sclerotiorum 1980] gi|189081650|sp|A7F075.1|MCA1_SCLS1 RecName: Full=Metacaspase-1; Flags: Precursor gi|154695379|gb|EDN95117.1| conserved 1980]
  misc_feature (83)..(411): NCBI GI: 116179586 Blast Desc: conserved [Chaetomium globosum CBS 148.51] gi|88184718|gb|EAQ92186.1| conserved [Chaetomium globosum CBS 148.51]
  misc_feature (104)..(419): NCBI GI: 256732444 Blast Desc: NECHADRAFT_103977 [Nectria haematococca mpVI 77-13-4]
  misc_feature (9)..(419): NCBI GI: 225560599 Blast Desc: metacaspase CasA [Ajellomyces capsulatus G186AR]
  misc_feature (84)..(419): NCBI GI: 146322507 Blast Desc: metacaspase CasA [Aspergillus fumigatus Af293] gi|129557051|gb|EAL88381.2| metacaspase CasA [Aspergillus fumigatus Af293]
  misc_feature (21)..(419): NCBI GI: 189081668 Blast Desc: MCA1A_ASPFC RecName: Full=Metacaspase-1A; Flags: Precursor gi|189081678|sp|Q4WJA1.3|MCA1A_ASPFU RecName: Full=Metacaspase-1A; Flags: Precursor gi|103060424|gb|ABF71662.1|
MSYYGYPASGGYAPPQQQQPQVHGSYYPPQQPSYSGYPQQSPQYANYSQAPPPQPNYAHYAPQQPQHHSPYPGNSTQYARPPSNSYSHGSHGSYHGPPAPPAGPQHFGHGAPTGYAFQYSNCSGRRKALLVGINYFGQRGQLRGCINDVRNMSAYLVEHFGYKREDMVILTDDQQNPMSQPTKQNLLRAMHWLVKDARPNDSLFFHYSGHGGQTKDLDGDEDDGYDEVIYPVDFRQVGHITDDEMHRIMVKPLQAGVRLTAIFDSCHSGTALDLPYIYSTQGILKEPNLAKEAGQGLLGVISSYSQGDLGGVANNIMGFFKKATSGEDAHNRTMATKTSAADVIMLSGSKDDQTSADATIAAQATGAMSWAFITALKKRPQQSYVQLLNSIRDELANRYSQKPQLSCSHPLNTNLLFVM

SEQ ID NO: 37595 - DNA, 2543 bp, Muscodor strobelii
  misc_feature: SGI EST ID NO. CUFF.90231.3
  misc_feature: Variant of the nucleotide sequence at SEQ ID NO 37593
ccaacatcatcatcctcgcacgagcagtcaacctagcccttgcccatgtcccgctgttcacagcccacagccctacggatcacggactatgcatgtcttgacagagtgattaacaataccgacatcgcgaggttacctacatcatcgtacaatacgacagtacttagagcatcgagcccaaacgcattgcttctccgtgccgccgcctcaggatctataatacccccaactaagtcctcagctgatagccctggcgtgtgcttctctcactctgcagggtcctttctatatttttggctcctctttttttgcatagctgaacacgattgcctggcgccgaacgccaatccaagactccacgaggcccgtcgcgcggtgtgtcgcccacatcggcggtcttaagctaacgtcgcttggcgcagtctagcctctgacagctgggatcaatctgcttaattgctcccaaacacctctggcgtattattttatggtctttgttagaagacatcaccaatcgccgactacaacaactcgagaagagccctacacaaagaatccaaagctccctttgccatcggacatctgcacgttgcggccaagctagtcgaggtagtctgtggccaagtctggtgccgccttgccgcttcgaaaccccgccgtcaccgcatttcgatcccgccatttgccgcctcgccgaccaccgcgggctagccaaagtcttgagagctctctcggctcttcctccagctaacaacacccaacacctaatctccctccgtcgacgccgcgccgcatcatctggatatgtcatactacggctatcccgcctcaggaggatacgctcctccacagcagcagcaaccacaggtccacggcagctattaccctcctcaacaaccaagctacagcggctatcctcaacagtctccgcagtacgccaactacagccaggcgcctcctcctcaaccaaactacgctcactacgctccacaacaaccacagcatcacagtccatatcccggcaattcgactcaatacgcgcgtcctccatctaattcctacagccacggaagccatggcagctatcacgggccgccagcgccgccagccgggccgcaacacttcggtcatggcgcgcctacaggctacgctttccagtatagcaactgcagcggccgaagaaaagccctattggtcggcataaactatttcggacagcgaggtcagctgcgcgggtgcatcaacgacgtgaggaacatgtcggcttatctcgtcgaacactttggatacaagcgagaggacatggttatcttaaccgacgatcagcaaaatcccatgagccagcctaccaaacagaatctcctccgagcaatgcattggcttgtcaaagatgcacgaccgaacgactcattatttttccattactctggtcacggtggccaaacgaaggatctagatggcgacgaagacgacggctacgatgaggtcatctacccggtcgactttcgccaggttggacacattaccgatgacgagatgcacaggatcatggtgaaacctcttcaagcgggtgtacgactgacggcaatattcgactcgtgtcattccggtactgctttggatttgccctacatctactccacacaaggcattctcaaggagcccaacttggccaaggaggctggccaaggattgcttggagtcatatcgtcttacagccagggtgatctcggtggtgtcgcaaacaatattatgggtttcttcaagaaagctacaagtggagaggatgcccataaccgtactatggctacgaagacctctgcggcggatgttatcatgctttctggaagcaaagacgaccagacttctgcggatgccactattgctgctcaagctacgggcgcaatgtcatgggctttcattacagcactaaagaagaggcctcagcagagctatgtgcagctactcaacagcatccgggatgaactcgcaaatcgttattcgcagaagcctcagctctcttgcagccaccctcttaataccaacctcctatttgtgatgtaaagataaacaaagaaggctcgaaatcgctccggagaagatttggtgtatttcctcggcggtccgctctgatttagttgacgatccaagcgctcatgggagaattgattaacggtctggtgtcttggtatagcacactgatattgctgggctacttaaaaatgggcagggcatatttttggattttatatgagtattgataattggatcttaactgactcatgagatacgatgaacgcgcacccttcgatgcaggcatggatgatcaggttagcgagtgcgaggagactaggctgtcatgatcctgggtagccctgagtatatatagagaagaatggttacattctacataatacctacgatcgtttggacgtcactacaatacgatggaatgattgctgccattacaagcatgctgtgcctgttatatcattcaccacgctccatataatcaccctatatccataaaacgcgaataaatc

SEQ ID NO: 37596 - DNA, 1911 bp, Muscodor strobelii
  misc_feature: SGI cDNA ID NO. 573050
  misc_feature: Reduced expression when VOC is produced
  misc_feature: Encodes the peptide sequence at SEQ ID NO 37597
atgtcatccttcgattccctgcccgatgaactaatccagcagattctacactacctctcgcccgaggaatgcctcgccaccgtcgcatatctctcccaccgcttcaacgacattgcccacgagcccttgctttggagatattattgccaagtcaatttcaggtactggcaggctgagcattgcttccacgacaaactgaatggccctcttcatgatgtgaactggaagaagctctatattcttcgactcagacggaatgcccagatcgccaccctcatcgacgacattgtcgcatcacgcgtgtctcgcctccgcaagaccgagcgcatttgtgccttcggctatgatgcaaaagactacctgttgacgcaatgcagggtggaagactccgccgacgatgtcttggctcgtaggttctattcttgctccgtcctcgacagcattcatcggagcctcgccattgaagaatgggccaagtatcaaaatcacgccgcctcataccccggcggcagcgaatctagcgctgaaaagctcaattgtggtatgaggctcgagcgagcattgggcgcatttgacatgttcatgctgcacgacaacgagggcgatctggacgagatctgtgagctgctcgacgacattgcgtcgcgattccgtgatgccaatcctggtgttgacctggccccaaccagacagaaagccattgctcttgcggaatggctgcacgcaaataatatgactggcttgaacgacccttctgaggagacctaccgttatttgcgcaattgtctgattggtagagcattacgtgatgaccaacatccctcgctccccatcatctctgccgccattttctcagctctcgcctcacgagtcggattcgaagcgtatccatcagctttacctaatcatgtacatgcgatagtcttatcgccgccaggaatttccttagatggcattgccatacctcctgatcaggtgcaacaggaaacaatgttcctcgatccctacgggtctgacgaggaggttccactggaaaatatacataatcttcttcacagactaggcatctatgtaggccatgatgacttactcatacccacatccacagacttgattgtgatgaggacagcacagaatatccgagcttccttcactagttttcgcactattgaccgaccgctatctcaacttatccccatgatcgaattaaaccgaggagactgggctagaaacctacaaccggctttatacagtatgatctgggcgagcatcatgatggtacctgttcttcccgataatgaggatgtcaggtgggattggcaacaagatgtgcgagacttgttgacgtatttctacgagtatttccccgaagattcgtggctcatcgaaaaatacgtctgtccaatgtacgatgcatttgctgcaccctcgcgacgacacacaaattttgagctcccttcgaagcgagtccgtgatcagatcaaggacattcgccgcgtggatacgtcaaccagagccccacggcggcgcagcgacgtgccctacggcgtagaagtcaaattccgcgtgggacaggttgtcaaacacaaacgttacgattactacgccctgatattgggttggagcaccgacggtgcgagcggcattacgaattgggagcaggacactgcaatgcgggacggcgggaaacaaaacgacacgtactatcgctgcatggtaggaacagatggctctgaccatcacatcattgccgaaagcagcattgacgcagttgagctccgtggcggtcccgaggtcttgccatctgagattagggacttgatcccaatggccggcaaatttttcaggcggtgggatgcggaaaatggcatgtttgtcagtaatctgaaggaattattccctgaggattag

SEQ ID NO: 37597 - protein, 636 aa, Muscodor strobelii
  misc_feature: SGI Peptide ID NO. 573050
  misc_feature (2)..(50): Pfam Id: PF00646 Pfam Desc: F-box domain
  misc_feature (518)..(541): Pfam Id: PF08755 Pfam Desc: Hemimethylated DNA-binding protein YccV like
  misc_feature (3)..(636): NCBI GI: 256732445 Blast Desc: NECHADRAFT_92438 [Nectria haematococca mpVI 77-13-4]
  misc_feature (3)..(636): NCBI GI: 46123971 Blast Desc: FG06363.1 [Gibberella zeae PH-1]
  misc_feature (2)..(636): NCBI GI: 116179550 Blast Desc: CHGG_00403 [Chaetomium globosum CBS 148.51] gi|88184700|gb|EAQ92168.1| CHGG_00403 [Chaetomium globosum CBS 148.51]
  misc_feature (2)..(636): NCBI GI: 85093971 Blast Desc: NCU02379 [Neurospora crassa OR74A] gi|28921254|gb|EAA30564.1| [Neurospora crassa OR74A] gi|226442508|dbj|BAH56483.1| [Neurospora crassa]
  misc_feature (48)..(551): NCBI GI: 145616122 Blast Desc: MGG_03552 [Magnaporthe grisea 70-15] gi|145009885|gb|EDJ94541.1| MGG_03552 [Magnaporthe grisea 70-15]
  misc_feature (3)..(572): NCBI GI: 154300268 Blast Desc: BC1G_11323 [Botryotinia fuckeliana B05.10] gi|150856646|gb|EDN31838.1| BC1G_11323 [Botryotinia fuckeliana B05.10]
  misc_feature (1)..(550): NCBI GI: 261361196 Blast Desc: F-box domain-containing protein [Verticillium albo-atrum VaMs.102]
  misc_feature (3)..(636): NCBI GI: 169779842 Blast Desc: [Aspergillus oryzae RIB40] gi|83773125|dbj|BAE63252.1| protein product [Aspergillus oryzae]
  misc_feature (1)..(636): NCBI GI: 189091894 Blast Desc: [Podospora anserina] gi|27803057|emb|CAD60760.1| protein product [Podospora anserina] gi|188219300|emb|CAP49280.1| protein product [Podospora anserina]
  misc_feature (4)..(636): NCBI GI: 119195523 Blast Desc: CIMG_02136 [Coccidioides immitis RS]
  misc_feature: Useful for introducing or modulating the production of volatile compounds
MSSFDSLPDELIQQILHYLSPEECLATVAYLSHRFNDIAHEPLLWRYYCQVNFRYWQAEHCFHDKLNGPLHDVNWKKLYILRLRRNAQIATLIDDIVASRVSRLRKTERICAFGYDAKDYLLTQCRVEDSADDVLARRFYSCSVLDSIHRSLAIEEWAKYQNHAASYPGGSESSAEKLNCGMRLERALGAFDMFMLHDNEGDLDEICELLDDIASRFRDANPGVDLAPTRQKAIALAEWLHANNMTGLNDPSEETYRYLRNCLIGRALRDDQHPSLPIISAAIFSALASRVGFEAYPSALPNHVHAIVLSPPGISLDGIAIPPDQVQQETMFLDPYGSDEEVPLENIHNLLHRLGIYVGHDDLLIPTSTDLIVMRTAQNIRASFTSFRTIDRPLSQLIPMIELNRGDWARNLQPALYSMIWASIMMVPVLPDNEDVRWDWQQDVRDLLTYFYEYFPEDSWLIEKYVCPMYDAFAAPSRRHTNFELPSKRVRDQIKDIRRVDTSTRAPRRRSDVPYGVEVKFRVGQVVKHKRYDYYALILGWSTDGASGITNWEQDTAMRDGGKQNDTYYRCMVGTDGSDHHIIAESSIDAVELRGGPEVLPSEIRDLIPMAGKFFRRWDAENGMFVSNLKELFPED

SEQ ID NO: 37598 - DNA, 3554 bp, Muscodor strobelii
  misc_feature: SGI EST ID NO. CUFF.90234.2
  misc_feature: Variant of the nucleotide sequence at SEQ ID NO 37596
cagacgcaggcggcttcggcctgctgctctgctgcttcatacaagtagccgtccatctgccgctgctccagctctccatgctttgcctgccgcctcgcctctcgttgcggccatcgacgtatcggagactcgccagcctccagccggtgccctcttactgttcccccccgtcgcaactcgtgccatgtctcgtgcctttgtttagaacctcagatgcacaccgcagatggggtcctaacctgcatgtagtaatctgataccctccgtccccttctacactatcctccgcggagccttcgcggccctcgcttgcgcgcactctcttgccttcgctcagccctcagtgaatccgggtcctgatataccgtgcaagtcttccgtttccgatctgtgaaccatcgccttttgtcatcctcgatcgcaacaccgccctttgcctcccacgtgttgcatctcgcctcaacccttttcgctctccgccctccccctggcgccaccatcccacttctctttggtccctgcatttcgccaacaggtcgatccgcaagcatgtcatccttcgattccctgcccgatgaactaatccagcagattctacactacctctcgcccgaggaatgcctcgccaccgtcgcatatctctcccaccgcttcaacgacattgcccacgagcccttgctttggagatattattgccaagtcaatttcaggtactggcaggctgagcattgcttccacgacaaactgaatggccctcttcatgatgtgaactggaagaagctctatattcttcgactcagacggaatgcccagatcgccaccctcatcgacgacattgtcgcatcacgcgtgtctcgcctccgcaagaccgagcgcatttgtgccttcggctatgatgcaaaagactacctgttgacgcaatgcagggtggaagactccgccgacgatgtcttggctcgtaggttctattcttgctccgtcctcgacagcattcatcggagcctcgccattgaagaatgggccaagtatcaaaatcacgccgcctcataccccggcggcagcgaatctagcgctgaaaagctcaattgtggtatgaggctcgagcgagcattgggcgcatttgacatgttcatgctgcacgacaacgagggcgatctggacgagatctgtgagctgctcgacgacattgcgtcgcgattccgtgatgccaatcctggtgttgacctggccccaaccagacagaaagccattgctcttgcggaatggctgcacgcaaataatatgactggcttgaacgacccttctgaggagacctaccgttatttgcgcaattgtctgattggtagagcattacgtgatgaccaacatccctcgctccccatcatctctgccgccattttctcagctctcgcctcacgagtcggattcgaagcgtatccatcagctttacctaatcatgtacatgcgatagtcttatcgccgccaggaatttccttagatggcattgccatacctcctgatcaggtgcaacaggaaacaatgttcctcgatccctacgggtctgacgaggaggttccactggaaaatatacataatcttcttcacagactaggcatctatgtaggccatgatgacttactcatacccacatccacagacttgattgtgatgaggacagcacagaatatccgagcttccttcactagttttcgcactattgaccgaccgctatctcaacttatccccatgatcgaattaaaccgaggagactgggctagaaacctacaaccggctttatacagtatgatctgggcgagcatcatgatggtacctgttcttcccgataatgaggatgtcaggtgggattggcaacaagatgtgcgagacttgttgacgtatttctacgagtatttccccgaagattcgtggctcatcgaaaaatacgtctgtccaatgtacgatgcatttgctgcaccctcgcgacgacacacaaattttgagctcccttcgaagcgagtccgtgatcagatcaaggacattcgccgcgtggatacgtcaaccagagccccacggcggcgcagcgacgtgccctacggcgtagaagtcaaattccgcgtgggacaggttgtcaaacacaaacgttacgattactacgccctgatattgggttggagcaccgacggtgcgagcggcattacgaattgggagcaggacactgcaatgcgggacggcgggaaacaaaacgacacgtactatcgctgcatggtaggaacagatggctctgaccatcacatcattgccgaaagcagcattgacgcagttgagctccgtggcggtcccgaggtcttgccatctgagattagggacttgatcccaatggccggcaaatttttcaggcggtgggatgcggaaaatggcatgtttgtcagtaatctgaaggaattattccctgaggattaggaggcagatctcgattgcatgtcgatcgcgagactgaggttcgggaaggcttcgagaaaaattgatccgctacggtaatgctattatctccaatgcgaggctgcgacaagaaagagcgggatgaagatcaattgcactgcttaattaacgttttgaaaagagttacgtcttgacgcgttatgaggttcttgggccggaggcgctgggggcaattgaatgttgcaaaaatcatccatagacataatggttctggcttcacgatatatggcatctagtataatatctctatatgataatccaaatgaatttgcgtattgctgtgtattacttccatggatcctcggatcctccgacgcatccgttggggctcgcggtatatctgtttgacttcgcagtcattgtgaggcatcctcattcaacttctcacaccttcttttcccctgctgattgagctgattctgcaatgtaaccctatgctagcgaggaccctgcactcgcagcacactgcgtgggcagttgagggcatcctaacgggtttcaacggtattagaggctacctacctactcgcctacctaccagtgcactgctatccgcaacatgcagtgaacttgttgaggttacatggtgaaatgttgagccgtagcgtcccactgccctgcagcacgtatgtccagtgtgtattcctctttggtcaccgaaaatggcgatccaagggtgctgtgcagcgggagagcgctggcatatcagtccctgggcagaacacaacactagacgatatctgcttgcgacgggaaggtaacgtgcgaaggcaaggtagcaataccagtcttttgccaagctgtcaaccgacaaagccacaagaaaaactagcccatcagcgacaaggcacattgaaacggcggaagggaagaggcgagtcccgaacatgatgattaccgggcttccattaacacactaactccccacaccacacaccacatggaagatgtgatagcctatgctgcgcggagaattgcgacgggtatacggacacgtggccacggcactggaatcttctgaagtatgggaatgtagtaatcacggcactaaatat

SEQ ID NO: 37599 - DNA, 3264 bp, Muscodor strobelii
  misc_feature: SGI cDNA ID NO. 573051
  misc_feature: Encodes the peptide sequence at SEQ ID NO 37600
atggaccctaattctccgaagcggcggaaacttgaccatgctaatggagggccaactttcgagagcgctgcttcgtcgtccatgggcgcatctggctctagcgccttcgttttagaaacggaagaactgttgaaagagtcgaggattgattatgcacagattttcccaggcgtggagcagaccctgcgccagtttaaagaagcgatagaaagtctcgatagctacggcccggttcccattcaagatgcctctacgacatggcaaaaggcaaacaaaactactatcccttatcccgatccgaaacctgcgcgcgattctccctacaaagtcgccttcgagccgccgacacaggtgaatgttgtagggtctttcacttctcggaccatgatcaagtcgcaagccaacctggcggtcgatatgattgtcgtgatgcccaaatctttattcacagacaaggactaccgtgacttccgatacttctacaagagggctttcttcctcgcttacatcgccgccgctctcagcaagcaattcgctgatatggacttcatgtatacgaatctgggcggaaatgctctaacgccggtccttgttgcgcgggggaaggataagtcgtcgaaatctcagaaaaagaaggattcagagccacaagtcgcttcgaaatatgagatcagaatcatacccaatgctcccgacgactgtttccccgcggcaaaactctcgtccaatagctgctctctccgccggcctggatcggaagaggcggcaggcgataagaccccaacgccatattataataatacagtgaaatcagaaagcctttttaccgcatacctaaagctactttccacgagcgcaaccacttgcgcttcgttcaaagatgcttgcattctagggcgtatatggctacggcaacgtggcttcggaggtgataaagacgatggcggctttggccacttccattgggccgtgttgatggctttgttattgcaaaccggtggtcgcagaggcgagccaatcctctcatcgtccttacactgctctcagctgttcaaagcaaccttgcagtatctcgcctcctcgaacctacacaagaagcctgttgtcctcggacctagcagctcggctcttgaggagttccgacaacaaggtccaacactgtacgacagtgctcgagggatcaatgtcctctttaatatgacgccgtggtcggcaaagatattagtcgagcaagccaaattatcactatccgccatcaatgatccaaccgttgatcagtttgactcgcttttcatcacgaaggttgaccaaccactccagatgtttgatctctttgtgaaaataaacatcccttcgaacgtaacaccagctactgatggcaaggctcccgtttgggcctttgctgaaggtgttcatcagacactaaagcgagcgctgggcgaacgagctagtcttatcgatattcgagtcctccagacgataaaatggtccgttacgccaccgtcaaccaagcagaaatcggagagtctattggtcgcaatcatgtgtgatcctatcaaaacatcccaagctagagagttcggaccgtcttacgagcagaaaaaggaagcggcaagatttcgggagttctggggcgatgctgcagagttatggcagttcccttccggggagatcgtcgaatcggtcgactggactcaagtttctgcctatggatatttcggtatatgccaggctatcattcgttacattttgaagttgcgaatgaaggtcggggatggagagctcgaattccgcggccaagaatttgcgaacatcatctcgcttgcgccgacagataaggcagcctacgacggtgctaaagctgctttttccacgttcgagaaagacgtacgtgagttagatgatttgtcgctatctgtgaagcaaattgcagccattgggcctgagactcgttatacttcgtcaaagttaccgaacccgagccaaaggaaacaaggcgccacaccaatcgacgttattctgtcttttgaggcatctgggaaatggcctgacaatctggctgcgatacaacgagcaaagatagcattgcttctccagattggacgatctctagaagaagcgaaggatggggaagtcaacactcatttggggcttgaagatgcagacggcgaaacagagaacctcgctttcctagacgtcgtctacgagggcgggttttcatttcggttacgcgttcacagtgatcaagaagattcgctactcgacaggcaaaccaaagatcagactcttgagcgccatgtccgtactgaggctgctgcgttacttgcatcgtcaaggtggaagagcacaattcttccgcttcacaaccagaccatcaccacatattgcacccgcttcccagccctatcatcatccatccgactcgccaagcattggttcaactctcatcacctgggcaaccacttcaacgagcccctgatcgagatcttcgttttgcaggctttcctacagccccatcccttccccatcccctcatctgcctctaccggcttcctccgcactctcctactcctcgcatcatacgactggagagaagagccaatgatcgtcgatccctcagataacctttcccccgctcagcgctctgatatgtctaccaggtttgaagcatggaggaaaatcgacattaatatgaaccgcacaaccttattcgtcgcaacctcatgggacgtaacaggggtagcatatacacaaagtatacccaaggtagtcgctacacgcatgactaccctggctcggtcagcgtctaagctggccaaagtcaagggcatcgagctagatgcgcagagtctctttcagtctggcctccgcgactacgacgtcatcatccacctggcccccaaagcggtaaagggcgtcctccgcgacgacggggcaaaacactcgcagttcaagaacatcgatcaaacaagcaactcagacgctctccccttacccgaatcccccattcctgcacttcttcgtcgcctgacctgtataaatgcaaaccccttgttattcttccatggagcgccggatgatccgattattgcagctctgtggaatcctcaactgcatagcaggggattcagcgttacaatgccgtcttccttccggcctgtcgagggggacaagtatgagttgaaccgcgatgcggtacttgcagagattgcgaggattggcggagacttgattgcgaagatcgaggtgaagggaagcggttag

SEQ ID NO: 37600 - protein, 1087 aa, Muscodor strobelii
  misc_feature: SGI Peptide ID NO. 573051
  misc_feature (123)..(1084): Pfam Id: PF03813 Pfam Desc: Nrap protein
  misc_feature (629)..(965): Pfam Id: PF03813 Pfam Desc: Nrap protein
  misc_feature (123)..(585): Pfam Id: PF03813 Pfam Desc: Nrap protein
  misc_feature (1)..(1084): NCBI GI: 85090796 Blast Desc: NCU09437 [Neurospora crassa OR74A] gi|28919963|gb|EAA29353.1| conserved [Neurospora crassa OR74A]
  misc_feature (1)..(1087): NCBI GI: 145608234 Blast Desc: MGG_03270 [Magnaporthe grisea 70-15] gi|145015729|gb|EDK00219.1| MGG_03270 [Magnaporthe grisea 70-15]
  misc_feature (4)..(1082): NCBI GI: 256732456 Blast Desc: [Nectria haematococca mpVI 77-13-4]
  misc_feature (1)..(1084): NCBI GI: 171679507 Blast Desc: protein product [Podospora anserina] gi|170939379|emb|CAP64607.1| protein product [Podospora anserina]
  misc_feature (1)..(1082): NCBI GI: 46123925 Blast Desc: FG06340.1 [Gibberella zeae PH-1]
  misc_feature (1)..(1086): NCBI GI: 116203599 Blast Desc: CHGG_09683 [Chaetomium globosum CBS 148.51] gi|88175811|gb|EAQ83279.1| CHGG_09683 [Chaetomium globosum CBS 148.51]
  misc_feature (29)..(1083): NCBI GI: 156042404 Blast Desc: SS1G_10999 [Sclerotinia sclerotiorum 1980] gi|154695386|gb|EDN95124.1| SS1G_10999 [Sclerotinia sclerotiorum 1980]
  misc_feature (13)..(1083): NCBI GI: 67525995 Blast Desc: AN3455.2 [Aspergillus nidulans FGSC A4] gi|40743809|gb|EAA62995.1| AN3455.2 [Aspergillus nidulans FGSC A4] gi|259485553|tpe|CBF82672.1| TPA: pre-rRNA processing protein
  misc_feature (5)..(1078): NCBI GI: 115402991 Blast Desc: conserved [Aspergillus terreus NIH2624] gi|114189418|gb|EAU31118.1| conserved [Aspergillus terreus NIH2624]
  misc_feature (29)..(1083): NCBI GI: 119493412 Blast Desc: pre-rRNA processing protein Utp22 [Neosartorya fischeri NRRL 181] gi|119412056|gb|EAW21999.1| pre-rRNA processing protein Utp22 [Neosartorya fischeri NRRL 181]
MDPNSPKRRKLDHANGGPTFESAASSSMGASGSSAFVLETEELLKESRIDYAQIFPGVEQTLRQFKEAIESLDSYGPVPIQDASTTWQKANKTTIPYPDPKPARDSPYKVAFEPPTQVNVVGSFTSRTMIKSQANLAVDMIVVMPKSLFTDKDYRDFRYFYKRAFFLAYIAAALSKQFADMDFMYTNLGGNALTPVLVARGKDKSSKSQKKKDSEPQVASKYEIRIIPNAPDDCFPAAKLSSNSCSLRRPGSEEAAGDKTPTPYYNNTVKSESLFTAYLKLLSTSATTCASFKDACILGRIWLRQRGFGGDKDDGGFGHFHWAVLMALLLQTGGRRGEPILSSSLHCSQLFKATLQYLASSNLHKKPVVLGPSSSALEEFRQQGPTLYDSARGINVLFNMTPWSAKILVEQAKLSLSAINDPTVDQFDSLFITKVDQPLQMFDLFVKINIPSNVTPATDGKAPVWAFAEGVHQTLKRALGERASLIDIRVLQTIKWSVTPPSTKQKSESLLVAIMCDPIKTSQAREFGPSYEQKKEAARFREFWGDAAELWQFPSGEIVESVDWTQVSAYGYFGICQAIIRYILKLRMKVGDGELEFRGQEFANIISLAPTDKAAYDGAKAAFSTFEKDVRELDDLSLSVKQIAAIGPETRYTSSKLPNPSQRKQGATPIDVILSFEASGKWPDNLAAIQRAKIALLLQIGRSLEEAKDGEVNTHLGLEDADGETENLAFLDVVYEGGFSFRLRVHSDQEDSLLDRQTKDQTLERHVRTEAAALLASSRWKSTILPLHNQTITTYCTRFPALSSSIRLAKHWFNSHHLGNHFNEPLIEIFVLQAFLQPHPFPIPSSASTGFLRTLLLLASYDWREEPMIVDPSDNLSPAQRSDMSTRFEAWRKIDINMNRTTLFVATSWDVTGVAYTQSIPKVVATRMTTLARSASKLAKVKGIELDAQSLFQSGLRDYDVIIHLAPKAVKGVLRDDGAKHSQFKNIDQTSNSDALPLPESPIPALLRRLTCINANPLLFFHGAPDDPIIAALWNPQLHSRGFSVTMPSSFRPVEGDKYELNRDAVLAEIARIGGDLIAKIEVKGSG

SEQ ID NO: 37601 - DNA, 4982 bp, Muscodor strobelii
  misc_feature: SGI EST ID NO. CUFF.89976.0
  misc_feature: Variant of the nucleotide sequence at SEQ ID NO 37599
aggtgggacatgttgatgatctagagaacattcccttctctacgagggcctttgacttgcgctgagcttgatataatttccaagctttatttcgtcttcggccttccgtttgtcttcgatcttttcaacaacatggaccctaattctccgaagcggcggaaacttgaccatgctaatggagggccaactttcgagagcgctgcttcgtcgtccatgggcgcatctggctctagcgccttcgttttagaaacggaagaactgttgaaagagtcgaggattgattatgcacagattttcccaggcgtggagcagaccctgcgccagtttaaagaagcgatagaaagtctcgatagctacggcccggttcccattcaagatgcctctacgacatggcaaaaggcaaacaaaactactatcccttatcccgatccgaaacctgcgcgcgattctccctacaaagtcgccttcgagccgccgacacaggtgaatgttgtagggtctttcacttctcggaccatgatcaagtcgcaagccaacctggcggtcgatatgattgtcgtgatgcccaaatctttattcacagacaaggactaccgtgacttccgatacttctacaagagggctttcttcctcgcttacatcgccgccgctctcagcaagcaattcgctgatatggacttcatgtatacgaatctgggcggaaatgctctaacgccggtccttgttgcgcgggggaaggataagtcgtcgaaatctcagaaaaagaaggattcagagccacaagtcgcttcgaaatatgagatcagaatcatacccaatgctcccgacgactgtttccccgcggcaaaactctcgtccaatagctgctctctccgccggcctggatcggaagaggcggcaggcgataagaccccaacgccatattataataatacagtgaaatcagaaagcctttttaccgcatacctaaagctactttccacgagcgcaaccacttgcgcttcgttcaaagatgcttgcattctagggcgtatatggctacggcaacgtggcttcggaggtgataaagacgatggcggctttggccacttccattgggccgtgttgatggctttgttattgcaaaccggtggtcgcagaggcgagccaatcctctcatcgtccttacactgctctcagctgttcaaagcaaccttgcagtatctcgcctcctcgaacctacacaagaagcctgttgtcctcggacctagcagctcggctcttgaggagttccgacaacaaggtccaacactgtacgacagtgctcgagggatcaatgtcctctttaatatgacgccgtggtcggcaaagatattagtcgagcaagccaaattatcactatccgccatcaatgatccaaccgttgatcagtttgactcgcttttcatcacgaaggttgaccaaccactccagatgtttgatctctttgtgaaaataaacatcccttcgaacgtaacaccagctactgatggcaaggctcccgtttgggcctttgctgaaggtgttcatcagacactaaagcgagcgctgggcgaacgagctagtcttatcgatattcgagtcctccagacgataaaatggtccgttacgccaccgtcaaccaagcagaaatcggagagtctattggtcgcaatcatgtgtgatcctatcaaaacatcccaagctagagagttcggaccgtcttacgagcagaaaaaggaagcggcaagatttcgggagttctggggcgatgctgcagagttatggcagttcccttccggggagatcgtcgaatcggtcgactggactcaagtttctgcctatggatatttcggtatatgccaggctatcattcgttacattttgaagttgcgaatgaaggtcggggatggagagctcgaattccgcggccaagaatttgcgaacatcatctcgcttgcgccgacagataaggcagcctacgacggtgctaaagctgctttttccacgttcgagaaagacgtacgtgagttagatgatttgtcgctatctgtgaagcaaattgcagccattgggcctgagactcgttatacttcgtcaaagttaccgaacccgagccaaaggaaacaaggcgccacaccaatcgacgttattctgtcttttgaggcatctgggaaatggcctgacaatctggctgcgatacaacgagcaaagatagcattgcttctccagattggacgatctctagaagaagcgaaggatggggaagtcaacactcatttggggcttgaagatgcagacggcgaaacagagaacctcgctttcctagacgtcgtctacgagggcgggttttcatttcggttacgcgttcacagtgatcaagaagattcgctactcgacaggcaaaccaaagatcagactcttgagcgccatgtccgtactgaggctgctgcgttacttgcatcgtcaaggtggaagagcacaattcttccgcttcacaaccagaccatcaccacatattgcacccgcttcccagccctatcatcatccatccgactcgccaagcattggttcaactctcatcacctgggcaaccacttcaacgagcccctgatcgagatcttcgttttgcaggctttcctacagccccatcccttccccatcccctcatctgcctctaccggcttcctccgcactctcctactcctcgcatcatacgactggagagaagagccaatgatcgtcgatccctcagataacctttcccccgctcagcgctctgatatgtctaccaggtttgaagcatggaggaaaatcgacattaatatgaaccgcacaaccttattcgtcgcaacctcatgggacgtaacaggggtagcatatacacaaagtatacccaaggtagtcgctacacgcatgactaccctggctcggtcagcgtctaagctggccaaagtcaagggcatcgagctagatgcgcagagtctctttcagtctggcctccgcgactacgacgtcatcatccacctggcccccaaagcggtaaagggcgtcctccgcgacgacggggcaaaacactcgcagttcaagaacatcgatcaaacaagcaactcagacgctctccccttacccgaatcccccattcctgcacttcttcgtcgcctgacctgtataaatgcaaaccccttgttattcttccatggagcgccggatgatccgattattgcagctctgtggaatcctcaactgcatagcaggggattcagcgttacaatgccgtcttccttccggcctgtcgagggggacaagtatgagttgaaccgcgatgcggtacttgcagagattgcgaggattggcggagacttgattgcgaagatcgaggtgaagggaagcggttagcgcaatgactcatgagtattgccaaggtgggggaagcagacgaagagcacgtgtcgttgttacatgttctagtcatgagataccacgagatgcaagaattagaggcgggaattaaactcgttctgatgcccaatccacttgtaaggcacagggtcatacaaaaaagtggcacttccaagccgctgcgaacccctgtactttatgtaagacgacccctaggacttgcgcacacaattgatcctcaacctcccaatttcaattggaaggcacaaaaatcgtctcacgagagtcaaaatcttaaaaacaagtgcttattctcaaaattaaaacagacttgcaaaacggctcaaaggcaccggtatactctagtgtgtcacaaatatctcccacccacctcctatccaaaactccgcaaccacctggagaaaattcaccacgtgcatgcatacaacattaccagaagcgaagagatgcagtccgctagccttttcctcacgagtctccatggatattcctcgtcatccgtttcgctgccttgctgagtctcacaacccaatcaattggttcggagaccctggtcgtgcaagtcagatataccccgtccttggtaattccgacgtctgcgctcggatttgctggaaaaggtacatttgatgatttggagtgtgtgtgcaaatggcgggatgggaaataagagagatggcatgattgcgatgcacttactagcttgatacagtaattttttcgagtgtatgagcgtgctggatggcggcgtggctgcatgtcagtggtgtccttgggtaatgaacagcatattattcgtgctggaattgcttagatatagagccatttcaggaaatatgtatcgcgaacctcgttgtcacggattgacttcattttctctagcttgggagcttttgaacagatagcggcattgtatgtgtattggctcgctcgtacgggtgcggaattgcggccaggtcatgaccatggtcatgacccaaccatctcatatttacgtgtttctctcctgagcgaattcaatggataagacagacaggcctacttaggcacccgcataacatcagacaactcttgcgttatctagcatgatatcgtcattcatacccgacgttatcctcccgccctttcaatgctcctcccgtaagagccctatacgatatacgcacgcgcatgtttcccatactactttttcgcatacacattatctagcatgaaaccgtgcttctgtaccatgtgcctcgttgcaatcgtgtcttcccacccaaaaaagcctgctttgctcccatgtctcacggaggccctgtcctccccgctggccgaatagcaaccactattgaccgacggcctactatcaccgaaaagacaaattacccctggatagacgccgcagacgatgcaagatacccagctcgcagaccgtaaaaacatgatgactcacaccgaaagtttcatcgtcgtttctgcgatatgacctgtatgtacatgtaggtgagaagcacattgtcgtatgtttcatatgcagttgatagaaaacgaaaccgagatgcatgaagactgaaatg

SEQ ID NO: 37602 - DNA, 1560 bp, Muscodor strobelii
  misc_feature: SGI cDNA ID NO. 573052
  misc_feature: Encodes the peptide sequence at SEQ ID NO 37603
atgccttctacagcagtatgcatgcggactttgagagcctactctcgctatggctctaatcatgttcgcattatggccagggccttctcggccacctcgcgccgtgcagagatcaacaaagtctacccatctgctaccgaagctcttaaagacatgaagtccaattcgactttactttgcggtggatttggtctatgtggtgtacctgacaccttaattaatgaggtgctgaagaaatcggacgtcactggactcacagctgtttcaaataatgccggaaccgacaactcgggactcggccagttgctcaagtcaaaacagattaaaaagatgatagcgagttatatcggtgaaaacaaaacgttcgagaagatgtacctgacgggagaaatcgagctcgaactcacaccccaaggcacattggccgaaagatgcgcagctggcggcaagggcattcctgctttctacacacccgcagcgtatggtacggtagtacaaaccggagacctgcccttgaagaataagaaagatggcacacccgatcaattttcttatccaaaagacgtcaaggtctttaacggtaaatcctacctgttggagaacagtatcgatggtgactatgcctttgtcaaggcttacaaagctgacaagctcggaaactgccaattccgcctcagcgccaataacttcaacggggcaatgggtcgcaatgccaagatgacgatagtagaggccgagcatatcgtcgaaccaggtgatattcctccagaggctgtccatctccccggcatatatgtgaagcgagttattcagagcactactgagaagaacattgaaaagtacacgtgggcgaaggatgagaacgactcctcggccgccaaggctctgggtacgggtgacacagcagctaagagggagcgtatcgtgcggagagcggccaaggagttcaagaatggcatgtacgccaacctgggaatcgggatgcccatgcttgcccccggtttcgtcggtcccgaggttgaggttcagctgcagtctgaaaacggcatcctgggattgggaccttaccccaagcaaggttctgaggatgcggacctgatcaatgccggcaaagagacggtcaccctccgcccgggagcatccgtcttcggcagcgaggagagtttcggcatgatccggagcggtcgcatcgacctaacgatcctgggcgccatgcaggttagtgccacgggcgatctcgccaactggatgttgcctggaaaggtcaagggcttcggcggtgccatggatctggtcagcaaccccagtgcgactaaggtggttgtcaccatggagcatacggataagaagggcaaccccaagatcctgaagcagtgcgaattccctctgacgggacgcgcttgcgtgtcaaggatcattaccgagttgtgtgtgttcgatgttgacttcgctcatgggcttactctcatcgagattgcggacggtgtgacggtggaggagatcaagagtaagacggaggcaccgtttagagtcgctgacgatctgaagcccatgttgtaa

SEQ ID NO: 37603 - protein, 519 aa, Muscodor strobelii
  misc_feature: SGI Peptide ID NO. 573052
  misc_feature (42)..(272): Pfam Id: PF01144 Pfam Desc: Coenzyme A transferase
  misc_feature (305)..(504): Pfam Id: PF01144 Pfam Desc: Coenzyme A transferase
  misc_feature (1)..(519): NCBI GI: 46123929 Blast Desc: FG06342.1 [Gibberella zeae PH-1]
  misc_feature (1)..(519): NCBI GI: 171679389 Blast Desc: protein product [Podospora anserina] gi|170939320|emb|CAP64548.1| protein product [Podospora anserina]
  misc_feature (5)..(519): NCBI GI: 85092103 Blast Desc: succinyl-CoA:3-ketoacid-coenzyme A transferase subunit A [Neurospora crassa OR74A] gi|28920631|gb|EAA29992.1| succinyl-CoA:3-ketoacid-coenzyme A transferase subunit A crassa
  misc_feature (1)..(519): NCBI GI: 145610859 Blast Desc: conserved [Magnaporthe grisea 70-15] gi|145018198|gb|EDK02477.1| conserved [Magnaporthe grisea 70-15]
  misc_feature (1)..(519): NCBI GI: 259484857 Blast Desc: TPA: succinyl-CoA:3-ketoacid-coenzyme A transferase (ScoT), (AFU_orthologue; AFUA_6G12250) [Aspergillus nidulans FGSC A4]
  misc_feature (3)..(519): NCBI GI: 156039789 Blast Desc: conserved [Sclerotinia sclerotiorum 1980] gi|154697768|gb|EDN97506.1| conserved [Sclerotinia sclerotiorum 1980]
  misc_feature (1)..(519): NCBI GI: 119472572 Blast Desc: succinyl-CoA:3-ketoacid-coenzyme A transferase (ScoT), [Neosartorya fischeri NRRL 181] gi|119406521|gb|EAW16472.1| succinyl-CoA:3-ketoacid-coenzyme A transferase (ScoT), fischeri
  misc_feature (1)..(519): NCBI GI: 121700032 Blast Desc: succinyl-CoA:3-ketoacid-coenzyme A transferase (ScoT), [Aspergillus clavatus NRRL 1] gi|119396423|gb|EAW06855.1| succinyl-CoA:3-ketoacid-coenzyme A transferase (ScoT), clavatus
  misc_feature (1)..(519): NCBI GI: 70992511 Blast Desc: succinyl-CoA:3-ketoacid-coenzyme A transferase (ScoT) [Aspergillus fumigatus Af293] gi|66848737|gb|EAL89066.1| succinyl-CoA:3-ketoacid-coenzyme A transferase (ScoT), fumigatus
  misc_feature (1)..(519): NCBI GI: 238504312 Blast Desc: succinyl-CoA:3-ketoacid-coenzyme A transferase (ScoT), [Aspergillus flavus NRRL3357] gi|220690858|gb|EED47207.1| succinyl-CoA:3-ketoacid-coenzyme A transferase (ScoT), flavus
  misc_feature (28)..(518): SWISSPROT Homolog: EC 2.8.3.5 3-oxoacid CoA-transferase
MPSTAVCMRTLRAYSRYGSNHVRIMARAFSATSRRAEINKVYPSATEALKDMKSNSTLLCGGFGLCGVPDTLINEVLKKSDVTGLTAVSNNAGTDNSGLGQLLKSKQIKKMIASYIGENKTFEKMYLTGEIELELTPQGTLAERCAAGGKGIPAFYTPAAYGTVVQTGDLPLKNKKDGTPDQFSYPKDVKVFNGKSYLLENSIDGDYAFVKAYKADKLGNCQFRLSANNFNGAMGRNAKMTIVEAEHIVEPGDIPPEAVHLPGIYVKRVIQSTTEKNIEKYTWAKDENDSSAAKALGTGDTAAKRERIVRRAAKEFKNGMYANLGIGMPMLAPGFVGPEVEVQLQSENGILGLGPYPKQGSEDADLINAGKETVTLRPGASVFGSEESFGMIRSGRIDLTILGAMQVSATGDLANWMLPGKVKGFGGAMDLVSNPSATKVVVTMEHTDKKGNPKILKQCEFPLTGRACVSRIITELCVFDVDFAHGLTLIEIADGVTVEEIKSKTEAPFRVADDLKPML

SEQ ID NO: 37604 - DNA, 2528 bp, Muscodor strobelii
  misc_feature: SGI EST ID NO. CUFF.89984.0
  misc_feature: Variant of the nucleotide sequence at SEQ ID NO 37602
gggcacatcctgggtcaattcatagccgaaagcagtatccgtcatcgctagtagcaacaaacaattgtcttgaggccgaacattgatgcgaatcttgctcggcgaatgtaattctgtcacgaaatcttctggttgactgttgattctctgctccctctccatcttcattccaaactcgcagcttgctgcgtcactgtcatccctgcgactttcatgccgcttcctctcattccgtaaatagccgccggagaagagtctcaacgtcaacaacatcacatctgtgtctcatcaatctcacgatgccttctacagcagtatgcatgcggactttgagagcctactctcgctatggctctaatcatgttcgcattatggccagggccttctcggccacctcgcgccgtgcagagatcaacaaagtctacccatctgctaccgaagctcttaaagacatgaagtccaattcgactttactttgcggtggatttggtctatgtggtgtacctgacaccttaattaatgaggtgctgaagaaatcggacgtcactggactcacagctgtttcaaataatgccggaaccgacaactcgggactcggccagttgctcaagtcaaaacagattaaaaagatgatagcgagttatatcggtgaaaacaaaacgttcgagaagatgtacctgacgggagaaatcgagctcgaactcacaccccaaggcacattggccgaaagatgcgcagctggcggcaagggcattcctgctttctacacacccgcagcgtatggtacggtagtacaaaccggagacctgcccttgaagaataagaaagatggcacacccgatcaattttcttatccaaaagacgtcaaggtctttaacggtaaatcctacctgttggagaacagtatcgatggtgactatgcctttgtcaaggcttacaaagctgacaagctcggaaactgccaattccgcctcagcgccaataacttcaacggggcaatgggtcgcaatgccaagatgacgatagtagaggccgagcatatcgtcgaaccaggtgatattcctccagaggctgtccatctccccggcatatatgtgaagcgagttattcagagcactactgagaagaacattgaaaagtacacgtgggcgaaggatgagaacgactcctcggccgccaaggctctgggtacgggtgacacagcagctaagagggagcgtatcgtgcggagagcggccaaggagttcaagaatggcatgtacgccaacctgggaatcgggatgcccatgcttgcccccggtttcgtcggtcccgaggttgaggttcagctgcagtctgaaaacggcatcctgggattgggaccttaccccaagcaaggttctgaggatgcggacctgatcaatgccggcaaagagacggtcaccctccgcccgggagcatccgtcttcggcagcgaggagagtttcggcatgatccggagcggtcgcatcgacctaacgatcctgggcgccatgcaggttagtgccacgggcgatctcgccaactggatgttgcctggaaaggtcaagggcttcggcggtgccatggatctggtcagcaaccccagtgcgactaaggtggttgtcaccatggagcatacggataagaagggcaaccccaagatcctgaagcagtgcgaattccctctgacgggacgcgcttgcgtgtcaaggatcattaccgagttgtgtgtgttcgatgttgacttcgctcatgggcttactctcatcgagattgcggacggtgtgacggtggaggagatcaagagtaagacggaggcaccgtttagagtcgctgacgatctgaagcccatgttgtaaatattgtaatcaatacccaccagaaagcccagcacaaaaacagacgaccatgtatcgggaatagaagagtttccggattggatagcggatcagtgcctcatagcattaaagcaattgttctgagatataaattgtatcaaattggcgtttacgtagtacagaattttcagattaacctgactagatgagtaatgttctttaacgacaccatttccgcctttcttattgcatgactctgagcattatggagctttgaaatcagctggtttgcctgtgttctgctgatagaactgcctggccatgcctttaaagccttcgaaatctatatcccatagtatagatagattgaaccactgacgctgcgagatctctcgtgaaacagcatttactttacgcgccccttcataaccgaaagccagccaccgctctcctttggatagtagaccaatagtgtgacaagatcagcgctgcacgcaagtcaaacaagtcaaactaaggggttagatttgcttattgctgtatttgtcaagtatttgatagacattgacttaattaggaagaaggtgaagccgtcagtcacacgcttttaaactatcgtactcccttcttggcgttgaggttgcgactattcctccgcaggcgatgacacattattgtattcaagtagag

SEQ ID NO: 37605 - DNA, 1569 bp, Muscodor strobelii
  misc_feature: SGI cDNA ID NO. 573053
  misc_feature: Encodes the peptide sequence at SEQ ID NO 37606
atgagcgacgacttagctgcgaagcttgccgcttcgaccctcactgacggagcggataactccaactggaagcaaggcctcaatatacctgttcgcgatggccgacagcaaaccgaggatgtcacaaatacgaaaggtctggagtgggaggacttctccttgaagcgagatctgctgatgggcatctttgaggccggatatgaaaagccatcgccaatccaagaagagtccatccctgtcgccttgacaggcagagacatattagctcgtgccaagaacggaaccggcaagacggctgccttcgtcgtgcccaccctcgaacgtatcaaccccaaagtcaacaagatccaatgcctcatcctcgtccctacccgagaacttgcaatgcagacgtcccaggtctgcaagactctaggaaagcacctcggcgtcaacgtgatggtcaccactggtggtaccgggcttcgagatgatattgtccgtttgcaggatcctgtccacatagtggtgggcactcccggacgtattctcgatcttgctgggaaaggtgtcgctgatctgagtgaatgccccatgttcatcatggacgaggctgacaagctcttgtccatcgagttcacccctgtcatcgagcagctcttgcagttccaccccaaggaccgccaggtcatgctgttctccgccactttccccttgtctgtcaaggacttctccgacaagaacatggccaagccctacgagatcaacctgatggacgagctgaccctccgtggtatcacgcaatattacgcctttgtcgaggagaagtccaaggttcattgcttaaacacacttttctccaaactacaaatcaaccagtccatcattttctgcaactcgaccaaccgtgttgaactcctggccaaaaagatcaccgaactcggctattcatgcttctacagtcacgccaagatggcccagcatgcccgaaaccgcgtcttccatgacttccgcaacggcgtctgccgtaatcttgtgtgctctgatcttctcacccgtggtatcgacattcaggctgtcaacgtcgtcatcaactttgacttccccaagaatgctgagacctacctgcatcgtattggtcgttccggccgttatggccatcttggtctggctatcaatctgatcaactgggaggatcgatataacctgtacaacattgagaaggatcttggtacggagattcagcctatcccacccaccatcgacaaagctctctacgtctatgacaaccccgagaacattccccgtcctgccaataccttcgccacaaagcctccttctgcccacagaacccaccagggcgagcatcataacggctcacaatctcaagcgagaggacagggcagtttccaatctcaaagcggtcgcggaggcttgtacaacgacggacagcctcgtcaattccagaacaaccgaggcggccagcgtggtggtcgtggtggctctcgcggccgtggcttcaacaactacaacggacgaggtggcggtcgtgggcaggctcaaccacaagggcctcctccgcaagcttag

SEQ ID NO: 37606 - protein, 522 aa, Muscodor strobelii
  misc_feature: SGI Peptide ID NO. 573053
  misc_feature (71)..(237): Pfam Id: PF00270 Pfam Desc: DEAD/DEAH box helicase
  misc_feature (303)..(379): Pfam Id: PF00271 Pfam Desc: Helicase conserved C-terminal domain
  misc_feature (1)..(450): NCBI GI: 46138553 Blast Desc: FG10791.1 [Gibberella zeae PH-1] gi|91206578|sp|Q4HW67.1|DHH1_GIBZE RecName: Full=ATP-dependent RNA helicase DHH1
  misc_feature (1)..(518): NCBI GI: 164425692 Blast Desc: NCU06149 [Neurospora crassa OR74A] gi|161789041|sp|Q7S5D9.2|DHH1_NEUCR RecName: Full=ATP-dependent RNA helicase dhh-1 gi|157071024|gb|EAA30775.2| NCU06149 crassa
  misc_feature (15)..(470): NCBI GI: 145608086 Blast Desc: MGG_03388 [Magnaporthe grisea 70-15] gi|152013507|sp|A4R715.1|DHH1_MAGGR RecName: Full=ATP-dependent RNA helicase DHH1 gi|145015595|gb|EDK00085.1| MGG_03388 grisea
  misc_feature (20)..(515): NCBI GI: 171681521 Blast Desc: protein product [Podospora anserina] gi|170940719|emb|CAP65947.1| protein product [Podospora anserina]
  misc_feature (1)..(463): NCBI GI: 156043018 Blast Desc: conserved [Sclerotinia sclerotiorum 1980] gi|154695693|gb|EDN95431.1| conserved [Sclerotinia sclerotiorum 1980]
  misc_feature (1)..(520): NCBI GI: 154313296 Blast Desc: conserved [Botryotinia fuckeliana B05.10] gi|160380642|sp|A6RY31.1|DHH1_BOTFB RecName: Full=ATP-dependent RNA helicase dhh1 gi|150849414|gb|EDN24607.1| conserved B05.10]
  misc_feature (1)..(515): NCBI GI: 121704610 Blast Desc: ATP dependent RNA helicase (Dhh1), [Aspergillus clavatus NRRL 1] gi|142981101|sp|A1CJ18.1|DHH1_ASPCL RecName: Full=ATP-dependent RNA helicase dhh1 gi|119398714|gb|EAW09142.1|
  misc_feature (1)..(497): NCBI GI: 119195455 Blast Desc: conserved [Coccidioides immitis RS] gi|118582181|sp|Q1E5R1.1|DHH1_COCIM RecName: Full=ATP-dependent RNA helicase DHH1
  misc_feature (1)..(497): NCBI GI: 240104922 Blast Desc: ATP-dependent RNA helicase, [Coccidioides posadasii C735 delta SOWgp]
  misc_feature (40)..(446): NCBI GI: 116203955 Blast Desc: CHGG_09861 [Chaetomium globosum CBS 148.51] gi|118582180|sp|Q2GQ93.1|DHH1_CHAGB RecName: Full=ATP-dependent RNA helicase DHH1 gi|88175989|gb|EAQ83457.1| CHGG_09861 globosum
MSDDLAAKLAASTLTDGADNSNWKQGLNIPVRDGRQQTEDVTNTKGLEWEDFSLKRDLLMGIFEAGYEKPSPIQEESIPVALTGRDILARAKNGTGKTAAFVVPTLERINPKVNKIQCLILVPTRELAMQTSQVCKTLGKHLGVNVMVTTGGTGLRDDIVRLQDPVHIVVGTPGRILDLAGKGVADLSECPMFIMDEADKLLSIEFTPVIEQLLQFHPKDRQVMLFSATFPLSVKDFSDKNMAKPYEINLMDELTLRGITQYYAFVEEKSKVHCLNTLFSKLQINQSIIFCNSTNRVELLAKKITELGYSCFYSHAKMAQHARNRVFHDFRNGVCRNLVCSDLLTRGIDIQAVNVVINFDFPKNAETYLHRIGRSGRYGHLGLAINLINWEDRYNLYNIEKDLGTEIQPIPPTIDKALYVYDNPENIPRPANTFATKPPSAHRTHQGEHHNGSQSQARGQGSFQSQSGRGGLYNDGQPRQFQNNRGGQRGGRGGSRGRGFNNYNGRGGGRGQAQPQGPPPQA

SEQ ID NO: 37607 - DNA, 3583 bp, Muscodor strobelii
  misc_feature: SGI EST ID NO. CUFF.90098.3
  misc_feature: Variant of the nucleotide sequence at SEQ ID NO 37605
agcacataatctgcacaagctccaaccacatttaccaggcctccacaccagtgcacacaccgcacggaatccttgaacatccctcgcggcgcaaacctctcgccatggtcaacggcccaacgttctagtcaatcacccaacgagcagacaaatccccacacatttttcgcctttgtggcagcttcaaccttcaaaccaccaagaaaagggcttctgagttgtccctgcccctgatctcaagccaacgtcctggtatcctgcctcgaaactctgtcccaaaccaccagcgacgactctcccttcccatatcatcctcccgtacgcaaatatccgccacatcgattcttcgacatcgaaatcgacccctagacgtacaaattccaattcccatccctccataccacaagattgagcgccaaagctcccccacctacccaatatgagcgacgacttagctgcgaagcttgccgcttcgaccctcactgacggagcggataactccaactggaagcaaggcctcaatatacctgttcgcgatggccgacagcaaaccgaggatgtcacaaatacgaaaggtctggagtgggaggacttctccttgaagcgagatctgctgatgggcatctttgaggccggatatgaaaagccatcgccaatccaagaagagtccatccctgtcgccttgacaggcagagacatattagctcgtgccaagaacggaaccggcaagacggctgccttcgtcgtgcccaccctcgaacgtatcaaccccaaagtcaacaagatccaatgcctcatcctcgtccctacccgagaacttgcaatgcagacgtcccaggtctgcaagactctaggaaagcacctcggcgtcaacgtgatggtcaccactggtggtaccgggcttcgagatgatattgtccgtttgcaggatcctgtccacatagtggtgggcactcccggacgtattctcgatcttgctgggaaaggtgtcgctgatctgagtgaatgccccatgttcatcatggacgaggctgacaagctcttgtccatcgagttcacccctgtcatcgagcagctcttgcagttccaccccaaggaccgccaggtcatgctgttctccgccactttccccttgtctgtcaaggacttctccgacaagaacatggccaagccctacgagatcaacctgatggacgagctgaccctccgtggtatcacgcaatattacgcctttgtcgaggagaagtccaaggttcattgcttaaacacacttttctccaaactacaaatcaaccagtccatcattttctgcaactcgaccaaccgtgttgaactcctggccaaaaagatcaccgaactcggctattcatgcttctacagtcacgccaagatggcccagcatgcccgaaaccgcgtcttccatgacttccgcaacggcgtctgccgtaatcttgtgtgctctgatcttctcacccgtggtatcgacattcaggctgtcaacgtcgtcatcaactttgacttccccaagaatgctgagacctacctgcatcgtattggtcgttccggccgttatggccatcttggtctggctatcaatctgatcaactgggaggatcgatataacctgtacaacattgagaaggatcttggtacggagattcagcctatcccacccaccatcgacaaagctctctacgtctatgacaaccccgagaacattccccgtcctgccaataccttcgccacaaagcctccttctgcccacagaacccaccagggcgagcatcataacggctcacaatctcaagcgagaggacagggcagtttccaatctcaaagcggtcgcggaggcttgtacaacgacggacagcctcgtcaattccagaacaaccgaggcggccagcgtggtggtcgtggtggctctcgcggccgtggcttcaacaactacaacggacgaggtggcggtcgtgggcaggctcaaccacaagggcctcctccgcaagcttagcttgttcactatctccaaactatactcgggaccaaagtcgacattccctcgacttatataatatgtggtcctacttccttcctctgtaaatatttcgtagcctggattaagtctttgatttgtatttgcatcatacccatcacgactggttcattggctttcggtttttatttcctttccattttctcggtttcttcaaggagattcttgcagcatctgacgtcatgaggccactgatgtttggacgaaatcggaaaaaggaaggacacggcgtttggtgtttttcttcatctgataagggcggcagcatctggtctaattcggcgaagtagagtaccggaaccaagaaggcggttgtgccacagatcactggttttcgactccggtataccgcttttcttcaacgaaacattgcctacaaattcacaattacaggattcatcttgaaggacaatcgatagattttctactaatgtcttcaagattcgttaccatacgatacccttgcaagtcttgccctcgcagcgagtcatcttgcattctcatcgcaaacacccaccttgcgcatatgcctcggcactgcatcgtttcgacagcaggagcacgatttggcatgatatatacgaaattacgggccattttttcctgtgatgggacagcatatcggcagagagattgagacgaaatccgacatcacgttcaacattcttccgatcgcagggattatgccggtttccctcgacacgaacactctagatcaaaaatcaatagcctgcgacttcccagctttcattgtacatgcgacaacgatacaggcctgagaacctatgacaacccacactccgctcattaatcacatgaccaagacttggccacatctcaagatctgggatagagaggggagcatattaggggagaaggagaaggaagagaaaaaaagagaaaacaagaaaaaaagtatttttttgagagggacgctggatgatcttgatagttctcgtactggttgggctactacggtagtctggactgctggatttgatagtagtctgagcaatatacgatgatggctgtctcttggggcaggtatcgttttccttttcaaatttcgtcttgactactctgtgtcactatgaatgtgatgtgtcattgatgtgagcaatcgctctatacgaatcacacgtgctaataatgcgttgaagcacttccaagtgtatatccgccaaaactgcagcgcaacatgtctgaattgtcaacacgcaaaagtcaggaaacgactggtatatatctgcacaattggaactcgaagcacgatgggtatggagtgctaagggtttccggtggcaatcgatgattgaatcattgatggggttttcgttcttcggatggaatgagagccagatgacattttggaatatggtcgaaaaagcccaatttatatccgattttgtttttgggatgtaaaggaaggatcattcgttcattacctgatgatttacctcgcggcctaagcatgaattcatcgttcattttaggcgaggagtttattaaagtcctggtagcgtcctgttgaaa

SEQ ID NO: 37608 - DNA, 2448 bp, Muscodor strobelii
  misc_feature: SGI cDNA ID NO. 573054
  misc_feature: Encodes the peptide sequence at SEQ ID NO 37609
atgagggacaaaaagaaacagaaacacgctcgctttgatacttcgactcattggtcgccgccacctccgccgggggagtttgcgcccgttgtccaggcagatagtacaattcctatcccatcttggcttttcaacttgcgctttcagaatcagataaaaaacaggaaaaaggatccggcgaggattcctgattggtttcttaacaactgcgtcaagacgaaagaagagttgcaagattcaagccctggtgttaagatcaggaatgcatttgacgtgctacgagaaagtgaggtgggagaagtggacgaccctgagaacgcagtattcgaggttgaacctactgtctatgaagctctgtacaaaacgctactacaacgaccatgtacatccaaagggacacgcgaagaaaatactcaaactttcgccatgtcgagactgttcttaacatctgtctacagtggagtctcacacggagcggcaagctttctacgagaagttgtcgaattctttgcaaaagatattggagccgatctaattaccttaacatcagatgacataatagacttggcacaatatcatgctcattattcagatggacttcgatcgaatttagataacaaccgcacctacctggagatcctggacattgatagatatttttacaacccccagcggtacgaggatccatatcggtatcggggcaaatattttgacgataaagcttatcagaataatccctttgcgcctcagccgggagcagatacatatacccgttatgacgccggtttcgatagtagatatgtgagactaatctctggcatgtcgccattctacaaagtactcgacgcgccgattcaaaagctgctgaagcaggatgagcctccaactgattctaccaagaggctacttatcatacatctccacgaagttcacgacttcggtagacaagtcggagggtttgaggaactccttgattcgctcacaagatcgatttgcgagagaaaatgtaccccggggagaacgttgcttttgctctccagccaattcatacaatctcgccagctttgtgagtcgcctaacagtattctacgagacttaggagattccggattgtatgtcacgctggcccccgtcaagtctcttcatcagcagcatctgctagatcttggacctcccgaagctggcgcgctcatgagttccaacgtgcgacggctacaacgcaagatcagattatttactggaaacttcaaattggctcgattacagccgcatgctgattggagctttgtgagagatgcaatgacttgcagtagttttagagagaggaatctcacgccaggcgtcattttgcgaattgctgctggcataggcaggaactacgaagaagctcacatcattgacgttttgtcaaagacgcagagtcagagtgagttgttgtctaagtggtacaatagggagtatgacagatggtcggactactctcctaagatccgagccataatttgtgatcttgaaaggcagggggagggatctgaatgggagaaggaaatgttgaaacttattatcacacctggccaaactgcggaagccgaggatagtattgaagtcgatgcgcacacgagaaatgtaatcattcagatggtcgaccatttcaggaaatcggccaatacactgagcaagatcccccaaaagctccaaccgaagacagctctagtctatggtccgcacggaacaggtaaaagtcatttagcccgaacgatcgctcatgaatgcagaattcccacactacttgtgtccgctggggatctccatgccagattacctgtgagtgagactagtgatttcgaacgagccgtcaaaggactcttcaaactcgcaagtttgttgtttcctgccgtgatagtcatccaagatgccgatgacgcccttcgcagcggagagctcagcaaccagacttggagaagaaaccgtgtcaatcagttactggaagagattgccggtctctcgaagtacgaagacacgccattcgtgattttgtcgactagcttcccgcagaatatggatcctgctgttttgcggcatattccatgcagattccgtactactctaccagatatcgctacgcgcaaacagatacttgacaactatttgctgggtgaatcaattagccctagtcttgatcttcagactttggcagaagcgacagatggatattctgggtcagacatccggactctgtgttaccaagcagctttggtatgtgaagcaagcccttcgcgagctgaaggacgcttgctgtttctgagggagcacttcgatgaggcgcttagcaggaccgcgccaactgttacacaggagtgtctggatggaattcagaagtttgccggggagaatcatccatctgcatgtgatcgagacaatggatcagggcagaaagcgattacgtga

SEQ ID NO: 37609 - protein, 815 aa, Muscodor strobelii
  misc_feature: SGI Peptide ID NO. 573054
  misc_feature (569)..(756): Pfam Id: PF00004 Pfam Desc: ATPase family associated with various cellular activities (AAA)
  misc_feature (395)..(805): NCBI GI: 154323758 Blast Desc: BC1G_00278 [Botryotinia fuckeliana B05.10] gi|150842507|gb|EDN17700.1| BC1G_00278 [Botryotinia fuckeliana B05.10]
  misc_feature (533)..(802): NCBI GI: 171679990 Blast Desc: protein product [Podospora anserina] gi|170939621|emb|CAP64848.1| protein product [Podospora anserina]
  misc_feature (511)..(799): NCBI GI: 145607716 Blast Desc: MGG_10118 [Magnaporthe grisea 70-15] gi|145015240|gb|EDJ99776.1| MGG_10118 [Magnaporthe grisea 70-15]
  misc_feature (511)..(785): NCBI GI: 145230387 Blast Desc: An01g10850 [Aspergillus niger] gi|134055619|emb|CAK37265.1| protein product [Aspergillus niger]
  misc_feature (568)..(800): NCBI GI: 256720402 Blast Desc: NECHADRAFT_55976 [Nectria haematococca mpVI 77-13-4]
  misc_feature (570)..(754): NCBI GI: 39944774 Blast Desc: MGG_04369 [Magnaporthe grisea 70-15] gi|145021593|gb|EDK05722.1| MGG_04369 [Magnaporthe grisea 70-15]
  misc_feature (571)..(752): NCBI GI: 256722892 Blast Desc: NECHADRAFT_6337 [Nectria haematococca mpVI 77-13-4]
  misc_feature (514)..(794): NCBI GI: 85110419 Blast Desc: NCU05459 [Neurospora crassa OR74A] gi|7801053|emb|CAB91448.1| related to MSP1 protein [Neurospora crassa] gi|28925131|gb|EAA34214.1| conserved [Neurospora crassa
  misc_feature (510)..(754): NCBI GI: 189198654 Blast Desc: ATPase family AAA domain-containing protein 1-A [Pyrenophora tritici-repentis Pt-1C-BFP] gi|187982763|gb|EDU48251.1| ATPase family AAA domain-containing
  misc_feature (511)..(751): NCBI GI: 242083742 Blast Desc: SORBIDRAFT_08g017577 [Sorghum bicolor] gi|241942989|gb|EES16134.1| SORBIDRAFT_08g017577 [Sorghum bicolor]
MRDKKKQKHARFDTSTHWSPPPPPGEFAPVVQADSTIPIPSWLFNLRFQNQIKNRKKDPARIPDWFLNNCVKTKEELQDSSPGVKIRNAFDVLRESEVGEVDDPENAVFEVEPTVYEALYKTLLQRPCTSKGTREENTQTFAMSRLFLTSVYSGVSHGAASFLREVVEFFAKDIGADLITLTSDDIIDLAQYHAHYSDGLRSNLDNNRTYLEILDIDRYFYNPQRYEDPYRYRGKYFDDKAYQNNPFAPQPGADTYTRYDAGFDSRYVRLISGMSPFYKVLDAPIQKLLKQDEPPTDSTKRLLIIHLHEVHDFGRQVGGFEELLDSLTRSICERKCTPGRTLLLLSSQFIQSRQLCESPNSILRDLGDSGLYVTLAPVKSLHQQHLLDLGPPEAGALMSSNVRRLQRKIRLFTGNFKLARLQPHADWSFVRDAMTCSSFRERNLTPGVILRIAAGIGRNYEEAHIIDVLSKTQSQSELLSKWYNREYDRWSDYSPKIRAIICDLERQGEGSEWEKEMLKLIITPGQTAEAEDSIEVDAHTRNVIIQMVDHFRKSANTLSKIPQKLQPKTALVYGPHGTGKSHLARTIAHECRIPTLLVSAGDLHARLPVSETSDFERAVKGLFKLASLLFPAVIVIQDADDALRSGELSNQTWRRNRVNQLLEEIAGLSKYEDTPFVILSTSFPQNMDPAVLRHIPCRFRTTLPDIATRKQILDNYLLGESISPSLDLQTLAEATDGYSGSDIRTLCYQAALVCEASPSRAEGRLLFLREHFDEALSRTAPTVTQECLDGIQKFAGENHPSACDRDNGSGQKAIT

SEQ ID NO: 37610 - DNA, 687 bp, Muscodor strobelii
  misc_feature: SGI cDNA ID NO. 573055
  misc_feature: Encodes the peptide sequence at SEQ ID NO 37611
atgtcttcccaagcttccaagtcgggccccgcatacaagggcaacacatccaaggatgccaagaaccgggacattccagaggctgaaaactgtgctgtgttcgttacccagatcccgtcaggcactacatacgcggagttggtgggaagcatggctggccgtggaattggtcgcatcaagcacgtccagtatggagcgctcagcatcaatcacgccggacttgctgctaaggtttctttctttgatccccagagcgcgaggaggctggttgccgccagcagaagtggtgggatcaggatcaaggataagtggcctcacgccatcttgaaccgtcacaaggttgcgcctagcagccctttgccgatgattcccggtaacaatggccgtgtctctcgtatactggagatcacgggtccgaagactgtagtccaactcggacaactaatggcgctgatcagatcatccatgaactcggacttcttcttgggtgtatcgggtaccgaggaacgagatgtcccgggtggtactcacagaactgtcatcatccacttctgctcctttgacgagcaactcatgccggttctcgacatgctccggagacaggcaactaacacgagcctcgatcgtaatcagagagcactctgggctcaggttgtctacggtcacggcgtggatccttgcgagtag

SEQ ID NO: 37611 - protein, 228 aa, Muscodor strobelii
  misc_feature: SGI Peptide ID NO. 573055
  misc_feature (12)..(228): NCBI GI: 256723100 Blast Desc: NECHADRAFT_81265 [Nectria haematococca mpVI 77-13-4]
  misc_feature (12)..(226): NCBI GI: 85104224 Blast Desc: NCU01087 [Neurospora crassa OR74A] gi|18376188|emb|CAD21304.1| [Neurospora crassa] gi|28923247|gb|EAA32463.1| [Neurospora crassa OR74A]
  misc_feature (10)..(92): NCBI GI: 39977813 Blast Desc: MGG_06791 [Magnaporthe grisea 70-15] gi|145013671|gb|EDJ98312.1| MGG_06791 [Magnaporthe grisea 70-15]
  misc_feature (12)..(190): NCBI GI: 171683223 Blast Desc: protein product [Podospora anserina] gi|170941571|emb|CAP67223.1| protein product [Podospora anserina]
  misc_feature (12)..(159): NCBI GI: 85085374 Blast Desc: NCU04417 [Neurospora crassa OR74A] gi|28918586|gb|EAA28258.1| [Neurospora crassa OR74A]
  misc_feature (12)..(159): NCBI GI: 40882203 Blast Desc: conserved [Neurospora crassa]
  misc_feature (9)..(190): NCBI GI: 154311226 Blast Desc: [Botryotinia fuckeliana B05.10] gi|150851135|gb|EDN26328.1| [Botryotinia fuckeliana B05.10]
  misc_feature (23)..(227): NCBI GI: 171683023 Blast Desc: protein product [Podospora anserina] gi|170941471|emb|CAP67122.1| protein product [Podospora anserina]
MSSQASKSGPAYKGNTSKDAKNRDIPEAENCAVFVTQIPSGTTYAELVGSMAGRGIGRIKHVQYGALSINHAGLAAKVSFFDPQSARRLVAASRSGGIRIKDKWPHAILNRHKVAPSSPLPMIPGNNGRVSRILEITGPKTVVQLGQLMALIRSSMNSDFFLGVSGTEERDVPGGTHRTVIIHFCSFDEQLMPVLDMLRRQATNTSLDRNQRALWAQVVYGHGVDPCE

SEQ ID NO: 37612 - DNA, 335 bp, Muscodor strobelii
  misc_feature: SGI EST ID NO. CUFF.90009.0
  misc_feature: Variant of the nucleotide sequence at SEQ ID NO 37610
gcagacaccacattttgcttccattgcataaggactgggcctcagttcacagttcttccacataaacgtgcttcaaagagagcttgagttagtattctccacggttacatattccatccaccagcatgtgcttccactaacacaatgtgcagaaatacttgctgagctacatgctatcatctcaaggcaacaatgtcttcccaagcttccaagtcgggccccgcatacaagggcaacacatccaaggatgccaagaaccgggacattccagaggctgaaaactgtgctgtgttcgttacccagatcccgtcaggcactacatacgcggagttggt

SEQ ID NO: 37613 - DNA, 1380 bp, Muscodor strobelii
  misc_feature: SGI cDNA ID NO. 573056
  misc_feature: Elevated expression when VOC is produced
  misc_feature: Encodes the peptide sequence at SEQ ID NO 37614
atggtgatcaagaagcgtcaaattctgtgggactggaccaactctgccggtccaggaaacgttggcgttcctggaaagatcgaacagataccatttggtcccaacagtcccgtcgctgcctttgtcaactggaatgcgtgggtacccccggagctgaatggtcgagtccctttccatcctatggtccgggttctcgctagcactcagggcaacgactgggccatcattcaaaatagtcccttcaacctaatattgttcttcaacgagcttgagcgcgctggtatctccccagaacaggctcgtgacatctggtatagccatatgatacccctgaggaaaaacaagggaaagaaactcggttcccctgccgtggcctcggatgataaaggtcgtcaatggatcgagaagttcatgagtctcgtagccagtgaccctccggacttcctctgtctgcactactactccaagaacgccgatgaggcaattaagtacatcgagaacatgcacaacaaatggcccaagcgcaagattatggtcacagaaattgcatgcatcgaccgcaaccaccaagtcgttctaaacttcacggtcaaaatctgcaattggatggataagcaggactatattgccgaatacggccttttcgactttcagtgcaagattgctgatgatttcgtcagtcccgctgctcagctcatggatgccaatggcaacttcaccgagctcggaaagatgtatgtgcaccaacagcctatgaagcttccaggccaaggcattgtcgccaatgaactcgttgttagcggcccaaaggaagagacagtggcagacttcgagtcgagaacttgcgatcctttgttccgtgaaacacaggacgttaccgccgacgccacggaggaagatggtgtcgaggtgcttggactcatgtctctcaccgctgccgctgccctcaacccagaccagcaaaaggcactggatgtacacaacaatggacgtaagggaaagaatctcaagcccttggtctgggatagcaatcttgcccacaatgctgaggtatatgcaaagcatctcgcccaaatcggcaagctggaacattcatctggtgatcagcgacctaaccagggcgagaatcttgcttgggcttctgcctccaacggcacacccatgcagatggcggcaaacatgtggatgggcgaagccaagaactatcacggcgagcctatcggccagggagacttcgggtcgtatggccactacactcaatgtatgtggaaatcaaccactaagctcggcatgggatgggccaaggacgccaaaggcggtgtctacattgtgggacgatactctcctcctggtaactttatcgggcagaagccgtactga

SEQ ID NO: 37614 - protein, 459 aa, Muscodor strobelii
  misc_feature: SGI Peptide ID NO. 573056
  misc_feature (324)..(447): Pfam Id: PF00188 Pfam Desc: SCP-like extracellular protein
  misc_feature (315)..(459): NCBI GI: 256723367 Blast Desc: NECHADRAFT_51924 [Nectria haematococca mpVI 77-13-4]
  misc_feature (245)..(459): NCBI GI: 256857934 Blast Desc: PR-1-like protein [Fusarium oxysporum f. sp. lycopersici]
  misc_feature (316)..(459): NCBI GI: 46114534 Blast Desc: FG03109.1 [Gibberella zeae PH-1]
  misc_feature (311)..(458): NCBI GI: 145604198 Blast Desc: MGG_13936 [Magnaporthe grisea 70-15] gi|145012244|gb|EDJ96900.1| MGG_13936 [Magnaporthe grisea 70-15]
  misc_feature (315)..(459): NCBI GI: 46114940 Blast Desc: FG03312.1 [Gibberella zeae PH-1]
  misc_feature (316)..(459): NCBI GI: 256724321 Blast Desc: NECHADRAFT_102131 [Nectria haematococca mpVI 77-13-4]
  misc_feature (297)..(459): NCBI GI: 171677961 Blast Desc: protein product [Podospora anserina] gi|170937049|emb|CAP61708.1| protein product [Podospora anserina]
  misc_feature (302)..(456): NCBI GI: 195502324 Blast Desc: GE10229 [Drosophila yakuba] gi|194184274|gb|EDW97885.1| GE10229 [Drosophila yakuba]
  misc_feature (320)..(456): NCBI GI: 156407846 Blast Desc: [Nematostella vectensis] gi|156228707|gb|EDO49505.1| [Nematostella vectensis]
  misc_feature (320)..(459): NCBI GI: 15235994 Blast Desc: allergen V5/Tpx-1-related family protein [Arabidopsis thaliana] gi|4539297|emb|CAB39600.1| pathogenesis-related protein [Arabidopsis thaliana] gi|7269430|emb|CAB79434.1| protein
  misc_feature: Useful for introducing or modulating the production of volatile compounds
MVIKKRQILWDWTNSAGPGNVGVPGKIEQIPFGPNSPVAAFVNWNAWVPPELNGRVPFHPMVRVLASTQGNDWAIIQNSPFNLILFFNELERAGISPEQARDIWYSHMIPLRKNKGKKLGSPAVASDDKGRQWIEKFMSLVASDPPDFLCLHYYSKNADEAIKYIENMHNKWPKRKIMVTEIACIDRNHQVVLNFTVKICNWMDKQDYIAEYGLFDFQCKIADDFVSPAAQLMDANGNFTELGKMYVHQQPMKLPGQGIVANELVVSGPKEETVADFESRTCDPLFRETQDVTADATEEDGVEVLGLMSLTAAAALNPDQQKALDVHNNGRKGKNLKPLVWDSNLAHNAEVYAKHLAQIGKLEHSSGDQRPNQGENLAWASASNGTPMQMAANMWMGEAKNYHGEPIGQGDFGSYGHYTQCMWKSTTKLGMGWAKDAKGGVYIVGRYSPPGNFIGQKPY

SEQ ID NO: 37615 - DNA, 4506 bp, Muscodor strobelii
  misc_feature: SGI EST ID NO. CUFF.90023.0
  misc_feature: Variant of the nucleotide sequence at SEQ ID NO 37613
gtcgcggattcttggcatttttctcatcatacgtcgtagcaatctgcctccttcagcttacatattgtttgctccgttgactcgttcgtcggcgcagccgacttgtcaataaaatttgccaaaatatataagcacacttcagtccggatgagatcgattggtactacttggttaaaccaacgcggctccaggacgtgcgatatttaaaacctactctttctcgatcttccctctttcatcgactacttctcaactattttctcttttcaacatctcatcccttttctctatttttcgtaccgaaaatggtgatcaagaagcgtcaaattctgtgggactggaccaactctgccggtccaggaaacgttggcgttcctggaaagatcgaacagataccatttggtcccaacagtcccgtcgctgcctttgtcaactggaatgcgtgggtacccccggagctgaatggtcgagtccctttccatcctatggtccgggttctcgctagcactcagggcaacgactgggccatcattcaaaatagtcccttcaacctaatattgttcttcaacgagcttgagcgcgctggtatctccccagaacaggctcgtgacatctggtatagccatatgatacccctgaggaaaaacaagggaaagaaactcggttcccctgccgtggcctcggatgataaaggtcgtcaatggatcgagaagttcatgagtctcgtagccagtgaccctccggacttcctctgtctgcactactactccaagaacgccgatgaggcaattaagtacatcgagaacatgcacaacaaatggcccaagcgcaagattatggtcacagaaattgcatgcatcgaccgcaaccaccaagtcgttctaaacttcacggtcaaaatctgcaattggatggataagcaggactatattgccgaatacggccttttcgactttcagtgcaagattgctgatgatttcgtcagtcccgctgctcagctcatggatgccaatggcaacttcaccgagctcggaaagatgtatgtgcaccaacagcctatgaagcttccaggccaaggcattgtcgccaatgaactcgttgttagcggcccaaaggaagagacagtggcagacttcgagtcgagaacttgcgatcctttgttccgtgaaacacaggacgttaccgccgacgccacggaggaagatggtgtcgaggtgcttggactcatgtctctcaccgctgccgctgccctcaacccagaccagcaaaaggcactggatgtacacaacaatggacgtaagggaaagaatctcaagcccttggtctgggatagcaatcttgcccacaatgctgaggtatatgcaaagcatctcgcccaaatcggcaagctggaacattcatctggtgatcagcgacctaaccagggcgagaatcttgcttgggcttctgcctccaacggcacacccatgcagatggcggcaaacatgtggatgggcgaagccaagaactatcacggcgagcctatcggccagggagacttcgggtcgtatggccactacactcaatgtatgtggaaatcaaccactaagctcggcatgggatgggccaaggacgccaaaggcggtgtctacattgtgggacgatactctcctcctggtaactttatcgggcagaagccgtactgaacaccttatgattcgcttttcatggagattttgtagaaacttgaagagatggtattgtcgaatttgtcgcagtagttgggcgtcgatggtaactacatagtacggtccttgtcttgattgagattggagtcatatattcagagtcttttcgttacactacatattcatgcgacagtattccacgcaaaactcacatgaggagaatcttctttttccccctcgatgctaaagtgtgaagccgtctggtatgaagagttagtgctagcccattgatcaaaccaaagccgagttcgtgccacagagactcctatatgaggcaaacatcaccataagaccaaatagagagcagtggggggtagatgcaggcgcaaggacgacatataacctaggcggctcacgtataggggacttgtatcgaaaagctactatatacatcatttgtactacgagactctaaagcacagatcaagcctatatgagaggcggcatatcatcatccgactcgtcttcttcctccgggtgcaagtaggcagctctcactctgaccatatcttcttcgtcatcatctgaatctgcccacgctcctggcattctcatgcctaaatccgaatcgtactgatcgtcttctccagcatcactctggcctgtttcgtggccaaacagatccatcagcatctggaaaacgccaggcgggggaccccgagcgggttcatcttgctcatcttcaagaccatctccagctcgcggcatcccaaaagcgacatcggcctcagcaaaagcttcctccatctgctgaagttgctcgggatttggctgtgcacctccttgctgaaaacgccggaaaagtctacgcagtacttcgatgtcggcggcttgtgcgccaagaggaagagcagggccagatcctctcgcacccagcggatcgggattccatggctgtttttgtgagtcgtatgaaaaaaatattctcgtccaatgggggtggaagaggatcaaactcccaatttggttgctgattgagcagcccgtctggaacaacgctcatgagagaaggcgtattatctagataaacaaatcttgccacatttcgttgagcgacagggggaaatgcgtatggttgtttacccggcttctttccatcacgagcaacctctttcaataagttcatcgcttgtgcattattccagagactcttcgtctgatgaatgtataattctgtgaaaagttcttcgtgctggtttcgcggctgtagcccccacactatcttgggaacatcgagattgagagctttatataggctactgtataaccatggaagttgcgcgatgccgtcaagtagtagggttttggcacctgcagggtcgttctgctgcaatctcgcaagaaccagtgtttgtctgatatagtcttgtatgtcaagtttgtccagtgcctcggagtcacagaagtcgatgaaccatttagactcgtgtgcccggatagccatcgggtggatgaaatggatgataccgtatgggtcgtcaagatccatgctgaaaagtagtttggaccactccaaagcagttctataggtgcccttcataactaggctcttgaggtaatgataacccgctagccagaactgacgattttccggtcgccgaaagtcgagtctggctttgccctcggtcatcttttggcgaaacaaagatacagaaacccggccaagagtgaagagggcacgttcgcacaggtcagcagccagcgccgagttttggtcctgcttggcgattttgctgacttggatgagacttgatacatggtagggacttcgatgcaggaagtgcacgagcgccatgggttcaaactgctggatgaccctgaagaaagacgcttcgagtgcttggtaggtcgtgtcatgggcaaatacaaactcgaccgtgccgcatttgttgttctcagtatctaatgccttcatcgagagaccatgtggcgaagcacgtggccaggtctctttgcccggcaggaagatatttctacgaagcgtaacttctgggagggtcttacccgcctggcctttcagaaacgtttccagatctacctgctgaggaatgttgcgcgggcgctgggtggtggtgcgggcgcgctcttcattttcctcgttttcagcagctgcgatggcctcccggccgaacaggttgcgcatttcgttgatgacgcgcaaatggtgagcattgatgcgcagcaggtcgcatatgcgttcgtatgcaactgagcgggcatcatccggcttcgttgaggccgtagtggcgcctggagcagacgccttggccaagttgagttccgcgagtgctttgtctatctcatcaacatcttgcggcctaggtgcgtcttgtttggctgctgtgggcgttgcatctgatttcttggctttcttctttttcttcttgctcttcttggaggaacttgttgggcccgctgagagcggagaggatgtcttagcagcagcagcagcagcagcagcaggagccgtcttctcgggatcgtcgtcagagtcatcatcgttgttgttgtcgttgtcgttgttctcgcggctgctatcgtcgtctgggtcgccaagagcagcaaatcccgagaaaagattcgccttcgccttcggccgttggacgggcgcctcctcttcgctttcgtccgactcggcggcgggactagagctttgcagctgctccagctctctctgcttctgcagcttgcgcagttgccgactggacatgattgctgccgtttgaaaagacaacactcgagctttgcccctccgcaattgcaaacgtttctttgcgac

SEQ ID NO: 37616 - DNA, 2133 bp, Muscodor strobelii
  misc_feature: SGI cDNA ID NO. 573057
  misc_feature: Encodes the peptide sequence at SEQ ID NO 37617
atgtccagtcggcaactgcgcaagctgcagaagcagagagagctggagcagctgcaaagctctagtcccgccgccgagtcggacgaaagcgaagaggaggcgcccgtccaacggccgaaggcgaaggcgaatcttttctcgggatttgctgctcttggcgacccagacgacgatagcagccgcgagaacaacgacaacgacaacaacaacgatgatgactctgacgacgatcccgagaagacggctcctgctgctgctgctgctgctgctgctaagacatcctctccgctctcagcgggcccaacaagttcctccaagaagagcaagaagaaaaagaagaaagccaagaaatcagatgcaacgcccacagcagccaaacaagacgcacctaggccgcaagatgttgatgagatagacaaagcactcgcggaactcaacttggccaaggcgtctgctccaggcgccactacggcctcaacgaagccggatgatgcccgctcagttgcatacgaacgcatatgcgacctgctgcgcatcaatgctcaccatttgcgcgtcatcaacgaaatgcgcaacctgttcggccgggaggccatcgcagctgctgaaaacgaggaaaatgaagagcgcgcccgcaccaccacccagcgcccgcgcaacattcctcagcaggtagatctggaaacgtttctgaaaggccaggcgggtaagaccctcccagaagttacgcttcgtagaaatatcttcctgccgggcaaagagacctggccacgtgcttcgccacatggtctctcgatgaaggcattagatactgagaacaacaaatgcggcacggtcgagtttgtatttgcccatgacacgacctaccaagcactcgaagcgtctttcttcagggtcatccagcagtttgaacccatggcgctcgtgcacttcctgcatcgaagtccctaccatgtatcaagtctcatccaagtcagcaaaatcgccaagcaggaccaaaactcggcgctggctgctgacctgtgcgaacgtgccctcttcactcttggccgggtttctgtatctttgtttcgccaaaagatgaccgagggcaaagccagactcgactttcggcgaccggaaaatcgtcagttctggctagcgggttatcattacctcaagagcctagttatgaagggcacctatagaactgctttggagtggtccaaactacttttcagcatggatcttgacgacccatacggtatcatccatttcatccacccgatggctatccgggcacacgagtctaaatggttcatcgacttctgtgactccgaggcactggacaaacttgacatacaagactatatcagacaaacactggttcttgcgagattgcagcagaacgaccctgcaggtgccaaaaccctactacttgacggcatcgcgcaacttccatggttatacagtagcctatataaagctctcaatctcgatgttcccaagatagtgtgggggctacagccgcgaaaccagcacgaagaacttttcacagaattatacattcatcagacgaagagtctctggaataatgcacaagcgatgaacttattgaaagaggttgctcgtgatggaaagaagccgggtaaacaaccatacgcatttccccctgtcgctcaacgaaatccatggaatcccgatccgctgggtgcgagaggatctggccctgctcttcctcttggcgcacaagccgccgacatcgaagtactgcgtagacttttccggcgttttcagcaaggaggtgcacagccaaatcccgagcaacttcagcagatggaggaagcttttgctgaggccgatgtcgcttttgggatgccgcgagctggagatggtcttgaagatgagcaagatgaacccgctcggggtcccccgcctggcgttttccagatgctgatggatctgtttggccacgaaacaggccagagtgatgctggagaagacgatcagtacgattcggatttaggcatgagaatgccaggagcgtgggcagattcagatgatgacgaagaagatatggtcagagtgagagctgcctacttgcacccggaggaagaagacgagtcggatgatgatatgccgcctctcatatag

SEQ ID NO: 37617 - protein, 710 aa, Muscodor strobelii
  misc_feature: SGI Peptide ID NO. 573057
  misc_feature (271)..(634): Pfam Id: PF04910 Pfam Desc: Domain of function, DUF654
  misc_feature (271)..(436): Pfam Id: PF04910 Pfam Desc: Domain of function, DUF654
  misc_feature (1)..(542): NCBI GI: 145606294 Blast Desc: MGG_02406 [Magnaporthe grisea 70-15] gi|145013996|gb|EDJ98637.1| MGG_02406 [Magnaporthe grisea 70-15]
  misc_feature (1)..(541): NCBI GI: 46138671 Blast Desc: FG10850.1 [Gibberella zeae PH-1]
  misc_feature (1)..(536): NCBI GI: 116199887 Blast Desc: CHGG_08099 [Chaetomium globosum CBS 148.51] gi|88179378|gb|EAQ86846.1| CHGG_08099 [Chaetomium globosum CBS 148.51]
  misc_feature (140)..(541): NCBI GI: 85079192 Blast Desc: NCU03367 [Neurospora crassa OR74A] gi|28917360|gb|EAA27066.1| [Neurospora crassa OR74A]
  misc_feature (1)..(562): NCBI GI: 171688912 Blast Desc: protein product [Podospora anserina] gi|170944418|emb|CAP70529.1| protein product [Podospora anserina]
  misc_feature (140)..(541): NCBI GI: 28881144 Blast Desc: conserved [Neurospora crassa]
  misc_feature (140)..(536): NCBI GI: 256729103 Blast Desc: NECHADRAFT_93314 [Nectria haematococca mpVI 77-13-4]
  misc_feature (1)..(542): NCBI GI: 154316961 Blast Desc: BC1G_03898 [Botryotinia fuckeliana B05.10] gi|150845510|gb|EDN20703.1| BC1G_03898 [Botryotinia fuckeliana B05.10]
  misc_feature (135)..(542): NCBI GI: 156043767 Blast Desc: SS1G_10887 [Sclerotinia sclerotiorum 1980] gi|154695274|gb|EDN95012.1| SS1G_10887 [Sclerotinia sclerotiorum 1980]
  misc_feature (1)..(536): NCBI GI: 115389212 Blast Desc: conserved [Aspergillus terreus NIH2624] gi|114194507|gb|EAU36207.1| conserved [Aspergillus terreus NIH2624]
MSSRQLRKLQKQRELEQLQSSSPAAESDESEEEAPVQRPKAKANLFSGFAALGDPDDDSSRENNDNDNNNDDDSDDDPEKTAPAAAAAAAAKTSSPLSAGPTSSSKKSKKKKKKAKKSDATPTAAKQDAPRPQDVDEIDKALAELNLAKASAPGATTASTKPDDARSVAYERICDLLRINAHHLRVINEMRNLFGREAIAAAENEENEERARTTTQRPRNIPQQVDLETFLKGQAGKTLPEVTLRRNIFLPGKETWPRASPHGLSMKALDTENNKCGTVEFVFAHDTTYQALEASFFRVIQQFEPMALVHFLHRSPYHVSSLIQVSKIAKQDQNSALAADLCERALFTLGRVSVSLFRQKMTEGKARLDFRRPENRQFWLAGYHYLKSLVMKGTYRTALEWSKLLFSMDLDDPYGIIHFIHPMAIRAHESKWFIDFCDSEALDKLDIQDYIRQTLVLARLQQNDPAGAKTLLLDGIAQLPWLYSSLYKALNLDVPKIVWGLQPRNQHEELFTELYIHQTKSLWNNAQAMNLLKEVARDGKKPGKQPYAFPPVAQRNPWNPDPLGARGSGPALPLGAQAADIEVLRRLFRRFQQGGAQPNPEQLQQMEEAFAEADVAFGMPRAGDGLEDEQDEPARGPPPGVFQMLMDLFGHETGQSDAGEDDQYDSDLGMRMPGAWADSDDDEEDMVRVRAAYLHPEEEDESDDDMPPLI

SEQ ID NO: 37618 - DNA, 462 bp, Muscodor strobelii
  misc_feature: SGI cDNA ID NO. 573058
  misc_feature: Encodes the peptide sequence at SEQ ID NO 37619
atgcagttttcagtggtcattaccttcctcgtgctggcaattaaggccgtaggcatcacggcacttcaggagttttggctgtcctttattcaccgcgtcatttacgacggtccacagctcgacgctcaaaatcatacgcacatagatgaagcatctgtcgaatggggcggtgccatcacgacaacgcccccggctgtaatattcaactgcaacaatgatgcggtttggtcaacaaaaatctgggaacggaaggacgacgtgagcggcaacaaatacggcatgcgcttcaagcccgatgatgacccccttggagacggcccgatatatgtcgtcgagctgaacacagataccttcgtcggacaccaaatcgaccgcaagttctcggctaaaatcctttgcaacagggacaaaaagtacaacatgtttgagacgtcgtcgatgcttcattgtacacctgtctaa

SEQ ID NO: 37619 - protein, 153 aa, Muscodor strobelii
  misc_feature: SGI Peptide ID NO. 573058
MQFSVVITFLVLAIKAVGITALQEFWLSFIHRVIYDGPQLDAQNHTHIDEASVEWGGAITTTPPAVIFNCNNDAVWSTKIWERKDDVSGNKYGMRFKPDDDPLGDGPIYVVELNTDTFVGHQIDRKFSAKILCNRDKKYNMFETSSMLHCTPV

SEQ ID NO: 37620 - DNA, 1698 bp, Muscodor strobelii
  misc_feature: SGI cDNA ID NO. 573059
  misc_feature: Encodes the peptide sequence at SEQ ID NO 37621
atgaattcaaaggcatgggcgttcgccttggctggtctgtcatccgtccaagctgcttgtaacgctcctaccgtgacattctccaatggcactgtcgtaggttcgagagacggcattgttgacacattttccgggattccattcgcccaaccgccagtaggcgagcttcgcttgcgtccttctcgtccgctagaccaaaattttggcactctgaacgcgacaggcataccgccagcctgtccacaactaccgagcgattacgacccaaagacatatagttccatcccgtctgaagacttggatccctatcttatcgtcataccgagccctcctgttgtcagtgaagattgtctgtcattaaatattcaacggccgtccggaacgaaacctagctccaagctgccggttctcttctggatctacggcggcgccttcaacacgggagcaacaagcaacaatgactgggcaaatttcgtcactgagtccgtcgttcttggtcatccgataattgtagtacaggcaaattatcgggtctcagcgtttggcttcttggcgggtgcgcagatccaagccgacgggagctccaatctaggccttcgcgaccagagattggcaatgaaatgggtagccgaaaatattgaggcattcggaggggacccagagcgcgtcacgatctggggagagtcagctggcgccgtttcagtgctatatcacatgctgatagagggtggtgacaatacacacaatggaaagccccttttccgcgctgccatgatgaattcaggctcatccatccccgccggggccatcgatagtcaaaaagcacaggggatcttcgataatatcgtcgaagctgctggatgtgacaaagccatgaatagctcggaagctttcgatccgctcaaatgtctgcgggatgtgccttacgaagagttcctcaatgctactgatgtggctccttcactactcacctacgatggtgtagcgctgtcatttctgccacgtgccgatccgagtgactcattctttcccatctcgcctgaagaggctattcgacaagggaaaatcgcccgtgttcccattataactggtaaccaagccgatgaaggcacacttttcggcctcccgttgtacaacgggaccacaagtgacctgctcgtcgacgggcccatgaaatcactctattctaccactccccgctccgaactcaaacatttggtcgacacctactccatcgatccagcagacggtacaccgtttggtaccgttgatgattatgaactgtatccagaagacaagcgcaactccgctgtatatggtgatgcagttttcatcttcccgcgacgctatcaacttgagcatacggcaggtttaatgcctatctggagctattcatcagtctacaatcggacttcaggatcattgggcactggccatggatcggatctcatcttgtttgcaagcggctttccggcaacaccttatcggcatattttgcagtattatatcagttttgttaactatatggatccgaattctattcaaaacagcaccagctctgtctcgtggccacagtggacggccgacgagaagaagatgatccagttcgaggctgacggggagtcgctaatcacagatacatttagacaggagtcttatgattattataagactattgtgtcaacattgagggcctag

SEQ ID NO: 37621 - protein, 565 aa, Muscodor strobelii
  misc_feature: SGI Peptide ID NO. 573059
  misc_feature (3)..(556): Pfam Id: PF00135 Pfam Desc: Carboxylesterase
  misc_feature (3)..(373): Pfam Id: PF00135 Pfam Desc: Carboxylesterase
  misc_feature (22)..(564): NCBI GI: 84993514 Blast Desc: sterol esterase precursor [Melanocarpus albomyces]
  misc_feature (31)..(564): NCBI GI: 189208005 Blast Desc: lipase 3 precursor [Pyrenophora tritici-repentis Pt-1C-BFP] gi|187976429|gb|EDU43055.1| lipase 3 precursor [Pyrenophora tritici-repentis Pt-1C-BFP]
  misc_feature (10)..(552): NCBI GI: 238845021 Blast Desc: cholinesterase [Microsporum canis CBS 113480]
  misc_feature (22)..(564): NCBI GI: 85093411 Blast Desc: NCU09575 [Neurospora crassa OR74A] gi|28921135|gb|EAA30450.1| NCU09575 [Neurospora crassa OR74A]
  misc_feature (22)..(563): NCBI GI: 116205752 Blast Desc: CHGG_02169 [Chaetomium globosum CBS 148.51] gi|88182766|gb|EAQ90234.1| CHGG_02169 [Chaetomium globosum CBS 148.51]
  misc_feature (18)..(564): NCBI GI: 238507487 Blast Desc: extracellular lipase, [Aspergillus flavus NRRL3357] gi|220689658|gb|EED46009.1| extracellular lipase, [Aspergillus flavus NRRL3357]
  misc_feature (23)..(564): NCBI GI: 169786469 Blast Desc: [Aspergillus oryzae RIB40] gi|83776443|dbj|BAE66562.1| protein product [Aspergillus oryzae]
  misc_feature (24)..(564): NCBI GI: 256730747 Blast Desc: NECHADRAFT_30050 [Nectria haematococca mpVI 77-13-4]
  misc_feature (24)..(555): NCBI GI: 46109442 Blast Desc: FG01603.1 [Gibberella zeae PH-1]
  misc_feature (22)..(554): NCBI GI: 242815532 Blast Desc: extracellular lipase, [Talaromyces stipitatus ATCC 10500] gi|218714926|gb|EED14349.1| extracellular lipase, [Talaromyces stipitatus ATCC 10500]
  misc_feature (13)..(554): SWISSPROT Homolog: EC 3.1.1.3 Triacylglycerol lipase
MNSKAWAFALAGLSSVQAACNAPTVTFSNGTVVGSRDGIVDTFSGIPFAQPPVGELRLRPSRPLDQNFGTLNATGIPPACPQLPSDYDPKTYSSIPSEDLDPYLIVIPSPPVVSEDCLSLNIQRPSGTKPSSKLPVLFWIYGGAFNTGATSNNDWANFVTESVVLGHPIIVVQANYRVSAFGFLAGAQIQADGSSNLGLRDQRLAMKWVAENIEAFGGDPERVTIWGESAGAVSVLYHMLIEGGDNTHNGKPLFRAAMMNSGSSIPAGAIDSQKAQGIFDNIVEAAGCDKAMNSSEAFDPLKCLRDVPYEEFLNATDVAPSLLTYDGVALSFLPRADPSDSFFPISPEEAIRQGKIARVPIITGNQADEGTLFGLPLYNGTTSDLLVDGPMKSLYSTTPRSELKHLVDTYSIDPADGTPFGTVDDYELYPEDKRNSAVYGDAVFIFPRRYQLEHTAGLMPIWSYSSVYNRTSGSLGTGHGSDLILFASGFPATPYRHILQYYISFVNYMDPNSIQNSTSSVSWPQWTADEKKMIQFEADGESLITDTFRQESYDYYKTIVSTLRA

SEQ ID NO: 37622 - DNA, 612 bp, Muscodor strobelii
  misc_feature: SGI cDNA ID NO. 573060
  misc_feature: Encodes the peptide sequence at SEQ ID NO 37623
atgtctataatccaacagcacaacgcctcgtccctaagcgacgcctggcgcaccgtcaacattgacgccttggaccccgactcctcccagaacttcgacaccaccacactccacccgccattagcggaactgagcgaagcagatgttcggggaatcaatgggcaggtacgccagctattacgcggcggggacgtcgagggagcgctccgcggctgcctagagaaccccgtctacagtgggagtgaaggggccaaggatgcacatctacaaaccgtcatcgaagtcctgcaatccatcaaagcgagcgaaatgacgcccatgctgcagcggatccacggctccgagggcggcgtggagctcgttgatgttttgatgaagtatctatacaaaggcatggcaggcagcagctcatcctccggcgcacctcgaacaccgacgcgaaacctcacaccccaggctacgggcttcagtcagatcggcggacgaccgggcggcgggggtgagtctacgggtgcgggcatgagcgtgttgctgagctggcacgagaaggtcgtcgatgtggccgggctgggatctgtgcagcgatgtatgacggattggcggaaggtctga

SEQ ID NO: 37623 - protein, 203 aa, Muscodor strobelii
  misc_feature: SGI Peptide ID NO. 573060
  misc_feature (14)..(203): Pfam Id: PF04699 Pfam Desc: ARP2/3 complex 16 kDa subunit (p16-Arc)
  misc_feature (14)..(141): Pfam Id: PF04699 Pfam Desc: ARP2/3 complex 16 kDa subunit (p16-Arc)
  misc_feature (175)..(203): Pfam Id: PF04699 Pfam Desc: ARP2/3 complex 16 kDa subunit (p16-Arc)
  misc_feature (1)..(203): NCBI GI: 85081453 Blast Desc: NCU03438 [Neurospora crassa OR74A] gi|9368555|emb|CAB98216.1| related to subunit of the Arp2/3 complex ARC15 [Neurospora crassa] gi|28917799|gb|EAA27488.1|
  misc_feature (1)..(203): NCBI GI: 39961037 Blast Desc: MGG_09495 [Magnaporthe grisea 70-15] gi|145010993|gb|EDJ95649.1| MGG_09495 [Magnaporthe grisea 70-15]
  misc_feature (1)..(203): NCBI GI: 46107878 Blast Desc: FG00822.1 [Gibberella zeae PH-1]
  misc_feature (1)..(203): NCBI GI: 256734637 Blast Desc: [Nectria haematococca mpVI 77-13-4]
  misc_feature (1)..(203): NCBI GI: 116200023 Blast Desc: CHGG_08167 [Chaetomium globosum CBS 148.51] gi|88179446|gb|EAQ86914.1| CHGG_08167 [Chaetomium globosum CBS 148.51]
  misc_feature (1)..(203): NCBI GI: 171689914 Blast Desc: protein product [Podospora anserina] gi|170944919|emb|CAP71030.1| protein product [Podospora anserina]
  misc_feature (1)..(203): NCBI GI: 154303365 Blast Desc: BC1G_09431 [Botryotinia fuckeliana B05.10] gi|150854994|gb|EDN30186.1| BC1G_09431 [Botryotinia fuckeliana B05.10]
  misc_feature (16)..(203): NCBI GI: 169622942 Blast Desc: SNOG_14696 [Phaeosphaeria nodorum SN15] gi|160704878|gb|EAT77888.2| SNOG_14696 [Phaeosphaeria nodorum SN15]
  misc_feature (1)..(170): NCBI GI: 156054246 Blast Desc: SS1G_05971 [Sclerotinia sclerotiorum 1980] gi|154703751|gb|EDO03490.1| SS1G_05971 [Sclerotinia sclerotiorum 1980]
  misc_feature (1)..(126): NCBI GI: 261353029 Blast Desc: Arp2/3 complex subunit [Verticillium albo-atrum VaMs.102]
MSIIQQHNASSLSDAWRTVNIDALDPDSSQNFDTTTLHPPLAELSEADVRGINGQVRQLLRGGDVEGALRGCLENPVYSGSEGAKDAHLQTVIEVLQSIKASEMTPMLQRIHGSEGGVELVDVLMKYLYKGMAGSSSSSGAPRTPTRNLTPQATGFSQIGGRPGGGGESTGAGMSVLLSWHEKVVDVAGLGSVQRCMTDWRKV

SEQ ID NO: 37624 - DNA, 2509 bp, Muscodor strobelii
  misc_feature: SGI EST ID NO. CUFF.90522.1
  misc_feature: Variant of the nucleotide sequence at SEQ ID NO 37622
ccccaccatgctaggtcatttaccgtttgacctcaacaccattaactatcacgaatacattgcctcttgcttcagacccgggggctttctctgcgaaatcagacacagctacatctcgaccaattgaagactagagaaaacgaagaatcgcgcagactcggtctcggccaaacctccccaggcatccgagccacctccgcctcctcaatcctcaacacggccctgcagagcctcgttgcagctatcgctcgacagtcaccactacatctctcccgtgagcctagagcaacacattgaacatgtctataatccaacagcacaacgcctcgtccctaagcgacgcctggcgcaccgtcaacattgacgccttggaccccgactcctcccagaacttcgacaccaccacactccacccgccattagcggaactgagcgaagcagatgttcggggaatcaatgggcaggtacgccagctattacgcggcggggacgtcgagggagcgctccgcggctgcctagagaaccccgtctacagtgggagtgaaggggccaaggatgcacatctacaaaccgtcatcgaagtcctgcaatccatcaaagcgagcgaaatgacgcccatgctgcagcggatccacggctccgagggcggcgtggagctcgttgatgttttgatgaagtatctatacaaaggcatggcaggcagcagctcatcctccggcgcacctcgaacaccgacgcgaaacctcacaccccaggctacgggcttcagtcagatcggcggacgaccgggcggcgggggtgagtctacgggtgcgggcatgagcgtgttgctgagctggcacgagaaggtcgtcgatgtggccgggctgggatctgtgcagcgatgtatgacggattggcggaaggtctgagtaacacggcgagggtgagattgagagcgaggttgaggcttctagcgagttcctgatatgaaaataccaaaacttctatcgctattttttgcctgccaaacattggctatgaccagatgataggagatgctactttcctagcggcattacgtagagatcttgaaagagtagaagcagaagcgggatataccgccagcaaaagggcggacatttgaatatatgatatctcagtctctatgcatgttctcaatatgcccgaaaagcgtgtcttgagaccaatcttccttattctctgtctaaactgtcagccattgaggtcgaaatgtgggatattgaagatcatgacagacgggttctttctcatcacacataaacgataaaaagttgcagaatatttcacgatttattctccaaaatatccttcaagctaagctcgccactccctctcgccaggggctgcgcctggtccgcagactccttccagccaatcatgtatatctgtctaaaagtcgccggtaaactcccatcctcattcccatgcagttctctataaatcgcatcagcagcgagcaaaacatctttctggatgggccccatttctctccccaacaccgcgttgctctcccccatggcttgcagatcctgcataagcgcaaaggtgtcgggatagtcgacaatgatatcatcgatgtcgacggtcaacatcttgaatcctgctttttgcagtagtcccccgacgtctcggacatctgctaggggagagacgtggggggagatgccgccgcgacggtcttgctcggcgagttggagggaggtgcgcagttcgtagagggtgtcgccgccgaacatggcgccgatgaaggcgcagtcgggctttaggatgttgtttatttgggataagacgcccggtaggtcgttgatccagtgcatgctgagggaggagagtacgaggtcgaaggtgttggcctcgtacgggagggtctcttcgtctgtgaggacttcccgagccatgttgatttgcgaattgaagtctagatctgcgtctcggtagagcagcgtcgacgaggaatcaacggctaggagatggtctatccgcgaggcaatggggtcggagacggggatctcgggggaggggtccgggttggggcgtgtgagggcgcgggcgatgttgcacgagtttgcgccgaagtcgaggactcgggggtagtggcgcttgatgtcgagcagtctctcgcagagccggatggcgacttcatctttcagatagtcggcgatgcggctctggtccagattggcggccgcgcgctctttttgcagccatttcgtccgccggttgaagacctggtggacgggaggtgcggcggcctgaatggcgtaggttcggcgcgtccagcttgcggtggacggtggcgggagatgcctggagctgctaagggggcggcatagctgggaggaagcacgaagagtgagattcatcctctcaagatgaatgacagctcatggcattctgttgtgcaatacaataaaaaaagaacgactcaattggattcagatacactagggaaagagtgtctcatggtgacgtccatcaagtgaag

SEQ ID NO: 37625 - DNA, 1080 bp, Muscodor strobelii
  misc_feature: SGI cDNA ID NO. 573061
  misc_feature: Encodes the peptide sequence at SEQ ID NO 37626
atgaatctcactcttcgtgcttcctcccagctatgccgcccccttagcagctccaggcatctcccgccaccgtccaccgcaagctggacgcgccgaacctacgccattcaggccgccgcacctcccgtccaccaggtcttcaaccggcggacgaaatggctgcaaaaagagcgcgcggccgccaatctggaccagagccgcatcgccgactatctgaaagatgaagtcgccatccggctctgcgagagactgctcgacatcaagcgccactacccccgagtcctcgacttcggcgcaaactcgtgcaacatcgcccgcgccctcacacgccccaacccggacccctcccccgagatccccgtctccgaccccattgcctcgcggatagaccatctcctagccgttgattcctcgtcgacgctgctctaccgagacgcagatctagacttcaattcgcaaatcaacatggctcgggaagtcctcacagacgaagagaccctcccgtacgaggccaacaccttcgacctcgtactctcctccctcagcatgcactggatcaacgacctaccgggcgtcttatcccaaataaacaacatcctaaagcccgactgcgccttcatcggcgccatgttcggcggcgacaccctctacgaactgcgcacctccctccaactcgccgagcaagaccgtcgcggcggcatctccccccacgtctctcccctagcagatgtccgagacgtcgggggactactgcaaaaagcaggattcaagatgttgaccgtcgacatcgatgatatcattgtcgactatcccgacacctttgcgcttatgcaggatctgcaagccatgggggagagcaacgcggtgttggggagagaaatggggcccatccagaaagatgttttgctcgctgctgatgcgatttatagagaactgcatgggaatgaggatgggagtttaccggcgacttttagacagatatacatgattggctggaaggagtctgcggaccaggcgcagcccctggcgagagggagtggcgagcttagcttgaaggatattttggagaataaatcgtga

SEQ ID NO: 37626 - protein, 359 aa, Muscodor strobelii
  misc_feature: SGI Peptide ID NO. 573061
  misc_feature (95)..(208): Pfam Id: PF08241 Pfam Desc: Methyltransferase domain
  misc_feature (95)..(206): Pfam Id: PF08242 Pfam Desc: Methyltransferase domain
  misc_feature (160)..(208): Pfam Id: PF08241 Pfam Desc: Methyltransferase domain
  misc_feature (1)..(358): NCBI GI: 46107880 Blast Desc: FG00823.1 [Gibberella zeae PH-1]
  misc_feature (34)..(358): NCBI GI: 116200021 Blast Desc: CHGG_08166 [Chaetomium globosum CBS 148.51] gi|88179445|gb|EAQ86913.1| CHGG_08166 [Chaetomium globosum CBS 148.51]
  misc_feature (1)..(358): NCBI GI: 16944525 Blast Desc: conserved [Neurospora crassa]
  misc_feature (23)..(358): NCBI GI: 164427412 Blast Desc: NCU03439 [Neurospora crassa OR74A] gi|157071732|gb|EAA27489.2| NCU03439 [Neurospora crassa OR74A]
  misc_feature (13)..(355): NCBI GI: 156054434 Blast Desc: SS1G_06065 [Sclerotinia sclerotiorum 1980] gi|154703845|gb|EDO03584.1| SS1G_06065 [Sclerotinia sclerotiorum 1980]
  misc_feature (24)..(355): NCBI GI: 115396278 Blast Desc: conserved [Aspergillus terreus NIH2624] gi|114193347|gb|EAU35047.1| conserved [Aspergillus terreus NIH2624]
  misc_feature (25)..(359): NCBI GI: 145232750 Blast Desc: An02g06370 [Aspergillus niger] gi|134056694|emb|CAL00636.1| protein product [Aspergillus niger]
  misc_feature (10)..(355): NCBI GI: 169770621 Blast Desc: [Aspergillus oryzae RIB40] gi|238486940|ref|XP_002374708.1| conserved [Aspergillus flavus NRRL3357] gi|83767639|dbj|BAE57778.1| protein product oryzae]
  misc_feature (32)..(359): NCBI GI: 70999662 Blast Desc: conserved [Aspergillus fumigatus Af293] gi|66852185|gb|EAL92510.1| conserved [Aspergillus fumigatus Af293] gi|159127561|gb|EDP52676.1| conserved [Aspergillus A1163]
  misc_feature (15)..(355): NCBI GI: 67537496 Blast Desc: AN4918.2 [Aspergillus nidulans FGSC A4] gi|40741806|gb|EAA60996.1| AN4918.2 [Aspergillus nidulans FGSC A4] gi|259482214|tpe|CBF76482.1| TPA: conserved [Aspergillus FGSC
MNLTLRASSQLCRPLSSSRHLPPPSTASWTRRTYAIQAAAPPVHQVFNRRTKWLQKERAAANLDQSRIADYLKDEVAIRLCERLLDIKRHYPRVLDFGANSCNIARALTRPNPDPSPEIPVSDPIASRIDHLLAVDSSSTLLYRDADLDFNSQINMAREVLTDEETLPYEANTFDLVLSSLSMHWINDLPGVLSQINNILKPDCAFIGAMFGGDTLYELRTSLQLAEQDRRGGISPHVSPLADVRDVGGLLQKAGFKMLTVDIDDIIVDYPDTFALMQDLQAMGESNAVLGREMGPIQKDVLLAADAIYRELHGNEDGSLPATFRQIYMIGWKESADQAQPLARGSGELSLKDILENKS

SEQ ID NO: 37627 - DNA, 2670 bp, Muscodor strobelii
  misc_feature: SGI EST ID NO. CUFF.90522.0
  misc_feature: Variant of the nucleotide sequence at SEQ ID NO 37625
cttcacttgatggacgtcaccatgagacactctttccctagtgtatctgaatccaattgagtcgttctttttttattgtattgcacaacagaatgccatgagctgtcattcatcttgagaggatgaatctcactcttcgtgcttcctcccagctatgccgcccccttagcagctccaggcatctcccgccaccgtccaccgcaagctggacgcgccgaacctacgccattcaggccgccgcacctcccgtccaccaggtcttcaaccggcggacgaaatggctgcaaaaagagcgcgcggccgccaatctggaccagagccgcatcgccgactatctgaaagatgaagtcgccatccggctctgcgagagactgctcgacatcaagcgccactacccccgagtcctcgacttcggcgcaaactcgtgcaacatcgcccgcgccctcacacgccccaacccggacccctcccccgagatccccgtctccgaccccattgcctcgcggatagaccatctcctagccgttgattcctcgtcgacgctgctctaccgagacgcagatctagacttcaattcgcaaatcaacatggctcgggaagtcctcacagacgaagagaccctcccgtacgaggccaacaccttcgacctcgtactctcctccctcagcatgcactggatcaacgacctaccgggcgtcttatcccaaataaacaacatcctaaagcccgactgcgccttcatcggcgccatgttcggcggcgacaccctctacgaactgcgcacctccctccaactcgccgagcaagaccgtcgcggcggcatctccccccacgtctctcccctagcagatgtccgagacgtcgggggactactgcaaaaagcaggattcaagatgttgaccgtcgacatcgatgatatcattgtcgactatcccgacacctttgcgcttatgcaggatctgcaagccatgggggagagcaacgcggtgttggggagagaaatggggcccatccagaaagatgttttgctcgctgctgatgcgatttatagagaactgcatgggaatgaggatgggagtttaccggcgacttttagacagatatacatgattggctggaaggagtctgcggaccaggcgcagcccctggcgagagggagtggcgagcttagcttgaaggatattttggagaataaatcgtgaaatattctgcaactttttatcgtttatgtgtgatgagaaagaacccgtctgtcatgatcttcaatatcccacatttcgacctcaatggctgacagtttagacagagaataaggaagattggtctcaagacacgcttttcgggcatattgagaacatgcatagagactgagatatcatatattcaaatgtccgcccttttgctggcggtatatcccgcttctgcttctactctttcaagatctctacgtaatgccgctaggaaagtagcatctcctatcatctggtcatagccaatgtttggcaggcaaaaaatagcgatagaagttttggtattttcatatcaggaactcgctagaagcctcaacctcgctctcaatctcaccctcgccgtgttactcagaccttccgccaatccgtcatacatcgctgcacagatcccagcccggccacatcgacgaccttctcgtgccagctcagcaacacgctcatgcccgcacccgtagactcacccccgccgcccggtcgtccgccgatctgactgaagcccgtagcctggggtgtgaggtttcgcgtcggtgttcgaggtgcgccggaggatgagctgctgcctgccatgcctttgtatctattgcagttgtgtcagtcattgggggttaagggattaggaaatgtggaagagggattgtcgtacagatacttcatcaaaacatcaacgagctccacgccgccctcggagccgtggatccgctgcagcatgggcgtcatttcgctcgctttgatggattgcaggacttcgatgacggtttgtagatgtgcatcctgttgttttttatcatcccgtcagcagcaattcatccatatgtagtccctttccgcccctagctttcacaacacggtgaccattgccaacgtaccttggccccttcactcccactgtagacggggttctctaggcagccgcggagcgctccctcgacgtccccgccgcgtaatagctggcgtacctgcccattgattccccgaacatctgcttcgctcagttccgctaatggcgggtggagtgtggtggtgtcgaagttctgggaggagtcggggtccaaggcgtcaatgttgacggtgcgccaggcgtcgcttagggacgaggcgttgtgctgttggattatagacatgttcaatgtgttgctctaggctcacgggagagatgtagtggtgactgtcgagcgatagctgcaacgaggctctgcagggccgtgttgaggattgaggaggcggaggtggctcggatgcctggggaggtttggccgagaccgagtctgcgcgattcttcgttttctctagtcttcaattggtcgagatgtagctgtgtctgatttcgcagagaaagcccccgggtctgaagcaagaggcaatgtattcgtgatagttaatggtgttgaggtcaaacggtaaatgacctagcatggtgggg

SEQ ID NO: 37628 - DNA, 2961 bp, Muscodor strobelii
  misc_feature: SGI cDNA ID NO. 573062
  misc_feature: Encodes the peptide sequence at SEQ ID NO 37629
atggcttcctcggcgtctggcggcttcctaggccgttccgccaacaataactccaacatgcgcgggctcgtccagttcatcgccgacttgaggaacgcccgcgctagagatctggaagagaagagaataaacaaagaattggcaaacatacggcaaaagttcaaggatggtagcttgagtggctatcataagaaaaaatacgtctgcaagctcctatatatctatattcttggctggaatgtcgacttcggacacctcgaagcggtgaatttgatctcagcccagaagtattccgaaaagcaaataggatatctggctatgacattgttcctccacgaaaagcacgaattgctgcatttagtcgtcaatagtatacggaaagacttgttggaccacaatgagctcttcaattgcctggcactacacgcaattgcaaatgtgggaggtagagaaatgggagaggccttaagcggcgaagtacacagactgttgatttcacctacatccaaaacgtttgtgaaaaagaaggcagctctcacgctcctccgtttataccggaagcacccagatatcgtccagcctcaatgggcagagcgtataatatccctgatggatgacgccgacactggtgttgccctctccgttacgtctcttgtcatggccgttgctcaagacgatcccgacgcgtataaaggcgcatatgcaaaagcggcatcaagactgaagcgtattgttatcgatggcgactacacagccgactacctttactacaaagtcccttgtccatggttgcagatcaaattgcttcgcctgcttcaatatttccctccatcagaggatagtcatgttcgtgaaatgattcgagaatcactacaaaagattttaaatttggctatggagtcaaacaaaaacgtgcaacagaataatgcccaaaacgctgttttgttcgaagccatcaatctcatcatccacctagatacagaacacgcattgatgaaacagatatcctcgcgtttgggtcgcttcatcacatcccgagagacgaatatccgctatctcggtctcgaagctatgacgcatcttgccgcccgagccgagaatttagaccccatcaagcagcatcaagatgtcattttgggctcactcaaagaccgcgatattagcgtgcgccgaaaaggtctggatctgctatatagtatgtgcgactcgaccaactcggggcccatcgtctcggagctcctacaatatctgcaaaatgcagacttcgctatacgcgaggagatggctctcaagatcgctatcttgacggaaaagtatgcaactgacatccagtggtatatcaatgtttcgttgcgattagtggccattgctggagaccaccttagtgacgaggtctggcagcgtgtcatccaaattgtgaccaataacgaagaactacaagtctacgctgcacaaaacactctgcagcacgtcaaacaagatcattgccacgagaccttggtaaagattggagcttatatccttggtgaattcggccatctcattgcggaagagaagggttgcagtccgattgagcaattcattgccttgtccggaaagctttccgcgtgcgcctcaagtacgcgtgcgatgattctgtcctcatttgtgaaatttgtcaaccttttccctgaaattaaaccacaacttctacatgtcttcgaactctactcgcacacgctggactctgaattgcaacaaagagcctgcgagtatttgactctcgccagtcttcctaccgatgaccttcttcgaacagtgtgcgacgaaatgccaccatttcccgagcgtcaatccgcgcttctttctcgattgcattcaaagcatgcaggcaccagtgataagcggacatgggtcgttggaggcaaagatgccaacgctgatacgtcagaactgaccatggctaagcaacccgggttgaagagagcatttagctctagtgggcagatgaacggagatggcgctgctaatggtacggccaacggaactaatggccaccatgaccttgccggcctggacatgaatgcaggtccggcaccggaaaaactactaaaagccccgaatctggccagtgctgcccatctatctcctggatgggaacctggttataacagattactactcaaatccgatggcatcttgttcgaagacgggcagatccaagtcggtgtccgttccgagtaccgtggccagatggcttgtctcatcttatactttacaaacaagacacccgccaccattagctcatttactactacgctagacttggatgagaacgaaaaagcaaacctcacttgggacgtaaaaggtctcccagatagcagtatcgcccaaaacgagcaagcaagacaggtcattatgttcgagggcaagaaagtcctcaacaagagcccgacaatcaggatcagttacctagccggtgcgctccaagcacttacgctcaaactacccctcacagcacacaaattcatggactccgcggatctaacagcagacgatttctttaagaggtggaaacagatcggtggtgcaccacgcgaggcacaggcaattatcgggttacagcctggtaaagagtctacgcgggagatcaacgagacgttcgtgacgaaggtcattaagggctttagatggggcatcttggagggcgttgatccgaatagtaagaatttcgtcggtgcgagtgtgctgcatactagtgagggtggcaagtttgggtgtttgatgaggttggagcctaattatcctgccaagatggtccgtctcacgatcagagcaacagacgagagtgtacccgctgtcttactcaagttgatggaggagaggctctcggcaggcgtatcgatacatcctccgctccaggagggacccacgagacaggagatttcggacgcgttcggaagtgttatggtgagtaattag

SEQ ID NO: 37629 - protein, 986 aa, Muscodor strobelii
  misc_feature: SGI Peptide ID NO. 573062
  misc_feature (39)..(593): Pfam Id: PF01602 Pfam Desc: Adaptin N terminal region
  misc_feature (836)..(955): Pfam Id: PF02296 Pfam Desc: Alpha adaptin AP2, C-terminal domain
  misc_feature (717)..(830): Pfam Id: PF02883 Pfam Desc: Adaptin C-terminal domain
  misc_feature (717)..(767): Pfam Id: PF02883 Pfam Desc: Adaptin C-terminal domain
  misc_feature (1)..(984): NCBI GI: 85081461 Blast Desc: NCU03440 [Neurospora crassa OR74A] gi|9368557|emb|CAB98218.1| related to alpha-adaptin C [Neurospora crassa] gi|28917801|gb|EAA27490.1| NCU03440 [Neurospora crassa
  misc_feature (1)..(986): NCBI GI: 116200019 Blast Desc: conserved [Chaetomium globosum CBS 148.51] gi|88179444|gb|EAQ86912.1| conserved [Chaetomium globosum CBS 148.51]
  misc_feature (3)..(985): NCBI GI: 46107882 Blast Desc: FG00824.1 [Gibberella zeae PH-1]
  misc_feature (1)..(984): NCBI GI: 145602594 Blast Desc: MGG_09493 [Magnaporthe grisea 70-15] gi|145010991|gb|EDJ95647.1| MGG_09493 [Magnaporthe grisea 70-15]
  misc_feature (1)..(984): NCBI GI: 171689908 Blast Desc: protein product [Podospora anserina] gi|170944916|emb|CAP71027.1| protein product [Podospora anserina]
  misc_feature (20)..(984): NCBI GI: 154321153 Blast Desc: BC1G_01451 [Botryotinia fuckeliana B05.10] gi|150851989|gb|EDN27181.1| BC1G_01451 [Botryotinia fuckeliana B05.10]
  misc_feature (20)..(932): NCBI GI: 156054436 Blast Desc: SS1G_06066 [Sclerotinia sclerotiorum 1980] gi|154703846|gb|EDO03585.1| SS1G_06066 [Sclerotinia sclerotiorum 1980]
  misc_feature (9)..(960): NCBI GI: 169610077 Blast Desc: SNOG_08132 [Phaeosphaeria nodorum SN15] gi|111063288|gb|EAT84408.1| SNOG_08132 [Phaeosphaeria nodorum SN15]
  misc_feature (18)..(962): NCBI GI: 261187895 Blast Desc: AP-2 complex subunit alpha [Ajellomyces dermatitidis SLH14081] gi|239593482|gb|EEQ76063.1| AP-2 complex subunit alpha [Ajellomyces dermatitidis SLH14081] gi|239608461|gb|EEQ85448.1|
  misc_feature (18)..(961): NCBI GI: 226279804 Blast Desc: AP-2 complex subunit alpha [Paracoccidioides brasiliensis Pb01]
MASSASGGFLGRSANNNSNMRGLVQFIADLRNARARDLEEKRINKELANIRQKFKDGSLSGYHKKKYVCKLLYIYILGWNVDFGHLEAVNLISAQKYSEKQIGYLAMTLFLHEKHELLHLVVNSIRKDLLDHNELFNCLALHAIANVGGREMGEALSGEVHRLLISPTSKTFVKKKAALTLLRLYRKHPDIVQPQWAERIISLMDDADTGVALSVTSLVMAVAQDDPDAYKGAYAKAASRLKRIVIDGDYTADYLYYKVPCPWLQIKLLRLLQYFPPSEDSHVREMIRESLQKILNLAMESNKNVQQNNAQNAVLFEAINLIIHLDTEHALMKQISSRLGRFITSRETNIRYLGLEAMTHLAARAENLDPIKQHQDVILGSLKDRDISVRRKGLDLLYSMCDSTNSGPIVSELLQYLQNADFAIREEMALKIAILTEKYATDIQWYINVSLRLVAIAGDHLSDEVWQRVIQIVTNNEELQVYAAQNTLQHVKQDHCHETLVKIGAYILGEFGHLIAEEKGCSPIEQFIALSGKLSACASSTRAMILSSFVKFVNLFPEIKPQLLHVFELYSHTLDSELQQRACEYLTLASLPTDDLLRTVCDEMPPFPERQSALLSRLHSKHAGTSDKRTWVVGGKDANADTSELTMAKQPGLKRAFSSSGQMNGDGAANGTANGTNGHHDLAGLDMNAGPAPEKLLKAPNLASAAHLSPGWEPGYNRLLLKSDGILFEDGQIQVGVRSEYRGQMACLILYFTNKTPATISSFTTTLDLDENEKANLTWDVKGLPDSSIAQNEQARQVIMFEGKKVLNKSPTIRISYLAGALQALTLKLPLTAHKFMDSADLTADDFFKRWKQIGGAPREAQAIIGLQPGKESTREINETFVTKVIKGFRWGILEGVDPNSKNFVGASVLHTSEGGKFGCLMRLEPNYPAKMVRLTIRATDESVPAVLLKLMEERLSAGVSIHPPLQEGPTRQEISDAFGSVMVSN

SEQ ID NO: 37630 - DNA, 3725 bp, Muscodor strobelii
  misc_feature: SGI EST ID NO. CUFF.90171.0
  misc_feature: Variant of the nucleotide sequence at SEQ ID NO 37628
ctgacccgacccttgagtttgagggagctggagataatacagttagttggaaggcggatagacgacgagatagctgcgagacagtcgactccggctcaaacctaaatccatctctccaatacgccgaaatactctcgtgcctccgaacaaatctaggcatctgctagagacgaagtatactaccacgcgacccgataccttgaccgactactgagcgacacacccaatcgctcatcacacgcctccttacccccgacgacgacgatccattgttcaactgccgctctccccgaataccgttgctgctccatataattcgacgatgcggtcgcattgatctggcctatcatgagagccgtaaaacgcagcgtgctttctgggacccgaggatacggacaataatcagggacctttctcttctgcatcatacgacgacgacgacgactaccatcactgcacaccatccacacctaactacgcgcgaaaccctctatgatttccagagcaattgaaggaggacaaaaaagagggcccgacaaaatggcttcctcggcgtctggcggcttcctaggccgttccgccaacaataactccaacatgcgcgggctcgtccagttcatcgccgacttgaggaacgcccgcgctagagatctggaagagaagagaataaacaaagaattggcaaacatacggcaaaagttcaaggatggtagcttgagtggctatcataagaaaaaatacgtctgcaagctcctatatatctatattcttggctggaatgtcgacttcggacacctcgaagcggtgaatttgatctcagcccagaagtattccgaaaagcaaataggatatctggctatgacattgttcctccacgaaaagcacgaattgctgcatttagtcgtcaatagtatacggaaagacttgttggaccacaatgagctcttcaattgcctggcactacacgcaattgcaaatgtgggaggtagagaaatgggagaggccttaagcggcgaagtacacagactgttgatttcacctacatccaaaacgtttgtgaaaaagaaggcagctctcacgctcctccgtttataccggaagcacccagatatcgtccagcctcaatgggcagagcgtataatatccctgatggatgacgccgacactggtgttgccctctccgttacgtctcttgtcatggccgttgctcaagacgatcccgacgcgtataaaggcgcatatgcaaaagcggcatcaagactgaagcgtattgttatcgatggcgactacacagccgactacctttactacaaagtcccttgtccatggttgcagatcaaattgcttcgcctgcttcaatatttccctccatcagaggatagtcatgttcgtgaaatgattcgagaatcactacaaaagattttaaatttggctatggagtcaaacaaaaacgtgcaacagaataatgcccaaaacgctgttttgttcgaagccatcaatctcatcatccacctagatacagaacacgcattgatgaaacagatatcctcgcgtttgggtcgcttcatcacatcccgagagacgaatatccgctatctcggtctcgaagctatgacgcatcttgccgcccgagccgagaatttagaccccatcaagcagcatcaagatgtcattttgggctcactcaaagaccgcgatattagcgtgcgccgaaaaggtctggatctgctatatagtatgtgcgactcgaccaactcggggcccatcgtctcggagctcctacaatatctgcaaaatgcagacttcgctatacgcgaggagatggctctcaagatcgctatcttgacggaaaagtatgcaactgacatccagtggtatatcaatgtttcgttgcgattagtggccattgctggagaccaccttagtgacgaggtctggcagcgtgtcatccaaattgtgaccaataacgaagaactacaagtctacgctgcacaaaacactctgcagcacgtcaaacaagatcattgccacgagaccttggtaaagattggagcttatatccttggtgaattcggccatctcattgcggaagagaagggttgcagtccgattgagcaattcattgccttgtccggaaagctttccgcgtgcgcctcaagtacgcgtgcgatgattctgtcctcatttgtgaaatttgtcaaccttttccctgaaattaaaccacaacttctacatgtcttcgaactctactcgcacacgctggactctgaattgcaacaaagagcctgcgagtatttgactctcgccagtcttcctaccgatgaccttcttcgaacagtgtgcgacgaaatgccaccatttcccgagcgtcaatccgcgcttctttctcgattgcattcaaagcatgcaggcaccagtgataagcggacatgggtcgttggaggcaaagatgccaacgctgatacgtcagaactgaccatggctaagcaacccgggttgaagagagcatttagctctagtgggcagatgaacggagatggcgctgctaatggtacggccaacggaactaatggccaccatgaccttgccggcctggacatgaatgcaggtccggcaccggaaaaactactaaaagccccgaatctggccagtgctgcccatctatctcctggatgggaacctggttataacagattactactcaaatccgatggcatcttgttcgaagacgggcagatccaagtcggtgtccgttccgagtaccgtggccagatggcttgtctcatcttatactttacaaacaagacacccgccaccattagctcatttactactacgctagacttggatgagaacgaaaaagcaaacctcacttgggacgtaaaaggtctcccagatagcagtatcgcccaaaacgagcaagcaagacaggtcattatgttcgagggcaagaaagtcctcaacaagagcccgacaatcaggatcagttacctagccggtgcgctccaagcacttacgctcaaactacccctcacagcacacaaattcatggactccgcggatctaacagcagacgatttctttaagaggtggaaacagatcggtggtgcaccacgcgaggcacaggcaattatcgggttacagcctggtaaagagtctacgcgggagatcaacgagacgttcgtgacgaaggtcattaagggctttagatggggcatcttggagggcgttgatccgaatagtaagaatttcgtcggtgcgagtgtgctgcatactagtgagggtggcaagtttgggtgtttgatgaggttggagcctaattatcctgccaagatggtccgtctcacgatcagagcaacagacgagagtgtacccgctgtcttactcaagttgatggaggagaggctctcggcaggcgtatcgatacatcctccgctccaggagggacccacgagacaggagatttcggacgcgttcggaagtgttatggtgagtaattaggcgaggagtggggatggataggggcaagggggagaagataaaagccatggaggggaggaggcaaatttgaacatagagagttttgtacaaactggcgtgtgccttactgttgatgaaacttttgaggtgctgtgatttgatgtcgtgatggtgatttgatattcgaatgatggtacggacataaatacatatttttcagcgctggcgagatcgatttattggca

SEQ ID NO: 37631 - DNA, 1164 bp, Muscodor strobelii
  misc_feature: SGI cDNA ID NO. 573063
  misc_feature: Encodes the peptide sequence at SEQ ID NO 37632
atgactgccaaccagacacagcactctcttttccctcaggataaaaacactgattttcccaaccagactcagacctccacgcctcctgagaatctccattttactataccagacgattcaaaggttacgcaacccgctgcctgccttaaacagaaaacaggagaaacgaaagagcaagtcttatttcatcgtaagaagcgcttagtgtttcctgatttcaacatgaatccaaacaatagaaccatccacatcaaattcaactcgtacgagatcaccgatgacgacgacctgaagacattctttacgggtctaggcgtgaaacgtattgagatgaatgatgattccgcgctcgtcaccttccacttccatgattccgctgagaagggtatgaaaaaaatcaacggcctccgacccatcaagaagggcgatatcggtcctcaggctacatgggcaaatactcgggctatcgaatctgatggagtatatcaacctcttcccttgactaaacgccgtgtcgacaatgctggcggccgggaccaaacgagccagcaaatgacaggaccagccatcatcgaggtcaacgaggaaccccgccgcccaaagtcccttttccgtctgaaactagaaggtgtaaaggacaaagtgaccgatctcgctggtcgaggaaacctacccgctcgcttgttctttctcgccatcatcattctggccatcgctagcatcgttactggctggtggggcatttctagagatacaatcacgaagacacgtcgtgacgttgattccgctctcgttcaccgttcgatcaacatcaccgcgtcgtccaaccaagactatatccccaccacctcaattatggctccaggatcaccggcatatctcgaagcttcactgattcccattatcaccctcgacgctgctgtggtcgccgatgtcaaagaaagggactcgggtgatcttggcccctatgattacggacaaatcggaaccagcgcggagactgtggaaaatatcacctcagaaaacgaccttgaccgcaacgaagaccgtgaccgccgtaacgaccagggtcacaacattgattacgacccaactatcagtagcaacaagccttgcatcaacgttgcctcatcccacgatgacctccggcagcctatcatctga

SEQ ID NO: 37632 - protein, 387 aa, Muscodor strobelii
  misc_feature: SGI Peptide ID NO. 573063
MTANQTQHSLFPQDKNTDFPNQTQTSTPPENLHFTIPDDSKVTQPAACLKQKTGETKEQVLFHRKKRLVFPDFNMNPNNRTIHIKFNSYEITDDDDLKTFFTGLGVKRIEMNDDSALVTFHFHDSAEKGMKKINGLRPIKKGDIGPQATWANTRAIESDGVYQPLPLTKRRVDNAGGRDQTSQQMTGPAIIEVNEEPRRPKSLFRLKLEGVKDKVTDLAGRGNLPARLFFLAIIILAIASIVTGWWGISRDTITKTRRDVDSALVHRSINITASSNQDYIPTTSIMAPGSPAYLEASLIPIITLDAAVVADVKERDSGDLGPYDYGQIGTSAETVENITSENDLDRNEDRDRRNDQGHNIDYDPTISSNKPCINVASSHDDLRQPII

SEQ ID NO: 37633 - DNA, 534 bp, Muscodor strobelii
  misc_feature: SGI cDNA ID NO. 573064
  misc_feature: Elevated expression when VOC is produced
  misc_feature: Encodes the peptide sequence at SEQ ID NO 37634
atgaagaattttggggctatctttatgatactagcagctgccacgagcgtgctttcgttaccggctcacgatgtagcacaacactatccgatggcccgtgacaacggccccaagttctttgccctggaggttcgagaaccaaagcgcaagaataaaaacggaggcaataacaataataacaacggcgctgctggtggaggagcggtagccaactcaactcttccagctgtgccggctggtgctgcgagcggaacacccaccgctgatgttggaaataatgatcagaacgacaataacaacgatcaagcaggaaatcaagacgcagggaatgacgacaatgtcgacgacactgaaaatgcggcggaaggcgaaaatgccgatgacaatgttggacaagacggcgaaaacgtcaatgccggcgatgaggttgatagcgggaatgctgaagctggagctgccgacggaagtcaaagcaatctccttgatcagatcgccggaaccttgcaaggccttctgggcctgggcggagcataa

SEQ ID NO: 37634 - protein, 177 aa, Muscodor strobelii
  misc_feature: SGI Peptide ID NO. 573064
  misc_feature: Useful for introducing or modulating the production of volatile compounds
MKNFGAIFMILAAATSVLSLPAHDVAQHYPMARDNGPKFFALEVREPKRKNKNGGNNNNNNGAAGGGAVANSTLPAVPAGAASGTPTADVGNNDQNDNNNDQAGNQDAGNDDNVDDTENAAEGENADDNVGQDGENVNAGDEVDSGNAEAGAADGSQSNLLDQIAGTLQGLLGLGGA

SEQ ID NO: 37635 - DNA, 493 bp, Muscodor strobelii
  misc_feature: SGI EST ID NO. CUFF.90135.0
  misc_feature: Variant of the nucleotide sequence at SEQ ID NO 37633
gataggttcattgctaacttacaaatttcagccggctggtgctgcgagcggaacacccaccgctgatgttggaaataatgatcagaacgacaataacaacgatcaagcaggaaatcaagacgcagggaatgacgacaatgtcgacgacactgaaaatgcggcggaaggcgaaaatgccgatgacaatgttggacaagacggcgaaaacgtcaatgccggcgatgaggttgatagcgggaatgctgaagctggagctgccgacggaagtcaaagcaatctccttgatcagatcgccggaaccttgcaaggccttctgggcctgggcggagcataagacaccacccaaaattccattgcacactctgatatgtctctggaaagaaagtcaagagaagacacgtagaaatagtcccaatatagaaatgatgttatcagtctaggatgatcaataggttagacagtatcaggttaagcggaacaatgataatggaac

SEQ ID NO: 37636 - DNA, 807 bp, Muscodor strobelii
  misc_feature: SGI cDNA ID NO. 573065
  misc_feature: Encodes the peptide sequence at SEQ ID NO 37637
atgagctcttcggaagagatgataatcaacccagctagagccgaagccctcgtgtcgcaaattaaggctgtcagcgagcgcgtcacggctgtcgccaagggccggaatgtcagactagtagcagtctcaaagttgaagccggcaaatgacatcctggctctcgccaaaccgcagcaaaccgggttcgagccacagctgcactttggcgagaactatgcccaggagctgatgcagaaggctgagctgctgccacgcgatatccagtggcatttcatcggcggtctacagtctggccactgcaaaaagcttgccgcaatccccaacctattctgcgtctcgagcgtagacacattgaagaaagcccagctcctggacaaacatcgaggcgagctcgccgcctccttcacctcatctgctcctgaaaagcttaacatccacgtacaagtcaacacctcaggcgaagactctaaatccggttgtatgcccggtgcagagaccgtggagctctgccgcgcagtcgaagaagcgcagaacttgcacctccttggtctgatgactatcggtgcaatcgcacgatccgtcgccacgacgccggagaatgagaatgaggactttgtcaccttacgggaacagcgcgatgttgtggccaaggaactgggcttgggtgatgataggaagctggagttgagtatgggtatgagtgaggattttgagggtgctattgcgatgggcagtgatgaggtgagagttgggagcacaatcttcggtacgcggcctcctaagagtgatgctgtacttgtgcagtag

SEQ ID NO: 37637 - protein, 268 aa, Muscodor strobelii
  misc_feature: SGI Peptide ID NO. 573065
  misc_feature (11)..(260): Pfam Id: PF01168 Pfam Desc: Alanine racemase, N-terminal domain
  misc_feature (68)..(187): Pfam Id: PF01168 Pfam Desc: Alanine racemase, N-terminal domain
  misc_feature (1)..(267): NCBI GI: 171689970 Blast Desc: protein product [Podospora anserina] gi|170944947|emb|CAP71058.1| protein product [Podospora anserina]
  misc_feature (3)..(267): NCBI GI: 85077550 Blast Desc: NCU03579 [Neurospora crassa OR74A] gi|28881125|emb|CAD70296.1| conserved [Neurospora crassa] gi|28917059|gb|EAA26782.1| NCU03579 [Neurospora crassa OR74A]
  misc_feature (3)..(264): NCBI GI: 256735358 Blast Desc: NECHADRAFT_75105 [Nectria haematococca mpVI 77-13-4]
  misc_feature (7)..(268): NCBI GI: 39961008 Blast Desc: MGG_09492 [Magnaporthe grisea 70-15] gi|145010990|gb|EDJ95646.1| MGG_09492 [Magnaporthe grisea 70-15]
  misc_feature (1)..(264): NCBI GI: 261353032 Blast Desc: conserved [Verticillium albo-atrum VaMs.102]
  misc_feature (5)..(266): NCBI GI: 189204762 Blast Desc: alanine racemase family protein (ISS) [Pyrenophora tritici-repentis Pt-1C-BFP] gi|187985815|gb|EDU51303.1| alanine racemase family protein (ISS) [Pyrenophora tritici-repentis
  misc_feature (4)..(266): NCBI GI: 169610101 Blast Desc: SNOG_08144 [Phaeosphaeria nodorum SN15] gi|111063300|gb|EAT84420.1| SNOG_08144 [Phaeosphaeria nodorum SN15]
  misc_feature (10)..(264): NCBI GI: 258577879 Blast Desc: UREG_02637 [Uncinocarpus reesii 1704] gi|237903387|gb|EEP77788.1| UREG_02637 [Uncinocarpus reesii 1704]
  misc_feature (6)..(263): NCBI GI: 156064729 Blast Desc: SS1G_00372 [Sclerotinia sclerotiorum 1980] gi|154691234|gb|EDN90972.1| SS1G_00372 [Sclerotinia sclerotiorum 1980]
  misc_feature (10)..(267): NCBI GI: 240110214 Blast Desc: CPC735_062460 [Coccidioides posadasii C735 delta SOWgp]
MSSSEEMIINPARAEALVSQIKAVSERVTAVAKGRNVRLVAVSKLKPANDILALAKPQQTGFEPQLHFGENYAQELMQKAELLPRDIQWHFIGGLQSGHCKKLAAIPNLFCVSSVDTLKKAQLLDKHRGELAASFTSSAPEKLNIHVQVNTSGEDSKSGCMPGAETVELCRAVEEAQNLHLLGLMTIGAIARSVATTPENENEDFVTLREQRDVVAKELGLGDDRKLELSMGMSEDFEGAIAMGSDEVRVGSTIFGTRPPKSDAVLVQ

SEQ ID NO: 37638 - DNA, 1013 bp, Muscodor strobelii
  misc_feature: SGI EST ID NO. CUFF.90138.0
  misc_feature: Variant of the nucleotide sequence at SEQ ID NO 37636
gcgaaatcgcaccaattttcaaaaacttcgtcgttttccacaaggcacaggcagcacgacgatgagctcttcggaagagatgataatcaacccagctagagccgaagccctcgtgtcgcaaattaaggctgtcagcgagcgcgtcacggctgtcgccaagggccggaatgtcagactagtagcagtctcaaagttgaagccggcaaatgacatcctggctctcgccaaaccgcagcaaaccgggttcgagccacagctgcactttggcgagaactatgcccaggagctgatgcagaaggctgagctgctgccacgcgatatccagtggcatttcatcggcggtctacagtctggccactgcaaaaagcttgccgcaatccccaacctattctgcgtctcgagcgtagacacattgaagaaagcccagctcctggacaaacatcgaggcgagctcgccgcctccttcacctcatctgctcctgaaaagcttaacatccacgtacaagtcaacacctcaggcgaagactctaaatccggttgtatgcccggtgcagagaccgtggagctctgccgcgcagtcgaagaagcgcagaacttgcacctccttggtctgatgactatcggtgcaatcgcacgatccgtcgccacgacgccggagaatgagaatgaggactttgtcaccttacgggaacagcgcgatgttgtggccaaggaactgggcttgggtgatgataggaagctggagttgagtatgggtatgagtgaggattttgagggtgctattgcgatgggcagtgatgaggtgagagttgggagcacaatcttcggtacgcggcctcctaagagtgatgctgtacttgtgcagtagagctaaacacagtacggtaatgcatatttccgatgcgatcagctatgacaatcacagagggtattacgtccatcacgtcaatttcgtcaatttttggcttcagagtgatggtatagttgagtttattgtacttctagcatccagc

SEQ ID NO: 37639 - DNA, 825 bp, Muscodor strobelii
  misc_feature: SGI cDNA ID NO. 573066
  misc_feature: Elevated expression when VOC is produced
  misc_feature: Encodes the peptide sequence at SEQ ID NO 37640
gagcctaccgtggtaaaccctgacgatccctctgcaatggtaaattggggcttcatagagatgacgaacaccgagaccggtctatacgccaacttatcctttgtggatttcgtcggcgtcttattaggactcacgcttattgccaaggacagtacgacccaagtagtgacaggtttaccggctggtgcagtgtccagcatttgtcgtgcattacgcgagcaatctaccgacaagctcccgtgggatagcttgtgtatagtcggcccgaatgacaagcccatacgagttctgtcaccgaatgaatacatctcaatcagccctacgttcctgcagggatattacacggattacgtcgagcgagtgtgggtgaagtatacgtctcaagatctggtcattgatacccagagcggtgcaggagaagtctcatgtcgtgtccacaatgacagcctctactgcgacggggacaatcgtagctacactcgtcccgaagaagtagatatctggggttgcaacacgggacctttcgcgattctagaaggagacaatactatccaccaggcggttgttccgaggttgtgtgccgcattcgctcggagcacgttgctcgtcgacggcggctctgtccaaccttcggtgctgggagaccagtactacaaaagcagcccaacaaatcattatagtcgaatcatacacgagcttctagcaggaggaaatggttacgcatttccttatgatgatgtcggtgtggataatacgagcatggcaggagttgtttctacgagcgatccaaaaattttgacagtaacagtcggtggaacttcgtaa

SEQ ID NO: 37640 - protein, 274 aa, Muscodor strobelii
  misc_feature: SGI Peptide ID NO. 573066
  misc_feature (1)..(271): NCBI GI: 256726304 Blast Desc: NECHADRAFT_94692 [Nectria haematococca mpVI 77-13-4]
  misc_feature (1)..(274): NCBI GI: 46111053 Blast Desc: FG02408.1 [Gibberella zeae PH-1]
  misc_feature (1)..(272): NCBI GI: 261361626 Blast Desc: glucanase B [Verticillium albo-atrum VaMs.102]
  misc_feature (1)..(274): NCBI GI: 212526330 Blast Desc: conserved [Penicillium marneffei ATCC 18224] gi|210072720|gb|EEA26807.1| conserved [Penicillium marneffei ATCC 18224]
  misc_feature (1)..(274): NCBI GI: 255931147 Blast Desc: Pc12g02400 [Penicillium chrysogenum Wisconsin 54-1255] gi|211581749|emb|CAP79867.1| Pc12g02400 [Penicillium chrysogenum Wisconsin 54-1255]
  misc_feature (1)..(274): NCBI GI: 242780568 Blast Desc: conserved [Talaromyces stipitatus ATCC 10500] gi|218719770|gb|EED19189.1| conserved [Talaromyces stipitatus ATCC 10500]
  misc_feature (1)..(274): NCBI GI: 242774018 Blast Desc: glucan endo-1,3-beta-glucosidase precursor, [Talaromyces stipitatus ATCC 10500] gi|218721977|gb|EED21395.1| glucan endo-1,3-beta-glucosidase precursor, [Talaromyces ATCC
  misc_feature (1)..(274): NCBI GI: 212531815 Blast Desc: glucan endo-1,3-beta-glucosidase precursor, [Penicillium marneffei ATCC 18224] gi|210071428|gb|EEA25517.1| glucan endo-1,3-beta-glucosidase precursor, [Penicillium ATCC
  misc_feature (1)..(274): NCBI GI: 242761177 Blast Desc: conserved [Talaromyces stipitatus ATCC 10500] gi|218723326|gb|EED22743.1| conserved [Talaromyces stipitatus ATCC 10500]
  misc_feature (1)..(273): NCBI GI: 261358449 Blast Desc: glucanase B [Verticillium albo-atrum VaMs.102]
  misc_feature (1)..(249): SWISSPROT Homolog: EC 3.2.1.39 Glucan endo-1,3-beta-D-glucosidase
  misc_feature: Useful for introducing or modulating the production of volatile compounds
EPTVVNPDDPSAMVNWGFIEMTNTETGLYANLSFVDFVGVLLGLTLIAKDSTTQVVTGLPAGAVSSICRALREQSTDKLPWDSLCIVGPNDKPIRVLSPNEYISISPTFLQGYYTDYVERVWVKYTSQDLVIDTQSGAGEVSCRVHNDSLYCDGDNRSYTRPEEVDIWGCNTGPFAILEGDNTIHQAVVPRLCAAFARSTLLVDGGSVQPSVLGDQYYKSSPTNHYSRIIHELLAGGNGYAFPYDDVGVDNTSMAGVVSTSDPKILTVTVGGTS

SEQ ID NO: 37641 - DNA, 1718 bp, Muscodor strobelii
  misc_feature: SGI EST ID NO. CUFF.90147.0
  misc_feature: Variant of the nucleotide sequence at SEQ ID NO 37639
ggagcctaccgtggtaaaccctgacgatccctctgcaatggtaaattggggcttcatagagatgacgaacaccgagaccggtctatacgccaacttatcctttgtggatttcgtcggcgtcttattaggactcacgcttattgccaaggacagtacgacccaagtagtgacaggtttaccggctggtgcagtgtccagcatttgtcgtgcattacgcgagcaatctaccgacaagctcccgtgggatagcttgtgtatagtcggcccgaatgacaagcccatacgagttctgtcaccgaatgaatacatctcaatcagccctacgttcctgcagggatattacacggattacgtcgagcgagtgtgggtgaagtatacgtctcaagatctggtcattgatacccagagcggtgcaggagaagtctcatgtcgtgtccacaatgacagcctctactgcgacggggacaatcgtagctacactcgtcccgaagaagtagatatctggggttgcaacacgggacctttcgcgattctagaaggagacaatactatccaccaggcggttgttccgaggttgtgtgccgcattcgctcggagcacgttgctcgtcgacggcggctctgtccaaccttcggtgctgggagaccagtactacaaaagcagcccaacaaatcattatagtcgaatcatacacgagcttctagcaggaggaaatggttacgcatttccttatgatgatgtcggtgtggataatacgagcatggcaggagttgtttctacgagcgatccaaaaattttgacagtaacagtcggtggaacttcgtaacgtgctggcattggcataaccaatctacagccaaggactggaatgttggagcaggtggagattattggcgcataaagtaagaggcgaagttaatacgttggatatatttagtacgttgtataatcacctacaactcgcagattacataagtaccagttctctaatagagagcaaggccgcatcaggcttcaaggcaggacaatagaatgaaatttcatgctctttaataaatgccacaagcactgacttctgacggagattgaatttcgccggtgtgtgttgctgagtggcgatgaccagaaggagcccatgcataggcttcttcccaaggggataaccgagaaacccacgacgcgtccacatttcatcatgcataaattcagattgatagctaaggtgcgaaaagtgaaagagtggctagataaagatgaaataatattctatatatgttggattcccttcccgggcgagcccagatcaccgtgaactagtgagcctgttcgatcgctaccaattatgtacattcatacagaccgtctagtgatttttcccatatgctggccagagacacccgcaagcatgcgcatcatcacttccgcgtcaacttagaccggctttctgccaagtttttgggtcccttcaaacctttacgccctcattactccaatgtaggagaattgggaacgaactcacgttcgctcgaatttcgccatataaaaagtccgatgagtaggaaagtagatactctccatcaacctactcgttgttgccttctcctactactcttctccaacagccctctccagtcgagctagcgtatctctgaagcgaaaaccttgctctcctgtatgtcccatatcttgatccggatatattttctccgcatctgttt

SEQ ID NO: 37642 - DNA, 420 bp, Muscodor strobelii
  misc_feature: SGI cDNA ID NO. 573067
  misc_feature: Encodes the peptide sequence at SEQ ID NO 37643
atgcatccctctgcccagaccaaattttccgtcaaggatcggtctcacgtctatttcaagatggccagagctgcaaatatgtcgtccgcaacagagtccgcgaggattggccttcgtcctcaaaggaatggtcaaaatactctcgccttttcctacagtcgtggtgcctgtcttccctctctgagggtcgatgctacctacaatctttcgttcattcaagtagttcttcagtcatcaatcagcgaccagacattcgatactggattggacggcagtgttatggctcagcttgtaaacgatacctcaggcggaaggtcatggactgctcagtccacgacctttcgagggttaaaacttaattgccagcctggcacttacgtccttaaattcttaggaagcgccatgggccagaatggcgca

SEQ ID NO: 37643 - protein, 140 aa, Muscodor strobelii
  misc_feature: SGI Peptide ID NO. 573067
MHPSAQTKFSVKDRSHVYFKMARAANMSSATESARIGLRPQRNGQNTLAFSYSRGACLPSLRVDATYNLSFIQVVLQSSISDQTFDTGLDGSVMAQLVNDTSGGRSWTAQSTTFRGLKLNCQPGTYVLKFLGSAMGQNGA

SEQ ID NO: 37644 - DNA, 159 bp, Muscodor strobelii
  misc_feature: SGI EST ID NO. CUFF.90150.0
  misc_feature: Variant of the nucleotide sequence at SEQ ID NO 37642
ccgcaacagagtccgcgaggattggccttcgtcctcaaaggaatggtcaaaatactctcgccttttcctacagtcgtggtgcctgtcttccctctctgagggtcgatgctacctacaatctttcgttcattcaagtagttcttcagtcatcaatcagcg

SEQ ID NO: 37645 - DNA, 1431 bp, Muscodor strobelii
  misc_feature: SGI cDNA ID NO. 573068
  misc_feature: Elevated expression when VOC is produced
  misc_feature: Encodes the peptide sequence at SEQ ID NO 37646
atggccgaagccgcagctcagaatggcgagaccgacgtgacaatggccgaatcgcatgacggacctgcgacagaaaatggcgacgagaagaaggatgtcaagctcgaggacctctttgccgatgtagactcggacgaggagttcccgagttcgagaccagaacagatcaagccttccagtccacccgttgcaccgtcatcacccatacagaaaggcgcggggataagttcgtcagaccctgagctgttgcgcatgttctaccaacgactattccctttccgatacctgtttcaatggctcaaccacagtccaacaccgaccaacgacttcggacatcgcgagtttgcccttaccattctcgatgccgccggcgaagagatctacttgcgatatcaatcctacccaacagccgatctcatccgaaaagacatcatatcaaaactgcccctccgtttcgagatcggccccgtatacaccaccaacccccgcgaccgcaaaacactacgaaaccagaactcgttcaagcccttagccaaggagctatgcttcgatatcgatcttaccgactacgacgacatccgcacgtgttgcgacaaagccaatatctgcaccaagtgctggcagttcatgaccatggccataaaggtcctcgacaccgctctgcgcgaggacttcggcttcaagcacatcatgtgggtctactcgggtcgtcgtggtgcccacgcctgggtctgcgacaagaaggccagaaatatggatgatcagaagcggagggccatcgctgggtatctggaggtcatccgtggtggttcacagaccgaagtctcgatctcctggcccccccatttccaatcagacgtcctcgaaatccaagacccctggtccgagggcgaccgcgccgaacacctcatctccctcctccccgacaaatctctcaacgagagcttacgaaagaagtgggatgcctcgccaggccgtgccagcacgtcgaaatgggccgacatcgacgctctcgccaaaagcggcgcgagcaagggcctagatgcgcgcgccctgctcgaggcgaagcaggacgtggtcctcgagtacacgtacccacgtctcgatatcgaagtctccaagaagttaaaccatttgcttaaatcaccgtttgtcgtccacccgggtacgggacgggtctgtgtgccgatcgacactagtaggttagatgagtttgatccgacggctgtgcccactgtgcaggggctgttggaggagattgatagttggaagccggagggcgagggagatgagaaggttgcggattgggaaaagactagtttgaagccgtatattcaggcgtttcggagttttgtcattgcgcttatgaaagatgagagggatcctaaggttaagagagaacgggatgaacctgagagtatggagttttag

SEQ ID NO: 37646 - protein, 476 aa, Muscodor strobelii
  misc_feature: SGI Peptide ID NO. 573068
  misc_feature (183)..(399): Pfam Id: PF01896 Pfam Desc: Eukaryotic and archaeal DNA primase small subunit
  misc_feature (4)..(476): NCBI GI: 261354809 Blast Desc: DNA primase small subunit [Verticillium albo-atrum VaMs.102]
  misc_feature (3)..(476): NCBI GI: 46123923 Blast Desc: FG06339.1 [Gibberella zeae PH-1]
  misc_feature (3)..(476): NCBI GI: 154313300 Blast Desc: BC1G_05347 [Botryotinia fuckeliana B05.10] gi|150849416|gb|EDN24609.1| BC1G_05347 [Botryotinia fuckeliana B05.10]
  misc_feature (7)..(476): NCBI GI: 145610823 Blast Desc: conserved [Magnaporthe grisea 70-15] gi|145018174|gb|EDK02453.1| conserved [Magnaporthe grisea 70-15]
  misc_feature (10)..(476): NCBI GI: 256732457 Blast Desc: [Nectria haematococca mpVI 77-13-4]
  misc_feature (13)..(465): NCBI GI: 85093187 Blast Desc: DNA primase small subunit [Neurospora crassa OR74A] gi|28921091|gb|EAA30409.1| DNA primase small subunit [Neurospora crassa OR74A]
  misc_feature (33)..(476): NCBI GI: 189210964 Blast Desc: DNA primase small subunit [Pyrenophora tritici-repentis Pt-1C-BFP] gi|187977906|gb|EDU44532.1| DNA primase small subunit [Pyrenophora tritici-repentis Pt-1C-BFP]
  misc_feature (11)..(476): NCBI GI: 119492141 Blast Desc: DNA primase subunit Pri1, [Neosartorya fischeri NRRL 181] gi|119411701|gb|EAW21644.1| DNA primase subunit Pri1, [Neosartorya fischeri NRRL 181]
  misc_feature (11)..(476): NCBI GI: 70999998 Blast Desc: DNA primase subunit Pri1 [Aspergillus fumigatus Af293] gi|66852353|gb|EAL92678.1| DNA primase subunit Pri1, [Aspergillus fumigatus Af293] gi|159127725|gb|EDP52840.1| DNA primase subunit
  misc_feature (12)..(476): NCBI GI: 169613034 Blast Desc: SNOG_09645 [Phaeosphaeria nodorum SN15] gi|111061790|gb|EAT82910.1| SNOG_09645 [Phaeosphaeria nodorum SN15]
  misc_feature: Useful for introducing or modulating the production of volatile compounds
MAEAAAQNGETDVTMAESHDGPATENGDEKKDVKLEDLFADVDSDEEFPSSRPEQIKPSSPPVAPSSPIQKGAGISSSDPELLRMFYQRLFPFRYLFQWLNHSPTPTNDFGHREFALTILDAAGEEIYLRYQSYPTADLIRKDIISKLPLRFEIGPVYTTNPRDRKTLRNQNSFKPLAKELCFDIDLTDYDDIRTCCDKANICTKCWQFMTMAIKVLDTALREDFGFKHIMWVYSGRRGAHAWVCDKKARNMDDQKRRAIAGYLEVIRGGSQTEVSISWPPHFQSDVLEIQDPWSEGDRAEHLISLLPDKSLNESLRKKWDASPGRASTSKWADIDALAKSGASKGLDARALLEAKQDVVLEYTYPRLDIEVSKKLNHLLKSPFVVHPGTGRVCVPIDTSRLDEFDPTAVPTVQGLLEEIDSWKPEGEGDEKVADWEKTSLKPYIQAFRSFVIALMKDERDPKVKRERDEPESMEF

SEQ ID NO: 37647 - DNA, 1877 bp, Muscodor strobelii
  misc_feature: SGI EST ID NO. CUFF.90177.0
  misc_feature: Variant of the nucleotide sequence at SEQ ID NO 37645
gccgaattgcgaacaggggtttccccagcttcccgggtgctttacgcgaaaacgcgtgcaaacgcgtctctgtcgtctctccttctggtattggcagactgaacccctccaagcacggatttatgttgcatgcgacttgataagatcaagactttaagacaagacttgggcagatagtgcaattcgtgaaatgccgcattcagtatcgcccaaagctcgaagctctcgtcagacaagcgacgaaaagatggccgaagccgcagctcagaatggcgagaccgacgtgacaatggccgaatcgcatgacggacctgcgacagaaaatggcgacgagaagaaggatgtcaagctcgaggacctctttgccgatgtagactcggacgaggagttcccgagttcgagaccagaacagatcaagccttccagtccacccgttgcaccgtcatcacccatacagaaaggcgcggggataagttcgtcagaccctgagctgttgcgcatgttctaccaacgactattccctttccgatacctgtttcaatggctcaaccacagtccaacaccgaccaacgacttcggacatcgcgagtttgcccttaccattctcgatgccgccggcgaagagatctacttgcgatatcaatcctacccaacagccgatctcatccgaaaagacatcatatcaaaactgcccctccgtttcgagatcggccccgtatacaccaccaacccccgcgaccgcaaaacactacgaaaccagaactcgttcaagcccttagccaaggagctatgcttcgatatcgatcttaccgactacgacgacatccgcacgtgttgcgacaaagccaatatctgcaccaagtgctggcagttcatgaccatggccataaaggtcctcgacaccgctctgcgcgaggacttcggcttcaagcacatcatgtgggtctactcgggtcgtcgtggtgcccacgcctgggtctgcgacaagaaggccagaaatatggatgatcagaagcggagggccatcgctgggtatctggaggtcatccgtggtggttcacagagtgggaagaaagtccacattaggaggccgctacatccacatctgagccgaagtctcgatctcctggcccccccatttccaatcagacgtcctcgaaatccaagacccctggtccgagggcgaccgcgccgaacacctcatctccctcctccccgacaaatctctcaacgagagcttacgaaagaagtgggatgcctcgccaggccgtgccagcacgtcgaaatgggccgacatcgacgctctcgccaaaagcggcgcgagcaagggcctagatgcgcgcgccctgctcgaggcgaagcaggacgtggtcctcgagtacacgtacccacgtctcgatatcgaagtctccaagaagttaaaccatttgcttaaatcaccgtttgtcgtccacccgggtacgggacgggtctgtgtgccgatcgacactagtaggttagatgagtttgatccgacggctgtgcccactgtgcaggggctgttggaggagattgatagttggaagccggagggcgagggagatgagaaggttgcggattgggaaaagactagtttgaagccgtatattcaggcgtttcggagttttgtcattgcgcttatgaaagatgagagggatcctaaggttaagagagaacgggatgaacctgagagtatggagttttagggttgtggatatggtgttggtgtatggtggactaagaattaatgattatgccttacggggtgagactgcacggattgttgctcgtggttttagtatgaggtgaaatcaacaatgccgccatattgtacaaagatctaaagaggtatcgaaatc

SEQ ID NO: 37648 - DNA, 867 bp, Muscodor strobelii
  misc_feature: SGI cDNA ID NO. 573069
  misc_feature: Encodes the peptide sequence at SEQ ID NO 37649
atggctgaggaccaagaaaggttgcctctatctatagaggacaatcatccggcggacaagctcgtccaagttgtcgtcagcaatggcttgagaagctgccaaatccagcttcgcctctgggagctcggcccgctttcggaactttacaacgacgaagatgacaacgacattcagatcgacgctcaattggaagcattcgagctcttcctcaagtggttgcacgaagacaaactgccgaccgtcgggcggggaatggtgaaggaagactatgactctgacgactggccattaggcggttgctgttttcccaatctctacccccatgctccaaccatggaagggcatcttgcgagttgtttcacaagagaagcctcatatttatctcgtcggaccccaacgcccgcctctgaggctatccagacctctctcatcgcgctcctcatcttcgccagcaactaccggctagaggagctctacaatgatgctctcgatgcttttcgcacaggagagacctacgtctggcgagacttcgtctctgtgactcatctcgatctggtatataatcgattacccttcgtcacgtttctggagggcgacaatgccaaaccgctgcgagcatactttgcggactatgcctaccaccttggaaccaagaacaagaccatgatggcatacgacaagctctggagcgacatggagtttcgacgagatatgctggcgcgcatagacggcccgcgtccaatgcaatggaaagagggagtgcagaatccgtacgagacaacgtatcatatccatggaggcgagctgggcatcgactgtccgaggacagcggctaggaattgcagcaagatgccacacagtcgttag

SEQ ID NO: 37649 - protein, 288 aa, Muscodor strobelii
  misc_feature: SGI Peptide ID NO. 573069
MAEDQERLPLSIEDNHPADKLVQVVVSNGLRSCQIQLRLWELGPLSELYNDEDDNDIQIDAQLEAFELFLKWLHEDKLPTVGRGMVKEDYDSDDWPLGGCCFPNLYPHAPTMEGHLASCFTREASYLSRRTPTPASEAIQTSLIALLIFASNYRLEELYNDALDAFRTGETYVWRDFVSVTHLDLVYNRLPFVTFLEGDNAKPLRAYFADYAYHLGTKNKTMMAYDKLWSDMEFRRDMLARIDGPRPMQWKEGVQNPYETTYHIHGGELGIDCPRTAARNCSKMPHSR

SEQ ID NO: 37650 - DNA, 1413 bp, Muscodor strobelii
  misc_feature: SGI cDNA ID NO. 573070
  misc_feature: Encodes the peptide sequence at SEQ ID NO 37651
atgtctttccagttcatcgacaataacattacaattgaccaaaaagcaagaaaactcattcgtagtcatgccgccaaagggaagaatctcggcagaactattcaccgtccatcccgcaatccgagaccacgtaaggttgaggacaagcccattgtcacaccgccgacaatacctcctgttgaggtagacgagcgtgaggatgattcgcgttcaactgcaattcagcgaaaatttcaagaggatttagcggtttctcttccgtttgaagtgaacccaacatgtcgacgtcttttccaccaagttgttgcatttatgagcctggtcccgtacgggccacaaataaggaaatttgtggttatgcccgaaggaccaaatcaatttctacaggttgcatttgttgacgaggctttcttccataccgtggtagcgatggccgttgcatcatctatcgaaacaacacggcatgagacagctgaagctttgaatcatctgagtcgaagcctgcagctcgtgaacaagcgcctggccgaggccaaaaacggagcaatttctgacacgacgttcgctgtaatcattgcgctgactcagcacgagcgtctcttaggctattatcatcaaggtctagtgcatttcgagggactgttgaaattgctggatacaaaaggtggcatctcagaactcgtgactcggaatccaaaaattgcatcgaaggcgtttcgagccgatcttgatttcgcgctccagtttggaacaccgacacgattcaatgccgacgacgtgcccggtgagattgctttattctggctcaaggaagagcgaagagagcttcaagaaatacggccgatgcggccgactgttctgtccgccgtcagcgatgggctccagcatgtatatgaggacatatcgactctcgtctggctcgtcaacgaaaacgctgtgaacaagatcaaaattgacgaccatgacttccatagcgtgctcctactcatcttgtatcgtttgttccgggtcaggtcagtcaacgccgcattcggaacatgtagtgcggtcgaagtactgcttcatcttggactcacggctgcgatgaccgaattcttcttctcgttgcgcatgaagctgccagatgttcgagtcctgaacaagcgcatctactcagctgtacacgaacattcatttaagggcagagatgcacaagaggttttgttctggatcctcttcacttgcaaagcctccgttttcaaagatctcgatgaagacatatggcttattccgaaagcttctgaagtcgtgcgccagctagggctaagaaattggaagggggcgtttcagatattgcaaaagtatccgtggatcaacatcttttccgacgccgctgcgaaatccctttgggatcagattacattcggtgtatga

SEQ ID NO: 37651 - protein, 470 aa, Muscodor strobelii
  misc_feature: SGI Peptide ID NO. 573070
  misc_feature (1)..(467): NCBI GI: 212534058 Blast Desc: conserved [Penicillium marneffei ATCC 18224] gi|210069584|gb|EEA23674.1| conserved [Penicillium marneffei ATCC 18224]
  misc_feature (1)..(462): NCBI GI: 67540290 Blast Desc: AN6315.2 [Aspergillus nidulans FGSC A4] gi|40739509|gb|EAA58699.1| [Aspergillus nidulans FGSC A4] gi|259479469|tpe|CBF69719.1| TPA: conserved [Aspergillus nidulans
  misc_feature (1)..(463): NCBI GI: 242789315 Blast Desc: conserved [Talaromyces stipitatus ATCC 10500] gi|218717923|gb|EED17343.1| conserved [Talaromyces stipitatus ATCC 10500]
  misc_feature (161)..(466): NCBI GI: 154303792 Blast Desc: BC1G_08780 [Botryotinia fuckeliana B05.10] gi|150854364|gb|EDN29556.1| BC1G_08780 [Botryotinia fuckeliana B05.10]
  misc_feature (1)..(463): NCBI GI: 159122257 Blast Desc: AFUB_099800 [Aspergillus fumigatus A1163]
  misc_feature (3)..(463): NCBI GI: 256720043 Blast Desc: NECHADRAFT_89397 [Nectria haematococca mpVI 77-13-4]
  misc_feature (1)..(469): NCBI GI: 225558546 Blast Desc: conserved [Ajellomyces capsulatus G186AR]
  misc_feature (2)..(466): NCBI GI: 242812770 Blast Desc: conserved [Talaromyces stipitatus ATCC 10500] gi|218714365|gb|EED13788.1| conserved [Talaromyces stipitatus ATCC 10500]
  misc_feature (1)..(469): NCBI GI: 240274981 Blast Desc: conserved [Ajellomyces capsulatus H143]
  misc_feature (2)..(466): NCBI GI: 46120812 Blast Desc: FG04937.1 [Gibberella zeae PH-1]
MSFQFIDNNITIDQKARKLIRSHAAKGKNLGRTIHRPSRNPRPRKVEDKPIVTPPTIPPVEVDEREDDSRSTAIQRKFQEDLAVSLPFEVNPTCRRLFHQVVAFMSLVPYGPQIRKFVVMPEGPNQFLQVAFVDEAFFHTVVAMAVASSIETTRHETAEALNHLSRSLQLVNKRLAEAKNGAISDTTFAVIIALTQHERLLGYYHQGLVHFEGLLKLLDTKGGISELVTRNPKIASKAFRADLDFALQFGTPTRFNADDVPGEIALFWLKEERRELQEIRPMRPTVLSAVSDGLQHVYEDISTLVWLVNENAVNKIKIDDHDFHSVLLLILYRLFRVRSVNAAFGTCSAVEVLLHLGLTAAMTEFFFSLRMKLPDVRVLNKRIYSAVHEHSFKGRDAQEVLFWILFTCKASVFKDLDEDIWLIPKASEVVRQLGLRNWKGAFQILQKYPWINIFSDAAAKSLWDQITFGV

SEQ ID NO: 37652 - DNA, 987 bp, Muscodor strobelii
  misc_feature: SGI EST ID NO. CUFF.90181.0
  misc_feature: Variant of the nucleotide sequence at SEQ ID NO 37650
ttctgctcttaaagaggtctagaatcttgcgagctgagaacgattgcaactctctgttgatcaatgcatagactatgagaaatggtgcttgacggatggatccggctcctgcacgacggcatggaattaattgtctagtacattctcaaccaaggaatagttgtaagcatttgagatattgagcattccatgatatgtttcaaggacgtacatataagtaacggatttaattatcctttccagttcagatgactcaatagagaatagaacgcacggatcacttcaatagggagtcgcctgaacatggcattgtacacgtaatttccatcagcttaccgggacccgatcaaagtggacctgtcttcacagcgttttgaagtcagtactagccttttaactcccaagcaattcgttcggggaataggactgcatactacctacctatcatgtctttccagttcatcgacaataacattacaattgaccaaaaagcaagaaaactcattcgtagtcatgccgccaaagggaagaatctcggcagaactattcaccgtccatcccgcaatccgagaccacgtaaggttgaggacaagcccattgtcacaccgccgacaatacctcctgttgaggtagacgagcgtgaggatgattcgcgttcaactgcaattcagcgaaaatttcaagaggatttagcggtttctcttccgtttgaagtgaacccaacatgtcgacgtcttttccaccaagttgttgcatttatgagcctggtcccgtacgggccacaaataaggaaatttgtggttatgcccgaaggaccaaatcaatttctacaggttgcatttgttgacgaggctttcttccataccgtggtagcgatggccgttgcatcatctatcgaaacaacacggcatgagacagctgaagctttgaatcatctgagtcgaagcctgcagctcgtgaacaagcgcctggccgaggccaaaaacg

SEQ ID NO: 37653 - DNA, 1653 bp, Muscodor strobelii
  misc_feature: SGI cDNA ID NO. 573071
  misc_feature: Encodes the peptide sequence at SEQ ID NO 37654
atgagaggcttcatcggactttcgataacctgcgttgctcttgcactcctcgttggaagcaacgcgcagccacaacgtccctatctcaagagagacacaccgccgacggtcaacttaggttacgagatacatcagggtaccgtcaatactacgggcaactactatttatttagtaatattccttatgcacaacagccgattggagatctgcggttcagagagcctcaggcgatcactacgaacagctccaatgtcaaccttggggcagaatatctccaatgttttcaagcttatccgggatggatattgactcgggaagcattatcaaacgatactttgagtgcgactgctggaagtcctaataacccgacgcaaacggaaagctgtcttgttcttgacgtatatgttccctcggatatcttcgatagtggcacagcagctgatgttcctgttctggtttggatccatggcggtggttttacaataggttctaagacttcatctggtaaccctgctggtctcattgctaagtctcaggagtacggtcaagctggcatgattgtcgtgaccatcaactaccgccttggattgtttgggtggttagctggggatgatgtggtacccaatattggactctatgatcaacgcttcgcattggaatggattcaaaaatacattggccggtttggaggctgcgctgacagggtgacgataatgggggagagtgccggtgcctcgagcatagtccatcagatcacagcgtatggcggcaaaaaaccagttccgttccaagccgccatcccgcaaagtccagcatggcaattcaacatcgatgtgaacacaacttatgaacttacacttgctacggccgcgaaattagttaactcaactgtccccgacgttgctacactacgcctcctcgactcctcggtccttgcaacactcaatcaagctgttgtgtaccctgcaagcacggggagtttcaactttggaccagcaccggatggcactttcgtgcccaaactcccgcaaatattgctgtacgagggtcagtttgctcagagtttggatcttctaataagccattgctcgaatgagtccgttacttttacgcctagaataagcgatgcgaattatctgcgcgagcaattagaggagaaattccccgaagcctctgaggcaaccatagacgagcttttgacagatgtatatccagacgtatcgccatctactccgtggaagacagaattcgcacgcgcggtccagctagtcagcgaggctttctttacctgttcaactgcgtatcttgcagaagcaaaaggtaacacgacatataactacctgtttgcatatcctcccggctatcatgccattgacgtcccgtatacgttcttcaacggcgatacgacgacactgaatgatgggttacccgtggatgcagatcttgccaatgcacttcaaggatacattatttcattcgcgcgtaccggtaatcctaatgccaatgctgatggcttactgaaatttcccgagtacggtgacgatagcaccgtgatcgagttttcgaccgctggagtgacaacgaccgtcgacgatgtgcgaaatagtcgatgtgaatggtggaagcaggcaattctcgatggtcgcgtatag

SEQ ID NO: 37654 - protein, 550 aa, Muscodor strobelii
  misc_feature: SGI Peptide ID NO. 573071
  misc_feature (4)..(541): Pfam Id: PF00135 Pfam Desc: Carboxylesterase
  misc_feature (119)..(541): Pfam Id: PF00135 Pfam Desc: Carboxylesterase
  misc_feature (4)..(77): Pfam Id: PF00135 Pfam Desc: Carboxylesterase
  misc_feature (31)..(547): NCBI GI: 154294375 Blast Desc: BC1G_13960 [Botryotinia fuckeliana B05.10] gi|150844799|gb|EDN19992.1| BC1G_13960 [Botryotinia fuckeliana B05.10]
  misc_feature (35)..(547): NCBI GI: 156039433 Blast Desc: SS1G_11853 [Sclerotinia sclerotiorum 1980] gi|154697590|gb|EDN97328.1| SS1G_11853 [Sclerotinia sclerotiorum 1980]
  misc_feature (28)..(545): NCBI GI: 189200859 Blast Desc: acetylcholinesterase precursor [Pyrenophora tritici-repentis Pt-1C-BFP] gi|187983865|gb|EDU49353.1| acetylcholinesterase precursor [Pyrenophora tritici-repentis
  misc_feature (35)..(544): NCBI GI: 255946670 Blast Desc: Pc22g00570 [Penicillium chrysogenum Wisconsin 54-1255] gi|211591119|emb|CAP97345.1| Pc22g00570 [Penicillium chrysogenum Wisconsin 54-1255]
  misc_feature (152)..(546): NCBI GI: 169622735 Blast Desc: SNOG_14594 [Phaeosphaeria nodorum SN15] gi|160704840|gb|EAT78134.2| SNOG_14594 [Phaeosphaeria nodorum SN15]
  misc_feature (35)..(545): NCBI GI: 169601504 Blast Desc: SNOG_03619 [Phaeosphaeria nodorum SN15] gi|111067704|gb|EAT88824.1| SNOG_03619 [Phaeosphaeria nodorum SN15]
  misc_feature (35)..(544): NCBI GI: 119485943 Blast Desc: carboxylesterase family protein [Neosartorya fischeri NRRL 181] gi|119410470|gb|EAW20417.1| carboxylesterase family protein [Neosartorya fischeri NRRL 181]
  misc_feature (35)..(543): NCBI GI: 121710936 Blast Desc: carboxylesterase family protein [Aspergillus clavatus NRRL 1] gi|119401234|gb|EAW11658.1| carboxylesterase family protein [Aspergillus clavatus NRRL 1]
  misc_feature (51)..(549): NCBI GI: 169773941 Blast Desc: [Aspergillus oryzae RIB40] gi|83769300|dbj|BAE59437.1| protein product [Aspergillus oryzae]
  misc_feature (35)..(543): NCBI GI: 237625986 Blast Desc: carboxylesterase family protein [Penicillium griseofulvum]
  misc_feature (4)..(534): SWISSPROT Homolog: EC 3.1.1.3 Triacylglycerol lipase
MRGFIGLSITCVALALLVGSNAQPQRPYLKRDTPPTVNLGYEIHQGTVNTTGNYYLFSNIPYAQQPIGDLRFREPQAITTNSSNVNLGAEYLQCFQAYPGWILTREALSNDTLSATAGSPNNPTQTESCLVLDVYVPSDIFDSGTAADVPVLVWIHGGGFTIGSKTSSGNPAGLIAKSQEYGQAGMIVVTINYRLGLFGWLAGDDVVPNIGLYDQRFALEWIQKYIGRFGGCADRVTIMGESAGASSIVHQITAYGGKKPVPFQAAIPQSPAWQFNIDVNTTYELTLATAAKLVNSTVPDVATLRLLDSSVLATLNQAVVYPASTGSFNFGPAPDGTFVPKLPQILLYEGQFAQSLDLLISHCSNESVTFTPRISDANYLREQLEEKFPEASEATIDELLTDVYPDVSPSTPWKTEFARAVQLVSEAFFTCSTAYLAEAKGNTTYNYLFAYPPGYHAIDVPYTFFNGDTTTLNDGLPVDADLANALQGYIISFARTGNPNANADGLLKFPEYGDDSTVIEFSTAGVTTTVDDVRNSRCEWWKQAILDGRV

SEQ ID NO: 37655 - DNA, 805 bp, Muscodor strobelii
  misc_feature: SGI EST ID NO. CUFF.90198.0
  misc_feature: Variant of the nucleotide sequence at SEQ ID NO 37653
cagcaccggatggcactttcgtgcccaaactcccgcaaatattgctgtacgagggtcagtttgctcagagtttggatcttctaataagccattgctcgaatgagtccgttacttttacgcctagaataagcgatgcgaattatctgcgcgagcaattagaggagaaattccccgaagcctctgaggcaaccatagacgagcttttgacagatgtatatccagacgtatcgccatctactccgtggaagacagaattcgcacgcgcggtccagctagtcagcgaggctttctttacctgttcaactgcgtatcttgcagaagcaaaaggtaacacgacatataactacctgtttgcatatcctcccggctatcatgccattgacgtcccgtatacgttcttcaacggcgatacgacgacactgaatgatgggttacccgtggatgcagatcttgccaatgcacttcaaggatacattatttcattcgcgcgtaccggtaatcctaatgccaatgctgatggcttactgaaatttcccgagtacggtgacgatagcaccgtgatcgagttttcgaccgctggagtgacaacgaccgtcgacgatgtgcgaaatagtcgatgtgaatggtggaagcaggcaattctcgatggtcgcgtataggtcgactaggtcattagaaataacctaaataatacacacatacatagtatctattcttttcgatgactcgtcacttgagttgaatattatctataccgtaggtgcaactatgaaagacaacaagcaaatagtatgaccaatccgtt

SEQ ID NO: 37656 - DNA, 1542 bp, Muscodor strobelii
  misc_feature: SGI cDNA ID NO. 573072
  misc_feature: Elevated expression when VOC is produced
  misc_feature: Encodes the peptide sequence at SEQ ID NO 37657
atggggatcaacgttgccaattgggacactctcactacgatcatcgctctcgtctcgcttactgtcatagcatacctcgtgcgcttgaactctttgctgagtggaacgcctaatgaggtccaacggctcgttgcgccgaaatggacgccagagttgctgaaaaagacctacgaaagactccaggagaatccaactgactataccgacaagcttcccccaaagcttgaccgtcgttatgtcgtgactggtggttcaggtgagcccttcttttacgttgcaaattgcggtgtccgtcttgtcggtggatatatcgtgttgcaactacttgctcgtggcacaccaccctcccatattcggatcatagacatcagacagacagaacgaacagatatgcaaactggtcccgctacacaggtagatttcgccaaaacggacatcacttcaagagcttcagtagatgcagcttttgcacgaccatggccggcgtcagctgtagatttgcccttaactgtattccacacggcagctgtaatcttagcctctgaccggtcgagacatacatacgcgtttccagaatctgtgaacgtgaagggtactatcaatctgatggccgctgctcaggctgctggtgcatcagttttcagtactacatcctcggccagtatttccattcgtacagtaggcacatgggctgcgccatgggcaaaagagcccaaggactactttcagttattggataccgaagatttcaaatatcccgttaagcctcgcgagcagtactacagcaactacccggccactaaagcctatgctgaacgtctggtttgcgacgcgaatcgtgacggcttcaggactggtgcaattcgtcccgccaacggcgtctacggaaacccaactgacaacactgttggtgaccctctgagtcgtgatgtaatgccaacatgggtgtcacatgtggtgcagagctttgtgcacggggccaatgtggctattgctcatttgcaccacgaagcagtgctcttagatgcatcatccgcagcttcccactcgggcaagccgtttgtcgtcacagatccaaaccctccaatcacttacgatgacctgtactctgcgatccgtgtgctgtccatccaccctttctcaaatccgcagctgccgccagtactcatgcttctgatatcgcacgctgtcgaaatttactctgagctcttttacctacccgcccctttctcgtttctgcgtaagattttgccgccagtgcagggcgatatcagacatttgaagccgggactattctctattacaacgcatctagtaggatcaaacgcggagatcagcaaacctgtgagccagggcggcctcggctacaaaggcgtcacaacgacactcgacggtatggtcgctgaagttcttgaatggaatcgcgagcatgaaaatttgagcgagcaggagcgaaaggtccgcaaggtctacaccacttctgtgtcactcgccgagaatattcgcaaactcgctgttgtatcgcactccgttgctgattaa

SEQ ID NO: 37657 - protein, 513 aa, Muscodor strobelii
  misc_feature: SGI Peptide ID NO. 573072
  misc_feature (80)..(388): Pfam Id: PF01073 Pfam Desc: 3-beta hydroxysteroid dehydrogenase/isomerase family
  misc_feature (79)..(357): Pfam Id: PF01370 Pfam Desc: NAD dependent epimerase/dehydratase family
  misc_feature (28)..(497): NCBI GI: 171684275 Blast Desc: protein product [Podospora anserina] gi|170942098|emb|CAP67750.1| protein product [Podospora anserina]
  misc_feature (29)..(512): NCBI GI: 39955521 Blast Desc: MGG_09014 [Magnaporthe grisea 70-15] gi|149209371|ref|XP_001522060.1| MGCH7_ch7g177 [Magnaporthe grisea 70-15] gi|86196132|gb|EAQ70770.1| MGCH7_ch7g177 grisea
  misc_feature (24)..(483): NCBI GI: 116180778 Blast Desc: CHGG_01017 [Chaetomium globosum CBS 148.51] gi|88185314|gb|EAQ92782.1| CHGG_01017 [Chaetomium globosum CBS 148.51]
  misc_feature (11)..(475): NCBI GI: 70991090 Blast Desc: 3-beta hydroxysteroid dehydrogenase/isomerase family protein, [Aspergillus fumigatus Af293] gi|66848026|gb|EAL88356.1| 3-beta hydroxysteroid dehydrogenase/isomerase family protein,
  misc_feature (11)..(475): NCBI GI: 159130868 Blast Desc: 3-beta hydroxysteroid dehydrogenase/isomerase family protein, [Aspergillus fumigatus A1163]
  misc_feature (14)..(509): NCBI GI: 171687429 Blast Desc: protein product [Podospora anserina] gi|170943676|emb|CAP69328.1| protein product [Podospora anserina]
  misc_feature (13)..(475): NCBI GI: 119496495 Blast Desc: 3-beta hydroxysteroid dehydrogenase/isomerase family protein, [Neosartorya fischeri NRRL 181] gi|119413183|gb|EAW23124.1| 3-beta hydroxysteroid family protein,
  misc_feature (15)..(495): NCBI GI: 145255548 Blast Desc: An18g05470 [Aspergillus niger] gi|134084589|emb|CAK97465.1| protein product [Aspergillus niger]
  misc_feature (14)..(478): NCBI GI: 169768992 Blast Desc: [Aspergillus oryzae RIB40] gi|83766824|dbj|BAE56964.1| protein product [Aspergillus oryzae]
  misc_feature (14)..(478): NCBI GI: 238501420 Blast Desc: 3-beta hydroxysteroid dehydrogenase family protein [Aspergillus flavus NRRL3357] gi|220692181|gb|EED48528.1| 3-beta hydroxysteroid dehydrogenase family protein [Aspergillus flavus
  misc_feature: Useful for introducing or modulating the production of volatile compounds
MGINVANWDTLTTIIALVSLTVIAYLVRLNSLLSGTPNEVQRLVAPKWTPELLKKTYERLQENPTDYTDKLPPKLDRRYVVTGGSGEPFFYVANCGVRLVGGYIVLQLLARGTPPSHIRIIDIRQTERTDMQTGPATQVDFAKTDITSRASVDAAFARPWPASAVDLPLTVFHTAAVILASDRSRHTYAFPESVNVKGTINLMAAAQAAGASVFSTTSSASISIRTVGTWAAPWAKEPKDYFQLLDTEDFKYPVKPREQYYSNYPATKAYAERLVCDANRDGFRTGAIRPANGVYGNPTDNTVGDPLSRDVMPTWVSHVVQSFVHGANVAIAHLHHEAVLLDASSAASHSGKPFVVTDPNPPITYDDLYSAIRVLSIHPFSNPQLPPVLMLLISHAVEIYSELFYLPAPFSFLRKILPPVQGDIRHLKPGLFSITTHLVGSNAEISKPVSQGGLGYKGVTTTLDGMVAEVLEWNREHENLSEQERKVRKVYTTSVSLAENIRKLAVVSHSVAD

SEQ ID NO: 37658 - DNA, 2065 bp, Muscodor strobelii
  misc_feature: SGI EST ID NO. CUFF.90222.0
  misc_feature: Variant of the nucleotide sequence at SEQ ID NO 37656
caaagttcaatccagctttagactctccgtaaaaaccatcatgcattttcaatgagttgcacgagacgtcactattcttcttggtctgtgtcatcaatccatttcctacaaacctacaatcattgaactgtgctggattatgtgctaccactcgaactaggaggataaaaaatatttcgagataagatcttacgagtgagccgacgatggggatcaacgttgccaattgggacactctcactacgatcatcgctctcgtctcgcttactgtcatagcatacctcgtgcgcttgaactctttgctgagtggaacgcctaatgaggtccaacggctcgttgcgccgaaatggacgccagagttgctgaaaaagacctacgaaagactccaggagaatccaactgactataccgacaagcttcccccaaagcttgaccgtcgttatgtcgtgactggtggttcaggtcttgtcggtggatatatcgtgttgcaactacttgctcgtggcacaccaccctcccatattcggatcatagacatcagacagacagaacgaacagatatgcaaactggtcccgctacacaggtagatttcgccaaaacggacatcacttcaagagcttcagtagatgcagcttttgcacgaccatggccggcgtcagctgtagatttgcccttaactgtattccacacggcagctgtaatcttagcctctgaccggtcgagacatacatacgcgtttccagaatctgtgaacgtgaagggtactatcaatctgatggccgctgctcaggctgctggtgcatcagttttcagtactacatcctcggccagtatttccattcgtacagtaggcacatgggctgcgccatgggcaaaagagcccaaggactactttcagttattggataccgaagatttcaaatatcccgttaagcctcgcgagcagtactacagcaactacccggccactaaagcctatgctgaacgtctggtttgcgacgcgaatcgtgacggcttcaggactggtgcaattcgtcccgccaacggcgtctacggaaacccaactgacaacactgttggtgaccctctgagtcgtgatgtaatgccaacatgggtgtcacatgtggtgcagagctttgtgcacggggccaatgtggctattgctcatttgcaccacgaagcagtgctcttagatgcatcatccgcagcttcccactcgggcaagccgtttgtcgtcacagatccaaaccctccaatcacttacgatgacctgtactctgcgatccgtgtgctgtccatccaccctttctcaaatccgcagctgccgccagtactcatgcttctgatatcgcacgctgtcgaaatttactctgagctcttttacctacccgcccctttctcgtttctgcgtaagattttgccgccagtgcagggcgatatcagacatttgaagccgggactattctctattacaacgcatctagtaggatcaaacgcggagatcagcaaacctgtgagccagggcggcctcggctacaaaggcgtcacaacgacactcgacggtatggtcgctgaagttcttgaatggaatcgcgagcatgaaaatttgagcgagcaggagcgaaaggtccgcaaggtctacaccacttctgtgtcactcgccgagaatattcgcaaactcgctgttgtatcgcactccgttgctgattaagagtgttgagagggttgaatgggggtcaagggaagaggactgaaggtagaatggatggtaatgtcgcagacgagctggtactgcatcactaaggtgtataaatgggtttctggattaacatatatcttgtatcagtatggactacaacttttcaacagacgcattctggcatggaattggtgttgtttcagttccggttcaagtatctgtgctagtccacgctcggtgagattagcaataatctatatgataagagttctagaatcacattgagcattgagcagtcggactataacctatgttgcatgggacggggttttcgaagaatcagagtgacgagaaatgcctagaaa

SEQ ID NO: 37659 - DNA, 486 bp, Muscodor strobelii
  misc_feature: SGI cDNA ID NO. 573073
  misc_feature: Encodes the peptide sequence at SEQ ID NO 37660
atggtattcctcacaattgccatgtcctcttatgggctcctcacatatgcccttcgctttcttcttcaagcctacttaatcaaattcactgtttctgatttgagcaacttcgagaaagcacacaatattccaaactaccagcatccccccattcacgctgtacaaggcgtcgtggccgccggtctcgtcttaataatatttgtcatcttctcccgagttgtagaactctatgtcactatcgatcgcaatcgaacatacgaagagttcgtaaataacagaatgcttggagagtatacaccaattggcattgccttgtacattgggttcgagggttatctcgcctatgcacttttcacattgtcgcgtgacttacctgaaggcaatcagcaacatggtaatgatgttgagcttggtgtcgtgaatccaccagcaggtcctccgccggttaatcctccggctcctgtggcgttaccagctggccgatag

SEQ ID NO: 37660 - protein, 161 aa, Muscodor strobelii
  misc_feature: SGI Peptide ID NO. 573073
MVFLTIAMSSYGLLTYALRFLLQAYLIKFTVSDLSNFEKAHNIPNYQHPPIHAVQGVVAAGLVLIIFVIFSRVVELYVTIDRNRTYEEFVNNRMLGEYTPIGIALYIGFEGYLAYALFTLSRDLPEGNQQHGNDVELGVVNPPAGPPPVNPPAPVALPAGR

SEQ ID NO: 37661 - DNA, 1662 bp, Muscodor strobelii
  misc_feature: SGI cDNA ID NO. 573074
  misc_feature: Encodes the peptide sequence at SEQ ID NO 37662
atggtgggcatttctcggtcaaaaggctgtaaaacatgtaggagaaagaaaatcaagtgcgatgaacaacgtccgagatgcggccaatgtagaaagggagtaagagagtgcgagggatatgaccaacccactatctttttgaacagctctagtggagatttctctaccgatgttcccgcttcaggaggaaaaggtatcaagttcaaaaacaagtctgtcgacgacattgcctggctgcattcccatggagactctaactctgggcaaaggacgctactccgcatcaagcaacatgatgcacgagcgaaaccatatgctgccaaagagcttaaaactgcccctagaactggagtggtacctgctcctcgcactctgggctcacatgtatgggctgtggaaaacatcctcttccagtttctggagatatgtcatccctcttgcagcacgcaagaagcaccgctagcttggatgaagagccttgtacccctgaagaaagacgtcgatgcattgccactggccatgtctgcacttgcttttggatgggccggacatgttcatagccaaccagagcttgttgataagggattacagctctacaatgcagcagtccaacagctgaggaacgacattaacgcgtgctctccacttcaaatgcttgccgccacagccatctttatcgaattcgagctctgcgagttcggtagtaaaggcaactcgggctggcaaacgcacatgcagggcatcgcggcgttattgcaatccctcggtcctgaaaaggtatccaaagagccttacctccagatatattcattttgtcgcatgatattcattacgcaaggcctgagccggcggcacagagtttgtgccggctccccaatgtggacaaacgggccatacaagaacttcaagaaaaattcgtatcacctgttctacgatctcgcagctgaggcttgcgagctgctagagcgcgctgacgcattggaattcccctgcttggattccaatgtcgagaatgaacgacctatactcgttcttcaggacatcatggaactcatccgaagactttgggcattcctacgagctgctgacatactcgttttgaaaggcccaatagaattccctagcgagtctgcggtagccctcaatcagttcaatcgtgctacagctcgcggatatcccacgaaaattcctgcagacaaaggttggacgtttgatgccgttcaaggtcagcgactaatgcataactattgggctcttgttttgagcctgtacatgaccatacttgacaatcatgtgctctgcccgatgctagagaattccgaagacctccaggaacagcttttaattgtgctcgggattaacaatactcgttctagtgagtcgattacctcgttaatggcagcagaatgtcggaaactcgcaaacaatgtcgcaatacacagtaccgagacctgccataatatgtgtcaaagttttggttctttgataagtcacgtcaatctcgaagccgcaatacggtggtacgagaaccatcctgaatcgaaaggagacatggagaccgctcttgagcagcattgccgagcgctacttcgggaatcagagatgaggaatcaaaaaaagtctgtgccttccaagttcccatcctccccgatgatgttctga

SEQ ID NO: 37662 - protein, 553 aa, Muscodor strobelii
  misc_feature: SGI Peptide ID NO. 573074
  misc_feature (8)..(47): Pfam Id: PF00172 Pfam Desc: Fungal Zn(2)-Cys(6) binuclear cluster domain
  misc_feature (8)..(44): Pfam Id: PF00172 Pfam Desc: Fungal Zn(2)-Cys(6) binuclear cluster domain
  misc_feature (1)..(530): NCBI GI: 212546723 Blast Desc: conserved [Penicillium marneffei ATCC 18224] gi|210065035|gb|EEA19130.1| conserved [Penicillium marneffei ATCC 18224]
  misc_feature (168)..(509): NCBI GI: 242822510 Blast Desc: conserved [Talaromyces stipitatus ATCC 10500] gi|218712822|gb|EED12247.1| conserved [Talaromyces stipitatus ATCC 10500]
  misc_feature (10)..(328): NCBI GI: 212532205 Blast Desc: conserved [Penicillium marneffei ATCC 18224] gi|210071623|gb|EEA25712.1| conserved [Penicillium marneffei ATCC 18224]
  misc_feature (1)..(314): NCBI GI: 169775579 Blast Desc: [Aspergillus oryzae RIB40] gi|83770991|dbj|BAE61123.1| protein product [Aspergillus oryzae]
  misc_feature (1)..(328): NCBI GI: 238502211 Blast Desc: conserved [Aspergillus flavus NRRL3357] gi|220691149|gb|EED47497.1| conserved [Aspergillus flavus NRRL3357]
  misc_feature (1)..(386): NCBI GI: 116182346 Blast Desc: [Chaetomium globosum CBS 148.51] gi|88186098|gb|EAQ93566.1| [Chaetomium globosum CBS 148.51]
  misc_feature (1)..(356): NCBI GI: 242761438 Blast Desc: conserved [Talaromyces stipitatus ATCC 10500] gi|218723375|gb|EED22792.1| conserved [Talaromyces stipitatus ATCC 10500]
  misc_feature (1)..(492): NCBI GI: 238843951 Blast Desc: C6 zinc finger domain-containing protein [Microsporum canis CBS 113480]
  misc_feature (10)..(333): NCBI GI: 212541813 Blast Desc: conserved [Penicillium marneffei ATCC 18224] gi|210065968|gb|EEA20061.1| conserved [Penicillium marneffei ATCC 18224]
  misc_feature (1)..(431): NCBI GI: 146324679 Blast Desc: conserved [Aspergillus fumigatus Af293] gi|129555472|gb|EBA27214.1| conserved [Aspergillus fumigatus Af293]
MVGISRSKGCKTCRRKKIKCDEQRPRCGQCRKGVRECEGYDQPTIFLNSSSGDFSTDVPASGGKGIKFKNKSVDDIAWLHSHGDSNSGQRTLLRIKQHDARAKPYAAKELKTAPRTGVVPAPRTLGSHVWAVENILFQFLEICHPSCSTQEAPLAWMKSLVPLKKDVDALPLAMSALAFGWAGHVHSQPELVDKGLQLYNAAVQQLRNDINACSPLQMLAATAIFIEFELCEFGSKGNSGWQTHMQGIAALLQSLGPEKVSKEPYLQIYSFCRMIFITQGLSRRHRVCAGSPMWTNGPYKNFKKNSYHLFYDLAAEACELLERADALEFPCLDSNVENERPILVLQDIMELIRRLWAFLRAADILVLKGPIEFPSESAVALNQFNRATARGYPTKIPADKGWTFDAVQGQRLMHNYWALVLSLYMTILDNHVLCPMLENSEDLQEQLLIVLGINNTRSSESITSLMAAECRKLANNVAIHSTETCHNMCQSFGSLISHVNLEAAIRWYENHPESKGDMETALEQHCRALLRESEMRNQKKSVPSKFPSSPMMF

SEQ ID NO: 37663 - DNA, 2322 bp, Muscodor strobelii
  misc_feature: SGI EST ID NO. CUFF.90220.0
  misc_feature: Variant of the nucleotide sequence at SEQ ID NO 37661
tgggtatcgtctggcttcttgatatgaggcatgcaatcgctagaaaaggcaacatcttccttttccgatatcgaaagtacaatgaagtcaagctccaaagcacagcgtccgcagtgtcgccattagtcgatccgcccctaggtctagtacacgtctcagacacttcgaaagttggtataactcgccatggtgggcatttctcggtcaaaaggctgtaaaacatgtaggagaaagaaaatcaagtgcgatgaacaacgtccgagatgcggccaatgtagaaagggagtaagagagtgcgagggatatgaccaacccactatctttttgaacagctctagtggagatttctctaccgatgttcccgcttcaggaggaaaaggtatcaagttcaaaaacaagtctgtcgacgacattgcctggctgcattcccatggagactctaactctgggcaaaggacgctactccgcatcaagcaacatgatgcacgagcgaaaccatatgctgccaaagagcttaaaactgcccctagaactggagtggtacctgctcctcgcactctgggctcacatgtatgggctgtggaaaacatcctcttccagtttctggagatatgtcatccctcttgcagcacgcaagaagcaccgctagcttggatgaagagccttgtacccctgaagaaagacgtcgatgcattgccactggccatgtctgcacttgcttttggatgggccggacatgttcatagccaaccagagcttgttgataagggattacagctctacaatgcagcagtccaacagctgaggaacgacattaacgcgtgctctccacttcaaatgcttgccgccacagccatctttatcgaattcgagctctgcgagttcggtagtaaaggcaactcgggctggcaaacgcacatgcagggcatcgcggcgttattgcaatccctcggtcctgaaaaggtatccaaagagccttacctccagatatattcattttgtcgcatgatattcattacgcaaggcctgagccggcggcacagagtttgtgccggctccccaatgtggacaaacgggccatacaagaacttcaagaaaaattcgtatcacctgttctacgatctcgcagctgaggcttgcgagctgctagagcgcgctgacgcattggaattcccctgcttggattccaatgtcgagaatgaacgacctatactcgttcttcaggacatcatggaactcatccgaagactttgggcattcctacgagctgctgacatactcgttttgaaaggcccaatagaattccctagcgagtctgcggtagccctcaatcagttcaatcgtgctacagctcgcggatatcccacgaaaattcctgcagacaaaggttggacgtttgatgccgttcaaggtcagcgactaatgcataactattgggctcttgttttgagcctgtacatgaccatacttgacaatcatgtgctctgcccgatgctagagaattccgaagacctccaggaacagcttttaattgtgctcgggattaacaatactcgttctagtgagtcgattacctcgttaatggcagcagaatgtcggaaactcgcaaacaatgtcgcaatacacagtaccgagacctgccataatatgtgtcaaagttttggttctttgataagtcacgtcaatctcgaagccgcaatacggtggtacgagaaccatcctgaatcgaaaggagacatggagaccgctcttgagcagcattgccgagcgctacttcgggaatcagagatgaggaatcaaaaaaagtctgtgccttccaagttcccatcctccccgatgatgttctgaggcgccattggtgctgagatttcgtaagcgcctgttgataagatcaacccagctacacacttgaatcataagcaatttgagctttatcgcatagaaacctcttatgcctgtcaatttgacaaggggtctcttaatttatcgatatatcatatctgttttccactaccccgaacaccgtcgacaagcggaggaacaagcatgtacagtacatcactcatagacagatttgtgaagtaaacccaggcgctatactacaagtctaacaatagcagagcggtccacagatgacgggactcttgacacattcctctttctttgttttccgaacgcctgcattgtctttgtcactcgatattctcccatcctcatgcagtgatgcagaacaataggaaacagatcttctgtttccattacggacaatatgattgttgaaactatgaagttgttgcaaagatgccaccagctgcttcgttg

SEQ ID NO: 37664 - DNA, 825 bp, Muscodor strobelii
  misc_feature: SGI cDNA ID NO. 573075
  misc_feature: Reduced expression when VOC is produced
  misc_feature: Encodes the peptide sequence at SEQ ID NO 37665
atgactcctctctacaagaagacgcttattattggtgctacgtcaggcattggctttgcacttgcagaaaggctcattgctgaaggtacatcggtcattgttacgggtcgacgacaagatcgccttcaggagtttgtagaaaaacatggaagtgcaaaggcaaccgccgagactatcgatgttatgaagctggaaacactccccgcgttcgccaagaccattacggaagtacactcagatctggacagtattatcgtgaatgcaggtatccaacggccgttcaactttgccgatcccgcaactgtcaacttgaacagctttggagatgagctcttgacgaactacacagccgtcgtacacacgataacagccttcctgccacatcttctgcgactgggaaaggagaaggaaacacacctggtcttcatcagcgcatcgctcggtctcgtgcccacaatgctgcgtacaccgggttacaatgctagcaaagcagcattacacagctttatcatgaatcttcgggagcagctcaaagagaatggtgataatgtccggtgtgtcgaggtctttccgccagccgtccaaaccgaactccacgacactcatcaccagcccgatctcatcgacggagggaagattggcatgccactcgacaaatacactgaatgcttgtataatagcttgcagagcggacatgaccagtttgcgactggcccagcagaaccatggctcgaaaacggaggcttcgaaagcgagcggcagaagatctaccaagagcaacatcctattattaaaaaggcactggcgcagttcagcaagaactaa

SEQ ID NO: 37665 - protein, 274 aa, Muscodor strobelii
  misc_feature: SGI Peptide ID NO. 573075
  misc_feature (6)..(178): Pfam Id: PF00106 Pfam Desc: short chain dehydrogenase
  misc_feature (1)..(273): NCBI GI: 256729384 Blast Desc: NECHADRAFT_63220 [Nectria haematococca mpVI 77-13-4]
  misc_feature (1)..(273): NCBI GI: 46117530 Blast Desc: FG04607.1 [Gibberella zeae PH-1]
  misc_feature (2)..(273): NCBI GI: 212546725 Blast Desc: short-chain dehydrogenase/oxidoreductase, [Penicillium marneffei ATCC 18224] gi|210065036|gb|EEA19131.1| short-chain dehydrogenase/oxidoreductase, [Penicillium marneffei ATCC 18224]
  misc_feature (2)..(271): NCBI GI: 242822506 Blast Desc: 4-nitrophenylphosphatase [Talaromyces stipitatus ATCC 10500] gi|218712821|gb|EED12246.1| 4-nitrophenylphosphatase [Talaromyces stipitatus ATCC 10500]
  misc_feature (5)..(271): NCBI GI: 145248241 Blast Desc: An13g02310 [Aspergillus niger] gi|134081119|emb|CAK41630.1| protein product [Aspergillus niger]
  misc_feature (1)..(274): NCBI GI: 46133923 Blast Desc: FG09101.1 [Gibberella zeae PH-1]
  misc_feature (5)..(271): NCBI GI: 238507337 Blast Desc: short-chain dehydrogenase/oxidoreductase, [Aspergillus flavus NRRL3357] gi|220689583|gb|EED45934.1| short-chain dehydrogenase/oxidoreductase, [Aspergillus flavus NRRL3357]
  misc_feature (5)..(271): NCBI GI: 169786337 Blast Desc: [Aspergillus oryzae RIB40] gi|83776377|dbj|BAE66496.1| protein product [Aspergillus oryzae]
  misc_feature (5)..(271): NCBI GI: 255947372 Blast Desc: Pc22g04140 [Penicillium chrysogenum Wisconsin 54-1255] gi|211591470|emb|CAP97702.1| Pc22g04140 [Penicillium chrysogenum Wisconsin 54-1255]
  misc_feature (5)..(271): NCBI GI: 119473491 Blast Desc: short-chain dehydrogenase/oxidoreductase, [Neosartorya fischeri NRRL 181] gi|119406774|gb|EAW16724.1| short-chain dehydrogenase/oxidoreductase, [Neosartorya fischeri NRRL 181]
  misc_feature (6)..(230): SWISSPROT Homolog: EC 1.1.1.56 Ribitol 2-dehydrogenase
  misc_feature: Useful for introducing or modulating the production of volatile compounds
MTPLYKKTLIIGATSGIGFALAERLIAEGTSVIVTGRRQDRLQEFVEKHGSAKATAETIDVMKLETLPAFAKTITEVHSDLDSIIVNAGIQRPFNFADPATVNLNSFGDELLTNYTAVVHTITAFLPHLLRLGKEKETHLVFISASLGLVPTMLRTPGYNASKAALHSFIMNLREQLKENGDNVRCVEVFPPAVQTELHDTHHQPDLIDGGKIGMPLDKYTECLYNSLQSGHDQFATGPAEPWLENGGFESERQKIYQEQHPIIKKALAQFSKN

SEQ ID NO: 37666 - DNA, 816 bp, Muscodor strobelii
  misc_feature: SGI cDNA ID NO. 573076
  misc_feature: Encodes the peptide sequence at SEQ ID NO 37667
atgttggacaacccgtccctcatctacctaggcccgaagaccgccccttggcaacctaactccccagctccgctaatactactgcacgatggtggcggcacgacgttcaattatcattgcctgtacccaataggtcgaaccctttatggtattcacaatgcgcatctcgacgaaggcggctattgggacactggtgtatctggcatggcatctcactacattaagttgatagaaaccattttgccagagggcggggatattctgcttggaggatggtcttttgggggtcacctatcccttgaagtagcgtggcaaatgttgaaacagccagcaaactcaacacgaccaaaatatagagtacttgggatggttttcatcgacagcatatgccctaaagacatgttcgaagaccgcgccaagtttgattcattttcataccatccagtggagaaatcacctgaggagctaaaggacatgaaactgcgagataaagttgacctgaacatgcataatgcgagggtgatgctcagtcgttggaaaatgccagattggaatagtcgacggagcgagataccgccgacaatcatgctgagagcgaaagaactctggggtgatgggacgggagttgtagaccatcatcgagattcccgttttcttggttgggaccgatacctaagcgacagaggttggatcaaagatgttgtcgatctcgatgggcatcatttcaatatcttcgatggcgaatatcttagggacataactgcgaaaattgcagcagccgccgacgagctcgacgcgcaagacttcgatctctga

SEQ ID NO: 37667 - protein, 271 aa, Muscodor strobelii
  misc_feature: SGI Peptide ID NO. 573076
  misc_feature (23)..(257): Pfam Id: PF00975 Pfam Desc: Thioesterase domain
  misc_feature (3)..(266): NCBI GI: 171692453 Blast Desc: protein product [Podospora anserina] gi|170946175|emb|CAP72976.1| protein product [Podospora anserina]
  misc_feature (1)..(265): NCBI GI: 46110351 Blast Desc: FG02057.1 [Gibberella zeae PH-1]
  misc_feature (1)..(265): NCBI GI: 256728756 Blast Desc: NECHADRAFT_86026 [Nectria haematococca mpVI 77-13-4]
  misc_feature (1)..(264): NCBI GI: 145257626 Blast Desc: An04g04360 [Aspergillus niger] gi|134058716|emb|CAK38700.1| protein product [Aspergillus niger]
  misc_feature (3)..(268): NCBI GI: 116198411 Blast Desc: CHGG_07361 [Chaetomium globosum CBS 148.51] gi|88178640|gb|EAQ86108.1| CHGG_07361 [Chaetomium globosum CBS 148.51]
  misc_feature (1)..(265): NCBI GI: 242774911 Blast Desc: TSTA_088110 [Talaromyces stipitatus ATCC 10500] gi|218722157|gb|EED21575.1| TSTA_088110 [Talaromyces stipitatus ATCC 10500]
  misc_feature (2)..(266): NCBI GI: 156622745 Blast Desc: thioesterase domain containing protein [Alternaria alternata] gi|261336134|dbj|BAI44766.1| thioesterase domain containing protein [Alternaria alternata] thioesterase domain
  misc_feature (13)..(261): NCBI GI: 240111652 Blast Desc: Thioesterase domain containing protein [Coccidioides posadasii C735 delta SOWgp]
  misc_feature (13)..(249): NCBI GI: 238842992 Blast Desc: Amt4 [Microsporum canis CBS 113480]
  misc_feature (23)..(267): NCBI GI: 242811736 Blast Desc: conserved [Talaromyces stipitatus ATCC 10500] gi|218714150|gb|EED13573.1| conserved [Talaromyces stipitatus ATCC 10500]
MLDNPSLIYLGPKTAPWQPNSPAPLILLHDGGGTTFNYHCLYPIGRTLYGIHNAHLDEGGYWDTGVSGMASHYIKLIETILPEGGDILLGGWSFGGHLSLEVAWQMLKQPANSTRPKYRVLGMVFIDSICPKDMFEDRAKFDSFSYHPVEKSPEELKDMKLRDKVDLNMHNARVMLSRWKMPDWNSRRSEIPPTIMLRAKELWGDGTGVVDHHRDSRFLGWDRYLSDRGWIKDVVDLDGHHFNIFDGEYLRDITAKIAAAADELDAQDFDL

SEQ ID NO: 37668 - DNA, 2629 bp, Muscodor strobelii
  misc_feature: SGI EST ID NO. CUFF.90229.0
  misc_feature: Variant of the nucleotide sequence at SEQ ID NO 37666
tgacaacgtaagaggatctccgaaaattcgcatcgattgactggatatctaggtgcattgctaagcgtcctatcggagaagcaggctacctcgctcacatctgaatccgcctacgcgcaattgttgtaatcggcgcggtttctcacattcaacgcctgaaagtctgaaggcctggtatagtggcactagaccaaccgtatttcgcccctggtggacctgcgatttgagttatcgcgaagaccatcagataattgcatacgaacgccacgcatttagtttcgctcacgtatttgttcggccggcttgggctcaagcgcaatgttggacaacccgtccctcatctacctaggcccgaagaccgccccttggcaacctaactccccagctccgctaatactactgcacgatggtggcggcacgacgttcaattatcattgcctgtacccaataggtcgaaccctttatggtattcacaatgcgcatctcgacgaaggcggctattgggacactggtgtatctggcatggcatctcactacattaagttgatagaaaccattttgccagagggcggggatattctgcttggaggatggtcttttgggggtcacctatcccttgaagtagcgtggcaaatgttgaaacagccagcaaactcaacacgaccaaaatatagagtacttgggatggttttcatcgacagcatatgccctaaagacatgttcgaagaccgcgccaagtttgattcattttcataccatccagtggagaaatcacctgaggagctaaaggacatgaaactgcgagataaagttgacctgaacatgcataatgcgagggtgatgctcagtcgttggaaaatgccagattggaatagtcgacggagcgagataccgccgacaatcatgctgagagcgaaagaactctggggtgatgggacgggagttgtagaccatcatcgagattcccgttttcttggttgggaccgatacctaagcgacagaggttggatcaaagatgttgtcgatctcgatgggcatcatttcaatatcttcgatggcgaatatcttagggacataactgcgaaaattgcagcagccgccgacgagctcgacgcgcaagacttcgatctctgagttgcaagaccattgaatcataagacacatcatggccaagctgccagactagagcgaggccgacgcatgaaagactcagatgtactatatggtcggccatatttagagacaccacccacaccaccttatagattattagaccaatacactggaaccactctaaaaattgtgcacatctatttatctatttagttcttgctgaactgcgccagtgcctttttaataataggatgttgctcttggtagatcttctgccgctcgctttcgaagcctccgttttcgagccatggttctgctgggccagtcgcaaactggtcatgtccgctctgcaagctattatacaagcattcagtgtatttgtcgagtggcatgccaatcttccctccgtcgatgagatcgggctggtgatgagtgtcgtggagttcggtttggacggctggcggaaagacctcgacacaccggacattatcaccattctctttgagctgctcccgaagattcatgataaagctgtgtaatgctgctttgctagcattgtaacccggtgtacgcagcattgtgggcacgagaccgagcgatgcgctgatgaagaccaggtgtgtttccttctcctttcccagtcgcagaagatgtggcaggaaggctgttatcgtgtgtacgacggctgtgtagttcgtcaagagctcatctccaaagctgttcaagttgacagttgcgggatcggcaaagttgaacggccgttggatacctgcattcacgataatactgtccagatctgagtgtacttccgtaatggtcttggcgaacgcggggagtgtttccagcttcataacatcgatagtctcggcggttgcctttgcacttccatgtttttctacaaactcctgaaggcgatcttgtcgtcgacccgtaacaatgaccgatgtaccttcagcaatgagcctttctgcaagtgcaaagccaatgcctgacgtagcaccaataataagcgtcttcttgtagagaggagtcatcctgaagttggccagtaggaatgggggtatggtgtagctgagtgtaatacttgacagagtaaaaatcgcttttccaggtagaaagtgtttagagataggtcggcaatttataggcatttgctacctatgtacagatagttcggcttatcgcgctcataggcgcagtacctaacttacctactgcagcggggatgccgtaggtgaaaaaagtcacaatgatattgatacggcccacgatcgattctgtcaagcactacctaagcacctcgagtgtttttatagattgtatcgtccgggaagttaccttgaacgacggtcttgcagactgccgtatctcttccccataacttccaatacacacggaggaagacggtgttgtaccactatacacataacacaccccgttaagttgagctcgcggatttacctcacgcgacatgtccgacaccatttgccaccacggtgaacgaacaaaggtcgat

SEQ ID NO: 37669 - DNA, 1434 bp, Muscodor strobelii
  misc_feature: SGI cDNA ID NO. 573077
  misc_feature: Encodes the peptide sequence at SEQ ID NO 37670
atggctccacccgacaagcacctgcagtacctggaccaagccacgcgtgccatcttcaaagagacccccgacaacgtcactgtaaactcaatccggaagcgggcagaagatcagaacgatctacaaaatggcttcttcgtcagtcccgagtggaagcaaagaagcaaggaattcattacaaaacttgtgaatgaacttatggaaattgaacctccatcatctatcccagaaccgaagctggagtccaatgggaagaacggtgtcaagcgatcttcgagcgacgagccgtcccctgcagccaagagacaaaagaagggctccaccaccgcaccctccaagaaatccaagaccaagcgagagagtcccagcgatctggatgacctagatgatctagacaccaaaccgaagaggaataagaagaaagtggccaagaaggcaaccgccgtcaagccacagtccgactccgaactatctgacctcagttcatctgaggtagaccagaagccgaagaagaaaggtggccgtgcgtcaaagcgcgctatcgactctgacaacgaagatgaggctagtgactttggcgactcaccgccgaagccgaaaacgaagcgtaaacgcgccgcgcctgcaaagaagaaaatcgccaaacgcaccaaagtagagtcggagagcgagggcgaagccgctccggtgaagaagcctgttgattccgatgacgacgaggaagaagcggacattaaagcggacacgaaggatgatgcaagtcctgatacaaaacccaagacgatgaccaaaaatgaggactctgaagaggatgtcaaagtaaagaaaagccaagttgtggcggatgactctgactcatcgttgtcatccgtgatcgacgatcctccaccgaagagaggtagagccaagggcgcgaaagcagctcccaaagccaaggccgcggtgcccaaagcagcgcccaaagagctgacaggcgacgaagccgagatcaagaaattgcagggacaccttgtcaagtgtggagtgcgcaagatttggggtatcgaactgaagaagtttggggacgatagcaaagccaaggtgcgacacctcaagaaaatgctcagtgatgtgggcatggacagccgcttctccgaggccaaggccaaggagatcaaagagagacgagaactcctaggcgagctggaagccgtcaacgagatgaactcgctatggggtagcgagggccgcggaggtcgtgcatcacgcagcactgccgttcgtaagtcactcaaggaagagtcagacgagggtgacgatgacgacaagacgaagcccgaagaggaggacgacgaagacgacggcgacagcgaggcagaagccaaaatcaagtcgcgaaagagtaaaagaatggccgacctggccttcttggggagcgagagtgaatccgactga

SEQ ID NO: 37670 - protein, 477 aa, Muscodor strobelii
  misc_feature: SGI Peptide ID NO. 573077
  misc_feature (329)..(477): NCBI GI: 46123361 Blast Desc: FG06058.1 [Gibberella zeae PH-1]
  misc_feature (291)..(477): NCBI GI: 145608174 Blast Desc: MGG_12724 [Magnaporthe grisea 70-15] gi|145015672|gb|EDK00162.1| MGG_12724 [Magnaporthe grisea 70-15]
  misc_feature (329)..(417): NCBI GI: 256732572 Blast Desc: NECHADRAFT_78893 [Nectria haematococca mpVI 77-13-4]
  misc_feature (24)..(431): NCBI GI: 171678645 Blast Desc: protein product [Podospora anserina] gi|170937392|emb|CAP62050.1| protein product [Podospora anserina]
  misc_feature (17)..(434): NCBI GI: 154279422 Blast Desc: [Ajellomyces capsulatus NAm1] gi|150412467|gb|EDN07854.1| [Ajellomyces capsulatus NAm1]
  misc_feature (1)..(477): NCBI GI: 154308599 Blast Desc: BC1G_07722 [Botryotinia fuckeliana B05.10] gi|150852673|gb|EDN27865.1| BC1G_07722 [Botryotinia fuckeliana B05.10]
  misc_feature (283)..(429): NCBI GI: 121705284 Blast Desc: transcriptional regulator, [Aspergillus clavatus NRRL 1] gi|119399051|gb|EAW09479.1| transcriptional regulator, [Aspergillus clavatus NRRL 1]
  misc_feature (281)..(435): NCBI GI: 242823328 Blast Desc: transcriptional regulator, [Talaromyces stipitatus ATCC 10500] gi|218712977|gb|EED12402.1| transcriptional regulator, [Talaromyces stipitatus ATCC 10500]
  misc_feature (11)..(424): NCBI GI: 258564150 Blast Desc: [Uncinocarpus reesii 1704] gi|237908327|gb|EEP82728.1| [Uncinocarpus reesii 1704]
  misc_feature (273)..(407): NCBI GI: 212546441 Blast Desc: transcriptional regulator, [Penicillium marneffei ATCC 18224] gi|210064894|gb|EEA18989.1| transcriptional regulator, [Penicillium marneffei ATCC 18224]
MAPPDKHLQYLDQATRAIFKETPDNVTVNSIRKRAEDQNDLQNGFFVSPEWKQRSKEFITKLVNELMEIEPPSSIPEPKLESNGKNGVKRSSSDEPSPAAKRQKKGSTTAPSKKSKTKRESPSDLDDLDDLDTKPKRNKKKVAKKATAVKPQSDSELSDLSSSEVDQKPKKKGGRASKRAIDSDNEDEASDFGDSPPKPKTKRKRAAPAKKKIAKRTKVESESEGEAAPVKKPVDSDDDEEEADIKADTKDDASPDTKPKTMTKNEDSEEDVKVKKSQVVADDSDSSLSSVIDDPPPKRGRAKGAKAAPKAKAAVPKAAPKELTGDEAEIKKLQGHLVKCGVRKIWGIELKKFGDDSKAKVRHLKKMLSDVGMDSRFSEAKAKEIKERRELLGELEAVNEMNSLWGSEGRGGRASRSTAVRKSLKEESDEGDDDDKTKPEEEDDEDDGDSEAEAKIKSRKSKRMADLAFLGSESESD

SEQ ID NO: 37671 - DNA, 2099 bp, Muscodor strobelii
  misc_feature: SGI EST ID NO. CUFF.90274.0
  misc_feature: Variant of the nucleotide sequence at SEQ ID NO 37669
tcaaaggcgaagttcaaggtctggagtctacatgtttaattacctacgccaccagctgcctgtgatgttatggcagctgcggagccggaccacgggcggcgttgaagtgctagtgcaaacaaggaattgacttgggaaggtgctgcgttcatgcgcctcggtgcgtttccccagatccgccgatccactgcaactcgcgacaagttcaagtccaagtccacgtcgaccccacttcaacgcaacacgcgacgggccatcaccacactctctgtcgccaacatcgtcgaagcgcgtgctgccattgtggaagcttgcacctttcgctctttcaatttcgtttgaattgaaccatcaacgtcccacccaggccaccgtcgccaacatggctccacccgacaagcacctgcagtacctggaccaagccacgcgtgccatcttcaaagagacccccgacaacgtcactgtaaactcaatccggaagcgggcagaagatcagaacgatctacaaaatggcttcttcgtcagtcccgagtggaagcaaagaagcaaggaattcattacaaaacttgtgaatgaacttatggaaattgaacctccatcatctatcccagaaccgaagctggagtccaatgggaagaacggtgtcaagcgatcttcgagcgacgagccgtcccctgcagccaagagacaaaagaagggctccaccaccgcaccctccaagaaatccaagaccaagcgagagagtcccagcgatctggatgacctagatgatctagacaccaaaccgaagaggaataagaagaaagtggccaagaaggcaaccgccgtcaagccacagtccgactccgaactatctgacctcagttcatctgaggtagaccagaagccgaagaagaaaggtggccgtgcgtcaaagcgcgctatcgactctgacaacgaagatgaggctagtgactttggcgactcaccgccgaagccgaaaacgaagcgtaaacgcgccgcgcctgcaaagaagaaaatcgccaaacgcaccaaagtagagtcggagagcgagggcgaagccgctccggtgaagaagcctgttgattccgatgacgacgaggaagaagcggacattaaagcggacacgaaggatgatgcaagtcctgatacaaaacccaagacgatgaccaaaaatgaggactctgaagaggatgtcaaagtaaagaaaagccaagttgtggcggatgactctgactcatcgttgtcatccgtgatcgacgatcctccaccgaagagaggtagagccaagggcgcgaaagcagctcccaaagccaaggccgcggtgcccaaagcagcgcccaaagagctgacaggcgacgaagccgagatcaagaaattgcagggacaccttgtcaagtgtggagtgcgcaagatttggggtatcgaactgaagaagtttggggacgatagcaaagccaaggtgcgacacctcaagaaaatgctcagtgatgtgggcatggacagccgcttctccgaggccaaggccaaggagatcaaagagagacgagaactcctaggcgagctggaagccgtcaacgagatgaactcgctatggggtagcgagggccgcggaggtcgtgcatcacgcagcactgccgttcgtaagtcactcaaggaagagtcagacgagggtgacgatgacgacaagacgaagcccgaagaggaggacgacgaagacgacggcgacagcgaggcagaagccaaaatcaagtcgcgaaagagtaaaagaatggccgacctggccttcttggggagcgagagtgaatccgactgaggttgtctccgacttcaacggtattgactagcgagatgggtaatctcgacgtcgtaaagggcctaataggacgggcaggtcctgttctctttaatatgagatatctcaataattgtacaactgtatctacatggccctggctacttatgggcattcatcctctgagctatcagactgaagacggcgacggaacccatgaacaggacagcattgtaaaactaagcaaccagagtaattagctaatagggctcgcaagagtcacgatgaatccatgaggaagaat

SEQ ID NO: 37672 - DNA, 2205 bp, Muscodor strobelii
  misc_feature: SGI cDNA ID NO. 573078
  misc_feature: Encodes the peptide sequence at SEQ ID NO 37673
atggctgtcaaccgcatccggggcgccttcgctccccctaggaagggcgagacgttcgagctgcgtgcggggctggtgtcgcagtatgcgtgggagcgcaaggagtcgatccagaagaccatcatggccatgaccctcggcaaggacgtctcccagctgttccccgacgtcctcaagaacatcgccaccggagacctcgaccagaagaagctcgtctacctatatctcatgaactacgccaaatcacatcccgatctctgcattctcgccgtcaacacgttcgtccaagactccgaagatccaaaccccctgatacgagcgctggccatccgtaccatgggctgtatcagggtcgagaagatggtcgactacatggaggagcccttgcgcaagacattgcgggacgagtcgccctacgtgcggaagacagccgctatctgcgtcgccaagctcttcgacttgaaccccagcatgtgcatcgagaacggcttcttggagacgctgcaggagctgattggagatcccaaccccatggtcgtggccaactccgtccaggccctggcagagatcaccgaaacagcgccagagacacgcgcacttgtcataacaccgcaggcgctcaagaagctattgatggccctgaacgaatgtaccgagtggggacgtgtcaccatcctctcgaccctcgccgactaccctccacaagacgtcaaggaatccgagcacatctgcgagagagtcactccccagttccagcacgtcaacccaagcgttgtgcttgctgccgtcaaggttgtcttcagccatatgaagctgatcaacccggatctcgtgcggcaatatctgaagaagatggccccgcctctagtgacgctcgtcgcatcccagcccgaagtccaatatgttgcattgcgaaacatcgatctacttctacaggccaagcctgacatcttgagcaaagagcttagggtgttcttctgcaaatacaacgatccaccctatgttaagctgcagaaactcgagattatggtcaggatagcaaacgacaagaattacgaacagctactagcagaacttagggagtacgctctggaagtggacatggatttcgtgcgccgagccgtcaaggcgatcggtcaagtcgccatcaagatcgagagtgccagtgagaaatgcgtcaacgccttgctggacctcatcgccaccaaagtcaattacgtagtccaagaggttattgtcgtgatcaaggatatcctccggaaataccccggctacgagggtgtcattccaacactgtgcaagcacatcgacgagctcgacgaaccagaggcccgcggctcgctgatatggatcgtaggagaatatgccgagaagatcaataatgctgatcagattttgtcaagcttcgtggacgagttcatggaagagttcacacagacacagctacagatcctgacggctgttgtgaaactattcttgaagaagcctagcaacaaccaagggttggtccaaaaggtgttgcaatccgcaactgtcgagaacgataatccggacattcgagatcgtgcatacgtctactggcgcctcctctctggagacttggatgtcgcaaagaacatcgttttatcacaaaagcctgcaattactaccacagtcactagcttaccaccagccttgttggaacaattgctcgctgagctatctacgcttgcttcggtttatcacaagccacctgagtccttcgtaggcaaaggccgctacggcgccgacgaaatccaaagggcagccatccaagaacaacggcagaatgctgccgagaatcccatcgccgctgccgtcgcggctgctcagaacggtgctcccgcgcagagcaacatcgagaacttgctggatatcgacttcgatggtggtgcaccggcctcactagaacagaactcggcgagcgccactcctgaacgtgtcgctagccctgctagcggctctgctccttctaacaacttgaacgacatgatgggtctgtttgatgctcctccaccagctcagaataacggcgcaaacgatttgatgaatgggttcgcggggctggatctcagcggatcaagccaaccgccaccagcctctatacagctcggccatggtagcgcggcgaataatggacagcctaagagtaataacgccaatgatgacttgctgggtcttttctag

SEQ ID NO: 37673 - protein, 734 aa, Muscodor strobelii
  misc_feature: SGI Peptide ID NO. 573078
  misc_feature (14)..(534): Pfam Id: PF01602 Pfam Desc: Adaptin N terminal region
  misc_feature (1)..(734): NCBI GI: 46123879 Blast Desc: FG06317.1 [Gibberella zeae PH-1]
  misc_feature (2)..(734): NCBI GI: 116204205 Blast Desc: CHGG_09986 [Chaetomium globosum CBS 148.51] gi|88176114|gb|EAQ83582.1| CHGG_09986 [Chaetomium globosum CBS 148.51]
  misc_feature (1)..(734): NCBI GI: 256732470 Blast Desc: [Nectria haematococca mpVI 77-13-4]
  misc_feature (2)..(734): NCBI GI: 39942480 Blast Desc: MGG_03320 [Magnaporthe grisea 70-15] gi|145015671|gb|EDK00161.1| MGG_03320 [Magnaporthe grisea 70-15]
  misc_feature (2)..(734): NCBI GI: 85091557 Blast Desc: NCU09721 [Neurospora crassa OR74A] gi|28920353|gb|EAA29724.1| NCU09721 [Neurospora crassa OR74A]
  misc_feature (2)..(734): NCBI GI: 171678647 Blast Desc: protein product [Podospora anserina] gi|170937393|emb|CAP62051.1| protein product [Podospora anserina]
  misc_feature (1)..(734): NCBI GI: 156039423 Blast Desc: SS1G_11848 [Sclerotinia sclerotiorum 1980] gi|154697585|gb|EDN97323.1| SS1G_11848 [Sclerotinia sclerotiorum 1980]
  misc_feature (1)..(734): NCBI GI: 239611459 Blast Desc: AP-1 complex subunit beta-1 [Ajellomyces dermatitidis ER-3]
  misc_feature (1)..(734): NCBI GI: 225562531 Blast Desc: AP-1 complex subunit beta-1 [Ajellomyces capsulatus G186AR]
  misc_feature (1)..(734): NCBI GI: 261205174 Blast Desc: AP-1 complex subunit beta-1 [Ajellomyces dermatitidis SLH14081] gi|239592383|gb|EEQ74964.1| AP-1 complex subunit beta-1 [Ajellomyces dermatitidis SLH14081]
MAVNRIRGAFAPPRKGETFELRAGLVSQYAWERKESIQKTIMAMTLGKDVSQLFPDVLKNIATGDLDQKKLVYLYLMNYAKSHPDLCILAVNTFVQDSEDPNPLIRALAIRTMGCIRVEKMVDYMEEPLRKTLRDESPYVRKTAAICVAKLFDLNPSMCIENGFLETLQELIGDPNPMVVANSVQALAEITETAPETRALVITPQALKKLLMALNECTEWGRVTILSTLADYPPQDVKESEHICERVTPQFQHVNPSVVLAAVKVVFSHMKLINPDLVRQYLKKMAPPLVTLVASQPEVQYVALRNIDLLLQAKPDILSKELRVFFCKYNDPPYVKLQKLEIMVRIANDKNYEQLLAELREYALEVDMDFVRRAVKAIGQVAIKIESASEKCVNALLDLIATKVNYVVQEVIVVIKDILRKYPGYEGVIPTLCKHIDELDEPEARGSLIWIVGEYAEKINNADQILSSFVDEFMEEFTQTQLQILTAVVKLFLKKPSNNQGLVQKVLQSATVENDNPDIRDRAYVYWRLLSGDLDVAKNIVLSQKPAITTTVTSLPPALLEQLLAELSTLASVYHKPPESFVGKGRYGADEIQRAAIQEQRQNAAENPIAAAVAAAQNGAPAQSNIENLLDIDFDGGAPASLEQNSASATPERVASPASGSAPSNNLNDMMGLFDAPPPAQNNGANDLMNGFAGLDLSGSSQPPPASIQLGHGSAANNGQPKSNNANDDLLGLF

SEQ ID NO: 37674 - DNA, 3265 bp, Muscodor strobelii
  misc_feature: SGI EST ID NO. CUFF.90733.0
  misc_feature: Variant of the nucleotide sequence at SEQ ID NO 37672
cacaggtaaaacaggcatccgtcaatcaactggggcatcgatggctagcttggcacaaccaaaagtcaggtacctgaactggggataagcacctgcagcaataccaactgcaaacctcctggcagaattatactgggttggcaagtaatcgacgacatcatttctcgcataacatcagcatcctgcatctcaataccaatccagaacgcgagcgagaaaggaacacgcaagtcggagagcataagagcgcatgccatcgatctagcccttgaagggctccctgatcccctcgtcccccgtccgccgcttcaccaccataaggctgcccctcgtcctcatatatatatattgccatggctgtcaaccgcatccggggcgccttcgctccccctaggaagggcgagacgttcgagctgcgtgcggggctggtgtcgcagtatgcgtgggagcgcaaggagtcgatccagaagaccatcatggccatgaccctcggcaaggacgtctcccagctgttccccgacgtcctcaagaacatcgccaccggagacctcgaccagaagaagctcgtctacctatatctcatgaactacgccaaatcacatcccgatctctgcattctcgccgtcaacacgttcgtccaagactccgaagatccaaaccccctgatacgagcgctggccatccgtaccatgggctgtatcagggtcgagaagatggtcgactacatggaggagcccttgcgcaagacattgcgggacgagtcgccctacgtgcggaagacagccgctatctgcgtcgccaagctcttcgacttgaaccccagcatgtgcatcgagaacggcttcttggagacgctgcaggagctgattggagatcccaaccccatggtcgtggccaactccgtccaggccctggcagagatcaccgaaacagcgccagagacacgcgcacttgtcataacaccgcaggcgctcaagaagctattgatggccctgaacgaatgtaccgagtggggacgtgtcaccatcctctcgaccctcgccgactaccctccacaagacgtcaaggaatccgagcacatctgcgagagagtcactccccagttccagcacgtcaacccaagcgttgtgcttgctgccgtcaaggttgtcttcagccatatgaagctgatcaacccggatctcgtgcggcaatatctgaagaagatggccccgcctctagtgacgctcgtcgcatcccagcccgaagtccaatatgttgcattgcgaaacatcgatctacttctacaggccaagcctgacatcttgagcaaagagcttagggtgttcttctgcaaatacaacgatccaccctatgttaagctgcagaaactcgagattatggtcaggatagcaaacgacaagaattacgaacagctactagcagaacttagggagtacgctctggaagtggacatggatttcgtgcgccgagccgtcaaggcgatcggtcaagtcgccatcaagatcgagagtgccagtgagaaatgcgtcaacgccttgctggacctcatcgccaccaaagtcaattacgtagtccaagaggttattgtcgtgatcaaggatatcctccggaaataccccggctacgagggtgtcattccaacactgtgcaagcacatcgacgagctcgacgaaccagaggcccgcggctcgctgatatggatcgtaggagaatatgccgagaagatcaataatgctgatcagattttgtcaagcttcgtggacgagttcatggaagagttcacacagacacagctacagatcctgacggctgttgtgaaactattcttgaagaagcctagcaacaaccaagggttggtccaaaaggtgttgcaatccgcaactgtcgagaacgataatccggacattcgagatcgtgcatacgtctactggcgcctcctctctggagacttggatgtcgcaaagaacatcgttttatcacaaaagcctgcaattactaccacagtcactagcttaccaccagccttgttggaacaattgctcgctgagctatctacgcttgcttcggtttatcacaagccacctgagtccttcgtaggcaaaggccgctacggcgccgacgaaatccaaagggcagccatccaagaacaacggcagaatgctgccgagaatcccatcgccgctgccgtcgcggctgctcagaacggtgctcccgcgcagagcaacatcgagaacttgctggatatcgacttcgatggtggtgcaccggcctcactagaacagaactcggcgagcgccactcctgaacgtgtcgctagccctgctagcggctctgctccttctaacaacttgaacgacatgatgggtctgtttgatgctcctccaccagctcagaataacggcgcaaacgatttgatgaatgggttcgcggggctggatctcagcggatcaagccaaccgccaccagcctctatacagctcggccatggtagcgcggcgaataatggacagcctaagagtaataacgccaatgatgacttgctgggtcttttctagtgaaacgagatcaactatcgcaagccggggaatgtcacgatcatgatatgtccaaggacaaaatttccagaccttggatggcaacctgatacgtcatgaaagcgattgggggcgtatgtttcctctcaccaattacaacagctgggagataggggcggggcttggagtgaattgtgatgtatgcttcgtatatggttgtgagatggtatatcgggtatcaaacgcgtcctctgcctagcttttgagtatagatagacaggcttggaatcgaagtggttgtctccggtccccccttttttcctctctccctccatgcatcctgcgtcgtaccgcgcgctgcgtcacttttacgcgccaaccgtaattcctctacggcgcgtattgtctctccatcgtgacctcatatcctaagccgccggttcatttcccatcgtttaaaactccagccgaccaagttattcaggcattaaccccatccacttttccaccgaccgtgccgtcgagcggcggtccctcggcgtctttagatcgcgtccgctcccattcttcgggggtctggcacttggcgctccaggcgtggatggcggctatttcgtccttgagggcggagtttacggcgcggtggcgcttgagcgaggtgaggccttggaagttgggtgatactattagggttgtgaaggattggccgcagccgcctggaaagaaac

SEQ ID NO: 37675 - DNA, 330 bp, Muscodor strobelii
  misc_feature: SGI cDNA ID NO. 573079
  misc_feature: Encodes the peptide sequence at SEQ ID NO 37676
atggcagacccaacaacaataacagagacctccctcaaagccgccatcacagatcgcatgaacgccgtccacgtcgaggtcacagatatgtccggcggctgcggccaatccttcacaaccctaatagtatcacccaacttccaaggcctcacctcgctcaagcgccaccgcgccgtaaactccgccctcaaggacgaaatagccgccatccacgcctggagcgccaagtgccagacccccgaagaatgggagcggacgcgatctaaagacgccgagggaccgccgctcgacggcacggtcggtggaaaagtggatggggttaatgcctga

SEQ ID NO: 37676 - protein, 109 aa, Muscodor strobelii
  misc_feature: SGI Peptide ID NO. 573079
  misc_feature (10)..(83): Pfam Id: PF01722 Pfam Desc: BolA-like protein
  misc_feature (1)..(108): NCBI GI: 261354536 Blast Desc: BolA domain-containing protein [Verticillium albo-atrum VaMs.102]
  misc_feature (6)..(108): NCBI GI: 171679517 Blast Desc: protein product [Podospora anserina] gi|170939384|emb|CAP64612.1| protein product [Podospora anserina]
  misc_feature (5)..(108): NCBI GI: 39940840 Blast Desc: MGG_11028 [Magnaporthe grisea 70-15] gi|145010368|gb|EDJ95024.1| MGG_11028 [Magnaporthe grisea 70-15]
  misc_feature (7)..(107): NCBI GI: 85094886 Blast Desc: NCU06107 [Neurospora crassa OR74A] gi|28921427|gb|EAA30733.1| conserved [Neurospora crassa OR74A]
  misc_feature (5)..(87): NCBI GI: 46123881 Blast Desc: FG06318.1 [Gibberella zeae PH-1]
  misc_feature (5)..(85): NCBI GI: 256732922 Blast Desc: [Nectria haematococca mpVI 77-13-4]
  misc_feature (1)..(109): NCBI GI: 154294381 Blast Desc: BC1G_13963 [Botryotinia fuckeliana B05.10] gi|150844802|gb|EDN19995.1| BC1G_13963 [Botryotinia fuckeliana B05.10]
  misc_feature (1)..(109): NCBI GI: 156039427 Blast Desc: SS1G_11850 [Sclerotinia sclerotiorum 1980] gi|154697587|gb|EDN97325.1| SS1G_11850 [Sclerotinia sclerotiorum 1980]
  misc_feature (1)..(84): NCBI GI: 255947426 Blast Desc: Pc22g04420 [Penicillium chrysogenum Wisconsin 54-1255] gi|211591497|emb|CAP97730.1| Pc22g04420 [Penicillium chrysogenum Wisconsin 54-1255]
  misc_feature (1)..(84): NCBI GI: 145236677 Blast Desc: An06g01650 [Aspergillus niger] gi|134075447|emb|CAK48008.1| protein product [Aspergillus niger]
MADPTTITETSLKAAITDRMNAVHVEVTDMSGGCGQSFTTLIVSPNFQGLTSLKRHRAVNSALKDEIAAIHAWSAKCQTPEEWERTRSKDAEGPPLDGTVGGKVDGVNA

SEQ ID NO: 37677 - DNA, 3740 bp, Muscodor strobelii
  misc_feature: SGI EST ID NO. CUFF.90734.1
  misc_feature: Variant of the nucleotide sequence at SEQ ID NO 37675
ccgcggggtgtgtgcttgctaagttgctcttgtgcgacatcgctattattgataccttactccatgttttctgtttcaaaaacataacatttgagacttacatctgaaagtgcaacaagttggaaagctaaatcggaaatcgcaaacaccaattacttagagcatgaaatggcagacccaacaacaataacagagacctccctcaaagccgccatcacagatcgcatgaacgccgtccacgtcgaggtcacagatatgtccggcggctgcggccaatccttcacaaccctaatagtatcacccaacttccaaggcctcacctcgctcaagcgccaccgcgccgtaaactccgccctcaaggacgaaatagccgccatccacgcctggagcgccaagtgccagacccccgaagaatgggagcggacgcgatctaaagacgccgagggaccgccgctcgacggcacggtcggtggaaaagtggatggggttaatgcctgaataacttggtcggctggagttttaaacgatgggaaatgaaccggcggcttaggatatgaggtcacgatggagagacaatacgcgccgtagaggaattacggttggcgcgtaaaagtgacgcagcgcgcggtacgacgcaggatgcatggagggagagaggaaaaaaggggggaccggagacaaccacttcgattccaagcctgtctatctatactcaaaagctaggcagaggacgcgtttgatacccgatataccatctcacaaccatatacgaagcatacatcacaattcactccaagccccgcccctatctcccagctgttgtaattggtgagaggaaacatacgcccccaatcgctttcatgacgtatcaggttgccatccaaggtctggaaattttgtccttggacatatcatgatcgtgacattccccggcttgcgatagttgatctcgtttcactagaaaagacccagcaagtcatcattggcgttattactcttaggctgtccattattcgccgcgctaccatggccgagctgtatagaggctggtggcggttggcttgatccgctgagatccagccccgcgaacccattcatcaaatcgtttgcgccgttattctgagctggtggaggagcatcaaacagacccatcatgtcgttcaagttgttagaaggagcagagccgctagcagggctagcgacacgttcaggagtggcgctcgccgagttctgttctagtgaggccggtgcaccaccatcgaagtcgatatccagcaagttctcgatgttgctctgcgcgggagcaccgttctgagcagccgcgacggcagcggcgatgggattctcggcagcattctgccgttgttcttggatggctgccctttggatttcgtcggcgccgtagcggcctttgcctacgaaggactcaggtggcttgtgataaaccgaagcaagcgtagatagctcagcgagcaattgttccaacaaggctggtggtaagctagtgactgtggtagtaattgcaggcttttgtgataaaacgatgttctagtctatgttagccttaatgcaaattgctgtagaactcgaaaatttcggtacctttgcgacatccaagtctccagagaggaggcgccagtagacgtatgcacgatctcgaatgtccggattatcgttctcgacagttgcggattgcaacaccttttggaccaacccttggttgttgctaggcttcttcaagaatagtttcacaacagccgtcaggatctgtagctgtgtctgtgtgaactcttccatgaactcgtccacgaagcttgacaaaatctgatcagcattattgatcttctcggcatattctcctacgatccatatcagcgagccgcgggcctctggttcgtcgagctcgtcgatgtgcttgcacagtgttggaatgacaccctcgtagccggggtatttccggaggatatccttgatcacgacaataacctcttggactacgtaattgactttggtggcgatgaggtccagcaaggcgttgacgcatttctcactggcactctcgatcttgatggcgacttgaccgatcgccttgacggctcggcgcacgaaatccatgtccacttccagagcgtactccctaagttctgctagtagctgttcgtaattcttgtcgtttgctatcctgaccataatctcgagtttctgcagcttaacatagggtggatcgttgtatttgcagaagaacaccctaagctctttgctcaagatgtcaggcttggcctgtagaagtagatcgatgtttcgcaatgcaacatattggacttcgggctgggatgcgacgagcgtcacttgtatcgtcagtaactgtcggtgctggtgggcacgcaagccttacctagaggcggggccatcttcttcagatattgccgcacgagatccgggttgatcagcttcatatggctgaagacaaccttgacggcagcaagcacaacgcttgggttgacgtgctggaactggggagtgactctctcgcagatgtgctcggattccttgacgtcttgtggagggtagtcggcgagggtcgagaggatggtgacacgtccccactcggtacattcgttcagggccatcaatagcttcttgagcgcctgcggtgttatgacaagtgcgcgtgtctctggcgctgtttcggtgatctctgccagggcctggacggagttggccacgaccatggggttgggatctccaatcagctcctgcagcgtctccaagaagccgttctcgatgcacatgctggggttcaagtcgaagagcttggcgacgcagatagcggctgtcttccgcacgtagggcgactcgtcccgcaatgtcttgcgcaagggctcctccatgtagtcgaccatcttctcgaccctgatacagcccatggtacggatggccagcgctcgtatcagggggtttggatcttcggagtcttggacgaacgtgttgacggcgagaatgcagagatcgggatgtgatttggcgtagttccttgtagacacatcatcagctttacgaacagatcaggggaggtgtccacccggtctaccgagcggtgaagcaggatagagaacggagggcagaggacagaggacagaagacagagacggcgcacatgagatataggtagacgagcttcttctggtcgaggtctccggtggcgatgttcttgaggacgtcggggaacagctgggagacgtccttgccgagggtcatggccatgatggtcttctggatcgactccttgcgctcccacgcatactgcgacaccagccccgcacgcagctcgaacgtctcgcccttcctagggggagcgaaggcgccccggatgcggttgacagccatggcaatatatatatatgaggacgaggggcagccttatggtggtgaagcggcggacgggggacgaggggatcagggagcccttcaagggctagatcgatggcatgcgctcttatgctctccgacttgcgtgttcctttctcgctcgcgttctggattggtattgagatgcaggatgctgatgttatgcgagaaatgatgtcgtcgattacttgccaacccagtataattctgccaggaggtttgcagttggtattgctgcaggtgcttatccccagttcaggtacctgacttttggttgtgccaagctagccatcgatgccccagttgattgacggatgcctgttttacctgtg

SEQ ID NO: 37678 - DNA, 900 bp, Muscodor strobelii
  misc_feature: SGI cDNA ID NO. 573080
  misc_feature: Encodes the peptide sequence at SEQ ID NO 37679
atgccaccagcttccttcaaagatgcagtcgtgcaagggatgagaacgctatatccagaagagctcgcagacaaggcatgggataacacagggttattactggaccaagctccatcattttccaaagagaacaacggcaagccagtcgttctcctcaccaacgatctgagcgaatcagttgtcgatgaagcactttcggtgggagctagcgtcatcgtcgcatatcatcctgtaatcttcagaccactgaagtccctcaccacaaaagatccaatgcaggcccagctcttgcgattgatagcagccggcgtagcagtatattgttcgcacacagctgttgatgcagctccgggcggcctgaatgagtggctctgcgagatcctcctcgacggggcgaaggtcaagcttgaagtcctcgagccaatccctcggccgttaccagaaagtctcaaagacaaggatgttgggtatggacgcgcatttgaattgaatgagcccatctcccttcggatcctacttcggcgcctcgctgctggcattggtggcaaacgatacgtgatggtcgctgctccaccaaatatgaagaacgtttacagggtccacgatattaagaagatcgccgtgtgcgcaggctctggcgcggatgtcctgaagaacaccgatgcacaggtcctagtgactggagaaatggcgcatcattatgccctgcggcatatccagctcggccagatcgtggtcaccgtcttccatagtaactccgagaggaaattcctgcacgatagactcaagcctagcctcgagaatgaactcaagaagactgagtttggtaacgcgcaggtcatcgtgagtactacggatcgggatccgttcgagattatcgacgtacggggactacagtag

SEQ ID NO: 37679 - protein, 299 aa, Muscodor strobelii
  misc_feature: SGI Peptide ID NO. 573080
  misc_feature (14)..(278): Pfam Id: PF01784 Pfam Desc: NIF3 (NGG1p interacting factor 3)
  misc_feature (6)..(298): NCBI GI: 164425670 Blast Desc: NCU06108 [Neurospora crassa OR74A] gi|157071017|gb|EAA30734.2| conserved [Neurospora crassa OR74A]
  misc_feature (3)..(299): NCBI GI: 256732471 Blast Desc: NECHADRAFT_39118 [Nectria haematococca mpVI 77-13-4]
  misc_feature (4)..(298): NCBI GI: 145608238 Blast Desc: MGG_03266 [Magnaporthe grisea 70-15] gi|145015733|gb|EDK00223.1| MGG_03266 [Magnaporthe grisea 70-15]
  misc_feature (4)..(299): NCBI GI: 46123883 Blast Desc: FG06319.1 [Gibberella zeae PH-1]
  misc_feature (5)..(298): NCBI GI: 171679515 Blast Desc: protein product [Podospora anserina] gi|170939383|emb|CAP64611.1| protein product [Podospora anserina]
  misc_feature (9)..(293): NCBI GI: 50546601 Blast Desc: YALI0B11704p [Yarrowia lipolytica] gi|49646636|emb|CAG83020.1| YALI0B11704p [Yarrowia lipolytica]
  misc_feature (6)..(293): NCBI GI: 242790044 Blast Desc: NGG1 interacting factor Nif3, [Talaromyces stipitatus ATCC 10500] gi|218718073|gb|EED17493.1| NGG1 interacting factor Nif3, [Talaromyces stipitatus ATCC 10500]
  misc_feature (6)..(293): NCBI GI: 212534354 Blast Desc: NGG1 interacting factor Nif3, [Penicillium marneffei ATCC 18224] gi|210069732|gb|EEA23822.1| NGG1 interacting factor Nif3, [Penicillium marneffei ATCC 18224]
  misc_feature (4)..(293): NCBI GI: 189191726 Blast Desc: NGG1p interacting factor 3 [Pyrenophora tritici-repentis Pt-1C-BFP] gi|187973808|gb|EDU41307.1| NGG1p interacting factor 3 [Pyrenophora tritici-repentis Pt-1C-BFP]
  misc_feature (9)..(291): NCBI GI: 199430923 Blast Desc: DEHA2C17116p [Debaryomyces hansenii]
MPPASFKDAVVQGMRTLYPEELADKAWDNTGLLLDQAPSFSKENNGKPVVLLTNDLSESVVDEALSVGASVIVAYHPVIFRPLKSLTTKDPMQAQLLRLIAAGVAVYCSHTAVDAAPGGLNEWLCEILLDGAKVKLEVLEPIPRPLPESLKDKDVGYGRAFELNEPISLRILLRRLAAGIGGKRYVMVAAPPNMKNVYRVHDIKKIAVCAGSGADVLKNTDAQVLVTGEMAHHYALRHIQLGQIVVTVFHSNSERKFLHDRLKPSLENELKKTEFGNAQVIVSTTDRDPFEIIDVRGLQ

SEQ ID NO: 37680 - DNA, 4371 bp, Muscodor strobelii
  misc_feature: SGI EST ID NO. CUFF.90270.0
  misc_feature: Variant of the nucleotide sequence at SEQ ID NO 37678
tttacttctaaagctgtcttgctgcgttgaaggttggaggtcttgtgtgttattggctacgagagagatgttggcaggtcgaagcttactattgcgaacacgatcaacactcttattgagatcagtacataaaactccaattgttggctctcacgctgtacctttgtcacaggcgtttcatcgctgctcgagacctaaagttgctttaatagcaaggagaaacccaacttcagcgaaacaattgacttttcgagggattgccacaatgccaccagcttccttcaaagatgcagtcgtgcaagggatgagaacgctatatccagaagagctcgcagacaaggcatgggataacacagggtgtacgatcccccatacctcatacagtagcgagatctcatactaagttactctagtattactggaccaagctccatcattttccaaagagaacaacggcaagccagtcgttctcctcaccaacgatctgagcgaatcagttgtcgatgaagcactttcggtgggagctagcgtcatcgtcgcatatcatcctgtaatcttcagaccactgaagtccctcaccacaaaagatccaatgcaggcccagctcttgcgattgatagcagccggcgtagcagtatattgttcgcacacagctgttgatgcagctccgggcggcctgaatgagtggctctgcgagatcctcctcgacggggcgaaggtcaagcttgaagtcctcgagccaatccctcggccgttaccagaaagtctcaaagacaaggatgttgggtatggacgcgcatttgaattgaatgagcccatctcccttcggatcctacttcggcgcctcgctgctggcattggtggcaaacgatacgtgatggtcgctgctccaccaaatatgaagaacgtttacagggtccacgatattaagaagatcgccgtgtgcgcaggctctggcgcggatgtcctgaagaacaccgatgcacaggtcctagtgactggagaaatggcgcatcattatgccctgcggcatatccagctcggccagatcgtggtcaccgtcttccatagtaactccgagaggaaattcctgcacgatagactcaagcctagcctcgagaatgaactcaagaagactgagtttggtaacgcgcaggtcatcgtgagtactacggatcgggatccgttcgagattatcgacgtacggggactacagtagtatagatactcgcccgctcgttgagccgcagcttgtaatagatgaaagagtcaaacccccagcatccgagattgtggttctcctgactcgtgccagttgatggatgatgcagcattgcccggaggtgcaatccaataacgcaactgcgatatgaacaatcatccatatgtctggcacatatcaagacaaagtcgactccgcaggccagattggatatatcatcgtttttcagattgcgcatgggtctcactcgttcgcattagcatcccgtcgctcacgccaggtaccctgtccaggctcgccacggactgcggcatcgccctctgccaggcagtcatcgacgtcgctgccaccaacgccctgttctttccagactagcaggagcttacgtggcagtttccaggtttctctagcgtcgtccattcgaccttcagctactaggggccgtatcttttctggtgtatccagtacctcgatggcgagctgtttagttcttaatctcctctgagcttcttcctcctgggctttccgggcgtcggtaggttctgggacaacttttcgtagagagtctcgtatttctgaagcttgagtgtaaatctttgcgattgcagggtcgagggttgaggccattgggtttaaagggtccatgttcgtacgcatctgtcttcccatcagtaaaaggttgtcatttatagtcttattttgattccttagagggtcctcgtgaatagactctgtctatcattgcttgctaaaatcaaacatgaagctgacctttcgtatcgtttcggtagcagtgatgagcttgctatagttatcgtacaccaaggccttcttctcggcgtccagtgcgcgcgtctcgcccagtacgcgtgtgtatagccgcagtaaatcttgcatgccgttctcggccaatgccttcttgacaaagacttcggcgtcgaagccgggcttgtccatctcactcggaggcacttctgagttctcatgcggtgcgtcttcgtcagtgatctcgacctgtggcggcgtggcggtcccggatgctgcgcccttacgcaagttgtagtattctcgcaaagctgcacggttccgttttggaagggcattgggagcaggcaaagacgagctcgggttcggggaagacactggggatcgtgtgctgtcgaggctgggacgagtggacgaggttggcgtggcaagcgcattggggcgccgcgggtcgcgggggctcgcgatggtggacatggtgagaccctcgagattcacagcgagaagattgagattatggtgagggcggggagagacagattatgggcttgataagtgcggcgaggcagacattgaagctattcgcaatagatgttaccagcttcgcttagggttagctgagagctgccccggagctgcgctggagcttgcagccactttaggcggtgggccttcgatttagcgttgaacctggtacctaacatctcgttgaccataatcacccccatagactgagacgtcttgcaaacaacatactaaataaaaataactattgcctcacatgatcgaggcctttgactagcgagattgaaatcatgtatgtattctcgtatatacactttacttagcagatgtccttgctcctgtagatttcataatggccggttggcgcaactcgtttcttccacaaggtttaaagatacagctacgcaccacaaaccctcagtcgcaaacagcatcgcttcactgccagaatgtccagtcgatgtgttagccatggacttgaggacacaaattcgttcaggcctgcaaagccaaggaattccagctccatctctgggctggattcagagcgcaatgccaaaccgtaatcctctgcctccactaccagctctcgtcgctaccgtcaaaacgcgtctcttagctgccgatctaaccagtagccaaatatttgactctctgccgcctacttttgcttcaaacgcaagcagtcttggtgtaaaagagtcaaagctgcttcaagatacgcctgtccaagtcctcgacattgagaacctatccaagagcagatgggaacaagtcgaagagctcgaggccatttcacgaggcgaacagacaaaaggaagagaaatcatccgtctcccgacaggcactgaagatgatgagagtatgacggatagccagtccaatcaatctggcacttatagtgcagcgaggaccggcgcgacagctgctaccaatgcctccgcggcagcctcgaagtcatcgacccatcggttgatagttcaggactgtaaagggcaaaagatgtatgcactggaattgaagaggattgacaggatcggtatcaacactctcaacattggcgaaaagatcatgttaaagaaaggcaccctgatcgcccgcggtactgtcctcctggagccaacaacatgcacaatcctgggaggaaaggttgaggcatggcagaagagttgggtcgaaggtcgtttagcaaggcttcgcgaacaaacaggagaggatcgaccatagcggtgaaagtcttcgtctccgcatggttgtgcaaattactttataaaatacagcttcaagtctcaagtttcagaaggaatagagtacgccatgaggtccattctagtgaggtcttttgtgcgtgacgtgcaaataaaaaggcattgaagaagctagagtcggcataaacataagagaggcttctttttcatttgaatgatgataaggatgtttgttctagaaacgttgtggctgaatttgtatgaaatttactcccgaaagactgcaggagaattagaaatcagtgaccgttctttgacagccaccatctaagactccgggtttgatgtgtgtctattgcaaagactggagtcctgaaacagaatcaccacagactattctagagggctttcgaagtatccaacacttcgataatcaagccgtctgtgattagtgcctttttgttcacaattctaatgtcccaagaatcccgtagctcaaaatttgcctaccaaggctgcaacgaggcagctgagatacacaaagatatttctatggaattgccttcggcacgttcttcagttcatcatcaatattatcacacataggaaaggcagaggtccagcctagtgtatcaaaagtcaccatgctcg

SEQ ID NO: 37681 - DNA, 885 bp, Muscodor strobelii
  misc_feature: SGI cDNA ID NO. 573081
  misc_feature: Encodes the peptide sequence at SEQ ID NO 37682
atgtccaccatcgcgagcccccgcgacccgcggcgccccaatgcgcttgccacgccaacctcgtccactcgtcccagcctcgacagcacacgatccccagtgtcttccccgaacccgagctcgtctttgcctgctcccaatgcccttccaaaacggaaccgtgcagctttgcgagaatactacaacttgcgtaagggcgcagcatccgggaccgccacgccgccacaggtcgagatcactgacgaagacgcaccgcatgagaactcagaagtgcctccgagtgagatggacaagcccggcttcgacgccgaagtctttgtcaagaaggcattggccgagaacggcatgcaagatttactgcggctatacacacgcgtactgggcgagacgcgcgcactggacgccgagaagaaggccttggtgtacgataactatagcaagctcatcactgctaccgaaacgatacgaaagatgcgtacgaacatggaccctttaaacccaatggcctcaaccctcgaccctgcaatcgcaaagatttacactcaagcttcagaaatacgagactctctacgaaaagttgtcccagaacctaccgacgcccggaaagcccaggaggaagaagctcagaggagattaagaactaaacagctcgccatcgaggtactggatacaccagaaaagatacggcccctagtagctgaaggtcgaatggacgacgctagagaaacctggaaactgccacgtaagctcctgctagtctggaaagaacagggcgttggtggcagcgacgtcgatgactgcctggcagagggcgatgccgcagtccgtggcgagcctggacagggtacctggcgtgagcgacgggatgctaatgcgaacgagtga

SEQ ID NO: 37682 - protein, 294 aa, Muscodor strobelii
  misc_feature: SGI Peptide ID NO. 573081
  misc_feature (96)..(182): Pfam Id: PF08700 Pfam Desc: Vps51/Vps67
  misc_feature (1)..(276): NCBI GI: 256732923 Blast Desc: NECHADRAFT_39130 [Nectria haematococca mpVI 77-13-4]
  misc_feature (1)..(276): NCBI GI: 145608236 Blast Desc: MGG_03267 [Magnaporthe grisea 70-15] gi|145015732|gb|EDK00222.1| MGG_03267 [Magnaporthe grisea 70-15]
  misc_feature (1)..(276): NCBI GI: 46123885 Blast Desc: FG06320.1 [Gibberella zeae PH-1]
  misc_feature (1)..(203): NCBI GI: 154294377 Blast Desc: BC1G_13961 [Botryotinia fuckeliana B05.10] gi|150844800|gb|EDN19993.1| BC1G_13961 [Botryotinia fuckeliana B05.10]
  misc_feature (1)..(187): NCBI GI: 156039431 Blast Desc: SS1G_11852 [Sclerotinia sclerotiorum 1980] gi|154697589|gb|EDN97327.1| SS1G_11852 [Sclerotinia sclerotiorum 1980]
  misc_feature (1)..(280): NCBI GI: 85092789 Blast Desc: NCU06084 [Neurospora crassa OR74A] gi|28920986|gb|EAA30310.1| [Neurospora crassa OR74A]
  misc_feature (96)..(278): NCBI GI: 171679511 Blast Desc: protein product [Podospora anserina] gi|170939381|emb|CAP64609.1| protein product [Podospora anserina]
  misc_feature (1)..(261): NCBI GI: 121705276 Blast Desc: conserved [Aspergillus clavatus NRRL 1] gi|119399047|gb|EAW09475.1| conserved [Aspergillus clavatus NRRL 1]
  misc_feature (1)..(261): NCBI GI: 169767684 Blast Desc: [Aspergillus oryzae RIB40] gi|238484597|ref|XP_002373537.1| conserved [Aspergillus flavus NRRL3357] gi|83766168|dbj|BAE56311.1| protein product oryzae]
  misc_feature (1)..(256): NCBI GI: 169622567 Blast Desc: SNOG_14508 [Phaeosphaeria nodorum SN15] gi|160704799|gb|EAT78048.2| SNOG_14508 [Phaeosphaeria nodorum SN15]
MSTIASPRDPRRPNALATPTSSTRPSLDSTRSPVSSPNPSSSLPAPNALPKRNRAALREYYNLRKGAASGTATPPQVEITDEDAPHENSEVPPSEMDKPGFDAEVFVKKALAENGMQDLLRLYTRVLGETRALDAEKKALVYDNYSKLITATETIRKMRTNMDPLNPMASTLDPAIAKIYTQASEIRDSLRKVVPEPTDARKAQEEEAQRRLRTKQLAIEVLDTPEKIRPLVAEGRMDDARETWKLPRKLLLVWKEQGVGGSDVDDCLAEGDAAVRGEPGQGTWRERRDANANE

SEQ ID NO: 37683 - DNA, 3886 bp, Muscodor strobelii
  misc_feature: SGI EST ID NO. CUFF.90271.1
  misc_feature: Variant of the nucleotide sequence at SEQ ID NO 37681
gcataatctcatcacctttttatttgcacgtcacgcacaaaagacctcactagaatggacctcatggcgtactctattccttctgaaacttgagacttgaagctgtattttataaagtaatttgcacaaccatgcggagacgaagactttcaccgctatggtcgatcctctcctgtttgttcgcgaagccttgctaaacgaccttcgacccaactcttctgccatgcctcaacctttcctcccaggattgtgcatgttgttggctccaggaggacagtaccgcgggcgatcagggtgcctttctttaacatgatcttttcgccaatgttgagagtgttgataccgatcctgtcaatcctcttcaattccagtgcatacatcttttgccctttacagtcctgaactatcaaccgatgggtcgatgacttcgaggctgccgcggaggcattggtagcagctgtcgcgccggtcctcgctgcactataagtgccagattgattggactggctatccgtcatactctcatcatcttcagtgcctgtcgggagacggatgatttctcttccttttgtctgttcgcctcgtgaaatggcctcgagctcttcgacttgttcccatctgctcttggataggttctcaatgtcgaggacttggacaggcgtatcttgaagcagctttgactcttttacaccaagactgcttgcgtttgaagcaaaagtaggcggcagagagtcaaatatttggctactggttagatcggcagctaagagacgcgttttgacggtagcgacgagagctggtagtggaggcagaggattacggtttggcattgcgctctgaatccagcccagagatggagctggaattccttggctttgcaggcctgaacgaatttgtgtcctcaagtccatggctaacacatcgactggacattctggcagtgaagcgatgctgtttgcgactgagggtttgtggtgcgtagctgtatctttaaaccttgtggaagaaacgagttgcgccaaccggccattatgaaatctacaggagcaaggacatctgctaagtaaagtgtatatacgagaatacatacatgatttcaatctcgctagtcaaaggcctcgatcatgtgaggcaatagttatttttatttagtatgttgtttgcaagacgtctcagtctatgggggtgattatggtcaacgagatgttaggtaccaggttcaacgctaaatcgaaggcccaccgcctaaagtggctgcaagctccagcgcagctccggggcagctctcagctaaccctaagcgaagctggtaacatctattgcgaatagcttcaatgtctgcctcgccgcacttatcaagcccataatctgtctctccccgccctcaccataatctcaatcttctcgctgtgaatctcgagggtctcaccatgtccaccatcgcgagcccccgcgacccgcggcgccccaatgcgcttgccacgccaacctcgtccactcgtcccagcctcgacagcacacgatccccagtgtcttccccgaacccgagctcgtctttgcctgctcccaatgcccttccaaaacggaaccgtgcagctttgcgagaatactacaacttgcgtaagggcgcagcatccgggaccgccacgccgccacaggtcgagatcactgacgaagacgcaccgcatgagaactcagaagtgcctccgagtgagatggacaagcccggcttcgacgccgaagtctttgtcaagaaggcattggccgagaacggcatgcaagatttactgcggctatacacacgcgtactgggcgagacgcgcgcactggacgccgagaagaaggccttggtgtacgataactatagcaagctcatcactgctaccgaaacgatacgaaagatgcgtacgaacatggaccctttaaacccaatggcctcaaccctcgaccctgcaatcgcaaagatttacactcaagcttcagaaatacgagactctctacgaaaagttgtcccagaacctaccgacgcccggaaagcccaggaggaagaagctcagaggagattaagaactaaacagctcgccatcgaggtactggatacaccagaaaagatacggcccctagtagctgaaggtcgaatggacgacgctagagaaacctggaaactgccacgtaagctcctgctagtctggaaagaacagggcgttggtggcagcgacgtcgatgactgcctggcagagggcgatgccgcagtccgtggcgagcctggacagggtacctggcgtgagcgacgggatgctaatgcgaacgagtgagacccatgcgcaatctgaaaaacgatgatatatccaatctggcctgcggagtcgactttgtcttgatatgtgccagacatatggatgattgttcatatcgcagttgcgttattggattgcacctccgggcaatgctgcatcatccatcaactggcacgagtcaggagaaccacaatctcggatgctgggggtttgactctttcatctattacaagctgcggctcaacgagcgggcgagtatctatactactgtagtccccgtacgtcgataatctcgaacggatcccgatccgtagtactcacgatgacctgcgcgttaccaaactcagtcttcttgagttcattctcgaggctaggcttgagtctatcgtgcaggaatttcctctcggagttactatggaagacggtgaccacgatctggccgagctggatatgccgcagggcataatgatgcgccatttctccagtcactaggacctgtgcatcggtgttcttcaggacatccgcgccagagcctgcgcacacggcgatcttcttaatatcgtggaccctgtaaacgttcttcatatttggtggagcagcgaccatcacgtatcgtttgccaccaatgccagcagcgaggcgccgaagtaggatccgaagggagatgggctcattcaattcaaatgcgcgtccatacccaacatccttgtctttgagactttctggtaacggccgagggattggctcgaggacttcaagcttgaccttcgccccgtcgaggaggatctcgcagagccactcattcaggccgcccggagctgcatcaacagctgtgtgcgaacaatatactgctacgccggctgctatcaatcgcaagagctgggcctgcattggatcttttgtggtgagggacttcagtggtctgaagattacaggatctacatagtcgtcagtcacaatcggtattgcacttgtcaaggagggtgaaagtacgatatgcgacgatgacgctagctcccaccgaaagtgcttcatcgacaactgattcgctcagatcgttggtgaggagaacgactggcttgccgttgttctctttggaaaatgatggagcttggtccagtaatactagagtaacttagtatgagatctcgctactgtatgaggtatgggggatcgtacaccctgtgttatcccatgccttgtctgcgagctcttctggatatctgccgaagtcaatagatggccaataatacaaagatctcacaacggcttacagcgttctcatcccttgcacgactgcatctttgaaggaagctggtggcattgtggcaatccctcgaaaagtcaattgtttcgctgaagttgggtttctccttgctattaaagcaactttaggtctcgagcagcgatgaaacgcctgtgacaaaggtacagcgtgagagccaacaattggagttttatgtactgatctcaataagagtgttgatcgtgttcgcaatagtaagcttcgacctgccaacatctctctcgtagccaataacacacaagacctccaaccttcaacgcagcaagacagctttagaagtaaa

SEQ ID NO: 37684 - DNA, 756 bp, Muscodor strobelii
  misc_feature: SGI cDNA ID NO. 573082
  misc_feature: Encodes the peptide sequence at SEQ ID NO 37685
atggacttgaggacacaaattcgttcaggcctgcaaagccaaggaattccagctccatctctgggctggattcagagcgcaatgccaaaccgtaatcctctgcctccactaccagctctcgtcgctaccgtcaaaacgcgtctcttagctgccgatctaaccagtagccaaatatttgactctctgccgcctacttttgcttcaaacgcaagcagtcttggtgtaaaagagtcaaagctgcttcaagatacgcctgtccaagtcctcgacattgagaacctatccaagagcagatgggaacaagtcgaagagctcgaggccatttcacgaggcgaacagacaaaaggaagagaaatcatccgtctcccgacaggcactgaagatgatgagagtatgacggatagccagtccaatcaatctggcacttatagtgcagcgaggaccggcgcgacagctgctaccaatgcctccgcggcagcctcgaagtcatcgacccatcggttgatagttcaggactgtaaagggcaaaagatgtatgcactggaattgaagaggattgacaggatcggtatcaacactctcaacattggcgaaaagatcatgttaaagaaaggcaccctgatcgcccgcggtactgtcctcctggagccaacaacatgcacaatcctgggaggaaaggttgaggcatggcagaagagttgggtcgaaggtcgtttagcaaggcttcgcgaacaaacaggagaggatcgaccatag

SEQ ID NO: 37685 - protein, 251 aa, Muscodor strobelii
  misc_feature: SGI Peptide ID NO. 573082
  misc_feature (9)..(103): Pfam Id: PF08585 Pfam Desc: Domain of function (DUF1767)
  misc_feature (23)..(103): Pfam Id: PF08585 Pfam Desc: Domain of function (DUF1767)
  misc_feature (1)..(245): NCBI GI: 46123887 Blast Desc: FG06321.1 [Gibberella zeae PH-1]
  misc_feature (1)..(249): NCBI GI: 261355111 Blast Desc: conserved [Verticillium albo-atrum VaMs.102]
  misc_feature (1)..(245): NCBI GI: 256732472 Blast Desc: NECHADRAFT_38279 [Nectria haematococca mpVI 77-13-4]
  misc_feature (5)..(247): NCBI GI: 39942376 Blast Desc: MGG_03268 [Magnaporthe grisea 70-15] gi|145015731|gb|EDK00221.1| MGG_03268 [Magnaporthe grisea 70-15]
  misc_feature (1)..(248): NCBI GI: 171679513 Blast Desc: protein product [Podospora anserina] gi|170939382|emb|CAP64610.1| protein product [Podospora anserina]
  misc_feature (3)..(243): NCBI GI: 85090800 Blast Desc: NCU09439 [Neurospora crassa OR74A] gi|28919965|gb|EAA29355.1| [Neurospora crassa OR74A]
  misc_feature (11)..(248): NCBI GI: 225562508 Blast Desc: conserved [Ajellomyces capsulatus G186AR]
  misc_feature (36)..(248): NCBI GI: 261205130 Blast Desc: conserved [Ajellomyces dermatitidis SLH14081] gi|239592361|gb|EEQ74942.1| conserved [Ajellomyces dermatitidis SLH14081] gi|239611481|gb|EEQ88468.1| conserved [Ajellomyces
  misc_feature (36)..(245): NCBI GI: 225683630 Blast Desc: conserved [Paracoccidioides brasiliensis Pb03]
  misc_feature (36)..(245): NCBI GI: 226292975 Blast Desc: conserved [Paracoccidioides brasiliensis Pb18]
MDLRTQIRSGLQSQGIPAPSLGWIQSAMPNRNPLPPLPALVATVKTRLLAADLTSSQIFDSLPPTFASNASSLGVKESKLLQDTPVQVLDIENLSKSRWEQVEELEAISRGEQTKGREIIRLPTGTEDDESMTDSQSNQSGTYSAARTGATAATNASAAASKSSTHRLIVQDCKGQKMYALELKRIDRIGINTLNIGEKIMLKKGTLIARGTVLLEPTTCTILGGKVEAWQKSWVEGRLARLREQTGEDRP

SEQ ID NO: 37686 - DNA, 4371 bp, Muscodor strobelii; identical to SEQ ID NO: 37680
  misc_feature: SGI EST ID NO. CUFF.90270.0
  misc_feature: Variant of the nucleotide sequence at SEQ ID NO 37684

SEQ ID NO: 37687 - DNA, 447 bp, Muscodor strobelii
  misc_feature: SGI cDNA ID NO. 573083
  misc_feature: Encodes the peptide sequence at SEQ ID NO 37688
atggaaattgagctacaacccggctcattcgacttgcctgctgtcgggcttccacaagtttacgccaacgaacgtgtcgcttgcaagaaggagaccacaaagaagatgagaaactccatacgatatatccctgccaacctcgacgggagagcttaccctgtgagaatgccgcccaaaggtcttaaggctgctgatgtccggatccaggacgagcgatatgagtcaaagaagcgaggtgtgcgcaactcaccgcgagaggaaccgaagggagcttgcggaatggcactagtgtggcatctccatgagccgactgtaggtgaggctatacaagcggcccgagaccctgtatttcttgcactttgccaattcgcttctcagcttgattggcacctcgaccaggtcttcaaatttcgacaatcttattctgcaacaaatgatgtccaataa

SEQ ID NO: 37688 - protein, 148 aa, Muscodor strobelii
  misc_feature: SGI Peptide ID NO. 573083
MEIELQPGSFDLPAVGLPQVYANERVACKKETTKKMRNSIRYIPANLDGRAYPVRMPPKGLKAADVRIQDERYESKKRGVRNSPREEPKGACGMALVWHLHEPTVGEAIQAARDPVFLALCQFASQLDWHLDQVFKFRQSYSATNDVQ

SEQ ID NO: 37689 - DNA, 5453 bp, Muscodor strobelii
  misc_feature: SGI EST ID NO. CUFF.90488.0
  misc_feature: Variant of the nucleotide sequence at SEQ ID NO 37687
ctcgggttaactaattcgtatttcagatatcgtgaccgcctagaatctgaagaagaacgactcgagtgtattgtttgcgccgaacacaagccacgcagagattatcctacttctccgatttcaccaacttgcgatcacgaagttcagtgttgccgcgaatgtatcgccacacacctcacatcccggttggattctggtggactgcaggcactcagttgccctcaatgccaagcaggcttgccttacacatcaatgaaggaatatgcttcggcgaacacatttgcccgatatgacgggttacttatgcgcgatggtctcagtacagagcccaatttctgttggtgcacagcgggatgcggttctgggcagctgcatcgagaaggtcatgcaaatccactcatgatatgtaacaactgcagcaggatgacatgctttactcatcaaaggccgtggcatcatggtcttacttgtcgtgaatttgacggtgacgatgacattgaggataatgtaaatgtcaacgcgataggatccatgcaacaggcactggatagtcttttgggaacaaacagacagcccatcacaatcgggggcattactcgtttggaaaccaatcaggagcttggcgatcgtctacttgccgagcaattaacaagagaagaagaggacctgcaacgccagcgagaacaggatgctgagcatcaaagactaaacagggaggacatcgagagacggagacaactaagagaaaacgagcgcagactgcaggaacttagagctcgagcagaagcccacaggcagcaacagcaaagagaagatgcgaaaagaagaagagacgaagcagcatctgagcaagctctctccagaatttctaaagtttgtcccaataagcgttgcggtgctcgaatccagaaaaggtcgggttgcgaccacatgacttgtgagtacttctcgtttttcttccccttcgtttctttttgaacttgcttctagttattcttcggacgaaaagaagcaactcatttccgcccctagcgattgtgaatgagactgaatattctgtgaggtcgccaatgccactatgagttctgctggcagtgttttgcggactggaatactattttacagtatggcaatgaataccaccgaccggactgcccgtactactcgtaaaggccatcagtgcgcgcagattgcaaatctcgaaaggacgttatttgactggatattgagcctcgagatcttcagggtcttccgctgggcagggggatggagggccgtgttatcctgggtagagttggtagtccggacggcgtttagagatgtgacttgataaaagcaagcgacgactttggttgattggcaatggtaattattcgcaaaggtcataagatctccctgtcactcagtctatatccaatggtatttgaggacagcatcttgacgtttagatcacagatagtaatatccaatgatgttaggtggtctgtgttcgacccctgacgctcagccctatgtgagggttcagtggagttcagagaacgaagccaaaactctaagcctccctcagcagatcattcattggctcgaaagttttcgtttcttcttgccaccctcgcgacttgccatgaaggcataaaacgctgcctggagtaagaatcaagagatccccaacacaagaatctcagtgcggctcatttagttcatacgctcgcgtccttaattttgtttcgagtccttcagctacgccacgttcatgcgtaccatacggagtagtatcattgcacatggctcggacagcgacgagaaagatatttgactcatgcgctccctccactgtatatttatggacattccagacattctgatcatctcaaaacatcaatcgcgcgcctctcgaaagctatcggcgataaatcggtgtccaatgtcttcggtccctgtactcgatccgtcaatgaccccagcaaccgagaaatccggtgcccctaataatgatcaggatttcaatactcggatcatggctgcgatcaccggtgtggtgtgaccacacctcttttaatccacaaacatccggccctctgacgccttatttcattgtcaaaccgcatcctgattatttctggagctggttgaccgtgcaaacacgagtctcccctctaacggcataaagaatcgaacatgagcaatatggtcaaaatgtcaactctcttccggttcctatctggcgttaatggtttacgaccactgtccaaaagggaacattggagtaaagctttacagtgacggtatcatgggcatgcatcgaattgaccaacgtcgtttcgcatgacagctatctttaaccaagacaataatcggccagcgtagagagtgttctcgatctctagtagagatggaaattgagctacaacccggctcattcgacttgcctgctgtcgggcttccacaagtttacgccaacgaacgtgtcgcttgcaagaaggttcgtgacttcatgggtcatgagttgtcacgcgttgccttttacactacagaccaaaggtgtgtgctattgtgcatcagccaatatcttcatccgctgtgtcatcctatggttatgtcgtacttaggagaccacaaagaagatgagaaactccatacgatatatccctgccaacctcgacgggagagcttaccctgtggtaaatcgacgacggctgaaggacttactagtcccaattgctcatccactaaggaaccacactgacaacgaagtagagaatgccgcccaaaggtcttaaggctgctgatgtccggatccaggacgagcgatatgagtcaaagaagcgaggtgtgcgcaactcaccgcgagaggaaccgaagggagcttgcggaatggcactagtgtggcatctccatgagccgactgtaggtgaggctatacaagcggcccgagaccctgtatttcttgcactttgccaattcgcttctcagcttgattggcacctcgaccaggtcttcaaatttcgacaatcttattctgcaacaaatgatgtccaataatgcaatctcgagatcggcttcgcagcaagtgtaatgattgagcaaccagttcctaatggattcatttgaatgagatccacatgattacccaatttccacaagtgtagggagtcctgcacgaaatctgcaacgcagtaatgtgccatccgacatttgaaccacccagaagcgaaggatcagtcatcggcaaacccaacctgcggccctgaaacaatctcgaagtcaggtggaaggcgccacctggtcgctgccattctagaaatttgccttgttcggcgcaatcgaacaaaatacctacatgtagatctcggcttttggttagctagtgcctcgtatgcgctcttcaggtcgtttcaagtcgcattacatgtcgacgaatcgcgtcgcgaagcagccgcccacactcattcccatcgtacttcaacaatggagtttcccgccttttgtagaatacgaggagcaggcaatcgacagcgtttgaagagacaacacgagttgcacggcatcagcataccagggcgttgagctcttcaaattttcaacgatagcaatatcgtcatatatccatgatccccataccttgcaatcttctccaacatttgctggcaagttcgcgaaccgcggccggcgccctattcgccaaggcagaccattactgggtgattgagtccacaatgaaaactgttcctccaacagtcgggtttgtgcagccctttcgacgtaggacttctttcttaccagttatctcgctaccgtagccagggccgccggcaacggggcgagcatgtacagacgcgtacattacgcattcaagactcaagaaagtatttcctggcgctactcaagtgatattaggcgatagctacctaatcattgtttcaacgattacgtcttacattgcccaggggacattgcaagatttatgcttgaatcccaatcccacctaagaacccgtctgttgggacaacatgtatgtctccgatccgacgacgtacctgatgtaggtaccaggattccgcttctgatccaaacccttcctatgcatacctctagcagataccacatgcaaacccctgaaacaataacacatgacagcttcactacaagcccacagaaaggtagtatacatggggtccctagtcccttgccgtaccttgacctgttgccttgctcatccgaagtaccgaaacttcaagtgtactccgaataggaatcacgggtcttccaaaaaggcagatagaaagttgctgggtacgaagttgaccaacttagtacacgggccagttaatggcctgctctttagttgccttatattttcttgaagtagattacgtgcgatgactatgatagcttcagatacaaaaagtatctttgcccccgtcgtccgacgctcaagatactgtttaggttgagacaaattcagaagccattctcaagaagtctatttttctagattcgctgtcatccgagattgttttccagcgtcgtaccaagcagctggaagataccttcagtcactcgtttacattctcaatactactgtcgctttcagttgcttacgccgctcacctgcgtgtcttctgctagccgcctcactttcgctgcacgttgtcctcgtcacctgtagtcaagatgagtactagccacacatcttctcttgacgtcaactatggcgggaaatctcactcatccagaatttattcccccgatcaagcattgtcacgaacagaccgagtttcgagcgccacaacccagtccaacacagaatttccccgtcgtatgtacactggcacccagtacgatcacgtcaaaaacgtcaagaggcagatcgatgcatttgacgcccggttccccaattcgggcggcagcaaccagaacaagagttaattgcatgcgcataggcagtccgcgactgcaatgcactacacgttggttaaacaagagggcatcgagaagaatgtggggcatagaaaaaaataacattaatagcatgtttccatgagccaaagctactggagcataatcacggtctcattatgaattcacgcgaaatctggctggaagggagacatgcgcattgactgcccgccccttacgatcactcttcaccttacgaagagtattattccgagggcctggcgctggacgtacggcatctttgacacataataacagcgccgcaagatcggattcctattacaacaaaatgtacaatagcataggggtattgcatcaaatttaatatctaagcgcactggagagcgcgatcactcttgccgtgtttttcgtcgtgctaagccctacgtgtgataccttgcaccacgcaatgtctcgcctcgtcgcacccacaacccgctgcctattgccgtggatgcacagacatcccgcgttccgtagcggcgggaatcctg

SEQ ID NO: 37690 - DNA, 255 bp, Muscodor strobelii
  misc_feature: SGI cDNA ID NO. 573084
  misc_feature: Reduced expression when VOC is produced
  misc_feature: Encodes the peptide sequence at SEQ ID NO 37691
atgagtactagccacacatcttctcttgacgtcaactatggcgggaaatctcactcatccagaatttattcccccgatcaagcattgtcacgaacagaccgagtttcgagcgccacaacccagtccaacacagaatttccccgtcgtatgtacactggcacccagtacgatcacgtcaaaaacgtcaagaggcagatcgatgcatttgacgcccggttccccaattcgggcggcagcaaccagaacaagagttaa

SEQ ID NO: 37691 - protein, 84 aa, Muscodor strobelii
  misc_feature: SGI Peptide ID NO. 573084
  misc_feature: Useful for introducing or modulating the production of volatile compounds
MSTSHTSSLDVNYGGKSHSSRIYSPDQALSRTDRVSSATTQSNTEFPRRMYTGTQYDHVKNVKRQIDAFDARFPNSGGSNQNKS

SEQ ID NO: 37692 - DNA, 5453 bp, Muscodor strobelii; identical to SEQ ID NO: 37689
  misc_feature: SGI EST ID NO. CUFF.90488.0
  misc_feature: Variant of the nucleotide sequence at SEQ ID NO 37690

SEQ ID NO: 37693 - DNA, 288 bp, Muscodor strobelii
  misc_feature: SGI cDNA ID NO. 573085
  misc_feature: Encodes the peptide sequence at SEQ ID NO 37694
atgtcgactccggacacaaaccttggtcccctaacgacaacttttgtgcccatggggcccgactgctcgtctacattcatcggccacgagacaggtgtcgcatggctccagtacggcgtcggcgccgcttcgtcaacagcctgctatccacccaatttcttcccgctcaactcctggttctactctcctggtatctgtccctctggttacaccacggcctgtgcggacgagatcatcgggtccaccacaattgccacctgctgtcccgaaaccttcatccagtactag

SEQ ID NO: 37694 - protein, 95 aa, Muscodor strobelii
  misc_feature: SGI Peptide ID NO. 573085
  misc_feature (8)..(89): NCBI GI: 154312023 Blast Desc: BC1G_06045 [Botryotinia fuckeliana B05.10] gi|150850695|gb|EDN25888.1| BC1G_06045 [Botryotinia fuckeliana B05.10]
  misc_feature (2)..(89): NCBI GI: 156060363 Blast Desc: [Sclerotinia sclerotiorum 1980] gi|154699728|gb|EDN99466.1| [Sclerotinia sclerotiorum 1980]
  misc_feature (8)..(89): NCBI GI: 242805878 Blast Desc: conserved [Talaromyces stipitatus ATCC 10500] gi|218715249|gb|EED14671.1| conserved [Talaromyces stipitatus ATCC 10500]
  misc_feature (11)..(92): NCBI GI: 212543619 Blast Desc: conserved [Penicillium marneffei ATCC 18224] gi|210066871|gb|EEA20964.1| conserved [Penicillium marneffei ATCC 18224]
  misc_feature (6)..(92): NCBI GI: 116194962 Blast Desc: CHGG_04079 [Chaetomium globosum CBS 148.51] gi|88179992|gb|EAQ87460.1| CHGG_04079 [Chaetomium globosum CBS 148.51]
  misc_feature (10)..(94): NCBI GI: 145241642 Blast Desc: An09g01500 [Aspergillus niger] gi|134078006|emb|CAK49071.1| protein product [Aspergillus niger]
MSTPDTNLGPLTTTFVPMGPDCSSTFIGHETGVAWLQYGVGAASSTACYPPNFFPLNSWFYSPGICPSGYTTACADEIIGSTTIATCCPETFIQY

SEQ ID NO: 37695 - DNA, 1725 bp, Muscodor strobelii
  misc_feature: SGI EST ID NO. CUFF.90259.0
  misc_feature: Variant of the nucleotide sequence at SEQ ID NO 37693
ggggctgcagctatgctatctcttctgcctcagaagttgggggtggcgcatttgattggctaaagcgactcaggagaccgacatcctccaacgccgattacacaaaagacctacatctgttggagactgtgatgacttggctgcataagatacctacgcgctgttacattgtgttgtttgtttaaagacgatggttgcattcggcctccaaaccaggcttgatctagttggctaaccgcaaccttagagcctcactttgacagtaaagctgaattaaggaccaaaacgtcacacagagcctattagcctccatttccataaaagtatccgtgggcgtactcctgaactccgacaagttttgtctgactcttttttccctttcttgtttgttttcgtgagactagtcaaatgttgaactctaatgatgatttggggcgcatatcacgtcgatattttgctctacccacgatttgcctcacacgtccgcctcttataacaggatgtcgactccggacacaaaccttggtcccctaacgacaacttttgtgcccatggggcccgactgctcgtctacattcatcggccacgagacaggtgtcgcatggctccagtacggcgtcggcgccgcttcgtcaacagcctgctatccacccaatttcttcccgctcaactcctggttctactctcctggtatctgtccctctggttacaccacggcctgtgcggacgagatcatcgggtccaccacaattgccacctgctgtcccgagtcctacgaatgcgcctctaaccgccagagctccgacgctttcgcttgcatgttttcatttagtgggacgaagactttcgaggttaacagctacagattcgaactgaactcagaaggagtaacgacacggcgcagtttcggaaccacgacagagctgtggggtgcttcaggcgataattttatctacgcccacgggcccgtggttcattacgggccgactgactttctcattacgtcgacatcctcctcggcttcttcgtcattgagtacgagcagtagcattatacctacgacctcttcgtcgtcaagcataagtagtgatagtataaccacgacatcttcgatattgaaacccaaccaagatcacccatcgtcaacattgagcggaggtgtggtcgcggccattgtggtgggctcggtgattggtggtgcattgatagcaacgctcttgatcttctattttgtgcgtcatcggaagaaacgacaacgtctggtaaaggctcaaccaacagaagtagtcgaacaggaaccagaacagctcaagtaccaacaacgccacccattcgaattggccttgcaccccatacgaccagcagagttgagtgcgtacagacagccagcagagttaagcgcgataagatgagatcatgcgcgacgcagaacgatgacggagaattgacatttcatcatattattagcggcgatgggtagaaccgcagcacagccacgatggctatgtattctaaacacattacctaattattgttgaagaactcgagctttggatagacgatagatggtttgataacaccatgctactcgtttgggcctaagctctgcataaagctatgcctgaatgtatgtacaagggaaatcaacagccaggacacttttacgtcgcaatgaacttattaggaatctattattgaggggattattacaatacacaaaagcgc

SEQ ID NO: 37696 - DNA, 462 bp, Muscodor strobelii
  misc_feature: SGI cDNA ID NO. 573086
  misc_feature: Reduced expression when VOC is produced
  misc_feature: Encodes the peptide sequence at SEQ ID NO 37697
atggctgacgctgaatacgaccccgttgccgccgcggagctgaagaagcgacgtgccttccgaaagttctcctaccgtggcgttgagttggacaacctcctcgagctcggctccgatgacctccgtacgctcctccacgcccgcgcccgtcgccgaatctctcgcggtctgagacgcaagcccatgggtctcgtccgcaagctgcgcaccgccaagcagaacgccgcccccaacgagaagcccgctgaggtcaagacccacctccgcaacatgatcgtcgttcccgagatgatcggttccattgtcggcatctacaacggcaaggtcttcaactctgtcgagatcagacctgagatggtcggacactacctcgccgaattctccatctcttactcccctgtcaagcacggtcgtcccggtatcggtgcgactaactcttctcgtttcatccccctgaagtaa

SEQ ID NO: 37697 - protein, 153 aa, Muscodor strobelii
  misc_feature: SGI Peptide ID NO. 573086
  misc_feature (55)..(136): Pfam Id: PF00203 Pfam Desc: Ribosomal protein S19
  misc_feature (1)..(153): NCBI GI: 145614766 Blast Desc: MGG_10370 [Magnaporthe grisea 70-15] gi|145021656|gb|EDK05785.1| MGG_10370 [Magnaporthe grisea 70-15]
  misc_feature (1)..(153): NCBI GI: 154308974 Blast Desc: 40S ribosomal protein S15 [Botryotinia fuckeliana B05.10] gi|150852641|gb|EDN27833.1| 40S ribosomal protein S15 [Botryotinia fuckeliana B05.10]
  misc_feature (1)..(153): NCBI GI: 156063164 Blast Desc: 40S ribosomal protein S15 [Sclerotinia sclerotiorum 1980] gi|154697034|gb|EDN96772.1| 40S ribosomal protein S15 [Sclerotinia sclerotiorum 1980]
  misc_feature (1)..(153): NCBI GI: 119195697 Blast Desc: 40S ribosomal protein S15 [Coccidioides immitis RS] gi|240110469|gb|EER28627.1| 40S ribosomal protein S15, [Coccidioides posadasii C735 delta SOWgp]
  misc_feature (1)..(153): NCBI GI: 255950318 Blast Desc: Pc22g20260 [Penicillium chrysogenum Wisconsin 54-1255] gi|211592943|emb|CAP99314.1| Pc22g20260 [Penicillium chrysogenum Wisconsin 54-1255]
  misc_feature (1)..(153): NCBI GI: 85117036 Blast Desc: 40S ribosomal protein S15 [Neurospora crassa OR74A] gi|28926968|gb|EAA35928.1| 40S ribosomal protein S15 [Neurospora crassa OR74A] gi|38567043|emb|CAE76341.1| ribosomal protein S12,
  misc_feature (1)..(153): NCBI GI: 46105805 Blast Desc: RS15_PODAN 40S RIBOSOMAL PROTEIN S15 (S12) [Gibberella zeae PH-1]
  misc_feature (1)..(153): NCBI GI: 242798937 Blast Desc: 40S ribosomal protein S15, [Talaromyces stipitatus ATCC 10500] gi|218716616|gb|EED16037.1| 40S ribosomal protein S15, [Talaromyces stipitatus ATCC 10500]
  misc_feature (1)..(153): NCBI GI: 258575595 Blast Desc: 40S ribosomal protein S15 [Uncinocarpus reesii 1704] gi|237902245|gb|EEP76646.1| 40S ribosomal protein S15 [Uncinocarpus reesii 1704]
  misc_feature (1)..(153): NCBI GI: 238845221 Blast Desc: 40S ribosomal protein S15 [Microsporum canis CBS 113480]
  misc_feature: Useful for introducing or modulating the production of volatile compounds
MADAEYDPVAAAELKKRRAFRKFSYRGVELDNLLELGSDDLRTLLHARARRRISRGLRRKPMGLVRKLRTAKQNAAPNEKPAEVKTHLRNMIVVPEMIGSIVGIYNGKVFNSVEIRPEMVGHYLAEFSISYSPVKHGRPGIGATNSSRFIPLK

SEQ ID NO: 37698 - DNA, 726 bp, Muscodor strobelii
  misc_feature: SGI EST ID NO. CUFF.90338.0
  misc_feature: Variant of the nucleotide sequence at SEQ ID NO 37696
ccccccactagtctcggacgtagcagtccaacccggccttcgtcgcctcgatccaattcagcttcacatcccaacgcaatcaacgccaacacaatcaagatggctgacgctgaatacgaccccgttgccgccgcggagctgaagaagcgacgtgccttccgaaagttctcctaccgtggcgttgagttggacaacctcctcgagctcggctccgatgacctccgtacgctcctccacgcccgcgcccgtcgccgaatctctcgcggtctgagacgcaagcccatgggtctcgtccgcaagctgcgcaccgccaagcagaacgccgcccccaacgagaagcccgctgaggtcaagacccacctccgcaacatgatcgtcgttcccgagatgatcggttccattgtcggcatctacaacggcaaggtcttcaactctgtcgagatcagacctgagatggtcggacactacctcgccgaattctccatctcttactcccctgtcaagcacggtcgtcccggtatcggtgcgactaactcttctcgtttcatccccctgaagtaaaatggatgctgggtacgaatgatgactggaagccgctgttgtcgagcgtggcttcttacataactctggccgttgagacagagatcgacacaactagctacggccatagatggattcctaggaaatggaacgcgcctagcaaaaaatcaagggttaattttttgt

SEQ ID NO: 37699 - DNA, 2613 bp, Muscodor strobelii
  misc_feature: SGI cDNA ID NO. 573087
  misc_feature: Elevated expression when VOC is produced
  misc_feature: Encodes the peptide sequence at SEQ ID NO 37700
atgttgcaccaggatgaaagagtcccgaagttgtgggtagtgggcgccaaaatgggagaaggaactgctttgttgttgaaatcaactgacgagaacatcgaagatacttgctactttaccttcgaagcagtccgcccgcatgtcttcaggacgacatttacaagtgctagtcatgctcctcccccacaccctagtgtttcacgtctcgaaccgaagcttgataacatcgtgcaacaccaagatacagatcccgatcgagcttcatacacattgaagctacaggacgtcaaagccaccgtcgaatggactggcgctccagttatctctctcttcttggacggtgtgcaacagcccatccaccaagatctccagttccgttcatatgctctggatgctactggagtttcgcattatactgtctacaagaaagacactcttcatgttggtctaggagaaaaagcaggacccatggatctaagtggacggggcttcgccataactgcaagtgacaccttcggctatgacgcgtaccgtaccgatcctctgtacaaacatatcccactattgattaatgttactccgcaagggtgcgtcgggatcttctccacgtcgcattcacgggcgtcatgggccgttggctctgagatcgatgggctttggggtcatttcaaagtctatcgccaagctcacggtggactagaagagtgtctcattgtcggcaagactgtagctgaagtggtcagatcatatgctgagcttgtgggattcccgctgcttgtcccgcgctacatgatgggctatatcggtggagggatgaaatacagcatgacggacgaaccaccaggatgtgagagcatcataacgtttatcaaacagtgcgaaaagcatgacatgccttgctctgcgtttcagatgagctctggatatacggtggcagaaaccgagcctaaaacgagaaatgtgttcacttggaacaggcaccggtttcctaatccccgtgatttcacacgtgaatgccatcagcagcatggtgtacgccttttggctaatgtaaagccatacgttctggctagccatcctgcctacgcagagattgcaaagaatggcgggttcttcaaggacccaagcaccgggcgggtggctgttgctcgactctggagtgctggtggaggtgagagtggcgaaggaagtcatctcgacttcacatctaaagctgggtttgattggtggtataagggcgtgaaggcccttaaggatgtcggaattgatgtgatgtggaatgacaataacgagtacaatatctcgagcgacagatggcaatgtgctctggagacggttgacgttccgcaaggtttagtatcaaaggatattggtctttgggggagagcacttcatactgaactcatgggcaaagcctcacatgatgccactctcgaagccgagccaaacgcacgaccatttgtattgactcgtagtgcaacggctgggactatgagatactgcgcctcctcttggagcggtgataacgtgacgagttgggagtgtatgaaaggagcaaatgcgctagccctaaatgccggattttctttacttcaatgctacggccacgacatcgggggatttgaaggaccacagccaactcctgaacatctagtacgttggatccagcttggcattcattcgccgcgctttgccatcaactgttataagaccagcccggatgacaacctcgttggtgcggtaatcgaaccgtttcagtacccttcagtaactccgatcattcgaaaagcaatcgagcgtcgatatgaactcgtgccatacacatactcacaggcattgaagtcacatgtggatgctactccgcctctgagatggattggctggggttatgaatctgatccggtggtttggacaaaggaagtgatacgaggagatagtcaatattggttcggagatgcgctactagtggctggtgtttatgagccaggagtatcaacagctcgagtctatcttcccaacaaaggggatatcgggtttctcaatttatcaccaccataccagtatttgtcgcctggtcagtgggccgagatttcgacgccttggaacgagtcgatcccagtactggctcgcatcggttccgcaatccccataggtaaatcaaacccaacaacatgcgtcgcagaattagatccggaatttccgaacatagaaaaggacgattggagaggagttgaaatctatcctcctcctcttaaggagtttccccattggccaatagttgcatcccttacgaagcccgattcaggccatgaggagacggtgttcagcacaacatggcttgaagacgacggatttagcccgcatggcaaagcagacttatgtcgcatcagtatccattactcggtttcgagggcacatatctctgtcaatgtcttgttggtgaaagatggcaagttcgagccactttggtggaggaatgggctcacagtcgtgcttccagtgggtgaggagcgtgaactcacgacgtcaagtacttcagaatacttgggaagagacgacgggggtagacgaagatggaatatcgctgttgcaacggacagtgttgttcaatga

SEQ ID NO: 37700 - protein, 870 aa, Muscodor strobelii
  misc_feature: SGI Peptide ID NO. 573087
  misc_feature (236)..(715): Pfam Id: PF01055 Pfam Desc: Glycosyl hydrolases family 31
  misc_feature (39)..(856): NCBI GI: 115389278 Blast Desc: conserved [Aspergillus terreus NIH2624] gi|114194540|gb|EAU36240.1| conserved [Aspergillus terreus NIH2624]
  misc_feature (39)..(856): NCBI GI: 169772771 Blast Desc: [Aspergillus oryzae RIB40] gi|83768715|dbj|BAE58852.1| protein product [Aspergillus oryzae]
  misc_feature (34)..(856): NCBI GI: 145255593 Blast Desc: An18g05620 [Aspergillus niger] gi|134084604|emb|CAK97480.1| protein product [Aspergillus niger]
  misc_feature (31)..(856): NCBI GI: 159130879 Blast Desc: alpha-glucosidase, [Aspergillus fumigatus A1163]
  misc_feature (31)..(856): NCBI GI: 70991112 Blast Desc: alpha-glucosidase [Aspergillus fumigatus Af293] gi|66848037|gb|EAL88367.1| alpha-glucosidase, [Aspergillus fumigatus Af293]
  misc_feature (32)..(856): NCBI GI: 119496471 Blast Desc: neutral alpha-glucosidase ab precursor (glucosidase II alpha subunit) (alpha glucosidase 2) [Neosartorya fischeri NRRL 181] gi|119413171|gb|EAW23112.1| neutral alpha-glucosidase ab II
  misc_feature (4)..(861): NCBI GI: 242766922 Blast Desc: alpha-glucosidase, [Talaromyces stipitatus ATCC 10500] gi|218724462|gb|EED23879.1| alpha-glucosidase, [Talaromyces stipitatus ATCC 10500]
  misc_feature (4)..(856): NCBI GI: 255956975 Blast Desc: Pc21g22730 [Penicillium chrysogenum Wisconsin 54-1255] gi|211590951|emb|CAP97170.1| Pc21g22730 [Penicillium chrysogenum Wisconsin 54-1255]
  misc_feature (2)..(857): NCBI GI: 169626180 Blast Desc: SNOG_16369 [Phaeosphaeria nodorum SN15] gi|160705779|gb|EAT76194.2| SNOG_16369 [Phaeosphaeria nodorum SN15]
  misc_feature (4)..(861): NCBI GI: 39963498 Blast Desc: MGG_09757 [Magnaporthe grisea 70-15] gi|145015463|gb|EDJ99999.1| MGG_09757 [Magnaporthe grisea 70-15]
  misc_feature (149)..(823): SWISSPROT Homolog: EC 3.2.1.20 Alpha-glucosidase
  misc_feature: Useful for introducing or modulating the production of volatile compounds
MLHQDERVPKLWVVGAKMGEGTALLLKSTDENIEDTCYFTFEAVRPHVFRTTFTSASHAPPPHPSVSRLEPKLDNIVQHQDTDPDRASYTLKLQDVKATVEWTGAPVISLFLDGVQQPIHQDLQFRSYALDATGVSHYTVYKKDTLHVGLGEKAGPMDLSGRGFAITASDTFGYDAYRTDPLYKHIPLLINVTPQGCVGIFSTSHSRASWAVGSEIDGLWGHFKVYRQAHGGLEECLIVGKTVAEVVRSYAELVGFPLLVPRYMMGYIGGGMKYSMTDEPPGCESIITFIKQCEKHDMPCSAFQMSSGYTVAETEPKTRNVFTWNRHRFPNPRDFTRECHQQHGVRLLANVKPYVLASHPAYAEIAKNGGFFKDPSTGRVAVARLWSAGGGESGEGSHLDFTSKAGFDWWYKGVKALKDVGIDVMWNDNNEYNISSDRWQCALETVDVPQGLVSKDIGLWGRALHTELMGKASHDATLEAEPNARPFVLTRSATAGTMRYCASSWSGDNVTSWECMKGANALALNAGFSLLQCYGHDIGGFEGPQPTPEHLVRWIQLGIHSPRFAINCYKTSPDDNLVGAVIEPFQYPSVTPIIRKAIERRYELVPYTYSQALKSHVDATPPLRWIGWGYESDPVVWTKEVIRGDSQYWFGDALLVAGVYEPGVSTARVYLPNKGDIGFLNLSPPYQYLSPGQWAEISTPWNESIPVLARIGSAIPIGKSNPTTCVAELDPEFPNIEKDDWRGVEIYPPPLKEFPHWPIVASLTKPDSGHEETVFSTTWLEDDGFSPHGKADLCRISIHYSVSRAHISVNVLLVKDGKFEPLWWRNGLTVVLPVGEERELTTSSTSEYLGRDDGGRRRWNIAVATDSVVQ

SEQ ID NO: 37701 - DNA, 1619 bp, Muscodor strobelii
  misc_feature: SGI EST ID NO. CUFF.90328.0
  misc_feature: Variant of the nucleotide sequence at SEQ ID NO 37699
aggcccttaaggatgtcggaattgatgtgatgtggaatgacaataacgagtacaatatctcgagcgacagatggcaatgtgctctggagacggttgacgttccgcaaggtttagtatcaaaggatattggtctttgggggagagcacttcatactgaactcatgggcaaagcctcacatgatgccactctcgaagccgagccaaacgcacgaccatttgtattgactcgtagtgcaacggctgggactatgagatactgcgcctcctcttggagcggtgataacgtgacgagttgggagtgtatgaaaggagcaaatgcgctagccctaaatgccggattttctttacttcaatgctacggccacgacatcgggggatttgaaggaccacagccaactcctgaacatctagtacgttggatccagcttggcattcattcgccgcgctttgccatcaactgttataagaccagcccggatgacaacctcgttggtgcggtaatcgaaccgtttcagtacccttcagtaactccgatcattcgaaaagcaatcgagcgtcgatatgaactcgtgccatacacatactcacaggcattgaagtcacatgtggatgctactccgcctctgagatggattggctggggttatgaatctgatccggtggtttggacaaaggaagtgatacgaggagatagtcaatattggttcggagatgcgctactagtggctggtgtttatgagccaggagtatcaacagctcgagtctatcttcccaacaaaggggatatcgggtttctcaatttatcaccaccataccagtatttgtcgcctggtcagtgggccgagatttcgacgccttggaacgagtcgatcccagtactggctcgcatcggttccgcaatccccataggtaaatcaaacccaacaacatgcgtcgcagaattagatccggaatttccgaacatagaaaaggacgattggagaggagttgaaatctatcctcctcctcttaaggagtttccccattggccaatagttgcatcccttacgaagcccgattcaggccatgaggagacggtgttcagcacaacatggcttgaagacgacggatttagcccgcatggcaaagcagacttatgtcgcatcagtatccattactcggtttcgagggcacatatctctgtcaatgtcttgttggtgaaagatggcaagttcgagccactttggtggaggaatgggctcacagtcgtgcttccagtgggtgaggagcgtgaactcacgacgtcaagtacttcagaatacttgggaagagacgacgggggtagacgaagatggaatatcgctgttgcaacggacagtgttgttcaatgaaaaattacttaataaatctcactttatggatcctttgacttacggatagatacctattgtaatacttgacgagtatgtaacatatagagaagcgttcgcatcgccacgttctatgcttttatgaacttgtctgatacctacctcaagtatgtgatagcatgcaggtcacgtctcataaggcttaatttagaagaataggtgagaactgcaggttactggtagtcaagatttatgtcctggtgttttcgc

SEQ ID NO: 37702 - DNA, 2592 bp, Muscodor strobelii
  misc_feature: SGI cDNA ID NO. 573088
  misc_feature: Elevated expression when VOC is produced
  misc_feature: Encodes the peptide sequence at SEQ ID NO 37703
atgagcttccttcgctacctgctcttggctctgcctactacggcttttgctttacctaagctttctgatggctttgacagtcaagatgaactcagttatcttgcggagcgaggtgtctttggcccgattgacacctcctcgccaaacgttgctggaggtcaagtcacctgtggtgctcctccggtgagctcgttctttgctggcctcaagcctccgttcccaacaaactcatggtgggcatcttacgccgcgacaccaggcaatgggactgcctccggcccgttcccatacgagtcatacctggacaaaactggtatccaattcggtatcagcgctgatcgggagtttgacggcacatctatcaagcagccaactcaaatggactggctcgcctcgttctctgagcatcaggagagcacagcaaatcataaggcaacagcttttgacacgcagagtgttaccgtacagtacttccagggctccgcaactatgacaacttatcttgttccggggtctccatacatcacattgcaatacaatcaagctaccccattattgacaacagtcaacggaggcatcaccgctttcaacggaaagtccgtcacctccggagcaagtgtcagcgccacaggcacacagttcacggtgacagacagttcaggcactcaatacatcatctactcgctgtcgtctatttcactgacagcaacggccaaatcttcctctacgggcactatcaaggcatcgggcacgttcaacggggtccttcgccttgtcaagttgaatgatgccagccacaagactctgctcgatgcccactccagcgtctaccccacctcagtcgggcttgattactccttcactgataccacaggaacgttgattttcaactacgctactgtcggcgcctcatctgacctcctcatgctcacgtggccacaccaccggctgtctctgcagaatcctaactatcccgcaactactgctttgaactaccttactacaaagggttggatgtaccccatcattggcgcccaatggaatctcaaatatactctctcctcgatcacgtggaatccgccgcgagcagttgactcatcttgcaagtctactcttatccagggcttggaatatgatattgggcagcttgatgtctctaaagcacctgttcccggagatttctactactgggtagccgcatctcggttagcgcttattgcggacaatgtcggccggtctgatctcatagcaccggtaattaactatctcaaagcatcgttcgacccctggttccagtcttcatctgccacaaagccagcttatgagactacttggggcggaatcgtgaaccaggcgggcgccaccaatgtttatgtcgacttcggcaatggatactacgacgaccatcacttccattacggatacttcctccacgtcgcggccgtgattgctaagtatgactcgtcatggttgagccaacataagacctacatcaatgctttcgcaagagacatcatcaacccgtcacctcaagacccctatttccctattactcgatgccgtgattggttcgctggtcactcgtgggcatccggaattgcaaacggggcagggtcgcgagaccaagagtccattggagaggctgttaacggatattacggcgccctgctctgggctagtgtcgccctctcgcaagattatgtcaactatgccaaactactcgtcgcaactgaacagcaagctgcacaggtgtactggcatctgtatccgagtcagagctcgactgctcgggataacccttatcccgaagctggggtcaggaacctgatcaccatgggcaatgtcgaggattggcaatccggcgcatggctgttctggggctcgcaacgagttgagatcgcttcgatccagatcttgcctgtgacacccatcaatgaggtcatgtatgacaaagaatgggtcaacaacgtgtggtcctatacgtcgggcgagatgaatgatcccaccatcggagacgaatggaaaaacgtcatcatcgcaggctactccaacgcaaaccctcagacggcagcagcctggagcgccaacatctcaacctggggatccggaaacacatactcaaatgagctgttcttcatcagcacacgtcccaacccttcgggaacaccaatctgcagcgccctgccatcaaacccctacggaaacttcaagctccaagtcgcgtcctcgggtgcctatgtcgcagcatcaagctcaaacaccaacctcgtcgcctccacctctacgtcctcgggcagcgcggcagtattcaagagtgcatatcgaccaaatacaggaacccttcaattgacaagcacaagtcaattcgtgacagcggactcgagcggcacttacgcgctctctgccgggcgagctacagcctcgacttgggagactttcatcatcaggcagaagatcggtgctgcgactggtgtttactctatcaaagcgagcagtaatggaaactacgtcacagttgctagcgatggttcgctaaagaacaatgcggcaagcgagtcgggtagtacagggttcaagttcgtcgcttcgtag

SEQ ID NO: 37703 - protein, 863 aa, Muscodor strobelii
  misc_feature: SGI Peptide ID NO. 573088
  misc_feature (60)..(717): Pfam Id: PF03639 Pfam Desc: Glycosyl hydrolase family 81
  misc_feature (241)..(586): Pfam Id: PF03639 Pfam Desc: Glycosyl hydrolase family 81
  misc_feature (64)..(717): NCBI GI: 162455385 Blast Desc: sce7103 [Sorangium cellulosum 'So ce 56'] gi|161165967|emb|CAN97272.1| [Sorangium cellulosum 'So ce 56']
  misc_feature (71)..(720): NCBI GI: 168005058 Blast Desc: [Physcomitrella patens subsp. patens] gi|162693821|gb|EDQ80172.1| [Physcomitrella patens subsp. patens]
  misc_feature (136)..(716): NCBI GI: 81250785 Blast Desc: beta-glucan-binding protein 2 [Medicago truncatula]
  misc_feature (60)..(716): NCBI GI: 1752734 Blast Desc: beta-glucan-elicitor receptor [Glycine max]
  misc_feature (60)..(716): NCBI GI: 5019452 Blast Desc: beta-glucan binding protein [Glycine max]
  misc_feature (137)..(716): NCBI GI: 81250791 Blast Desc: beta-glucan-binding protein 5 [Medicago truncatula]
  misc_feature (60)..(718): NCBI GI: 81250789 Blast Desc: beta-glucan-binding protein 4 [Medicago truncatula]
  misc_feature (138)..(716): NCBI GI: 30984026 Blast Desc: beta-glucan elicitor receptor [Brassica napus]
  misc_feature (73)..(717): NCBI GI: 262104199 Blast Desc: endo-1,3(4)-beta-glucanase, [Phytophthora infestans T30-4]
  misc_feature (138)..(716): NCBI GI: 225451939 Blast Desc: [Vitis vinifera]
  misc_feature (252)..(690): SWISSPROT Homolog: EC 3.2.1.6 Endo-1,3(4)-beta-glucanase
  misc_feature: Useful for introducing or modulating the production of volatile compounds
MSFLRYLLLALPTTAFALPKLSDGFDSQDELSYLAERGVFGPIDTSSPNVAGGQVTCGAPPVSSFFAGLKPPFPTNSWWASYAATPGNGTASGPFPYESYLDKTGIQFGISADREFDGTSIKQPTQMDWLASFSEHQESTANHKATAFDTQSVTVQYFQGSATMTTYLVPGSPYITLQYNQATPLLTTVNGGITAFNGKSVTSGASVSATGTQFTVTDSSGTQYIIYSLSSISLTATAKSSSTGTIKASGTFNGVLRLVKLNDASHKTLLDAHSSVYPTSVGLDYSFTDTTGTLIFNYATVGASSDLLMLTWPHHRLSLQNPNYPATTALNYLTTKGWMYPIIGAQWNLKYTLSSITWNPPRAVDSSCKSTLIQGLEYDIGQLDVSKAPVPGDFYYWVAASRLALIADNVGRSDLIAPVINYLKASFDPWFQSSSATKPAYETTWGGIVNQAGATNVYVDFGNGYYDDHHFHYGYFLHVAAVIAKYDSSWLSQHKTYINAFARDIINPSPQDPYFPITRCRDWFAGHSWASGIANGAGSRDQESIGEAVNGYYGALLWASVALSQDYVNYAKLLVATEQQAAQVYWHLYPSQSSTARDNPYPEAGVRNLITMGNVEDWQSGAWLFWGSQRVEIASIQILPVTPINEVMYDKEWVNNVWSYTSGEMNDPTIGDEWKNVIIAGYSNANPQTAAAWSANISTWGSGNTYSNELFFISTRPNPSGTPICSALPSNPYGNFKLQVASSGAYVAASSSNTNLVASTSTSSGSAAVFKSAYRPNTGTLQLTSTSQFVTADSSGTYALSAGRATASTWETFIIRQKIGAATGVYSIKASSNGNYVTVASDGSLKNNAASESGSTGFKFVAS

SEQ ID NO: 37704 - DNA, 1777 bp, Muscodor strobelii
  misc_feature: SGI EST ID NO. CUFF.90288.0
  misc_feature: Variant of the nucleotide sequence at SEQ ID NO 37702
ttagcgcttattgcggacaatgtcggccggtctgatctcatagcaccggtaattaactatctcaaagcatcgttcgacccctggttccagtcttcatctgccacaaagccagcttatgagactacttggggcggaatcgtgaaccaggcgggcgccaccaatgtttatgtcgacttcggcaatggatactacgacgaccatcacttccattacggatacttcctccacgtcgcggccgtgattgctaagtatgactcgtcatggttgagccaacataagacctacatcaatgctttcgcaagagacatcatcaacccgtcacctcaagacccctatttccctattactcgatgccgtgattggttcgctggtcactcgtgggcatccggaattgcaaacggggcagggtcgcgagaccaagagtccattggagaggctgttaacggatattacggcgccctgctctgggctagtgtcgccctctcgcaagattatgtcaactatgccaaactactcgtcgcaactgaacagcaagctgcacaggtgtactggcatctgtatccgagtcagagctcgactgctcgggataacccttatcccgaagctggggtcaggaacctgatcaccatgggcaatgtcgaggattggcaatccggcgcatggctgttctggggctcgcaacgagttgagatcgcttcgatccagatcttgcctgtgacacccatcaatgaggtcatgtatgacaaagaatgggtcaacaacgtgtggtcctatacgtcgggcgagatgaatgatcccaccatcggagacgaatggaaaaacgtcatcatcgcaggctactccaacgcaaaccctcagacggcagcagcctggagcgccaacatctcaacctggggatccggaaacacatactcaaatgagctgttcttcatcagcacacgtcccaacccttcgggaacaccaatctgcagcgccctgccatcaaacccctacggaaacttcaagctccaagtcgcgtcctcgggtgcctatgtcgcagcatcaagctcaaacaccaacctcgtcgcctccacctctacgtcctcgggcagcgcggcagtattcaagagtgcatatcgaccaaatacaggaacccttcaattgacaagcacaagtcaattcgtgacagcggactcgagcggcacttacgcgctctctgccgggcgagctacagcctcgacttgggagactttcatcatcaggcagaagatcggtgctgcgactggtgtttactctatcaaagcgagcagtaatggaaactacgtcacagttgctagcgatggttcgctaaagaacaatgcggcaagcgagtcgggtagtacagggttcaagttcgtcgcttcgtagaagcagaccattaagctccgtgatgaagagagggcgattttggataatcttgcagatacgcttagtattagcgatgagagtattgcggtagatgtcaatacaactgaggtcgaatgaaagattacattcccacatggcacacacgtgatttgcgagtagaaccgggtaacatccagctctgctgattgaattgatgcttgatgccactacctgaggtacgtacacctgcctcatttgacctgcagaactccaccagcggataccgaatatcgccggcgtcccgagaacccacgttgctgaaccattggtcaattcgtgttcatccgacatctgccaagacttgactattttagagatgatcccctcaattcgatctatagctcacgcatta

SEQ ID NO: 37705 - DNA, 1734 bp, Muscodor strobelii
  misc_feature: SGI cDNA ID NO. 573089
  misc_feature: Encodes the peptide sequence at SEQ ID NO 37706
atgtcggacatgcagcaaaccgcgaacaacgtgcccagtgaccagccgacgcggcgagccacgggtatgactgcctcgacgcaaacaggtggctcacgcacagatagattagagccgggagtgtacgctggcctgctgttttcgtttctggcacggccatcgactggaaccttgtactctggagagcactatcgagcattgtctcagtttcttgtccatggcgcccataaatcctcccaagacatcacttcgcacaacttgaggccaacgggggttgttcctagtcctccaagctttgttaccatgcgctcttttgaacctgtagagaacggaagatgtcacgaaagagtcgggcaatggagacatccgggcgatttgcgagatgactggaatcattcctcggtagggaataacagactactgttcctccgcgggtatccgtctgcagattggctttgccacctgggaacagagctcaacctggatcacgacttcttctaccagcacttctcctttgactctcaactgagcgtgtcagagagttattctctgcccccgctctcgctcatcgggagtagagatacgattcagttaacctttactagtatcggatcttgggacaatcacaactctggcgtcagcttggcctctgctcgggcaaaacttggagaggacatgaaagcgttccttgaggatctcaacagcaatagaggtctgagcttgggcgactcaattgttcgggagtttgagatccacgacttggagcatttctcaatcgaacaaagagtcaccatcaagttgatcacgcacggagatttctggaccctgttgatatggaccgacttcggcagttctctcagcagaagtcatcggggaccgtggcgcacgatcgaggaacatcatgcgtcatcgtgccgctttcttgctgtgcccacgcactatagcagcagacagatcaaaagactcattgcagcagcgaacagaagtcgagaacaggaagaaggactgggtcaagcccatgtttcggaattatttcagtctttgaacttaataagtactgacttggggacacttgcagatcgggacacagcaggcattgacccattctactacctgaaagaggttttcagtcttctcgcctcgtctgaataccagtttctaaacttaatggagcgaaaggtactgaagaaaggccactggggcaaacaaactcgccagatcatcgcggagctacgcagaacaaaacgagtcgtggacctgcacagtcaacgacttcgagacgccgcagaaagcctgtgcgactggcaagagcgacataatcgccaagccacggagaccaatagcgcagtggaagacgaatatttgcgtcgaatttactctaagctggtgcgtcaagctgattcgctttcggcgctttgccaggcagagatcacggctctggggagcgattcgatggtccacgaggcgcagaagagtctcgagcaagcggagtctctatcgaaggtgacattgatcgcatttgtctttgtgcccctttctttcaccacttcgttctttgggatgaacatgactcttttcggccaggggtctttggcactttggatctggtttgttgtgtccgcaccaatcttggccctttcggtacttgcatggtggcttaataaggagaaacgtgatgagctttggaagcttgccaggcggcggctgaacttcaagagaacagacactgattga

SEQ ID NO: 37706 - protein, 577 aa, Muscodor strobelii
  misc_feature: SGI Peptide ID NO. 573089
  misc_feature (43)..(549): NCBI GI: 238844682 Blast Desc: conserved [Microsporum canis CBS 113480]
  misc_feature (42)..(549): NCBI GI: 119483712 Blast Desc: NFIA_094820 [Neosartorya fischeri NRRL 181] gi|119409915|gb|EAW19862.1| conserved [Neosartorya fischeri NRRL 181]
  misc_feature (42)..(560): NCBI GI: 70983087 Blast Desc: AFUA_8G01350 [Aspergillus fumigatus Af293] gi|66844696|gb|EAL85033.1| AFUA_8G01350 [Aspergillus fumigatus Af293]
  misc_feature (42)..(559): NCBI GI: 159123957 Blast Desc: AFUB_085260 [Aspergillus fumigatus A1163]
  misc_feature (42)..(549): NCBI GI: 242775202 Blast Desc: TSTA_088690 [Talaromyces stipitatus ATCC 10500] gi|218722215|gb|EED21633.1| TSTA_088690 [Talaromyces stipitatus ATCC 10500]
  misc_feature (140)..(548): NCBI GI: 242801350 Blast Desc: conserved [Talaromyces stipitatus ATCC 10500] gi|218717090|gb|EED16511.1| conserved [Talaromyces stipitatus ATCC 10500]
  misc_feature (2)..(554): NCBI GI: 256731608 Blast Desc: NECHADRAFT_85226 [Nectria haematococca mpVI 77-13-4]
  misc_feature (140)..(551): NCBI GI: 261189085 Blast Desc: conserved [Ajellomyces dermatitidis SLH14081] gi|239591959|gb|EEQ74540.1| conserved [Ajellomyces dermatitidis SLH14081]
  misc_feature (136)..(576): NCBI GI: 145245427 Blast Desc: An11g10240 [Aspergillus niger] gi|134079681|emb|CAK97107.1| [Aspergillus niger]
  misc_feature (139)..(577): NCBI GI: 115385891 Blast Desc: [Aspergillus terreus NIH2624] gi|114187939|gb|EAU29639.1| [Aspergillus terreus NIH2624]
MSDMQQTANNVPSDQPTRRATGMTASTQTGGSRTDRLEPGVYAGLLFSFLARPSTGTLYSGEHYRALSQFLVHGAHKSSQDITSHNLRPTGVVPSPPSFVTMRSFEPVENGRCHERVGQWRHPGDLRDDWNHSSVGNNRLLFLRGYPSADWLCHLGTELNLDHDFFYQHFSFDSQLSVSESYSLPPLSLIGSRDTIQLTFTSIGSWDNHNSGVSLASARAKLGEDMKAFLEDLNSNRGLSLGDSIVREFEIHDLEHFSIEQRVTIKLITHGDFWTLLIWTDFGSSLSRSHRGPWRTIEEHHASSCRFLAVPTHYSSRQIKRLIAAANRSREQEEGLGQAHVSELFQSLNLISTDLGTLADRDTAGIDPFYYLKEVFSLLASSEYQFLNLMERKVLKKGHWGKQTRQIIAELRRTKRVVDLHSQRLRDAAESLCDWQERHNRQATETNSAVEDEYLRRIYSKLVRQADSLSALCQAEITALGSDSMVHEAQKSLEQAESLSKVTLIAFVFVPLSFTTSFFGMNMTLFGQGSLALWIWFVVSAPILALSVLAWWLNKEKRDELWKLARRRLNFKRTDTD

SEQ ID NO: 37707 - DNA, 867 bp, Muscodor strobelii
  misc_feature: SGI cDNA ID NO. 573090
  misc_feature: Elevated expression when VOC is produced
  misc_feature: Encodes the peptide sequence at SEQ ID NO 37708
atgttaactacatcgatctggttcatggaagacttggatctctaccatgacgtaaaaccttatcgtctgagcttcgagcccgaagacccagacttccccgccagcaacataaaaacgattgagatttctgacataccgattcgagatattcgaaagcaccaacatgagctggaatatgctaattgtgggtttagtctcctgcaaatgccttttaacccagaatcctgggatttcgatgacttagaccttgtcgtgactcggtactacccactcatcgaagaactctctcggaactttgtcagaaagtctcatccgggcgctgaagtcatggcgctcactcactacgggaagagctacgacgcgccgcagccagttttggttgctcatgttgactggacaatggggacgattgagaagaaacttcgagctgtgctcggagatgctaagacggacaaaatcttgagtcgaaactttgagttctgtcacgcttggcgacctatcaaaggccccgtgagagattatcctctggcagtctgtgaccattcgacagtcgacccggcagcagactatgaactgtgggacaacgtcagcaaagacgacgtcgaggagaattacgctgtgtatcatcgatccgcgcataaatggtataccgtcgttgagcaggaagcaactgaggttcttttctttcgccagtacgggagcacgattggtcctgggtccggtaagacagcgtctcgcttgaatcgtatcattcttaccaacgtcgtcacaggcattccgcattgcgctgtacagagtccaattccatttctcgacgcgcctcctaggcaaagcatcgaggtgcatttgattgtttactgggaatga

SEQ ID NO: 37708 - protein, 288 aa, Muscodor strobelii
  misc_feature: SGI Peptide ID NO. 573090
  misc_feature (2)..(288): NCBI GI: 242801385 Blast Desc: CmcJ-like methyltransferase, [Talaromyces stipitatus ATCC 10500] gi|218717098|gb|EED16519.1| CmcJ-like methyltransferase, [Talaromyces stipitatus ATCC 10500]
  misc_feature (2)..(245): NCBI GI: 70983083 Blast Desc: CmcJ-like methyltransferase [Aspergillus fumigatus Af293] gi|66844694|gb|EAL85031.1| CmcJ-like methyltransferase, [Aspergillus fumigatus Af293] gi|159123955|gb|EDP49074.1| A1163]
  misc_feature (6)..(285): NCBI GI: 242796618 Blast Desc: conserved [Talaromyces stipitatus ATCC 10500] gi|218719424|gb|EED18844.1| conserved [Talaromyces stipitatus ATCC 10500]
  misc_feature (19)..(287): NCBI GI: 186685770 Blast Desc: Npun_F5723 [Nostoc punctiforme PCC 73102] gi|186468222|gb|ACC84023.1| conserved [Nostoc punctiforme PCC 73102]
  misc_feature (6)..(234): NCBI GI: 261189077 Blast Desc: [Ajellomyces dermatitidis SLH14081] gi|239591955|gb|EEQ74536.1| [Ajellomyces dermatitidis SLH14081]
  misc_feature (19)..(287): NCBI GI: 196256911 Blast Desc: conserved [Cyanothece sp. PCC 7822] gi|196202306|gb|EDX97124.1| conserved [Cyanothece sp. PCC 7822]
  misc_feature (18)..(286): NCBI GI: 146341215 Blast Desc: BRADO4289 [Bradyrhizobium sp. ORS278] gi|146194021|emb|CAL78038.1| conserved [Bradyrhizobium sp. ORS278]
  misc_feature (19)..(287): NCBI GI: 75906327 Blast Desc: Ava_0102 [Anabaena variabilis ATCC 29413] gi|75700052|gb|ABA19728.1| conserved [Anabaena variabilis ATCC 29413]
  misc_feature (19)..(286): NCBI GI: 27381560 Blast Desc: bll6449 [Bradyrhizobium japonicum USDA 110] gi|27354728|dbj|BAC51714.1| bll6449 [Bradyrhizobium japonicum USDA 110]
  misc_feature (2)..(288): NCBI GI: 145238152 Blast Desc: An07g06460 [Aspergillus niger] gi|134076204|emb|CAK39491.1| protein product [Aspergillus niger]
  misc_feature: Useful for introducing or modulating the production of volatile compounds
MLTTSIWFMEDLDLYHDVKPYRLSFEPEDPDFPASNIKTIEISDIPIRDIRKHQHELEYANCGFSLLQMPFNPESWDFDDLDLVVTRYYPLIEELSRNFVRKSHPGAEVMALTHYGKSYDAPQPVLVAHVDWTMGTIEKKLRAVLGDAKTDKILSRNFEFCHAWRPIKGPVRDYPLAVCDHSTVDPAADYELWDNVSKDDVEENYAVYHRSAHKWYTVVEQEATEVLFFRQYGSTIGPGSGKTASRLNRIILTNVVTGIPHCAVQSPIPFLDAPPRQSIEVHLIVYWE

SEQ ID NO: 37709 - DNA, 745 bp, Muscodor strobelii
  misc_feature: SGI EST ID NO. CUFF.90395.0
  misc_feature: Variant of the nucleotide sequence at SEQ ID NO 37707
gaaacttcgagctgtgctcggagatgctaagacggacaaaatcttgagtcgaaactttgagttctgtcacgcttggcgacctatcaaaggccccgtgagagattatcctctggcagtctgtgaccattcgacagtcgacccggcagcagactatgaactgtgggacaacgtcagcaaagacgacgtcgaggagaattacgctgtgtatcatcgatccgcgcataaatggtataccgtcgttgagcaggaagcaactgaggttcttttctttcgccagtacgggagcacgattggtcctgggtccggcattccgcattgcgctgtacagagtccaattccatttctcgacgcgcctcctaggcaaagcatcgaggtgcatttgattgtttactgggaatgagttccaagttcatcaattagacgacatgtcttatattggtgcggtgcacttcattatgatggtccaacggtaaacatgaaacagacatgaggacacttctcaagttacttcaatatcgtaatgctagtcttgcccataagaggtagtatgttggcatatatatccgcctgctttcgtgatagtcacgatagagagtccttctcataagactactccggcttgcgaccgagtatagccctgctcgcaatgtcccccggactggtcatttcaataaacaaatctcccttcttcagaccgtagtacccagtatcttgacttttctcgttcggtttgacgttcagccag

SEQ ID NO: 37710 - DNA, 3219 bp, Muscodor strobelii
  misc_feature: SGI cDNA ID NO. 573091
  misc_feature: Elevated expression when VOC is produced
  misc_feature: Encodes the peptide sequence at SEQ ID NO 37711
atgcgacagtctatttggcgatgcactgccgacctccgcctagtcttccatctttccgagcttaaagcggcgtacgatggtgtagacatcgtggttatccccagtctttgggtcgagcatgtgcaggataaggcctcaaaccaatgcagttggcttaagctccttgttgcctcgacagacaatgacacgcgcgtgtttgttttcaaatatgacatccagcccagcgaagacggcaatgtgtggcatcagatgatcggacttgggaaggttctggtcgactcactgcgccaggcgcggccctttgaaagccgacttcgaccattgtatttcgtggcgcacagtctcgggggtatactgctcaaacaagcgttgctgctagctcaatatgactatccagtgattagcaatgcgctttcgggcattatattcttgagcagccctcatttgagcgcaccagacgatcaccgctgggagctttgggggcacatactcaggctataccgaaaagacgccccgaaggacatactgagagacgaggataagaagatgttggctgggctatgtgacaaattcaccggattgagtcttcagattccagttctctctgtctatgagaaaacggataccaatgtaagggcctccgggctggtttcacgctttagaggagtcaaccgaaggcttgtggacgaactccatgctaccgtcaacgctgctaaagaggagttgttcggcgtgagcctgtcacacagagacgttcatgatgtcaaggcaggatctgcgctgttcgagcgcttggtggcatatctacgatgcgctcaattagaaggtagctcaatcgtcaatggcgcctatcagcggcttgagctcagactcgacctgtcagacactcacagccgcgctagcaaccctttagagatagaatcactgccaacggcctcggaagatccttcgtcgggcgattcggaggtgatcaagcgacgtgtgcttttgccttgtcactcacttggccaaaaccgcaatcgcaacttctttggccaatgcaaaaccctcgatcttctagacagcgctttgctaccgggtcgaacccccgacgacgcggttccaaagacctttgctctctgcggcatgggaggattgggaaagacggaaattgcggttgagttcatgcacacgaggaagaccaatttcgatgccatattctggatcaacagtgccagtcgggacaagatccaggccgcatttcaagatatcgctttaaagctcgggctccaagatgacccggcggtgcagagtgatgacccagcggccacaagagagatcgtcaaggcgtggttggcaaatcccgtccgccaacttggactggaaccaccggagcaagttgctgatgtcaagtggctcattgtgttcgacaatatggacgagcccgatcttctagttgacttttggccccgggatggatgtggcgctgttctgatcacaagcagaaacccactcgcgatacaatccttatatgcagatatcactggtttggatcttgcgccgatgtccgacgaagaagcaggccgcctgttgcagagcctatcgaagcgagaggaagagccagggagctttgagacttgcgtgtcgattgctcatcgacttggaggactacccttggctatcgtgcagatggcacatcagatccgacttaaacacctctcactgagcgaatttgtcgagtactatgaccaagatacgaaaagattccagggagccgtcgtacctgggctgacaaaccagcagtccattgcatcaatttggaatgtcgaaagcttgccactgcctgctatagcactgcttcgtgtgctctcagttctggaccctgacgcaacttatgaggatgttctcatatcgggcgccgacaaagtgaccctcgagaactatcccaaatcaaagattgattatttcgaggctcgggaagctctgatcaaatcatcactcgtgacgagaaacgttgagctctcgtttcttaaaatccaccggctcgtgcaagaagtcgtacgcctcaagctgcagattgaagatctgagggatgtctacaatgctgccgtggtccttgtatcagatgtgtggccatttacagacgagaacaatctgaatcgagctgatcgataccgcgtaatccagcgacacgccccacaagtcactatgctaagatcggtgcttgaagaagtaggtgttgagaagttgaagccagatatcactgtcgcagctttgtttcatgaggttacatggatgtacctcgagcataatcttcaagagggtgcggcgtacgctagcctctcattggatatactacaaaacgaccacggatccgatgaagagcttcacagtaaactattagcagatgcctatcggtatcagggtattacagcaagctggatggggagcgatcttgcaatacccagtgttcggaaatggatcgagcttctagtcgttcgaatccagaagtatcagaaacaagtcgacataaagaccctcccgacagcatataatgagtacggaatggctctgatgcgtgttcccgacgaagcagcagctcttaaatcatgggagttggcgtgcgaaacccttctcgaagtgaataaacccgacgacctcccatttccatttccttgggcacatagagctgtcgtgactgcgtactcagggaacccagatgccgcgtttgagcttttgatgcccaccatcgaagctagagctgaaaagctcggcaaagacgacacgaagtcaatcgaaaccggcattcttctgtctcagatgggcaacattcgcaggctgcaagggcagctagaagaagcgtacgactatcatgcacggggcgcctctgcgctccagcacaccctcggggcgcggtctgctactaccagtgaggccttctaccgactagcaagggacaactatgatcgagggaagaaccaagaggcatgtgacctccttcgcaaatgcctcgcggtgaagggggatgtaccttggtacaaggcagataccgcacgcatcagctggaagttgggacacgccttggccgcattagatggcgatgggaatagagaagaagccaacacgctgttgataaaagctatggatttgcgtcaccaactggatcccaacgacaagcgtgaggagtcgcaactgaaggacaaggactgggatcaattggtatactattggtatcgttaa

SEQ ID NO: 37711 - protein, 1072 aa, Muscodor strobelii
  misc_feature: SGI Peptide ID NO. 573091
  misc_feature (12)..(1072): NCBI GI: 238844681 Blast Desc: tetratricopeptide repeat domain-containing protein [Microsporum canis CBS 113480]
  misc_feature (130)..(1072): NCBI GI: 242801355 Blast Desc: NB-ARC and TPR domain protein [Talaromyces stipitatus ATCC 10500] gi|218717091|gb|EED16512.1| NB-ARC and TPR domain protein [Talaromyces stipitatus ATCC 10500]
  misc_feature (58)..(1070): NCBI GI: 261189079 Blast Desc: tetratricopeptide repeat domain-containing protein [Ajellomyces dermatitidis SLH14081] gi|239591956|gb|EEQ74537.1| tetratricopeptide repeat domain-containing protein [Ajellomyces
  misc_feature (325)..(1072): NCBI GI: 119483720 Blast Desc: tetratricopeptide repeat domain protein [Neosartorya fischeri NRRL 181] gi|119409919|gb|EAW19866.1| tetratricopeptide repeat domain protein [Neosartorya fischeri NRRL 181]
  misc_feature (18)..(1072): NCBI GI: 238839586 Blast Desc: tetratricopeptide repeat domain-containing protein [Microsporum canis CBS 113480]
  misc_feature (316)..(1072): NCBI GI: 225560352 Blast Desc: tetratricopeptide repeat domain-containing protein [Ajellomyces capsulatus G186AR]
  misc_feature (325)..(1072): NCBI GI: 70983081 Blast Desc: NB-ARC and TPR domain protein [Aspergillus fumigatus Af293] gi|66844693|gb|EAL85030.1| NB-ARC and TPR domain protein [Aspergillus fumigatus Af293] gi|159123954|gb|EDP49073.1| NB-ARC
  misc_feature (316)..(1072): NCBI GI: 240278718 Blast Desc: tetratricopeptide repeat domain-containing protein [Ajellomyces capsulatus H143]
  misc_feature (308)..(1072): NCBI GI: 242775182 Blast Desc: conserved [Talaromyces stipitatus ATCC 10500] gi|218722211|gb|EED21629.1| conserved [Talaromyces stipitatus ATCC 10500]
  misc_feature (330)..(1072): NCBI GI: 258577059 Blast Desc: [Uncinocarpus reesii 1704] gi|237902977|gb|EEP77378.1| [Uncinocarpus reesii 1704]
  misc_feature: Useful for introducing or modulating the production of volatile compounds
MRQSIWRCTADLRLVFHLSELKAAYDGVDIVVIPSLWVEHVQDKASNQCSWLKLLVASTDNDTRVFVFKYDIQPSEDGNVWHQMIGLGKVLVDSLRQARPFESRLRPLYFVAHSLGGILLKQALLLAQYDYPVISNALSGIIFLSSPHLSAPDDHRWELWGHILRLYRKDAPKDILRDEDKKMLAGLCDKFTGLSLQIPVLSVYEKTDTNVRASGLVSRFRGVNRRLVDELHATVNAAKEELFGVSLSHRDVHDVKAGSALFERLVAYLRCAQLEGSSIVNGAYQRLELRLDLSDTHSRASNPLEIESLPTASEDPSSGDSEVIKRRVLLPCHSLGQNRNRNFFGQCKTLDLLDSALLPGRTPDDAVPKTFALCGMGGLGKTEIAVEFMHTRKTNFDAIFWINSASRDKIQAAFQDIALKLGLQDDPAVQSDDPAATREIVKAWLANPVRQLGLEPPEQVADVKWLIVFDNMDEPDLLVDFWPRDGCGAVLITSRNPLAIQSLYADITGLDLAPMSDEEAGRLLQSLSKREEEPGSFETCVSIAHRLGGLPLAIVQMAHQIRLKHLSLSEFVEYYDQDTKRFQGAVVPGLTNQQSIASIWNVESLPLPAIALLRVLSVLDPDATYEDVLISGADKVTLENYPKSKIDYFEAREALIKSSLVTRNVELSFLKIHRLVQEVVRLKLQIEDLRDVYNAAVVLVSDVWPFTDENNLNRADRYRVIQRHAPQVTMLRSVLEEVGVEKLKPDITVAALFHEVTWMYLEHNLQEGAAYASLSLDILQNDHGSDEELHSKLLADAYRYQGITASWMGSDLAIPSVRKWIELLVVRIQKYQKQVDIKTLPTAYNEYGMALMRVPDEAAALKSWELACETLLEVNKPDDLPFPFPWAHRAVVTAYSGNPDAAFELLMPTIEARAEKLGKDDTKSIETGILLSQMGNIRRLQGQLEEAYDYHARGASALQHTLGARSATTSEAFYRLARDNYDRGKNQEACDLLRKCLAVKGDVPWYKADTARISWKLGHALAALDGDGNREEANTLLIKAMDLRHQLDPNDKREESQLKDKDWDQLVYYWYR

SEQ ID NO: 37712 - DNA, 2461 bp, Muscodor strobelii
  misc_feature: SGI EST ID NO. CUFF.90315.0
  misc_feature: Variant of the nucleotide sequence at SEQ ID NO 37710
gctagcaaccctttagagatagaatatgaatgcgcatctgtgctgatgggttctatataaagcactgccaacggcctcggaagatccttcgtcgggcgattcggaggtgatcaagcgacgtgtgcttttgccttgtcactcacttggccaaaaccgcaatcgcaacttctttggccaatgcaaaaccctcgatcttctagacagcgctttgctaccgggtcgaacccccgacgacgcggttccaaagacctttgctctctgcggcatgggaggattgggaaagacggaaattgcggttgagttcatgcacacgaggaagaccaatttcgatgccatattctggatcaacagtgccagtcgggacaagatccaggccgcatttcaagatatcgctttaaagctcgggctccaagatgacccggcggtgcagagtgatgacccagcggccacaagagagatcgtcaaggcgtggttggcaaatcccgtccgccaacttggactggaaccaccggagcaagttgctgatgtcaagtggctcattgtgttcgacaatatggacgagcccgatcttctagttgacttttggccccgggatggatgtggcgctgttctgatcacaagcagaaacccactcgcgatacaatccttatatgcagatatcactggtttggatcttgcgccgatgtccgacgaagaagcaggccgcctgttgcagagcctatcgaagcgagaggaagagccagggagctttgagacttgcgtgtcgattgctcatcgacttggaggactacccttggctatcgtgcagatggcacatcagatccgacttaaacacctctcactgagcgaatttgtcgagtactatgaccaagatacgaaaagattccagggagccgtcgtacctgggctgacaaaccagcagtccattgcatcaatttggaatgtcgaaagcttgccactgcctgctatagcactgcttcgtgtgctctcagttctggaccctgacgcaacttatgaggatgttctcatatcgggcgccgacaaagtgaccctcgagaactatcccaaatcaaagattgattatttcgaggctcgggaagctctgatcaaatcatcactcgtgacgagaaacgttgagctctcgtttcttaaaatccaccggctcgtgcaagaagtcgtacgcctcaagctgcagattgaagatctgagggatgtctacaatgctgccgtggtccttgtatcagatgtgtggccatttacagacgagaacaatctgaatcgagctgatcgataccgcgtaatccagcgacacgccccacaagtcactatgctaagatcggtgcttgaagaagtaggtgttgagaagttgaagccagatatcactgtcgcagctttgtttcatgaggttacatggatgtacctcgagcataatcttcaagagggtgcggcgtacgctagcctctcattggatatactacaaaacgaccacggatccgatgaagagcttcacagtaaactattagcagatgcctatcggtatcagggtattacagcaagctggatggggagcgatcttgcaatacccagtgttcggaaatggatcgagcttctagtcgttcgaatccagaagtatcagaaacaagtcgacataaagaccctcccgacagcatataatgagtacggaatggctctgatgcgtgttcccgacgaagcagcagctcttaaatcatgggagttggcgtgcgaaacccttctcgaagtgaataaacccgacgacctcccatttccatttccttgggcacatagagctgtcgtgactgcgtactcagggaacccagatgccgcgtttgagcttttgatgcccaccatcgaagctagagctgaaaagctcggcaaagacgacacgaagtcaatcgaaaccggcattcttctgtctcagatgggcaacattcgcaggctgcaagggcagctagaagaagcgtacgactatcatgcacggggcgcctctgcgctccagcacaccctcggggcgcggtctgctactaccagtgaggccttctaccgactagcaagggacaactatgatcgagggaagaaccaagaggcatgtgacctccttcgcaaatgcctcgcggtgaagggggatgtaccttggtacaaggcagataccgcacgcatcagctggaagttgggacacgccttggccgcattagatggcgatgggaatagagaagaagccaacacgctgttgataaaagctatggatttgcgtcaccaactggatcccaacgacaagcgtgaggagtcgcaactgaaggacaaggactgggatcaattggtatactattggtatcgttaagggggccaagcaaggaatgccggctgtagtttatctctacatgaacggggcactactactttccgagtaaagttaaagaataataaatacattaagccgtgt

SEQ ID NO: 37713 - DNA, 1575 bp, Muscodor strobelii
  misc_feature: SGI cDNA ID NO. 573092
  misc_feature: Encodes the peptide sequence at SEQ ID NO 37714
atggagatcaactggcttacagctgcatgtgcagcccttatcacgatttatatgttcagcttggccgtgttacggctcacccaggacgagaatgagccgccagcgattgatagcttaattccattcataagcccagttctcggcatgatgcgaagtggctatcattactggatctctcgcagacaacaaagtcattggccaatatatacactgcgactgccatttgtgcggctttatgttgtcaattctccttcactattgcagaatcttcatcggcatcctcgaaagatatcttttaccgccatcatggtccggatgtcttccaccgtcatggggttaagcagagctaccgctgaaagcattgcaaaggaccatctccaaccgcatgggttcttgcatgatttcatttccacgactcgcaccactctaagtccaggctcgatgaaattaaacatgttaaacagaaagtcgatccaaatcattgccaaatctttcgacacaatggccaccaaagctcaggcagggataaaaatcaatatggctgagtggataaaacatgaagtcatgatggcgagcaccgaaggcgtctatggtccccaaaatccgctcagagatgcaaaaacacagcaagcattctttgattatgaacgtggatttgtccgattaatgattagcttctttccagctttgacggctcgaaagagctcacaagctcgaacagccctcaaacgcgcgtaccagagatattacgaacacggtggatataatgacttagaagcgtccgccttcattcgagaacgatatgggctctgctccgataaagggtggccgcttcttgatatcgtgaaaatggaggtggcaagctctattgctttgctaagtaacactatgcctgccaccttttggctcgcttttcatatctattctgatactcagttacttgatgcctgtcgggaggaattagcacgagccaccaaagaagacaatggtaggcactcaattgatatggcgtacgtcaagagtcaatgtcctctactactctcaacctttcaagaggtcctacgcttctacagtattgggttatctactcgcatagtcatggatgataccatgctagatcagaaatacctcgtcaagaaaggaggcatcatgttcataccgggtgcggcatttcatcagctcaaatcagcgtggggagatgatgccggcagattcttagcgagacgattcctgccgagatctcctggccacgaccgagaacacgagccagttgcatttcgtgcatttggcggcggatcgactctttgtcctggcagacatttcgctgcgacagagatactggcgtttgcatcactaatcatcctgcgatttaatgctcgacccgcgaagggccaatggacaacaccgagtactgaaaatacgcctcttgggacaacgattcgtcagcctgactatgatattgagatcgaactacaagctcgtgacgactttacgtgggacgtgcagttctcggactcggagcacgtaataccagtttccgcagaagatatccactcgggaaaatctttgccttga

SEQ ID NO: 37714 - protein, 524 aa, Muscodor strobelii
  misc_feature: SGI Peptide ID NO. 573092
  misc_feature (34)..(489): Pfam Id: PF00067 Pfam Desc: Cytochrome P450
  misc_feature (344)..(489): Pfam Id: PF00067 Pfam Desc: Cytochrome P450
  misc_feature (10)..(494): NCBI GI: 145252772 Blast Desc: An16g05910 [Aspergillus niger] gi|134083453|emb|CAK46931.1| protein product [Aspergillus niger]
  misc_feature (29)..(516): NCBI GI: 154303094 Blast Desc: BC1G_09567 [Botryotinia fuckeliana B05.10] gi|150855030|gb|EDN30222.1| BC1G_09567 [Botryotinia fuckeliana B05.10]
  misc_feature (6)..(506): NCBI GI: 225558023 Blast Desc: conserved [Ajellomyces capsulatus G186AR]
  misc_feature (28)..(516): NCBI GI: 169609679 Blast Desc: SNOG_07932 [Phaeosphaeria nodorum SN15] gi|160701894|gb|EAT84208.2| SNOG_07932 [Phaeosphaeria nodorum SN15]
  misc_feature (6)..(495): NCBI GI: 225681045 Blast Desc: conserved [Paracoccidioides brasiliensis Pb03] gi|226292259|gb|EEH47679.1| conserved [Paracoccidioides brasiliensis Pb18]
  misc_feature (6)..(462): NCBI GI: 154280549 Blast Desc: [Ajellomyces capsulatus NAm1] gi|150411266|gb|EDN06654.1| [Ajellomyces capsulatus NAm1]
  misc_feature (50)..(517): NCBI GI: 169608169 Blast Desc: SNOG_07153 [Phaeosphaeria nodorum SN15] gi|160701581|gb|EAT85804.2| SNOG_07153 [Phaeosphaeria nodorum SN15]
  misc_feature (6)..(475): NCBI GI: 240273269 Blast Desc: cytochrome P450 oxidoreductase [Ajellomyces capsulatus H143]
  misc_feature (71)..(516): NCBI GI: 156058692 Blast Desc: SS1G_03358 [Sclerotinia sclerotiorum 1980] gi|154701145|gb|EDO00884.1| SS1G_03358 [Sclerotinia sclerotiorum 1980]
  misc_feature (6)..(497): NCBI GI: 119467107 Blast Desc: cytochrome P450, [Neosartorya fischeri NRRL 181] gi|119405512|gb|EAW15463.1| cytochrome P450, [Neosartorya fischeri NRRL 181]
  misc_feature (8)..(494): SWISSPROT Homolog: EC 1.14.13.17 Cholesterol 7-alpha-monooxygenase
MEINWLTAACAALITIYMFSLAVLRLTQDENEPPAIDSLIPFISPVLGMMRSGYHYWISRRQQSHWPIYTLRLPFVRLYVVNSPSLLQNLHRHPRKISFTAIMVRMSSTVMGLSRATAESIAKDHLQPHGFLHDFISTTRTTLSPGSMKLNMLNRKSIQIIAKSFDTMATKAQAGIKINMAEWIKHEVMMASTEGVYGPQNPLRDAKTQQAFFDYERGFVRLMISFFPALTARKSSQARTALKRAYQRYYEHGGYNDLEASAFIRERYGLCSDKGWPLLDIVKMEVASSIALLSNTMPATFWLAFHIYSDTQLLDACREELARATKEDNGRHSIDMAYVKSQCPLLLSTFQEVLRFYSIGLSTRIVMDDTMLDQKYLVKKGGIMFIPGAAFHQLKSAWGDDAGRFLARRFLPRSPGHDREHEPVAFRAFGGGSTLCPGRHFAATEILAFASLIILRFNARPAKGQWTTPSTENTPLGTTIRQPDYDIEIELQARDDFTWDVQFSDSEHVIPVSAEDIHSGKSLP

SEQ ID NO: 37715 - DNA, 2313 bp, Muscodor strobelii
  misc_feature: SGI cDNA ID NO. 573093
  misc_feature: Elevated expression when VOC is produced
  misc_feature: Encodes the peptide sequence at SEQ ID NO 37716
atgcatctctttggcttcatattttggactgttgccgttccggtggtggccactttgatcaacgtcccacagtccgcgacatctggcgtcgaggccttgctgcaacgcaggctacctcagcatgctgcttcatttcaattcgcaattgaagacgcttcaaacacaaatgtcacagagccttggattgagcgtgcgaacgataaatatcatgtctccagcacagagcatggcaagattctagtcaagggcaacagcgttggcgctttgctcgctggactccatgcctacttgtcgagcaaagcaaaagttgacatatggtggttcattggtagtcaattggatcaggctccggaagagcttccagaactgtccaccccattggagggcgaaagcatagtcccctatcgctactacttgaacacagtgactacgtcttatacgatggcattttggggatgggaggaatgggaggcacacctagattggatggctttgcgaggtgtcaacctcgctctcgcttggattgggttcgagaagatttatatcgacgttttccgcgaaattggattttccgacacggacttcgaggattttttaagcggtccagcatttcttgcctggaatcattttggaaatatccaaggctcgtggggtggatcgctccccatatcttgggtagacgaccaatttgccttgcaactcaagattctgcagagaatgatcgaactcaatattacgccgattctcccagcctttcccggatacactccacgcgcgatatcagatattttcccggaagccaatatcacgaatggctctaactgggaagcctttcctacgcagtataccaatgatacctttctcgatccatttgatccactctacgaagaacttcaaatccgcttcatctccacgcaacaaaaatactatggcaatatcagcaatttttggacgctggatcagttcaatgagaacaatcccgcttctggggatcttggatatctcgaaagtgttagcagcaacacgtggaaatcgcttaaggcggcttctccggatgctatttgggttatgcaaggctggctcttctcatcaaactcggctttttggacgaatgatcgtgtcgctgcatttctggacggcgtgacagtgaactcagacatgctaattctcgatcttttctccgaatcccagccgcagtggcaacgaacgagttctttctatggaaaaccttggatatggtgtgagctccatgactacggcgggaactatggtctttatggccaaattttgaacgttactgagaactctattgccgctgtcgacaattcaagcaacacggtagtcggctttggcttaactatggaaggcttagaagggaatgagatcatgtatgatctcctcctagatcaagccttcagtccgacgccaattgatactgagacttatttccatgactgggtagcgactcgttacggcgcaagtgggcaggttcccgaagcagcgtttgaggcctgggagatagtgcggcccactgtgttcaacaatacaaatcttacaggcaacgccgttcccaagtcaatttacgaactcgtgccaagtacgtcagggctcgtgaaccgaacaggtcatcatccgactgtgctcaactacgatacggatagtcttgtcgcagcttggaaactgctgtatcatgcaggattacaagaccctaagctgttctcgaacccagcttatgagtacgatatggtcgactggacccgtcaggtacttggcaacgcattcatcccgttatacgcaagcctggtcgcaacctacacgtcaacgagcgaaaatttctcaacctgctctttgaaagcccaaggaacacagttggtagcattgttatcgactcttgaccatgtcctttcgaccaatacccacttcagactctccacttggatcaatgcagcccgcggtaccgtgaacacctcagacccgaatgcttcaaccatagcagatttcctcgaatataacgcaagaaaccaggtgtctctttggggaccaaagggagaaatcagtgattatgcctcccgctcgtgggctggcctggtgtccacttactatgtacctaggtgggaacggttcgtagattatctcgtggcaacccccttcgagagctataatcagtccgctttctcagcggagttgcttgaatgggaagaatcatggtccaatcgaaagacggcaagcactgaatttcaagactcagcagacagcttgcaggatgtcttggaaacagtggtgaagacatgggccttcattttcaaagtctag

SEQ ID NO: 37716 - protein, 770 aa, Muscodor strobelii
  misc_feature: SGI Peptide ID NO. 573093
  misc_feature (73)..(764): Pfam Id: PF05089 Pfam Desc: Alpha-N-acetylglucosaminidase (NAGLU)
  misc_feature (73)..(514): Pfam Id: PF05089 Pfam Desc: Alpha-N-acetylglucosaminidase (NAGLU)
  misc_feature (550)..(764): Pfam Id: PF05089 Pfam Desc: Alpha-N-acetylglucosaminidase (NAGLU)
  misc_feature (1)..(768): NCBI GI: 242809019 Blast Desc: alpha-N-acetylglucosaminidase, [Talaromyces stipitatus ATCC 10500] gi|218715907|gb|EED15329.1| alpha-N-acetylglucosaminidase, [Talaromyces stipitatus ATCC
  misc_feature (11)..(768): NCBI GI: 212537509 Blast Desc: alpha-N-acetylglucosaminidase, [Penicillium marneffei ATCC 18224] gi|210068652|gb|EEA22743.1| alpha-N-acetylglucosaminidase, [Penicillium marneffei ATCC 18224]
  misc_feature (15)..(768): NCBI GI: 119480815 Blast Desc: alpha-N-acetylglucosaminidase, [Neosartorya fischeri NRRL 181] gi|119408590|gb|EAW18539.1| alpha-N-acetylglucosaminidase, [Neosartorya fischeri NRRL 181]
  misc_feature (15)..(768): NCBI GI: 71001188 Blast Desc: alpha-N-acetylglucosaminidase [Aspergillus fumigatus Af293] gi|66852913|gb|EAL93237.1| alpha-N-acetylglucosaminidase, [Aspergillus fumigatus Af293] gi|159129357|gb|EDP54471.1| A1163]
  misc_feature (29)..(769): NCBI GI: 212541222 Blast Desc: alpha-N-acetylglucosaminidase, [Penicillium marneffei ATCC 18224] gi|210068065|gb|EEA22157.1| alpha-N-acetylglucosaminidase, [Penicillium marneffei ATCC 18224]
  misc_feature (29)..(684): NCBI GI: 121698957 Blast Desc: alpha-N-acetylglucosaminidase, [Aspergillus clavatus NRRL 1] gi|119396001|gb|EAW06433.1| alpha-N-acetylglucosaminidase, [Aspergillus clavatus NRRL 1]
  misc_feature (9)..(736): NCBI GI: 156046298 Blast Desc: SS1G_09403 [Sclerotinia sclerotiorum 1980] gi|154693798|gb|EDN93536.1| SS1G_09403 [Sclerotinia sclerotiorum 1980]
  misc_feature (140)..(768): NCBI GI: 169785389 Blast Desc: [Aspergillus oryzae RIB40] gi|83775903|dbj|BAE66022.1| protein product [Aspergillus oryzae]
  misc_feature (135)..(768): NCBI GI: 238506383 Blast Desc: alpha-N-acetylglucosaminidase, [Aspergillus flavus NRRL3357] gi|220689106|gb|EED45457.1| alpha-N-acetylglucosaminidase, [Aspergillus flavus NRRL3357]
  misc_feature (1)..(770): NCBI GI: 261199246 Blast Desc: alpha-N-acetylglucosaminidase [Ajellomyces dermatitidis SLH14081] gi|239594232|gb|EEQ76813.1| alpha-N-acetylglucosaminidase [Ajellomyces dermatitidis SLH14081]
  misc_feature (39)..(721): SWISSPROT Homolog: EC 3.2.1.50 Alpha-N-acetylglucosaminidase
  misc_feature: Useful for introducing or modulating the production of volatile compounds
MHLFGFIFWTVAVPVVATLINVPQSATSGVEALLQRRLPQHAASFQFAIEDASNTNVTEPWIERANDKYHVSSTEHGKILVKGNSVGALLAGLHAYLSSKAKVDIWWFIGSQLDQAPEELPELSTPLEGESIVPYRYYLNTVTTSYTMAFWGWEEWEAHLDWMALRGVNLALAWIGFEKIYIDVFREIGFSDTDFEDFLSGPAFLAWNHFGNIQGSWGGSLPISWVDDQFALQLKILQRMIELNITPILPAFPGYTPRAISDIFPEANITNGSNWEAFPTQYTNDTFLDPFDPLYEELQIRFISTQQKYYGNISNFWTLDQFNENNPASGDLGYLESVSSNTWKSLKAASPDAIWVMQGWLFSSNSAFWTNDRVAAFLDGVTVNSDMLILDLFSESQPQWQRTSSFYGKPWIWCELHDYGGNYGLYGQILNVTENSIAAVDNSSNTVVGFGLTMEGLEGNEIMYDLLLDQAFSPTPIDTETYFHDWVATRYGASGQVPEAAFEAWEIVRPTVFNNTNLTGNAVPKSIYELVPSTSGLVNRTGHHPTVLNYDTDSLVAAWKLLYHAGLQDPKLFSNPAYEYDMVDWTRQVLGNAFIPLYASLVATYTSTSENFSTCSLKAQGTQLVALLSTLDHVLSTNTHFRLSTWINAARGTVNTSDPNASTIADFLEYNARNQVSLWGPKGEISDYASRSWAGLVSTYYVPRWERFVDYLVATPFESYNQSAFSAELLEWEESWSNRKTASTEFQDSADSLQDVLETVVKTWAFIFKV

SEQ ID NO: 37717 - DNA, 2409 bp, Muscodor strobelii
  misc_feature: SGI EST ID NO. CUFF.90339.0
  misc_feature: Variant of the nucleotide sequence at SEQ ID NO 37715
tgctgtcttttcacaaggtcacaatgcatctctttggcttcatattttggactgttgccgttccggtggtggccactttgatcaacgtcccacagtccgcgacatctggcgtcgaggccttgctgcaacgcaggctacctcagcatgctgcttcatttcaattcgcaattgaagacgcttcaaacacaaatgtcacagagccttggattgagcgtgcgaacgataaatatcatgtctccagcacagagcatggcaagattctagtcaagggcaacagcgttggcgctttgctcgctggactccatgcctacttgtcgagcaaagcaaaagttgacatatggtggttcattggtagtcaattggatcaggctccggaagagcttccagaactgtccaccccattggagggcgaaagcatagtcccctatcgctactacttgaacacagtgactacgtcttatacgatggcattttggggatgggaggaatgggaggcacacctagattggatggctttgcgaggtgtcaacctcgctctcgcttggattgggttcgagaagatttatatcgacgttttccgcgaaattggattttccgacacggacttcgaggattttttaagcggtccagcatttcttgcctggaatcattttggaaatatccaaggctcgtggggtggatcgctccccatatcttgggtagacgaccaatttgccttgcaactcaagattctgcagagaatgatcgaactcaatattacgccgattctcccagcctttcccggatacactccacgcgcgatatcagatattttcccggaagccaatatcacgaatggctctaactgggaagcctttcctacgcagtataccaatgatacctttctcgatccatttgatccactctacgaagaacttcaaatccgcttcatctccacgcaacaaaaatactatggcaatatcagcaatttttggacgctggatcagttcaatgagaacaatcccgcttctggggatcttggatatctcgaaagtgttagcagcaacacgtggaaatcgcttaaggcggcttctccggatgctatttgggttatgcaaggctggctcttctcatcaaactcggctttttggacgaatgatcgtgtcgctgcatttctggacggcgtgacagtgaactcagacatgctaattctcgatcttttctccgaatcccagccgcagtggcaacgaacgagttctttctatggaaaaccttggatatggtgtgagctccatgactacggcgggaactatggtctttatggccaaattttgaacgttactgagaactctattgccgctgtcgacaattcaagcaacacggtagtcggctttggcttaactatggaaggcttagaagggaatgagatcatgtatgatctcctcctagatcaagccttcagtccgacgccaattgatactgagacttatttccatgactgggtagcgactcgttacggcgcaagtgggcaggttcccgaagcagcgtttgaggcctgggagatagtgcggcccactgtgttcaacaatacaaatcttacaggcaacgccgttcccaagtcaatttacgaactcgtgccaagtacgtcagggctcgtgaaccgaacaggtcatcatccgactgtgctcaactacgatacggatagtcttgtcgcagcttggaaactgctgtatcatgcaggattacaagaccctaagctgttctcgaacccagcttatgagtacgatatggtcgactggacccgtcaggtacttggcaacgcattcatcccgttatacgcaagcctggtcgcaacctacacgtcaacgagcgaaaatttctcaacctgctctttgaaagcccaaggaacacagttggtagcattgttatcgactcttgaccatgtcctttcgaccaatacccacttcagactctccacttggatcaatgcagcccgcggtaccgtgaacacctcagacccgaatgcttcaaccatagcagatttcctcgaatataacgcaagaaaccaggtgtctctttggggaccaaagggagaaatcagtgattatgcctcccgctcgtgggctggcctggtgtccacttactatgtacctaggtgggaacggttcgtagattatctcgtggcaacccccttcgagagctataatcagtccgctttctcagcggagttgcttgaatgggaagaatcatggtccaatcgaaagacggcaagcactgaatttcaagactcagcagacagcttgcaggatgtcttggaaacagtggtgaagacatgggccttcattttcaaagtctagataaaatattagctggttatcacgaaggttaacctgatcgcacgcatcgtgtctcattctgatgcatctcggg

SEQ ID NO: 37718 - DNA, 1647 bp, Muscodor strobelii
  misc_feature: SGI cDNA ID NO. 573094
  misc_feature: Encodes the peptide sequence at SEQ ID NO 37719
atgtctctgctatgctctttatccacacaatactacggaggagtacggcagtggctaggtatttatccttgttggaagctcggggtagatactgtaatattcaccctgaaccgactaattctctatacaagcattgttaatatggctgttgtgatttccatacatgcgcctctgatcgctattgtgctcatagtagttgcttatattgtctcggccatatacagctggcatcggcttcgtcatattccaggacctcgtcttgcttcattttcctatctttggtatgcaaatgttacatggagaggcacgcagtgggagactcagtgcgagattggggagaaatatggaccgctagtgagaattggtcccaacgatgttatgaccagtgatcctgctcgccgtctagggagcatcaagagaaaacatccaaatcggtcaacttggtacaaggggttacggtttaaccctcagtgtgacacattgatcaacctagtggacacagtctcacatgacaagctaaaggcgaaactcgtccctgggtactcggggcgcgatgttcccggtcttgaagcaatgatagacgaacaagtcaacagtcttcttacttctatccgcacaagatatctcgctgatcctcataacggaaacttctccatcccaatggatttcactcgcatactatcgctattcgctttggacgttatgtcaaaagttgcattaggtgaagaatttggttgccttaaggcagataaagacatccatgaattctttagtacgactgcaaaatatctgccatcaatgacattagccatggatgttccttggctacgtagactcgtgtactcttcgttcgctctgtggctcgttggacccaaggaaaccgatcgagcaggtttaggcaagctgatgaaattgacgaacgataaagttgatgagagatacggcaattgcgcaaaaatccaaaaagacatgcttgggtcttttgtccggcacggactaagccaagttgaatgcgaagcagaacttctagctggatttgtagctggatctgaaagtacagccagtgcgctgagactgactctgctttacataatcacatcacctttggtttaccagaagctcaaatatgagatccgatctgctgtagctgaaggcagagtatcacaaccgatcacttctagtgaagcccaaacccttccatatctccaggcggtaacctacgaagggcttcgtatgcgtccggtgatcacaaatctcttctccaaagaaagtccttcaggtggggaaataattcatgggcattatgttcctgctggtacgtctattgcgatgaacctgtcctcaatactccgatcaacggcgctatttggcgaggacgccaactcgtttcggccggagcgtttcatcgatgcctgtctagcggagcgtgcagaaatgcaacgcaacgttgaacttaattttggtacgggaagatggatttgcgccggaaaaccgatcgcctggcacgagttgaataaggtatactttgagctcttacgcgaattcgatttccaatttgttgatccccgacaactcggaggatcgcccagccatggcgtcttcttagacaaagaatggttcgtcaacgtcacgaaagctagtgattaa

SEQ ID NO: 37719 - protein, 548 aa, Muscodor strobelii
  misc_feature: SGI Peptide ID NO. 573094
  misc_feature (85)..(543): Pfam Id: PF00067 Pfam Desc: Cytochrome P450
  misc_feature (220)..(524): Pfam Id: PF00067 Pfam Desc: Cytochrome P450
  misc_feature (56)..(548): NCBI GI: 46109770 Blast Desc: FG01767.1 [Gibberella zeae PH-1]
  misc_feature (43)..(546): NCBI GI: 51490962 Blast Desc: cytochrome P450 monooxygenase [Botryotinia fuckeliana]
  misc_feature (64)..(511): NCBI GI: 154309274 Blast Desc: BC1G_07531 [Botryotinia fuckeliana B05.10] gi|150852355|gb|EDN27547.1| BC1G_07531 [Botryotinia fuckeliana B05.10]
  misc_feature (57)..(548): NCBI GI: 85094228 Blast Desc: NCU05848 [Neurospora crassa OR74A] gi|28921295|gb|EAA30603.1| [Neurospora crassa OR74A]
  misc_feature (59)..(545): NCBI GI: 39972649 Blast Desc: cytochrome P450 monooxygenase, [Magnaporthe grisea 70-15] gi|145016837|gb|EDK01267.1| cytochrome P450 monooxygenase, [Magnaporthe grisea 70-15]
  misc_feature (62)..(510): NCBI GI: 116194093 Blast Desc: CHGG_06764 [Chaetomium globosum CBS 148.51] gi|88182677|gb|EAQ90145.1| CHGG_06764 [Chaetomium globosum CBS 148.51]
  misc_feature (73)..(545): NCBI GI: 171678209 Blast Desc: protein product [Podospora anserina] gi|170937174|emb|CAP61831.1| protein product [Podospora anserina]
  misc_feature (48)..(541): NCBI GI: 169615603 Blast Desc: SNOG_10960 [Phaeosphaeria nodorum SN15] gi|111060339|gb|EAT81459.1| SNOG_10960 [Phaeosphaeria nodorum SN15]
  misc_feature (59)..(547): NCBI GI: 171680444 Blast Desc: protein product [Podospora anserina] gi|170939849|emb|CAP65074.1| protein product [Podospora anserina]
  misc_feature (59)..(547): NCBI GI: 148285648 Blast Desc: LolP [Neotyphodium coenophialum]
  misc_feature (79)..(518): SWISSPROT Homolog: EC 1.14.13.12 Benzoate 4-monooxygenase
MSLLCSLSTQYYGGVRQWLGIYPCWKLGVDTVIFTLNRLILYTSIVNMAVVISIHAPLIAIVLIVVAYIVSAIYSWHRLRHIPGPRLASFSYLWYANVTWRGTQWETQCEIGEKYGPLVRIGPNDVMTSDPARRLGSIKRKHPNRSTWYKGLRFNPQCDTLINLVDTVSHDKLKAKLVPGYSGRDVPGLEAMIDEQVNSLLTSIRTRYLADPHNGNFSIPMDFTRILSLFALDVMSKVALGEEFGCLKADKDIHEFFSTTAKYLPSMTLAMDVPWLRRLVYSSFALWLVGPKETDRAGLGKLMKLTNDKVDERYGNCAKIQKDMLGSFVRHGLSQVECEAELLAGFVAGSESTASALRLTLLYIITSPLVYQKLKYEIRSAVAEGRVSQPITSSEAQTLPYLQAVTYEGLRMRPVITNLFSKESPSGGEIIHGHYVPAGTSIAMNLSSILRSTALFGEDANSFRPERFIDACLAERAEMQRNVELNFGTGRWICAGKPIAWHELNKVYFELLREFDFQFVDPRQLGGSPSHGVFLDKEWFVNVTKASD

SEQ ID NO: 37720 - DNA, 1530 bp, Muscodor strobelii
  misc_feature: SGI cDNA ID NO. 573095
  misc_feature: Elevated expression when VOC is produced
  misc_feature: Encodes the peptide sequence at SEQ ID NO 37721
atggcgaatagcagcgtcgatgagaaatcagagcatgcatcaacacatcaaactcatggtctgtctcgttccgaaagccaggttccatcgctcaagctcgataagactggcctccctctttcaccacaaccatcatcacacaaagatgatcccttgaactggtcgccagcactcaaactttcaatctgtttgcaagtatcgcttctatcactactgggacctttgggttccgccgttgtcaacccggcattcgtaacgctggccgaggctttcgatgtcactccggttcaggcgtcatatcagctaacagtattcctggtgttcactgctacatcgcctatacttgtgccgccgatcgcgaatgcttatggaagaaggctaccgattgtggctggagcgtttcttgcggcagtgacgaacataattgctgcatacagtccgagttggacaggtatccatgtcaccagggcattcaatggcattgctgttggatggatgacaactctagggccacctacgatctgcgatttatggtcagtccttcatagatactttctacacgaaagaggcttctatatggggatctgggcactattcgtgaataatggagcccatatagcgccacttctaggaggtccaatcgctcaatatctcgggtggaggtggtgttttggaatacccggatatatacaattattctttgcggttgttgttgcatttggactaccggaaacgctctatgaccggaccgcgaagacggactacgcaaaggaaagatcatattgggacttacttgtagtacgctccgctatcaccccacggcgcttctcattcggagacttcattcgaccctttactatgttgcgctatctgtgtataggtctaccagcgatctactacatgacctgtctcgcttatggatcagtcctgttcgccacgacaagctcagtcgtatacaaggagttctaccacttcaatacgacgcagacaggccttatcttggctatcccacagattgtggggaccctgatcggtgaggctggcgcgggctggttcatcgatcggctcatgtaccttcacgcgaagcgtcataacggcgaaagaccacccgaggctcggcttaatgccttgggaattgctctgctacttcccattggggccataattaatggaatctgcattagtcactctaaaacttcaagctggattggaaacgcgttcggaatggctatcgctaatattgggttacaagtctcgacgactgtcgtctatgcgtactgcacagattgctataagcctcagagtgctgaggtgtctgccatcatcagcttcttccggcacatctttgctggcttggtgtccttctacgctctgccattagcagaggatatcggattccaatatgcatggctggtatttgcattgatcaatgtcgttttgctcgtaccattcagtttgcttcggtggaagggtcaggagatcagggccaggccatggcagaaaccgccaactgtgtacagaaatgactga

SEQ ID NO: 37721 - protein, 509 aa, Muscodor strobelii
  misc_feature: SGI Peptide ID NO. 573095
  misc_feature (66)..(454): Pfam Id: PF07690 Pfam Desc: Major Facilitator Superfamily
  misc_feature (62)..(496): Pfam Id: PF00083 Pfam Desc: Sugar (and other) transporter
  misc_feature (3)..(497): NCBI GI: 154323830 Blast Desc: BC1G_00314 [Botryotinia fuckeliana B05.10] gi|150842543|gb|EDN17736.1| BC1G_00314 [Botryotinia fuckeliana B05.10]
  misc_feature (22)..(497): NCBI GI: 156056621 Blast Desc: SS1G_04041 [Sclerotinia sclerotiorum 1980] gi|154701827|gb|EDO01566.1| SS1G_04041 [Sclerotinia sclerotiorum 1980]
  misc_feature (3)..(498): NCBI GI: 154309127 Blast Desc: BC1G_07458 [Botryotinia fuckeliana B05.10] gi|150852501|gb|EDN27693.1| BC1G_07458 [Botryotinia fuckeliana B05.10]
  misc_feature (5)..(496): NCBI GI: 189206706 Blast Desc: conserved [Pyrenophora tritici-repentis Pt-1C-BFP] gi|187975780|gb|EDU42406.1| conserved [Pyrenophora tritici-repentis Pt-1C-BFP]
  misc_feature (7)..(497): NCBI GI: 119499818 Blast Desc: MFS transporter, [Neosartorya fischeri NRRL 181] gi|119414831|gb|EAW24769.1| MFS transporter, [Neosartorya fischeri NRRL 181]
  misc_feature (33)..(495): NCBI GI: 115396792 Blast Desc: conserved [Aspergillus terreus NIH2624] gi|114193604|gb|EAU35304.1| conserved [Aspergillus terreus NIH2624]
  misc_feature (2)..(497): NCBI GI: 255950638 Blast Desc: Pc22g21910 [Penicillium chrysogenum Wisconsin 54-1255] gi|211593103|emb|CAP99479.1| Pc22g21910 [Penicillium chrysogenum Wisconsin 54-1255]
  misc_feature (2)..(495): NCBI GI: 145231180 Blast Desc: An01g14660 [Aspergillus niger] gi|134055984|emb|CAK44163.1| protein product [Aspergillus niger]
  misc_feature (33)..(495): NCBI GI: 169766804 Blast Desc: [Aspergillus oryzae RIB40] gi|83765728|dbj|BAE55871.1| protein product [Aspergillus oryzae]
  misc_feature (7)..(495): NCBI GI: 70993202 Blast Desc: MFS multidrug transporter [Aspergillus fumigatus Af293] gi|66849082|gb|EAL89410.1| MFS multidrug transporter, [Aspergillus fumigatus Af293] gi|159125619|gb|EDP50736.1| MFS
  misc_feature: Useful for introducing or modulating the production of volatile compounds
MANSSVDEKSEHASTHQTHGLSRSESQVPSLKLDKTGLPLSPQPSSHKDDPLNWSPALKLSICLQVSLLSLLGPLGSAVVNPAFVTLAEAFDVTPVQASYQLTVFLVFTATSPILVPPIANAYGRRLPIVAGAFLAAVTNIIAAYSPSWTGIHVTRAFNGIAVGWMTTLGPPTICDLWSVLHRYFLHERGFYMGIWALFVNNGAHIAPLLGGPIAQYLGWRWCFGIPGYIQLFFAVVVAFGLPETLYDRTAKTDYAKERSYWDLLVVRSAITPRRFSFGDFIRPFTMLRYLCIGLPAIYYMTCLAYGSVLFATTSSVVYKEFYHFNTTQTGLILAIPQIVGTLIGEAGAGWFIDRLMYLHAKRHNGERPPEARLNALGIALLLPIGAIINGICISHSKTSSWIGNAFGMAIANIGLQVSTTVVYAYCTDCYKPQSAEVSAIISFFRHIFAGLVSFYALPLAEDIGFQYAWLVFALINVVLLVPFSLLRWKGQEIRARPWQKPPTVYRND

SEQ ID NO: 37722 - DNA, 1525 bp, Muscodor strobelii
  misc_feature: SGI EST ID NO. CUFF.90388.0
  misc_feature: Variant of the nucleotide sequence at SEQ ID NO 37720
cttctatatggggatctgggcactattcgtgaataatggagcccatatagcgccacttctaggaggtccaatcgctcaatatctcgggtggaggtggtgttttggaatacccggatatatacaattattctttgcggttgttgttgcatttggactaccggaaacgctctatgaccggaccgcgaagacggactacgcaaaggaaagatcatattgggacttacttgtagtacgctccgctatcaccccacggcgcttctcattcggagacttcattcgaccctttactatgttgcgctatctgtgtataggtctaccagcgatctactacatgacctgtctcgcttatggatcagtcctgttcgccacgacaagctcagtcgtatacaaggagttctaccacttcaatacgacgcagacaggccttatcttggctatcccacagattgtggggaccctgatcggtgaggctggcgcgggctggttcatcgatcggctcatgtaccttcacgcgaagcgtcataacggcgaaagaccacccgaggctcggcttaatgccttgggaattgctctgctacttcccattggggccataattaatggaatctgcattagtcactctaaaacttcaagctggattggaaacgcgttcggaatggctatcgctaatattgggttacaagtctcgacgactgtcgtctatgcgtactgcacagattgctataagcctcagagtgctgaggtgtctgccatcatcagcttcttccggcacatctttgctggcttggtgtccttctacgctctgccattagcagaggatatcggattccaatatgcatggctggtatttgcattgatcaatgtcgttttgctcgtaccattcagtttgcttcggtggaagggtcaggagatcagggccaggccatggcagaaaccgccaactgtgtacagaaatgactgagtcttgttggtttctcgttggccagcttggagcgcctcgaagtatccctctaattcactagtggattcacaataaggcccatctacaaatactatttctaacacacaattacgcttgcagcctaagctctcttgtgggttacactcaaaacaccgtccacatactctcaaaatgtgggatgtcacttgtattagcgagagccgtaccattaccaagcagctttcaactttagcagtcaaatctcttattatctattgcattcgtagtgatagttctactacatcttgagccgacattcacatcgtctgtttcagctgttactccatcggcattcctgggatttgaacaagccctagtacgaatcagcaaaaagtacacattgagacttcggcagcgggcgtaacttacatccgtcaacatcttcgacagcagtttgtgcttgcgtgcatcgcatcgcttcctccgaagtctgtgttttgagttctttgcatacgctattggatacaagttagcacaccagtcaagatataaagaatagaatggcatatcacttacgcattatca

SEQ ID NO: 37723 - DNA, 1032 bp, Muscodor strobelii
  misc_feature: SGI cDNA ID NO. 573096
  misc_feature: Encodes the peptide sequence at SEQ ID NO 37724
atgcagtggtccgtaattctaacagcgctcttcgcgcaggcgtcagcccagcaaatgatccgcttcggatgctcgcagctagtcatcgagcgcgtcgaccctctcgtcaacccaggagtcgcagtttcgccgcatgtgcatcaagttgtgggcggaaattcgttcaactcgtcgatgtaccccgactcccatgatctcgtcgcggaatcaacatgtacgagctgcaccttcgccgaagacttttcgaactactggacggcagtgatgtacttcaaagcacggaacgggacgtacaaacgagtcccgcagttcgcaaacgtgggaattcgcgctgtcgggggaattactgtgtactatatcccgccgtatgatgggaagacaaacgtcactgctttcaagcctggattccggatgttggtcggtgatgcgcagctccagactgctactggtatgcagcgccaattgtgccatcgttgttatgagagcgcggatggcgctggggttgctggatcttcaggcggtgcgccctgtactggggatgattcacagagtttccctaaggctatgtgtaatggtgggattcgcactacaattacgttcccgacttgttgggatggtgtcaatgttgatagtcctgaccacaagagccatgttgcatatccgagcagcgggaccttcgagtctgttggaacatgccccagcagtcatcctgtgaggctacctcaactgatgtacgaagtgatgtgggataccacaccgttcaacgatcccgaattatggcccgaagatggctctcagccatttgtgtggagcaccggtgatggtaaaggattcagtcaacatggtgactatatgttcggttggaagggtgattctctgcaaagagcgttgaacgagcgctgtgataatgccgtatgcaaagaactcaaaacacagacttcggaggaagcgatgcgatgcacgcaagcacaaactgctgtcgaagatgttgacggatggcttgttcaaatcccaggaatgccgatggagtaa

SEQ ID NO: 37724 - protein, 343 aa, Muscodor strobelii
  misc_feature: SGI Peptide ID NO. 573096
  misc_feature (33)..(288): Pfam Id: PF09362 Pfam Desc: Domain of function (DUF1996)
  misc_feature (19)..(342): NCBI GI: 116203171 Blast Desc: CHGG_09470 [Chaetomium globosum CBS 148.51] gi|88177988|gb|EAQ85456.1| CHGG_09470 [Chaetomium globosum CBS 148.51]
  misc_feature (19)..(332): NCBI GI: 171694483 Blast Desc: protein product [Podospora anserina] gi|170947190|emb|CAP73995.1| protein product [Podospora anserina]
  misc_feature (1)..(332): NCBI GI: 171682738 Blast Desc: protein product [Podospora anserina] gi|170941328|emb|CAP66978.1| protein product [Podospora anserina]
  misc_feature (1)..(342): NCBI GI: 116191393 Blast Desc: CHGG_05414 [Chaetomium globosum CBS 148.51] gi|88181327|gb|EAQ88795.1| CHGG_05414 [Chaetomium globosum CBS 148.51]
  misc_feature (4)..(343): NCBI GI: 39941238 Blast Desc: MGG_05530 [Magnaporthe grisea 70-15] gi|145022203|gb|EDK06223.1| MGG_05530 [Magnaporthe grisea 70-15]
  misc_feature (18)..(342): NCBI GI: 116208376 Blast Desc: CHGG_03481 [Chaetomium globosum CBS 148.51] gi|88184078|gb|EAQ91546.1| CHGG_03481 [Chaetomium globosum CBS 148.51]
  misc_feature (19)..(332): NCBI GI: 171693385 Blast Desc: protein product [Podospora anserina] gi|170946641|emb|CAP73444.1| protein product [Podospora anserina]
  misc_feature (59)..(339): NCBI GI: 145611868 Blast Desc: MGG_00066 [Magnaporthe grisea 70-15] gi|145019100|gb|EDK03379.1| MGG_00066 [Magnaporthe grisea 70-15]
  misc_feature (1)..(342): NCBI GI: 164427037 Blast Desc: NCU02341 [Neurospora crassa OR74A] gi|157071579|gb|EAA30531.2| conserved [Neurospora crassa OR74A]
  misc_feature (1)..(342): NCBI GI: 189195938 Blast Desc: conserved [Pyrenophora tritici-repentis Pt-1C-BFP] gi|187980186|gb|EDU46812.1| conserved [Pyrenophora tritici-repentis Pt-1C-BFP]
MQWSVILTALFAQASAQQMIRFGCSQLVIERVDPLVNPGVAVSPHVHQVVGGNSFNSSMYPDSHDLVAESTCTSCTFAEDFSNYWTAVMYFKARNGTYKRVPQFANVGIRAVGGITVYYIPPYDGKTNVTAFKPGFRMLVGDAQLQTATGMQRQLCHRCYESADGAGVAGSSGGAPCTGDDSQSFPKAMCNGGIRTTITFPTCWDGVNVDSPDHKSHVAYPSSGTFESVGTCPSSHPVRLPQLMYEVMWDTTPFNDPELWPEDGSQPFVWSTGDGKGFSQHGDYMFGWKGDSLQRALNERCDNAVCKELKTQTSEEAMRCTQAQTAVEDVDGWLVQIPGMPME

SEQ ID NO: 37725 - DNA, 570 bp, Muscodor strobelii
  misc_feature: SGI EST ID NO. CUFF.90389.1
  misc_feature: Variant of the nucleotide sequence at SEQ ID NO 37723
tgtgataatgccgtatgcaaagaactcaaaacacagacttcggaggaagcgatgcgatgcacgcaagcacaaactgctgtcgaagatgttgacggatggcttgttcaaatcccaggaatgccgatggagtaacagctgaaacagacgatgtgaatgtcggctcaagatgtagtagaactatcactacgaatgcaatagataataagagatttgactgctaaagttgaaagctgcttggtaatggtacggctctcgctaatacaagtgacatcccacattttgagagtatgtggacggtgttttgagtgtaacccacaagagagcttaggctgcaagcgtaattgtgtgttagaaatagtatttgtagatgggccttattgtgaatccactagtgaattagagggatacttcgaggcgctccaagctggccaacgagaaaccaacaagactcagtcatttctgtacacagttggcggtttctgccatggcctggccctgatctcctgacccttccaccgaagcaaactgaatggtacgagcaaaacgacattgatcaatgcaaataccagc

SEQ ID NO: 37726 - DNA, 867 bp, Muscodor strobelii
  misc_feature: SGI cDNA ID NO. 573097
  misc_feature: Encodes the peptide sequence at SEQ ID NO 37727
atgcgacgaaacacggtacttatcgtcgttgagacgacggcagtactatttgcgcctgcgtatgctgcacgtgtatgtggctcttcaagtactccgtctacatacgcatggagagtcaacgatgcccggtacgacggcgatgatccgagtgcaaagagcgcctcagccgtcgtcgcaattggcatggctccgaccggtggcgctctctgtgaatgtgtcgcagagtggccggtgagctgggacggcagtcttgacagcaacatcgtctggagcgactgcatcttcacaggcgctggactcagtttggacacaagcgtttcttttggattggattggaaaaataggacgatgtatttctctcatacatatgcttgctcagacaataagggtaagagtacgactgcaggcctaagtgtgagcactaagtcagtgtcgtcaatcggatcgaatgcggcctgcgaagacaactcgaaagcatatcaatcttggcaacttgagaattggcatcgtcagtatgtccttgcacctggtagtaccacttcatctccgtcttcggatacgggcccgtcattcacgttaaggaacttggcgaacaatggaaccttcaattgtgcgcccaccaccaatactacggagaacatcttccaaggcaactgcatggcagccggtgcatcttctccatataatacttctgcatcattctattttgacccagaactagatatgttgtcaattactgagcagtacatgtgcggagggtcgacattgaatgccactggcgttgcttacatccaggcaaattgtgaccgccaaggcaacacattgtcgtgtaccacgcttcctctttggattggaacgaaggtgtag

SEQ ID NO: 37727 - protein, 288 aa, Muscodor strobelii
  misc_feature: SGI Peptide ID NO. 573097
  misc_feature (22)..(287): NCBI GI: 171694485 Blast Desc: protein product [Podospora anserina] gi|170947191|emb|CAP73996.1| protein product [Podospora anserina]
  misc_feature (1)..(251): NCBI GI: 116203169 Blast Desc: [Chaetomium globosum CBS 148.51] gi|88177987|gb|EAQ85455.1| [Chaetomium globosum CBS 148.51]
MRRNTVLIVVETTAVLFAPAYAARVCGSSSTPSTYAWRVNDARYDGDDPSAKSASAVVAIGMAPTGGALCECVAEWPVSWDGSLDSNIVWSDCIFTGAGLSLDTSVSFGLDWKNRTMYFSHTYACSDNKGKSTTAGLSVSTKSVSSIGSNAACEDNSKAYQSWQLENWHRQYVLAPGSTTSSPSSDTGPSFTLRNLANNGTFNCAPTTNTTENIFQGNCMAAGASSPYNTSASFYFDPELDMLSITEQYMCGGSTLNATGVAYIQANCDRQGNTLSCTTLPLWIGTKV

SEQ ID NO: 37728 - DNA, 966 bp, Muscodor strobelii
  misc_feature: SGI cDNA ID NO. 573098
  misc_feature: Encodes the peptide sequence at SEQ ID NO 37729
atggcgaggcaagcatgggatctggtgtcgactccgtttcagggaccagcaaaacccgactgttcgctgtgtaaacccatcaacgaatctccgcaccatcgcccgtccccgtacgaatgcctcggcacctcgacatttgctgagcagtgtatcggagtagcagcaaatcatctaaacgagttagacaccgattgtctcgacaacctcccttcccatttgttagtagacatatgggaatttgtgacaacccataaaaaagccttgtcgttcaaagcttggaagctcttcgccaccaggctgtctcgagacaaagctactgcccaatgcatgtcctactctttaatgagatggttctcttcaattcctggcgatctcgtggtatcacttgccgaagttctctcacctctcgcctcgaatactattgactttcttactcacctcactattgcgggccacgtgagtattgaaacccatgatctactccaattaagtcagttgaggaatttggccgtattggaggtcatcgaaccacttccagatcctgaggttatcagtgagtttccccaactgaatgactcgatcgtccgcgaatgggcatggcagaccgatcccttcccatcactgagaatattaagggtctgggggtggcacttcactaccacccgatccttccagtacctcgatgattttccttccttggtaatgtacgatgttgcgggcaaagaggacgattggagagatagggacgacttctctgcatcctgggcctgcaagacccataagacgtcgggaacgattgaggttctgatgaaacacgcaaaacagctttctgcaaatcccgatgatgtactcgttcgttcgattggaaaactcggcaacaaccgggagattccgggacagtatcattactccattccaaagcaagacgttgagagacgagtggtcaaaaacaggggggaaggctaa

SEQ ID NO: 37729 - protein, 321 aa, Muscodor strobelii
  misc_feature: SGI Peptide ID NO. 573098
  misc_feature (42)..(272): NCBI GI: 256732909 Blast Desc: NECHADRAFT_78677 [Nectria haematococca mpVI 77-13-4]
  misc_feature (42)..(245): NCBI GI: 46123931 Blast Desc: FG06343.1 [Gibberella zeae PH-1]
  misc_feature (42)..(245): NCBI GI: 261361201 Blast Desc: conserved [Verticillium albo-atrum VaMs.102]
  misc_feature (56)..(238): NCBI GI: 154313304 Blast Desc: [Botryotinia fuckeliana B05.10] gi|150849418|gb|EDN24611.1| [Botryotinia fuckeliana B05.10]
  misc_feature (56)..(238): NCBI GI: 156043012 Blast Desc: SS1G_11306 [Sclerotinia sclerotiorum 1980] gi|154695690|gb|EDN95428.1| SS1G_11306 [Sclerotinia sclerotiorum 1980]
  misc_feature (42)..(240): NCBI GI: 116203697 Blast Desc: CHGG_09732 [Chaetomium globosum CBS 148.51] gi|88175860|gb|EAQ83328.1| CHGG_09732 [Chaetomium globosum CBS 148.51]
  misc_feature (1)..(235): NCBI GI: 121702455 Blast Desc: ACLA_027910 [Aspergillus clavatus NRRL 1] gi|119397635|gb|EAW08066.1| ACLA_027910 [Aspergillus clavatus NRRL 1]
  misc_feature (158)..(240): NCBI GI: 261206256 Blast Desc: conserved [Ajellomyces dermatitidis SLH14081] gi|239592924|gb|EEQ75505.1| conserved [Ajellomyces dermatitidis SLH14081]
  misc_feature (158)..(240): NCBI GI: 239610903 Blast Desc: conserved [Ajellomyces dermatitidis ER-3]
  misc_feature (93)..(240): NCBI GI: 226281876 Blast Desc: CBS domain-containing protein [Paracoccidioides brasiliensis Pb01]
MARQAWDLVSTPFQGPAKPDCSLCKPINESPHHRPSPYECLGTSTFAEQCIGVAANHLNELDTDCLDNLPSHLLVDIWEFVTTHKKALSFKAWKLFATRLSRDKATAQCMSYSLMRWFSSIPGDLVVSLAEVLSPLASNTIDFLTHLTIAGHVSIETHDLLQLSQLRNLAVLEVIEPLPDPEVISEFPQLNDSIVREWAWQTDPFPSLRILRVWGWHFTTTRSFQYLDDFPSLVMYDVAGKEDDWRDRDDFSASWACKTHKTSGTIEVLMKHAKQLSANPDDVLVRSIGKLGNNREIPGQYHYSIPKQDVERRVVKNRGEG

SEQ ID NO: 37730 - DNA, 1859 bp, Muscodor strobelii
  misc_feature: SGI EST ID NO. CUFF.90359.0
  misc_feature: Variant of the nucleotide sequence at SEQ ID NO 37728
cgcaccttagtgcgcaatattgctggcaaactaatccgaaatattagtcgaacgtttatccggagtcttgcggtgccatatatttcctgcatagcctggtaggtaccgtaggtatagcaacagcacccacgccctaggtagccaaaaatgagtgatacacttcctcatctatcccatagcaacgccagtacctggttgattatttgggtttcccttggtgtatattttggggtgtaactcgccatccttacccttctggtatttgacagtagcctcaaaatggcgaggcaagcatgggatctggtgtcgactccgtttcagggaccagcaaaacccgactgttcgctgtgtaaacccatcaacgaatctccgcaccatcgcccgtccccgtacgaatgcctcggcacctcgacatttgctgagcagtgtatcggagtagcagcaaatcatctaaacgagttagacaccgattgtctcgacaacctcccttcccatttgttagtagacatatgggaatttgtgacaacccataaaaaagccttgtcgttcaaagcttggaagctcttcgccaccaggctgtctcgagacaaagctactgcccaatgcatgtcctactctttaatgagatggttctcttcaattcctggcgatctcgtggtatcacttgccgaagttctctcacctctcgcctcgaatactattgactttcttactcacctcactattgcgggccacgtgagtattgaaacccatgatctactccaattaagtcagttgaggaatttggccgtattggaggtcatcgaaccacttccagatcctgaggttatcagtgagtttccccaactgaatgactcgatcgtccgcgaatgggcatggcagaccgatcccttcccatcactgagaatattaagggtctgggggtggcacttcactaccacccgatccttccagtacctcgatgattttccttccttggtaatgtacgatgttgcgggcaaagaggacgattggagagatagggacgacttctctgcatcctgggcctgcaagacccataagacgtcgggaacgattgaggttctgatgaaacacgcaaaacagctttctgcaaatcccgatgatgtgagtactcgttcgttcgattggaaaactcggcaacaaccgggagattccgggacagtatcattactccattccaaagcaagacgttgagagacgagtggtcaaaaacaggggggaaggctaacatgctctcacgctataggaacattgggaggaatcatttctgcgttgccgggatgacatttcgactagtttccagaacaggattctcgcagatctcgagcacacactatcagaccccgatatgagttgtgatccgcagcccggattagaatttctcttatacaagggaaagcttcacgatgatggccttatgttctttctcctctactgttatatcggagcaatgatatcaaacagggatcttcaagaccttgggatcactccttgggatcacttaacgtcacacaacaagacggttgtcccagcccttccgatggccagcctaactattggaaagcgcccatcaatcaaagactgtaaagaggctttcgaagtacaatacacgtttactaaaaaacaatatcaaaaggagaaatcgaagacttcctcatcgaccccgaaatccccacagtctaagagcaagaaaaggaacgtctcgtccgcttgttcgcagccaagaaaacgacgtgacgtatggggattactggagtcatttagatgatcagtcagagttacaattcttagaaagtgatgggaagcatagaagagatctcacagaggtgagactggtg

SEQ ID NO: 37731 - DNA, 912 bp, Muscodor strobelii
  misc_feature: SGI cDNA ID NO. 573099
  misc_feature: Encodes the peptide sequence at SEQ ID NO 37732
atgattcttcgaacacccatcctcgtcttctcctcgtgcccgcatctcctcacttcgccaacatattgcatcacgtcatcatcttgcggctggcaacggtctcgaaattgcaactacagttacgaatgcgtgccctgccgaaggtcactacgaccacgggcctcaacgtacattcgttcctatgcctccatatcagactcacgtgaagggcccgatccctctgctacagatcaccacgaatggccttcagcgccgcatcctacaccttacgatatctttgcccagccccgagatgcccggtataataaggctatctactacgagctcgtcaagatctaccatccggacaggatccatgcctctgtcaattcttccgtggccccggccgttcggctcgagcgctatcgcttgattgtcgctgccaacgagatcctgagcgatcccgtcaagcgcaaagcctacgatctctacggcgccggctgggataacaaccgctccatggaatctctatatcgcgaggcagacaagagatggcgcagcgagccaggcaaccccagcatgaatgccacttgggaagactgggacaggtggtatcgcgagaagaaaggcgagaaaccaccacagacacccatgtacatgtccaacgaactattcgtcgtccttctgtgtgcattcgttgtcgccggcagcatggcccaggcgagacgcgccaattccaacaccatgagcatcgtggagatgcgagagcaaagctctatagccatcagcggtgacatgagaaggaggcagagcgagcaggctttattaaacagacatgagcgagttgagagcttcttgaggcagagagacggatggaacgttgcctcgtctgcaactttggatcatgcagccgacgatacacaaaccaaatga

SEQ ID NO: 37732 - protein, 303 aa, Muscodor strobelii
  misc_feature: SGI Peptide ID NO. 573099
  misc_feature (88)..(155): Pfam Id: PF00226 Pfam Desc: DnaJ domain
  misc_feature (103)..(155): Pfam Id: PF00226 Pfam Desc: DnaJ domain
  misc_feature (45)..(286): NCBI GI: 85095058 Blast Desc: NCU06150 [Neurospora crassa OR74A] gi|28921470|gb|EAA30776.1| [Neurospora crassa OR74A]
  misc_feature (52)..(283): NCBI GI: 171681519 Blast Desc: protein product [Podospora anserina] gi|170940718|emb|CAP65946.1| protein product [Podospora anserina]
  misc_feature (2)..(282): NCBI GI: 156043006 Blast Desc: SS1G_11303 [Sclerotinia sclerotiorum 1980] gi|154695687|gb|EDN95425.1| SS1G_11303 [Sclerotinia sclerotiorum 1980]
  misc_feature (59)..(288): NCBI GI: 46123405 Blast Desc: FG06080.1 [Gibberella zeae PH-1]
  misc_feature (40)..(288): NCBI GI: 256733026 Blast Desc: NECHADRAFT_100012 [Nectria haematococca mpVI 77-13-4]
  misc_feature (87)..(282): NCBI GI: 154313308 Blast Desc: BC1G_05351 [Botryotinia fuckeliana B05.10] gi|150849420|gb|EDN24613.1| BC1G_05351 [Botryotinia fuckeliana B05.10]
  misc_feature (59)..(283): NCBI GI: 39942618 Blast Desc: MGG_03389 [Magnaporthe grisea 70-15] gi|145015594|gb|EDK00084.1| MGG_03389 [Magnaporthe grisea 70-15]
  misc_feature (81)..(283): NCBI GI: 189194615 Blast Desc: conserved [Pyrenophora tritici-repentis Pt-1C-BFP] gi|187979210|gb|EDU45836.1| conserved [Pyrenophora tritici-repentis Pt-1C-BFP]
  misc_feature (80)..(284): NCBI GI: 169618122 Blast Desc: SNOG_12248 [Phaeosphaeria nodorum SN15] gi|111059540|gb|EAT80660.1| SNOG_12248 [Phaeosphaeria nodorum SN15]
  misc_feature (81)..(288): NCBI GI: 261194062 Blast Desc: conserved [Ajellomyces dermatitidis SLH14081] gi|239588450|gb|EEQ71093.1| conserved [Ajellomyces dermatitidis SLH14081]
MILRTPILVFSSCPHLLTSPTYCITSSSCGWQRSRNCNYSYECVPCRRSLRPRASTYIRSYASISDSREGPDPSATDHHEWPSAPHPTPYDIFAQPRDARYNKAIYYELVKIYHPDRIHASVNSSVAPAVRLERYRLIVAANEILSDPVKRKAYDLYGAGWDNNRSMESLYREADKRWRSEPGNPSMNATWEDWDRWYREKKGEKPPQTPMYMSNELFVVLLCAFVVAGSMAQARRANSNTMSIVEMREQSSIAISGDMRRRQSEQALLNRHERVESFLRQRDGWNVASSATLDHAADDTQTK

SEQ ID NO: 37733 - DNA, 6010 bp, Muscodor strobelii
  misc_feature: SGI EST ID NO. CUFF.90649.0
  misc_feature: Variant of the nucleotide sequence at SEQ ID NO 37731
ctcagatcgttcttctggtttagagctcctctatcacatcaaaccctagtcatcattacttgttgtgcttgctagttgtgtctgaactttgactgagggatcaggccaaagatcaaaatggcacctgatgttgtttgagcactgatcgtagttaacacacgcagagtatttagaatgtaacattcaggcttaggactatgctcaggaaacttagatgactgaagagcacttcaatgtttaccttagctacctggaagaccctaaatccgtgtgcgggcatcaagcgcaaagcaccgatccccgccgccgtggtccactaaaacagattagtccttaggtggtgtcgtcaactgtcgtcaaccatagctctttcaacttcttgtccctctcatgtcttatttcgtttacctattccatgccaccatgagaaccgtacatacttcacaaatcgtaaatatcgcagtaatatgactttaaataaaacatgattcttcgaacacccatcctcgtcttctcctcgtgcccgcatctcctcacttcgccaacatattgcatcacgtcatcatcttgcggctggcaacggtctcgaaattgcaactacagttacgaatgcgtgccctgccgaaggtcactacgaccacgggcctcaacgtacattcgttcctatgcctccatatcagactcacgtgaagggcccgatccctctgctacagatcaccacgaatggccttcagcgccgcatcctacaccttacgatatctttgcccagccccgagatgcccggtataataaggctatctactacgagctcgtcaagatctaccatccggacaggatccatgcctctgtcaattcttccgtggccccggccgttcggctcgagcgctatcgcttgattgtcgctgccaacgagatcctgagcgatcccgtcaagcgcaaagcctacgatctctacggcgccggctgggataacaaccgctccatggaatctctatatcgcgaggcagacaagagatggcgcagcgagccaggcaaccccagcatgaatgccacttgggaagactgggacaggtggtatcgcgagaagaaaggcgagaaaccaccacagacacccatgtacatgtccaacgaactattcgtcgtccttctgtgtgcattcgttgtcgccggcagcatggcccaggcgagacgcgccaattccaacaccatgagcatcgtggagatgcgagagcaaagctctatagccatcagcggtgacatgagaaggaggcagagcgagcaggctttattaaacagacatgagcgagttgagagcttcttgaggcagagagacggatggaacgttgcctcgtctgcaactttggatcatgcagccgacgatacacaaaccaaatgaacgtctgcctatacagcaacatgtttcaaactttgtctgtagacggagaaggcgcgtctgccattatcggtgatggtagcaatctagtcgcaacagagactaggtgtgagtgacgcggtatcatacgataacgagctacctaggtatgctcaaacttaccaatttctatgttgggttggaagagcaaacaagctgaaacagctcaatctatttgatgacgattcaaccgaacgccaatttcagcctcttcaggcgttcaaaaggcaactaggggggccgcatgcacgctgcacgacatcaaaacggccatcactcacactaattgaggatcggggtaggggttctgactggccgtgccgtggttacactgcgactatcgcggggagttgctcctacccaacagcccgagtccgtcacgcggcttctgattcgaggggcgattgcggtctagaccgagtccatgcaggccctttgtatcgtctctgcttgcttatatcgcatactacacgtactccggactcacgagcttctcattttcacaccgaggcctggagatcggaacatcgaacgatgcactctcctcaattttcttttcgttgtccctcacgccttgtcctgtccgtcaagagctgatcattccggtcttggcaatccacactggatcggtccatcgctccctcctcttctctcaagcgggaaagtgatcgacttagctccccgagttgttccatctcccccattaaccagccaccaaccaagttatcacaattcgctaaccacaaggttattttgataccgagattcatccttgcgctacgccctgcctcaaaacttaatatcccgcacccaccatggtgcttcgtagcgtatcgcttcccgctcacaaccagcacacgcacactgtcatcttcctccacggccgtggatcaaatgctcgggagttcagcgaggagttgtgggagaatcatgatcgtcgcggggagacactacagcacatcttcccgtcagtaagatgggtatttccgcaggccgatgagagctatctcgagcgattccaggagtatctttcgcagtggttcgacatctggggctatgataacccggacgagcgccgcgaacttcaagtgccgggcttaaaggaggtcacgccaaaactcatccgcctaatacagggtgaagccgccgtggtcggactgcagaacattgtgctcgcaggcatatcgcagggctgtacgacggctattcacggtctcttgaactatcccataccgaccggtggagacgaaggtcagcgtatgtgtgccttcatcgggctgtctagttggatgtcccttggtactggctcggtgaaagaggcccgagaattgttagcgcccgaagggttgacggctggacccagtgatgtgatatttcgcaacacgccgacattcctttgccacaacgcagatgatcaaaccgtgcccgttgaacaagggagacgactgagagatatcctgaaggggtatggtatggatgtcaaatggaaagaatatccgacaggcgggcactggatcaacacgccgcaatgcatcgacgatgtcgtcgcattccttaagagtcaggggttggcggcgaaatgagcacaacaaaaaagacatagggacatactacagggaacgaggttcattgagcattttcggtcttcttattcgatagcgcgaggcgttgaggtatatactactcatcatggttttgaacgggtcacgtatgacatacaacaagagatgtaatttgatgaccgcgacggctcggcgccgtgatgcagtgcacccgtcggcgatatgggactcttgctcggggatttatgagtgtgctgtaatggatgttgtgaggagtgatgacacgagggccgaaggggagtgcctgatacatttacaatttacacatgtacccgtaatcaagtttatacctcgtcgtcgctctgtgatctcatacgatgcccgtactcaaatgacctacccaatacagtcggtagtacccaatctagaacacgagccagctaccaacctaaccaattatgtgccgctcaagattgtaatgacagttcagagtttaacaatatgcttgacgggtatcattctatagatattcatacacgctggatatgtatcatacagcgactatctatacacactcgtattcttttcatacttgtctcatatcccttccaccgttctttcaccccttcaacctcggcccatagaccgtctcaatccgttccctaaggaccttctcagcactcttaggatcaatcctctcctcctggccaagcgcaatcatgcgtccaacgaggaacatcagtttgccctgtggcaagatctccgcctctaccagcattctcaaaactttatcctggccttcgaccgccttatcagccaagtcattatactcctcggtgctcaactcctggaactgcagattctctctttcgatagcgatttcgacggtggggtattcccggggtatacgacctcggtatatggcccagaggagttctttagctactttggcggtgatttgacgcgtgtggagagagtagattagggatgcgaagtgctccgccgggacttgggcgcagtgaccggattcggtgaatgttagagtggaagaggaggagacgctgtcgctaccgctgtcgctacgttcggatgttaggcggccgagttcgtggagggtccagttcgctgctaggaggaagctggatttcaattcttccagggattgcttgatggggaaaagagagcgcaggtgtgatgtcacggtgtagaaatactcgactctacacccgttgtcgagcgatacgagggacattgcgtcctttgaggagaggccgtaggaggatatgagttcggtgattattacgtcggggagcagcggcatggtggtagagaggtgggtgatcagatcggtgccgatgagtaaggggggaacgtcgggatcgggcatgtagcggtagtcgacttctccttcttttcccctgagtcgtcgggtttctgtcgagcctatggaccacccgcgggtttcgcccgcgatggtgccgcccgcttcgaggacggcgatttgtcggtcgcgctcggcgattatggcgtcttcgacggctttgaaactgcttaggttcttgatctctgttcgttggcctaggggcgtgtttgggtcgtcggttcgccggacggagacgttgatgtctgctcgtagaccgccggtctccatgcccgagacgcaggcgtcgacggcgttgaggagggtctggactctgcgcacgaaggctgctgcggtggctgggtggtggattacggggtgggttatgatttcgatgaggggcatgccgacgcggttgaagtctatccagtggacgccgccgggctgggcgagggttttggctgtgtcctgttccatctgtatctgcttgatgcctaccgagaccatctccccgtcctcagctgcaatgccgtcgcggggcagtagatcgatggttccatcgcgtgcgaagggctcgtagtactgcgtgatctggtagcctgacggctggtcccagtggaagtagtgcttccggtcgaagcggctcacgggctggacggcgcattgcagagcgagggcggcgcgcaaggctgggatgagcgtctctttctggaagatgggctggctgccaggcgtggcaaggtcgaagtatgcgacgttggtattcggctcgtcgttgaaggatgttggcgcatcagagaagagcttcttggccgtgttgagctgggcgtggatctcgattccgactgtcaattcccatccttcgactacctgattgttcacattcttctttttcttctttcctgaagctttccggctttttgcttcatcttttaactgtttgcgcagtggaacatggcctagcgtacgcgcatcaggtgtgggttgaactgtttcggtgtgtagaggtcgacttgatgttgaagtttggagtgtgagagagaccaagtgaggtctggttctaattcgtagacatcctcggcttatcaactggccattgggcagatatctgcttaaaattgccggtcgaaagtgaggcatcgcagccagtataaggccatccagtttgaagacctttgcagctgtcgttgaagcccggttgcagcacatatatctaaaggcttcaaattctgacgtctgtcgcaaaacagtcgatttccgctaaagctcaacgatgtaagtgctagcttcagtggagacctccgctaaacatgaaccaagccagtgggaatcaaacccgccaagaagcgcgaggtccgaatacctactcgctagggtcacgcgctctcatcctatcaagctgcatcgtcacggcctgcaggggtaaacctcgacaattgacgactgagatatccttgctctcgtagatgctatgaaacatcgctattctagtccgtacatttgttttctttggtgcctctcagcttcaccttgcgcgccattcccggcttacctagctcacggtagtttttggtcgagagacttgattcgaggcttgatcacaccaccaactgtctgctcactgcctctattgccctcgattgcttctccggtagc

SEQ ID NO: 37734 - DNA, 768 bp, Muscodor strobelii
  misc_feature: SGI cDNA ID NO. 573100
  misc_feature: Reduced expression when VOC is produced
  misc_feature: Encodes the peptide sequence at SEQ ID NO 37735
atggtgcttcgtagcgtatcgcttcccgctcacaaccagcacacgcacactgtcatcttcctccacggccgtggatcaaatgctcgggagttcagcgaggagttgtgggagaatcatgatcgtcgcggggagacactacagcacatcttcccgtcagtaagatgggtatttccgcaggccgatgagagctatctcgagcgattccaggagtatctttcgcagtggttcgacatctggggctatgataacccggacgagcgccgcgaacttcaagtgccgggcttaaaggaggtcacgccaaaactcatccgcctaatacagggtgaagccgccgtggtcggactgcagaacattgtgctcgcaggcatatcgcagggctgtacgacggctattcacggtctcttgaactatcccataccgaccggtggagacgaaggtcagcgtatgtgtgccttcatcgggctgtctagttggatgtcccttggtactggctcggtgaaagaggcccgagaattgttagcgcccgaagggttgacggctggacccagtgatgtgatatttcgcaacacgccgacattcctttgccacaacgcagatgatcaaaccgtgcccgttgaacaagggagacgactgagagatatcctgaaggggtatggtatggatgtcaaatggaaagaatatccgacaggcgggcactggatcaacacgccgcaatgcatcgacgatgtcgtcgcattccttaagagtcaggggttggcggcgaaatga

SEQ ID NO: 37735 - protein, 255 aa, Muscodor strobelii
  misc_feature: SGI Peptide ID NO. 573100
  misc_feature (3)..(251): Pfam Id: PF02230 Pfam Desc: Phospholipase/Carboxylesterase
  misc_feature (188)..(232): Pfam Id: PF02230 Pfam Desc: Phospholipase/Carboxylesterase
  misc_feature (3)..(248): NCBI GI: 256726082 Blast Desc: NECHADRAFT_70183 [Nectria haematococca mpVI 77-13-4]
  misc_feature (7)..(252): NCBI GI: 39970873 Blast Desc: MGG_02903 [Magnaporthe grisea 70-15] gi|149210379|ref|XP_001522564.1| MGCH7_ch7g667 [Magnaporthe grisea 70-15] gi|86196622|gb|EAQ71260.1| MGCH7_ch7g667 grisea
  misc_feature (11)..(255): NCBI GI: 261361415 Blast Desc: phospholipase/Carboxylesterase [Verticillium albo-atrum VaMs.102]
  misc_feature (2)..(250): NCBI GI: 171681028 Blast Desc: protein product [Podospora anserina] gi|170940472|emb|CAP65699.1| protein product [Podospora anserina]
  misc_feature (11)..(249): NCBI GI: 240281696 Blast Desc: conserved [Ajellomyces capsulatus H143]
  misc_feature (8)..(248): NCBI GI: 189190398 Blast Desc: conserved [Pyrenophora tritici-repentis Pt-1C-BFP] gi|187973144|gb|EDU40643.1| conserved [Pyrenophora tritici-repentis Pt-1C-BFP]
  misc_feature (12)..(212): NCBI GI: 156056212 Blast Desc: SS1G_05458 [Sclerotinia sclerotiorum 1980] gi|154703242|gb|EDO02981.1| SS1G_05458 [Sclerotinia sclerotiorum 1980]
  misc_feature (11)..(249): NCBI GI: 225558828 Blast Desc: conserved [Ajellomyces capsulatus G186AR]
  misc_feature (18)..(251): NCBI GI: 169599030 Blast Desc: SNOG_02327 [Phaeosphaeria nodorum SN15] gi|111069419|gb|EAT90539.1| SNOG_02327 [Phaeosphaeria nodorum SN15]
  misc_feature (14)..(249): NCBI GI: 238837541 Blast Desc: conserved [Microsporum canis CBS 113480]
  misc_feature (18)..(247): SWISSPROT Homolog: EC 3.1.1.1 Carboxylesterase
  misc_feature: Useful for introducing or modulating the production of volatile compounds
MVLRSVSLPAHNQHTHTVIFLHGRGSNAREFSEELWENHDRRGETLQHIFPSVRWVFPQADESYLERFQEYLSQWFDIWGYDNPDERRELQVPGLKEVTPKLIRLIQGEAAVVGLQNIVLAGISQGCTTAIHGLLNYPIPTGGDEGQRMCAFIGLSSWMSLGTGSVKEARELLAPEGLTAGPSDVIFRNTPTFLCHNADDQTVPVEQGRRLRDILKGYGMDVKWKEYPTGGHWINTPQCIDDVVAFLKSQGLAAK

SEQ ID NO: 37736 - DNA, 6010 bp, Muscodor strobelii; identical to SEQ ID NO: 37733
  misc_feature: SGI EST ID NO. CUFF.90649.0
  misc_feature: Variant of the nucleotide sequence at SEQ ID NO 37734

SEQ ID NO: 37737 - DNA, 1881 bp, Muscodor strobelii
  misc_feature: SGI cDNA ID NO. 573101
  misc_feature: Reduced expression when VOC is produced
  misc_feature: Encodes the peptide sequence at SEQ ID NO 37738
atgcctcactttcgaccggcaattttaagcagatatctgcccaatggccagttgataagccgaggatgtctacgaattagaaccagacctcacttggtctctctcacactccaaacttcaacatcaagtcgacctctacacaccgaaacagttcaacccacacctgatgcgcgtacgctaggccatgttccactgcgcaaacagttaaaagatgaagcaaaaagccggaaagcttcaggaaagaagaaaaagaagaatgtgaacaatcaggtagtcgaaggatgggaattgacagtcggaatcgagatccacgcccagctcaacacggccaagaagctcttctctgatgcgccaacatccttcaacgacgagccgaataccaacgtcgcatacttcgaccttgccacgcctggcagccagcccatcttccagaaagagacgctcatcccagccttgcgcgccgccctcgctctgcaatgcgccgtccagcccgtgagccgcttcgaccggaagcactacttccactgggaccagccgtcaggctaccagatcacgcagtactacgagcccttcgcacgcgatggaaccatcgatctactgccccgcgacggcattgcagctgaggacggggagatggtctcggtaggcatcaagcagatacagatggaacaggacacagccaaaaccctcgcccagcccggcggcgtccactggatagacttcaaccgcgtcggcatgcccctcatcgaaatcataacccaccccgtaatccaccacccagccaccgcagcagccttcgtgcgcagagtccagaccctcctcaacgccgtcgacgcctgcgtctcgggcatggagaccggcggtctacgagcagacatcaacgtctccgtccggcgaaccgacgacccaaacacgcccctaggccaacgaacagagatcaagaacctaagcagtttcaaagccgtcgaagacgccataatcgccgagcgcgaccgacaaatcgccgtcctcgaagcgggcggcaccatcgcgggcgaaacccgcgggtggtccataggctcgacagaaacccgacgactcaggggaaaagaaggagaagtcgactaccgctacatgcccgatcccgacgttccccccttactcatcggcaccgatctgatcacccacctctctaccaccatgccgctgctccccgacgtaataatcaccgaactcatatcctcctacggcctctcctcaaaggacgcaatgtccctcgtatcgctcgacaacgggtgtagagtcgagtatttctacaccgtgacatcacacctgcgctctcttttccccatcaagcaatccctggaagaattgaaatccagcttcctcctagcagcgaactggaccctccacgaactcggccgcctaacatccgaacgtagcgacagcggtagcgacagcgtctcctcctcttccactctaacattcaccgaatccggtcactgcgcccaagtcccggcggagcacttcgcatccctaatctactctctccacacgcgtcaaatcaccgccaaagtagctaaagaactcctctgggccatataccgaggtcgtataccccgggaataccccaccgtcgaaatcgctatcgaaagagagaatctgcagttccaggagttgagcaccgaggagtataatgacttggctgataaggcggtcgaaggccaggataaagttttgagaatgctggtagaggcggagatcttgccacagggcaaactgatgttcctcgttggacgcatgattgcgcttggccaggaggagaggattgatcctaagagtgctgagaaggtccttagggaacggattgagacggtctatgggccgaggttgaaggggtga

SEQ ID NO: 37738 - protein, 626 aa, Muscodor strobelii
  misc_feature: SGI Peptide ID NO. 573101
  misc_feature (357)..(425): Pfam Id: PF01162 Pfam Desc: PET112 family, C terminal region
  misc_feature (93)..(340): Pfam Id: PF02934 Pfam Desc: PET112 family, N terminal region
  misc_feature (446)..(616): Pfam Id: PF02637 Pfam Desc: GatB domain
  misc_feature (9)..(619): NCBI GI: 261354972 Blast Desc: aspartyl/glutamyl-tRNA(Asn/Gln) amidotransferase subunit B [Verticillium albo-atrum VaMs.102]
  misc_feature (1)..(625): NCBI GI: 85091582 Blast Desc: NCU09025 [Neurospora crassa OR74A] gi|28920366|gb|EAA29736.1| NCU09025 [Neurospora crassa OR74A]
  misc_feature (1)..(619): NCBI GI: 46123401 Blast Desc: FG06078.1 [Gibberella zeae PH-1]
  misc_feature (1)..(619): NCBI GI: 256732581 Blast Desc: [Nectria haematococca mpVI 77-13-4]
  misc_feature (9)..(625): NCBI GI: 171679733 Blast Desc: protein product [Podospora anserina] gi|170939492|emb|CAP64720.1| protein product [Podospora anserina]
  misc_feature (9)..(618): NCBI GI: 39942620 Blast Desc: MGG_03390 [Magnaporthe grisea 70-15] gi|145015593|gb|EDK00083.1| MGG_03390 [Magnaporthe grisea 70-15]
  misc_feature (4)..(616): NCBI GI: 67524885 Blast Desc: GATB_EMENI glutamyl-tRNA(Gln) amidotransferase subunit B, mitochondrial precursor (GLU-ADT subunit B) (NEMPA protein) [Aspergillus nidulans FGSC A4] gi|40744295|gb|EAA63471.1| subunit
  misc_feature (4)..(616): NCBI GI: 238054286 Blast Desc: GATB_EMENI glutamyl-tRNA(Gln) amidotransferase subunit B, mitochondrial precursor (GLU-ADT subunit B) (NEMPA protein) [Aspergillus nidulans FGSC A4] gi|40744295|gb|EAA63471.1| subunit
  misc_feature (1)..(498): NCBI GI: 154295134 Blast Desc: BC1G_13510 [Botryotinia fuckeliana B05.10] gi|150844193|gb|EDN19386.1| BC1G_13510 [Botryotinia fuckeliana B05.10]
  misc_feature (22)..(616): NCBI GI: 119491596 Blast Desc: glutamyl-tRNA(Gln) amidotransferase, B subunit [Neosartorya fischeri NRRL 181] gi|119411479|gb|EAW21422.1| glutamyl-tRNA(Gln) amidotransferase, B subunit [Neosartorya NRRL
  misc_feature: Useful for introducing or modulating the production of volatile compounds
MPHFRPAILSRYLPNGQLISRGCLRIRTRPHLVSLTLQTSTSSRPLHTETVQPTPDARTLGHVPLRKQLKDEAKSRKASGKKKKKNVNNQVVEGWELTVGIEIHAQLNTAKKLFSDAPTSFNDEPNTNVAYFDLATPGSQPIFQKETLIPALRAALALQCAVQPVSRFDRKHYFHWDQPSGYQITQYYEPFARDGTIDLLPRDGIAAEDGEMVSVGIKQIQMEQDTAKTLAQPGGVHWIDFNRVGMPLIEIITHPVIHHPATAAAFVRRVQTLLNAVDACVSGMETGGLRADINVSVRRTDDPNTPLGQRTEIKNLSSFKAVEDAIIAERDRQIAVLEAGGTIAGETRGWSIGSTETRRLRGKEGEVDYRYMPDPDVPPLLIGTDLITHLSTTMPLLPDVIITELISSYGLSSKDAMSLVSLDNGCRVEYFYTVTSHLRSLFPIKQSLEELKSSFLLAANWTLHELGRLTSERSDSGSDSVSSSSTLTFTESGHCAQVPAEHFASLIYSLHTRQITAKVAKELLWAIYRGRIPREYPTVEIAIERENLQFQELSTEEYNDLADKAVEGQDKVLRMLVEAEILPQGKLMFLVGRMIALGQEERIDPKSAEKVLRERIETVYGPRLKG

SEQ ID NO: 37739 - DNA, 6010 bp, Muscodor strobelii
  misc_feature: SGI EST ID NO. CUFF.90649.0
  misc_feature: Variant of the nucleotide sequence at SEQ ID NO 37737
gctaccggagaagcaatcgagggcaatagaggcagtgagcagacagttggtggtgtgatcaagcctcgaatcaagtctctcgaccaaaaactaccgtgagctaggtaagccgggaatggcgcgcaaggtgaagctgagaggcaccaaagaaaacaaatgtacggactagaatagcgatgtttcatagcatctacgagagcaaggatatctcagtcgtcaattgtcgaggtttacccctgcaggccgtgacgatgcagcttgataggatgagagcgcgtgaccctagcgagtaggtattcggacctcgcgcttcttggcgggtttgattcccactggcttggttcatgtttagcggaggtctccactgaagctagcacttacatcgttgagctttagcggaaatcgactgttttgcgacagacgtcagaatttgaagcctttagatatatgtgctgcaaccgggcttcaacgacagctgcaaaggtcttcaaactggatggccttatactggctgcgatgcctcactttcgaccggcaattttaagcagatatctgcccaatggccagttgataagccgaggatgtctacgaattagaaccagacctcacttggtctctctcacactccaaacttcaacatcaagtcgacctctacacaccgaaacagttcaacccacacctgatgcgcgtacgctaggccatgttccactgcgcaaacagttaaaagatgaagcaaaaagccggaaagcttcaggaaagaagaaaaagaagaatgtgaacaatcaggtagtcgaaggatgggaattgacagtcggaatcgagatccacgcccagctcaacacggccaagaagctcttctctgatgcgccaacatccttcaacgacgagccgaataccaacgtcgcatacttcgaccttgccacgcctggcagccagcccatcttccagaaagagacgctcatcccagccttgcgcgccgccctcgctctgcaatgcgccgtccagcccgtgagccgcttcgaccggaagcactacttccactgggaccagccgtcaggctaccagatcacgcagtactacgagcccttcgcacgcgatggaaccatcgatctactgccccgcgacggcattgcagctgaggacggggagatggtctcggtaggcatcaagcagatacagatggaacaggacacagccaaaaccctcgcccagcccggcggcgtccactggatagacttcaaccgcgtcggcatgcccctcatcgaaatcataacccaccccgtaatccaccacccagccaccgcagcagccttcgtgcgcagagtccagaccctcctcaacgccgtcgacgcctgcgtctcgggcatggagaccggcggtctacgagcagacatcaacgtctccgtccggcgaaccgacgacccaaacacgcccctaggccaacgaacagagatcaagaacctaagcagtttcaaagccgtcgaagacgccataatcgccgagcgcgaccgacaaatcgccgtcctcgaagcgggcggcaccatcgcgggcgaaacccgcgggtggtccataggctcgacagaaacccgacgactcaggggaaaagaaggagaagtcgactaccgctacatgcccgatcccgacgttccccccttactcatcggcaccgatctgatcacccacctctctaccaccatgccgctgctccccgacgtaataatcaccgaactcatatcctcctacggcctctcctcaaaggacgcaatgtccctcgtatcgctcgacaacgggtgtagagtcgagtatttctacaccgtgacatcacacctgcgctctcttttccccatcaagcaatccctggaagaattgaaatccagcttcctcctagcagcgaactggaccctccacgaactcggccgcctaacatccgaacgtagcgacagcggtagcgacagcgtctcctcctcttccactctaacattcaccgaatccggtcactgcgcccaagtcccggcggagcacttcgcatccctaatctactctctccacacgcgtcaaatcaccgccaaagtagctaaagaactcctctgggccatataccgaggtcgtataccccgggaataccccaccgtcgaaatcgctatcgaaagagagaatctgcagttccaggagttgagcaccgaggagtataatgacttggctgataaggcggtcgaaggccaggataaagttttgagaatgctggtagaggcggagatcttgccacagggcaaactgatgttcctcgttggacgcatgattgcgcttggccaggaggagaggattgatcctaagagtgctgagaaggtccttagggaacggattgagacggtctatgggccgaggttgaaggggtgaaagaacggtggaagggatatgagacaagtatgaaaagaatacgagtgtgtatagatagtcgctgtatgatacatatccagcgtgtatgaatatctatagaatgatacccgtcaagcatattgttaaactctgaactgtcattacaatcttgagcggcacataattggttaggttggtagctggctcgtgttctagattgggtactaccgactgtattgggtaggtcatttgagtacgggcatcgtatgagatcacagagcgacgacgaggtataaacttgattacgggtacatgtgtaaattgtaaatgtatcaggcactccccttcggccctcgtgtcatcactcctcacaacatccattacagcacactcataaatccccgagcaagagtcccatatcgccgacgggtgcactgcatcacggcgccgagccgtcgcggtcatcaaattacatctcttgttgtatgtcatacgtgacccgttcaaaaccatgatgagtagtatatacctcaacgcctcgcgctatcgaataagaagaccgaaaatgctcaatgaacctcgttccctgtagtatgtccctatgtcttttttgttgtgctcatttcgccgccaacccctgactcttaaggaatgcgacgacatcgtcgatgcattgcggcgtgttgatccagtgcccgcctgtcggatattctttccatttgacatccataccataccccttcaggatatctctcagtcgtctcccttgttcaacgggcacggtttgatcatctgcgttgtggcaaaggaatgtcggcgtgttgcgaaatatcacatcactgggtccagccgtcaacccttcgggcgctaacaattctcgggcctctttcaccgagccagtaccaagggacatccaactagacagcccgatgaaggcacacatacgctgaccttcgtctccaccggtcggtatgggatagttcaagagaccgtgaatagccgtcgtacagccctgcgatatgcctgcgagcacaatgttctgcagtccgaccacggcggcttcaccctgtattaggcggatgagttttggcgtgacctcctttaagcccggcacttgaagttcgcggcgctcgtccgggttatcatagccccagatgtcgaaccactgcgaaagatactcctggaatcgctcgagatagctctcatcggcctgcggaaatacccatcttactgacgggaagatgtgctgtagtgtctccccgcgacgatcatgattctcccacaactcctcgctgaactcccgagcatttgatccacggccgtggaggaagatgacagtgtgcgtgtgctggttgtgagcgggaagcgatacgctacgaagcaccatggtgggtgcgggatattaagttttgaggcagggcgtagcgcaaggatgaatctcggtatcaaaataaccttgtggttagcgaattgtgataacttggttggtggctggttaatgggggagatggaacaactcggggagctaagtcgatcactttcccgcttgagagaagaggagggagcgatggaccgatccagtgtggattgccaagaccggaatgatcagctcttgacggacaggacaaggcgtgagggacaacgaaaagaaaattgaggagagtgcatcgttcgatgttccgatctccaggcctcggtgtgaaaatgagaagctcgtgagtccggagtacgtgtagtatgcgatataagcaagcagagacgatacaaagggcctgcatggactcggtctagaccgcaatcgcccctcgaatcagaagccgcgtgacggactcgggctgttgggtaggagcaactccccgcgatagtcgcagtgtaaccacggcacggccagtcagaacccctaccccgatcctcaattagtgtgagtgatggccgttttgatgtcgtgcagcgtgcatgcggcccccctagttgccttttgaacgcctgaagaggctgaaattggcgttcggttgaatcgtcatcaaatagattgagctgtttcagcttgtttgctcttccaacccaacatagaaattggtaagtttgagcatacctaggtagctcgttatcgtatgataccgcgtcactcacacctagtctctgttgcgactagattgctaccatcaccgataatggcagacgcgccttctccgtctacagacaaagtttgaaacatgttgctgtataggcagacgttcatttggtttgtgtatcgtcggctgcatgatccaaagttgcagacgaggcaacgttccatccgtctctctgcctcaagaagctctcaactcgctcatgtctgtttaataaagcctgctcgctctgcctccttctcatgtcaccgctgatggctatagagctttgctctcgcatctccacgatgctcatggtgttggaattggcgcgtctcgcctgggccatgctgccggcgacaacgaatgcacacagaaggacgacgaatagttcgttggacatgtacatgggtgtctgtggtggtttctcgcctttcttctcgcgataccacctgtcccagtcttcccaagtggcattcatgctggggttgcctggctcgctgcgccatctcttgtctgcctcgcgatatagagattccatggagcggttgttatcccagccggcgccgtagagatcgtaggctttgcgcttgacgggatcgctcaggatctcgttggcagcgacaatcaagcgatagcgctcgagccgaacggccggggccacggaagaattgacagaggcatggatcctgtccggatggtagatcttgacgagctcgtagtagatagccttattataccgggcatctcggggctgggcaaagatatcgtaaggtgtaggatgcggcgctgaaggccattcgtggtgatctgtagcagagggatcgggcccttcacgtgagtctgatatggaggcataggaacgaatgtacgttgaggcccgtggtcgtagtgaccttcggcagggcacgcattcgtaactgtagttgcaatttcgagaccgttgccagccgcaagatgatgacgtgatgcaatatgttggcgaagtgaggagatgcgggcacgaggagaagacgaggatgggtgttcgaagaatcatgttttatttaaagtcatattactgcgatatttacgatttgtgaagtatgtacggttctcatggtggcatggaataggtaaacgaaataagacatgagagggacaagaagttgaaagagctatggttgacgacagttgacgacaccacctaaggactaatctgttttagtggaccacggcggcggggatcggtgctttgcgcttgatgcccgcacacggatttagggtcttccaggtagctaaggtaaacattgaagtgctcttcagtcatctaagtttcctgagcatagtcctaagcctgaatgttacattctaaatactctgcgtgtgttaactacgatcagtgctcaaacaacatcaggtgccattttgatctttggcctgatccctcagtcaaagttcagacacaactagcaagcacaacaagtaatgatgactagggtttgatgtgatagaggagctctaaaccagaagaacgatctgag

SEQ ID NO: 37740 - DNA, 1806 bp, Muscodor strobelii
  misc_feature: SGI cDNA ID NO. 573102
  misc_feature: Reduced expression when VOC is produced
  misc_feature: Encodes the peptide sequence at SEQ ID NO 37741
atggcggacagcggagatcacgccagccctgaggtgtcgacgtcattgcgcccggcgactagaaaggagagatcgcgcagtcaggctgcggaatcgctaggagaccgcaaggcttccggctccaagaaatcgcatgcgagatctgcgacggtcgtgaacatcgtgggggcggttccggcaagggatcagtcgcctcaaaatagcaagtcaaacgaagaaactgacattgtcctggttaagacctccgatgcacccttggagacagcatctgagaagatacgggaatcgcggcgttcccgtagggcttcatcaaatgatcccaagtcgcggtctcaatcacctccaacagagtcaagcgacactcctaagcctgctaatatgagtaacgcaagcgagtcagagggttcgagcggcagcagtgagactataacacgagggtctccctcgaaacgtgaaagtcttgggaagaccgttgacagaccgaaaaggcacagcaacaggcccgacgctttgagcttcttagactcagactcgcctcaagtaactgctgagtgcattgagcgtaccgttcaagcgtcttccaagttctctcctgactcggcgcaaagcacctcgccttctgcccatagtacatcatcggcatcaagtggattccgtgatgatcgctccgacacatacggtgaccatgagactgaccggagcaccagcccagagtgtagcgtcgatggagatccacggagccgtttgccagtggatgcaaacatccggaagaaggcaaagaacaggaaaaccagttatggcacgcctgagatgccacatggaagcgcacaacaccctcatattccacccgaagccctgacaccacgcgcgcctcctcaatatcgtacagcgccaatgcatctgcccagagcagagaagcttcctttgacaggctatgagcttctggcctcgagactggcagccacgtcaaacgatcgtagcggcccatgccttcgaccgatgtatcgaagattcgaaatgctgaaccatcgactgttgttacatctacaggacgagatgtgcgaactcgaggaacagttacatcgtctggatacgaccgacacacaaactcgatgcctacagaatggcattctccctgcttcgcggagagcggaagccgtatcaggcggcgagctacagtggcacagagccgacgtgatgggcaagatcgggtttaagctggagcaatacaatcgagtcttggcatcgtttcgcgatacacaatcgttgccaacgccctccttggccgatgtccacgagtacaggggcttcctctcaacctatgcaccgattaacgaccttgagactcaattcttagacacaccggatgatctcgtctgtgttggcgagcgggatatagacatgatcgcagacgaaaccgatctggcgacaccaatgccacgaccagatatgcagatgttcaacccgcgacgtcgtccgtctgtcttgtctcagtccgatatctcacgtcgccctgatgaacgcagcattgtatcacaggagactataacttccgtccaaacagagaagcctgcgattgcccaaatatcgattgcagccgccgtggctatcatcctacctattttcaccttcttggtcattccgggctttctcggacgtatgacagttgcatctcttgtaggtggtgccactcttggagcgctagtccagggtaatatcgtcgggctacaggcaacacaagagctctgtgtttgtgttggactttacggtggtgtaatggctatcttagcaggcgtcatcggctga

SEQ ID NO: 37741 - protein, 601 aa, Muscodor strobelii
  misc_feature: SGI Peptide ID NO. 573102
  misc_feature (220)..(601): NCBI GI: 154295128 Blast Desc: BC1G_13507 [Botryotinia fuckeliana B05.10] gi|150844190|gb|EDN19383.1| BC1G_13507 [Botryotinia fuckeliana B05.10]
  misc_feature (221)..(461): NCBI GI: 156039641 Blast Desc: SS1G_11957 [Sclerotinia sclerotiorum 1980] gi|154697694|gb|EDN97432.1| SS1G_11957 [Sclerotinia sclerotiorum 1980]
  misc_feature (156)..(412): NCBI GI: 261354971 Blast Desc: conserved [Verticillium albo-atrum VaMs.102]
  misc_feature (169)..(371): NCBI GI: 145608094 Blast Desc: [Magnaporthe grisea 70-15] gi|145015599|gb|EDK00089.1| [Magnaporthe grisea 70-15]
  misc_feature (269)..(588): NCBI GI: 189211247 Blast Desc: conserved [Pyrenophora tritici-repentis Pt-1C-BFP] gi|187978047|gb|EDU44673.1| conserved [Pyrenophora tritici-repentis Pt-1C-BFP]
  misc_feature (310)..(464): NCBI GI: 169600525 Blast Desc: SNOG_03100 [Phaeosphaeria nodorum SN15] gi|160705457|gb|EAT89831.2| SNOG_03100 [Phaeosphaeria nodorum SN15]
  misc_feature (309)..(600): NCBI GI: 145232981 Blast Desc: An02g07290 [Aspergillus niger] gi|134056785|emb|CAK37693.1| protein product [Aspergillus niger]
  misc_feature (220)..(389): NCBI GI: 154295132 Blast Desc: BC1G_13509 [Botryotinia fuckeliana B05.10] gi|150844192|gb|EDN19385.1| BC1G_13509 [Botryotinia fuckeliana B05.10]
  misc_feature (310)..(464): NCBI GI: 238486780 Blast Desc: conserved [Aspergillus flavus NRRL3357] gi|220699507|gb|EED55846.1| conserved [Aspergillus flavus NRRL3357]
  misc_feature (310)..(461): NCBI GI: 67524883 Blast Desc: AN2899.2 [Aspergillus nidulans FGSC A4] gi|40744294|gb|EAA63470.1| AN2899.2 [Aspergillus nidulans FGSC A4] gi|259486164|tpe|CBF83787.1| TPA: [Aspergillus nidulans FGSC
  misc_feature: Useful for introducing or modulating the production of volatile compounds
MADSGDHASPEVSTSLRPATRKERSRSQAAESLGDRKASGSKKSHARSATVVNIVGAVPARDQSPQNSKSNEETDIVLVKTSDAPLETASEKIRESRRSRRASSNDPKSRSQSPPTESSDTPKPANMSNASESEGSSGSSETITRGSPSKRESLGKTVDRPKRHSNRPDALSFLDSDSPQVTAECIERTVQASSKFSPDSAQSTSPSAHSTSSASSGFRDDRSDTYGDHETDRSTSPECSVDGDPRSRLPVDANIRKKAKNRKTSYGTPEMPHGSAQHPHIPPEALTPRAPPQYRTAPMHLPRAEKLPLTGYELLASRLAATSNDRSGPCLRPMYRRFEMLNHRLLLHLQDEMCELEEQLHRLDTTDTQTRCLQNGILPASRRAEAVSGGELQWHRADVMGKIGFKLEQYNRVLASFRDTQSLPTPSLADVHEYRGFLSTYAPINDLETQFLDTPDDLVCVGERDIDMIADETDLATPMPRPDMQMFNPRRRPSVLSQSDISRRPDERSIVSQETITSVQTEKPAIAQISIAAAVAIILPIFTFLVIPGFLGRMTVASLVGGATLGALVQGNIVGLQATQELCVCVGLYGGVMAILAGVIG

SEQ ID NO: 37742 - DNA, 4369 bp, Muscodor strobelii
  misc_feature: SGI EST ID NO. CUFF.91061.1
  misc_feature: Variant of the nucleotide sequence at SEQ ID NO 37740
ggtggttcgaggtgggatcgtgtagggaacctcctcacccgcacttgaaacatgaccatgtgtctgatacaggaacccgttcgcatacaccccttgacctttcgtcatggcccgactagttcaacattcccacggctaaacgctgcacttacactgcacttcacatctgtcatgtttcgaactgctctggggatcttcgtcccaagtccatgctgctctcctgaatacccatttcttgcagttatggccatgtaatcgcccatctgtcccgagtgtttaagtgcgtatcacgcgcaaatccgtcgtcgaaatgtgtgccacaccatttacttgtcttatcttcatttcacttctgtcttgcgcgacataaggccgttgaccggctattttgtttccctttcttagttctgttcctgatgtattagtcctatcttaataataatacccaaccgtttttgccgtttggcgtcggccgcctcgcttcttgctattgatacccaatcataatcatcccacctccaacggggcgcttgcttgcagtgcaacaagaacttgaaaaccagtatcacacacaggtatgcatgtcccacgctatgtctaccatctttcgccaccgggcgctgcgtggctgttcagcactctccgccgctacggggagaaaaaagaaattctaaagccttcttccggagcaaacaattacattgtgcccctcatctgtgacgtttgatcaatctgttcctcactgactcatttccggatccaagtgtgaacaaaaaatggcggacagcggagatcacgccagccctgaggtgtcgacgtcattgcgcccggcgactagaaaggagagatcgcgcagtcaggctgcggaatcgctaggagaccgcaaggcttccggctccaagaaatcgcatgcgagatctgcgacggtcgtgaacatcgtgggggcggttccggcaagggatcagtcgcctcaaaatagcaagtcaaacgaagaaactgacattgtcctggttaagacctccgatgcacccttggagacagcatctgagaagatacgggaatcgcggcgttcccgtagggcttcatcaaatgatcccaagtcgcggtctcaatcacctccaacagagtcaagcgacactcctaagcctgctaatatgagtaacgcaagcgagtcagagggttcgagcggcagcagtgagactataacacgagggtctccctcgaaacgtgaaagtcttgggaagaccgttgacagaccgaaaaggcacagcaacaggcccgacgctttgagcttcttagactcagactcgcctcaagtaactgctgagtgcattgagcgtaccgttcaagcgtcttccaagttctctcctgactcggcgcaaagcacctcgccttctgcccatagtacatcatcggcatcaagtggattccgtgatgatcgctccgacacatacggtgaccatgagactgaccggagcaccagcccagagtgtagcgtcgatggagatccacggagccgtttgccagtggatgcaaacatccggaagaaggcaaagaacaggaaaaccagttatggcacgcctgagatgccacatggaagcgcacaacaccctcatattccacccgaagccctgacaccacgcgcgcctcctcaatatcgtacagcgccaatgcatctgcccagagcagagaagcttcctttgacaggctatgagcttctggcctcgagactggcagccacgtcaaacgatcgtagcggcccatgccttcgaccgatgtatcgaagattcgaaatgctgaaccatcgactgttgttacatctacaggacgagatgtgcgaactcgaggaacagttacatcgtctggatacgaccgacacacaaactcgatgcctacagaatggcattctccctgcttcgcggagagcggaagccgtatcaggcggcgagctacagtggcacagagccgacgtgatgggcaagatcgggtttaagctggagcaatacaatcgagtcttggcatcgtttcgcgatacacaatcgttgccaacgccctccttggccgatgtccacgagtacaggggcttcctctcaacctatgcaccgattaacgaccttgagactcaattcttagacacaccggatgatctcgtctgtgttggcgagcgggatatagacatgatcgcagacgaaaccgatctggcgacaccaatgccacgaccagatatgcagatgttcaacccgcgacgtcgtccgtctgtcttgtctcagtccgatatctcacgtcgccctgatgaacgcagcattgtatcacaggagactataacttccgtccaaacagagaagcctgcgattgcccaaatatcgattgcagccgccgtggctatcatcctacctattttcaccttcttggtcattccgggctttctcggacgtatgacagttgcatctcttgtaggtggtgccactcttggagcgctagtccagggtaatatcgtcgggctacaggcaacacaagagctctgtgtttgtgttggactttacggtggtgtaatggctatcttagcaggcgtcatcggctgatcgtaatggccttgatcgaagtttgtaggaccacgtgttggctctagtgtaatggtcgtgtaggacttgtaggatgagctgcaaaagtctgggcttgggatgatctggcttttctgatgaaatgtttctggcatctcaaatcaatcgaagatttattggtgcacttgcaaacgtactcagtcattgccttgtgatgggcttttgaaatggaaatggtgtgttcttcgaccgatgttggagtgagcagacattgtgaatctcgtatgtcagcagcgaaaactctgcaccagaatcccaccttcaaaagctgttctgtgccagaatagtggaccagcatcaacatacatgataaatgatcggggtttgagcctttcttaccctttattatatcatcttctcagccaaaatgagaagtcattttagcacaaagaacgggaaacggccaaaaggtgagggcttgtgagatacctacaaatatggataccaacctgtcagactgaaggtcactggccaccagggtatccgaccatcgcctcttcacataattaaagactttgtctgcaataagagatagatgtttgtgagccattctatgttttcttaaattctcaaacatcagactctgcttttttgtgcgattgcacattgcagtttgctcattctgctacccattaaatgttaagacaatacatcgcactcaaccatcgtcacggaactaagcggaacttgcgtatgctagcaaagtagggcgggagccatctttcacggcatcacgttgctccttcttacactcccatctgttccagcggtctcttccttattcacaggacggcgatgaaaatgagatattaggtagccgtagttaaacgcaatgttggctagacacttcctcactataacccccacgcagcatgccaatcccacctgacaggacatcaccaggccagcaacaagatatatcagtctaggtgtatcaaataccactttcagcacatctcattcgcttttgcttatgaaacatcactttgaagtatagtgtcatcttcgttcagttgttttcattccatcttcccatcaaaacccttctttctgtcggccaaaactaggcacccagcagtatgtctacgtcgacgcccctaggccgcacaccgccgccttgggtcactcccgctcagcctatcgacctgtacgggccattacttgaggaattgctgagtaagaaatacatgaagaatgagaagttcccatacccaggtgaaagatggcatccaaacccggagagcaatgtaccggaggcagttcaacaagtcgccatcttgccaagggctattagcaagcagcgaatcaagtacaaggcactggtaattgactgcgagatggtcaccacaaaggggccagcaagtagtcccaacatcaacgacctcgtcagcgttgcagtcgtcgacttcctctcgggagatgtggtcctacactgcctggttcaacccaccgcctacgtcacgaattggaacttccgttacaccggagtcaatcctggagtattgaaggccgctaagagcgaccccaatcagcaggttttgagaggctggcccgcagcacgtaccaagatattcgagtttgcggatgagaacaccgtatttctaggtcatgctctacacaacgatctacgaatgctacgtatctgtgctgagaaagtcgtcgactccgtcgctctcactgctcatgcggcattcggcaagaatagcgatgggcctcaccgaacttggagtctgaagggactctgcaaa

SEQ ID NO: 37743 - DNA, 1236 bp, Muscodor strobelii
  misc_feature: SGI cDNA ID NO. 573103
  misc_feature: Encodes the peptide sequence at SEQ ID NO 37744
atggcggacagcggagatcacgccagccctgaggtgtcgacgtcattgcgcccggcgactagaaaggagagatcgcgcagtcaggctgcggaatcgctaggagaccgcaaggcttccggctccaagaaatcgcatgcgagatctgcgacggtcgtgaacatcgtgggggcggttccggcaagggatcagtcgcctcaaaatagcaagtcaaacgaagaaactgacattgtcctggttaagacctccgatgcacccttggagacagcatctgagaagatacgggaatcgcggcgttcccgtagggcttcatcaaatgatcccaagtcgcggtctcaatcacctccaacagagtcaagcgacactcctaagcctgctaatatgagtaacgcaagcgagtcagagggttcgagcggcagcagtgagactataacacgagggtctccctcgaaacgtgaaagtcttgggaagaccgttgacagaccgaaaaggcacagcaacaggcccgacgctttgagcttcttagactcagactcgcctcaagtaactgctgagtgcattgagcgtaccgttcaagcgtcttccaagttctctcctgactcggcgcaaagcacctcgccttctgcccatagtacatcatcggcatcaagtggattccgtgatgatcgctccgacacatacggtgaccatgagactgaccggagcaccagcccagagtgtagcgtcgatggagatccacggagccgtttgccagtggatgcaaacatccggaagaaggcaaagaacaggaaaaccagttatggcacgcctgagatgccacatggaagcgcacaacaccctcatattccacccgaagccctgacaccacgcgcgcctcctcaatatcgtacagcgccaatgcatctgcccagagcagagaagcttcctttgacaggctatgagcttctggcctcgagactggcagccacgtcaaacgatcgtagcggcccatgccttcgaccgatgtatcgaagattcgaaatgctgaaccatcgactgttgttacatctacaggacgagatgtgcgaactcgaggaacagttacatcgtctggatacgaccgacacacaaactcgatgcctacagaatggcattctccctgcttcgcggagagcggaagccgtatcaggcggcgagctacagtggcacagagccgacgtgatgggcaagatcgggtttaagctggagcaatacagttag

SEQ ID NO: 37744 - protein, 411 aa, Muscodor strobelii
  misc_feature: SGI Peptide ID NO. 573103
  misc_feature (156)..(411): NCBI GI: 261354971 Blast Desc: conserved [Verticillium albo-atrum VaMs.102]
  misc_feature (220)..(411): NCBI GI: 154295128 Blast Desc: BC1G_13507 [Botryotinia fuckeliana B05.10] gi|150844190|gb|EDN19383.1| BC1G_13507 [Botryotinia fuckeliana B05.10]
  misc_feature (169)..(371): NCBI GI: 145608094 Blast Desc: [Magnaporthe grisea 70-15] gi|145015599|gb|EDK00089.1| [Magnaporthe grisea 70-15]
  misc_feature (221)..(411): NCBI GI: 156039641 Blast Desc: SS1G_11957 [Sclerotinia sclerotiorum 1980] gi|154697694|gb|EDN97432.1| SS1G_11957 [Sclerotinia sclerotiorum 1980]
  misc_feature (220)..(389): NCBI GI: 154295132 Blast Desc: BC1G_13509 [Botryotinia fuckeliana B05.10] gi|150844192|gb|EDN19385.1| BC1G_13509 [Botryotinia fuckeliana B05.10]
  misc_feature (269)..(411): NCBI GI: 189211247 Blast Desc: conserved [Pyrenophora tritici-repentis Pt-1C-BFP] gi|187978047|gb|EDU44673.1| conserved [Pyrenophora tritici-repentis Pt-1C-BFP]
  misc_feature (310)..(411): NCBI GI: 169600525 Blast Desc: SNOG_03100 [Phaeosphaeria nodorum SN15] gi|160705457|gb|EAT89831.2| SNOG_03100 [Phaeosphaeria nodorum SN15]
  misc_feature (309)..(411): NCBI GI: 255936749 Blast Desc: Pc13g09780 [Penicillium chrysogenum Wisconsin 54-1255] gi|211584021|emb|CAP92047.1| Pc13g09780 [Penicillium chrysogenum Wisconsin 54-1255]
  misc_feature (310)..(411): NCBI GI: 67524883 Blast Desc: AN2899.2 [Aspergillus nidulans FGSC A4] gi|40744294|gb|EAA63470.1| AN2899.2 [Aspergillus nidulans FGSC A4] gi|259486164|tpe|CBF83787.1| TPA: [Aspergillus nidulans FGSC
  misc_feature (310)..(410): NCBI GI: 169770757 Blast Desc: [Aspergillus oryzae RIB40] gi|83767707|dbj|BAE57846.1| protein product [Aspergillus oryzae]
MADSGDHASPEVSTSLRPATRKERSRSQAAESLGDRKASGSKKSHARSATVVNIVGAVPARDQSPQNSKSNEETDIVLVKTSDAPLETASEKIRESRRSRRASSNDPKSRSQSPPTESSDTPKPANMSNASESEGSSGSSETITRGSPSKRESLGKTVDRPKRHSNRPDALSFLDSDSPQVTAECIERTVQASSKFSPDSAQSTSPSAHSTSSASSGFRDDRSDTYGDHETDRSTSPECSVDGDPRSRLPVDANIRKKAKNRKTSYGTPEMPHGSAQHPHIPPEALTPRAPPQYRTAPMHLPRAEKLPLTGYELLASRLAATSNDRSGPCLRPMYRRFEMLNHRLLLHLQDEMCELEEQLHRLDTTDTQTRCLQNGILPASRRAEAVSGGELQWHRADVMGKIGFKLEQYS

SEQ ID NO: 37745 - DNA, 4369 bp, Muscodor strobelii; identical to SEQ ID NO: 37742
  misc_feature: SGI EST ID NO. CUFF.91061.1
  misc_feature: Variant of the nucleotide sequence at SEQ ID NO 37743

SEQ ID NO: 37746 - DNA, 1179 bp, Muscodor strobelii
  misc_feature: SGI cDNA ID NO. 573104
  misc_feature: Encodes the peptide sequence at SEQ ID NO 37747
atgtctacgtcgacgcccctaggccgcacaccgccgccttgggtcactcccgctcagcctatcgacctgtacgggccattacttgaggaattgctgagtaagaaatacatgaagaatgagaagttcccatacccaggtgaaagatggcatccaaacccggagagcaatgtaccggaggcagttcaacaagtcgccatcttgccaagggctattagcaagcagcgaatcaagtacaaggcactggtaattgactgcgagatggtcaccacaaaggggccagcaagtagtcccaacatcaacgacctcgtcagcgttgcagtcgtcgacttcctctcgggagatgtggtcctacactgcctggttcaacccaccgcctacgtcacgaattggaacttccgttacaccggagtcaatcctggagtattgaaggccgctaagagcgaccccaatcagcaggttttgagaggctggcccgcagcacgtaccaagatattcgagtttgcggatgagaacaccgtatttctaggtcatgctctacacaacgatctacgaatgctacgtatctgtgctgagaaagtcgtcgactccgtcgctctcactgctcatgcggcattcggcaagaatagcgatgggcctcaccgaacttggagtctgaagggactctgcaaagaactcctcggcatcgagatacagaagaaaaaggccagtcacgactgccttgaggatgccctcgccacccgagagctcatcatctggtgtcttacgcagccggagaaactgaaagcgtggggtacgaagtcaaaggaggctttcgacaaggaattcgagaagagaagagaggagcagagagctgcgggcgagcttcgtcgccttaagaatcgcgagacttggatcaggcagcgcattattaggatcgacgagagaatgaatgagacatacgaagagcagtgtgcccgaccgcaggaggaggacgatgaggaacgggagttcacagaggagcaggaacgcgatttcccggcgtacaaggcgcagcttgagcagaacttggtggagattgaggccgactataaagtaaagcttcgggactggatgcagaaaaagcatgaggctaagaacctcaagaaggaggctttggcgctgaaagatggtcccgaccccggatcggccgcgcagaactag

SEQ ID NO: 37747 - protein, 392 aa, Muscodor strobelii
  misc_feature: SGI Peptide ID NO. 573104
  misc_feature (80)..(250): Pfam Id: PF00929 Pfam Desc: Exonuclease
  misc_feature (53)..(282): NCBI GI: 255946241 Blast Desc: Pc20g14100 [Penicillium chrysogenum Wisconsin 54-1255] gi|211588623|emb|CAP86739.1| Pc20g14100 [Penicillium chrysogenum Wisconsin 54-1255]
  misc_feature (77)..(271): NCBI GI: 238506411 Blast Desc: RNA exonuclease, [Aspergillus flavus NRRL3357] gi|220689120|gb|EED45471.1| RNA exonuclease, [Aspergillus flavus NRRL3357]
  misc_feature (77)..(278): NCBI GI: 46114532 Blast Desc: FG03108.1 [Gibberella zeae PH-1]
  misc_feature (79)..(271): NCBI GI: 67528318 Blast Desc: AN4357.2 [Aspergillus nidulans FGSC A4] gi|40741328|gb|EAA60518.1| AN4357.2 [Aspergillus nidulans FGSC A4] gi|259482833|tpe|CBF77690.1| TPA: RNA exonuclease, nidulans
  misc_feature (77)..(271): NCBI GI: 169785415 Blast Desc: [Aspergillus oryzae RIB40] gi|83775916|dbj|BAE66035.1| protein product [Aspergillus oryzae]
  misc_feature (68)..(281): NCBI GI: 242782588 Blast Desc: RNA exonuclease, [Talaromyces stipitatus ATCC 10500] gi|218720177|gb|EED19596.1| RNA exonuclease, [Talaromyces stipitatus ATCC 10500]
  misc_feature (79)..(296): NCBI GI: 255943993 Blast Desc: Pc20g02050 [Penicillium chrysogenum Wisconsin 54-1255] gi|211587499|emb|CAP85534.1| Pc20g02050 [Penicillium chrysogenum Wisconsin 54-1255]
  misc_feature (79)..(283): NCBI GI: 238493423 Blast Desc: exonuclease, [Aspergillus flavus NRRL3357] gi|220696442|gb|EED52784.1| exonuclease, [Aspergillus flavus NRRL3357]
  misc_feature (53)..(274): NCBI GI: 258570479 Blast Desc: [Uncinocarpus reesii 1704] gi|237904313|gb|EEP78714.1| [Uncinocarpus reesii 1704]
  misc_feature (79)..(278): NCBI GI: 115388773 Blast Desc: [Aspergillus terreus NIH2624] gi|114195976|gb|EAU37676.1| [Aspergillus terreus NIH2624]
MSTSTPLGRTPPPWVTPAQPIDLYGPLLEELLSKKYMKNEKFPYPGERWHPNPESNVPEAVQQVAILPRAISKQRIKYKALVIDCEMVTTKGPASSPNINDLVSVAVVDFLSGDVVLHCLVQPTAYVTNWNFRYTGVNPGVLKAAKSDPNQQVLRGWPAARTKIFEFADENTVFLGHALHNDLRMLRICAEKVVDSVALTAHAAFGKNSDGPHRTWSLKGLCKELLGIEIQKKKASHDCLEDALATRELIIWCLTQPEKLKAWGTKSKEAFDKEFEKRREEQRAAGELRRLKNRETWIRQRIIRIDERMNETYEEQCARPQEEDDEEREFTEEQERDFPAYKAQLEQNLVEIEADYKVKLRDWMQKKHEAKNLKKEALALKDGPDPGSAAQN

SEQ ID NO: 37748 - DNA, 4369 bp, Muscodor strobelii; identical to SEQ ID NO: 37742
  misc_feature: SGI EST ID NO. CUFF.91061.1
  misc_feature: Variant of the nucleotide sequence at SEQ ID NO 37746

SEQ ID NO: 37749 - DNA, 516 bp, Muscodor strobelii
  misc_feature: SGI cDNA ID NO. 573105
  misc_feature: Encodes the peptide sequence at SEQ ID NO 37750
atgctcatcactcaaacaaagcttaccacgatggtgtcatttggcttccccccgaagtatcaatatgggcgccggcggtatatgagcgaccctatccaccctgtttttcggcatctgagtcgtccgattgttctcctccacaaacttccaatcaagacagtcgccttgcaacttaatctattcttcggatcgtggaagaaccgcaacagtcctctcacgcaataccgagttttggtcggcggttatgaatacgaacccgaatcaattctcgtcaaattggatcaacagggtattgaccaactccctgaagaagatcaagaagaaatcgcccttctgaacacgtggttcgaccgatggaaccgatacaaaaacgatgaatggattgcctggacgaaacagtcgacgccggactgggcgccattctggtataacgatgacagtcgatcgttggtcagatttcacccagagtattaccgttttgagggagagaaaattcccgatcctgaaacgccgtaa

SEQ ID NO: 37750 - protein, 171 aa, Muscodor strobelii
  misc_feature: SGI Peptide ID NO. 573105
MLITQTKLTTMVSFGFPPKYQYGRRRYMSDPIHPVFRHLSRPIVLLHKLPIKTVALQLNLFFGSWKNRNSPLTQYRVLVGGYEYEPESILVKLDQQGIDQLPEEDQEEIALLNTWFDRWNRYKNDEWIAWTKQSTPDWAPFWYNDDSRSLVRFHPEYYRFEGEKIPDPETP

SEQ ID NO: 37751 - DNA, 774 bp, Muscodor strobelii
  misc_feature: SGI cDNA ID NO. 573106
  misc_feature: Elevated expression when VOC is produced
  misc_feature: Encodes the peptide sequence at SEQ ID NO 37752
atggctgcgcccttcgaactcatctactggtgcggcgctcctggccgtggagagcatattcgcttagctcttgaagaccaaggagttccgtataaagacactgcagaactcggttttgaggcgtgttggaaaaaggtcgaggaatatatcggcgacgactacctaggagagaatggcaacccgccgtactacgctcctccgttcttgagacacggcgatgtcttcatttctcaaaccagcaacattctcatgtacctaggccccaagatcggactagccggtcccaaagataatgacatataccgggttaattcgcttgctctgaccgcacttgacggcttaagcaccgaagtccacgatactcaccatcccgtttcgcatgatgtgtactgggaagaccaaaaagaagaaagtcgtcgcgctgctaaggagtgggtgaagacccgtctcccgaagcaccttggattttgggaaaaggtactcaagagcaatcagagcgggccttggctactcggcacctcattcacatacgcagatatttgtttatttcagtgtcttgacggctgccagtttgcttttccaaaggcaatgaatcatgcccaacaatgttgtatatatccccgcgtcttccagctatgcgaagcagttgcagctcggccgaacattgcctcgtatcttgctagcgacagaagacagaagtacacattgggtgtctatcgatactacaaggaaaacgacgttcttgcagaggatagcgaagagaaagagagctga

SEQ ID NO: 37752 - protein, 257 aa, Muscodor strobelii
  misc_feature: SGI Peptide ID NO. 573106
  misc_feature (122)..(220): Pfam Id: PF00043 Pfam Desc: Glutathione S-transferase, C-terminal domain
  misc_feature (1)..(250): NCBI GI: 154289559 Blast Desc: BC1G_16073 [Botryotinia fuckeliana B05.10] gi|150849028|gb|EDN24221.1| BC1G_16073 [Botryotinia fuckeliana B05.10]
  misc_feature (3)..(246): NCBI GI: 171691647 Blast Desc: protein product [Podospora anserina] gi|170945772|emb|CAP72572.1| protein product [Podospora anserina]
  misc_feature (5)..(246): NCBI GI: 261354641 Blast Desc: glutathione S-transferase [Verticillium albo-atrum VaMs.102]
  misc_feature (3)..(247): NCBI GI: 116179728 Blast Desc: CHGG_00492 [Chaetomium globosum CBS 148.51] gi|88184789|gb|EAQ92257.1| CHGG_00492 [Chaetomium globosum CBS 148.51]
  misc_feature (3)..(247): NCBI GI: 164425285 Blast Desc: NCU04676 [Neurospora crassa OR74A] gi|157070866|gb|EAA29983.2| NCU04676 [Neurospora crassa OR74A]
  misc_feature (3)..(247): NCBI GI: 28950064 Blast Desc: conserved [Neurospora crassa]
  misc_feature (3)..(244): NCBI GI: 46116630 Blast Desc: FG04157.1 [Gibberella zeae PH-1]
  misc_feature (3)..(246): NCBI GI: 169784552 Blast Desc: [Aspergillus oryzae RIB40] gi|83775484|dbj|BAE65604.1| protein product [Aspergillus oryzae]
  misc_feature (3)..(246): NCBI GI: 238508282 Blast Desc: glutathione S-transferase family protein, [Aspergillus flavus NRRL3357] gi|220688857|gb|EED45209.1| glutathione S-transferase family protein, [Aspergillus flavus NRRL3357]
  misc_feature (1)..(244): NCBI GI: 256726160 Blast Desc: NECHADRAFT_62085 [Nectria haematococca mpVI 77-13-4]
  misc_feature (4)..(233): SWISSPROT Homolog: EC 2.5.1.18 Glutathione transferase
  misc_feature: Useful for introducing or modulating the production of volatile compounds
MAAPFELIYWCGAPGRGEHIRLALEDQGVPYKDTAELGFEACWKKVEEYIGDDYLGENGNPPYYAPPFLRHGDVFISQTSNILMYLGPKIGLAGPKDNDIYRVNSLALTALDGLSTEVHDTHHPVSHDVYWEDQKEESRRAAKEWVKTRLPKHLGFWEKVLKSNQSGPWLLGTSFTYADICLFQCLDGCQFAFPKAMNHAQQCCIYPRVFQLCEAVAARPNIASYLASDRRQKYTLGVYRYYKENDVLAEDSEEKES

SEQ ID NO: 37753 - DNA, 1304 bp, Muscodor strobelii
  misc_feature: SGI EST ID NO. CUFF.90421.0
  misc_feature: Variant of the nucleotide sequence at SEQ ID NO 37751
gctcactagctaattccaccaagtttgctataggctcaggtaaggaatgctttgggggcgagcccaagcaactgggcagtgcgccgcttaccgacccctcactgttatctccttgcgaatccgcgactgcgccctaactggcacttattcaaggcagtccggatacatttcattcaggcatttgctttcatgctctcttaaggagtccactcataacagatctcgtatattcaaagtgcttcgccttcactcacaccatggctgcgcccttcgaactcatctactggtgcggcgctcctggccgtggagagcatattcgcttagctcttgaagaccaaggagttccgtataaagacactgcagaactcggttttgaggcgtgttggaaaaaggtcgaggaatatatcggcgacgactacctaggagagaatggcaacccgccgtactacgctcctccgttcttgagacacggcgatgtcttcatttctcaaaccagcaacattctcatgtacctaggccccaagatcggactagccggtcccaaagataatgacatataccgggttaattcgcttgctctgaccgcacttgacggcttaagcaccgaagtccacgatactcaccatcccgtttcgcatgatgtgtactgggaagaccaaaaagaagaaagtcgtcgcgctgctaaggagtgggtgaagacccgtctcccgaagcaccttggattttgggaaaaggtactcaagagcaatcagagcgggccttggctactcggcacctcattcacatacgcagatatttgtttatttcagtgtcttgacggctgccagtttgcttttccaaaggcaatgaatcatgcccaacaatgttgtatatatccccgcgtcttccagctatgcgaagcagttgcagctcggccgaacattgcctcgtatcttgctagcgacagaagacagaagtacacattgggtgtctatcgatactacaaggaaaacgacgttcttgcagaggatagcgaagagaaagagagctgaaggcatcacttagctatcacgaatctatacagatgtgtttagatcctacactcgcgcaagatacattgccgcgaatacttatcactgagaatcgcttcatttatataacttgagctatctaacatgaaaggttacatgcagcgaaatggttgattattaaattcagtaagtcacgaagtggcctaattatacgaagtcagggttatgaggtaatacgctatgcttggtggcgtctaatgtaaaggtttaagagtatatatatatacatatata

SEQ ID NO: 37754 - DNA, 690 bp, Muscodor strobelii
  misc_feature: SGI cDNA ID NO. 573107
  misc_feature: Encodes the peptide sequence at SEQ ID NO 37755
atgggtgtagattccaccgctctcggaccacgattgcacaccaccaacacattggacccctacgtctgcggcaaccacttgtcggtagccacagccagtaggatatccttcgcgacgccttgccgccttaagaagacggcgttccttgcccgtactcaagcccagccgtattctgtggttaattggcaagttgagatcctaatgatcaaaatgtacggggaaggaagatcccaagacttccaccgttttatccagcctaaagttaaggctagccttaaacaagagctcaggcagctcattaagtcacgtattatgcccactaaatatactaaagataaaggactccacgccgtttggccaaagtggacgattgcctgggccttgcctagattcaatagggacaagagcaagcgcgcagccaaagtcttgctcgccagcgcggatgagcagacacttacccgtctacctttgaatgtagatactcgggtgcccattattcccgcagccgggcagacgagccacgttgtcaccccggctcactcggccgcgccccctgtgcgtacccctgtgcgcattcctgtacctacccctgtacctacccctgtacctaccccgaaccgtcaggaggatggcgtcgaggctgcagtggagctagtggccagccttagcaatattgccgagcttaactag

SEQ ID NO: 37755 - protein, 229 aa, Muscodor strobelii
  misc_feature: SGI Peptide ID NO. 573107
MGVDSTALGPRLHTTNTLDPYVCGNHLSVATASRISFATPCRLKKTAFLARTQAQPYSVVNWQVEILMIKMYGEGRSQDFHRFIQPKVKASLKQELRQLIKSRIMPTKYTKDKGLHAVWPKWTIAWALPRFNRDKSKRAAKVLLASADEQTLTRLPLNVDTRVPIIPAAGQTSHVVTPAHSAAPPVRTPVRIPVPTPVPTPVPTPNRQEDGVEAAVELVASLSNIAELN

SEQ ID NO: 37756 - DNA, 864 bp, Muscodor strobelii
  misc_feature: SGI cDNA ID NO. 573108
  misc_feature: Encodes the peptide sequence at SEQ ID NO 37757
atgctcacaaagcggtcgtatcggtgcggcgagcgcgacgacaatggcgagatctgcggccgccatttcgtccggccatggaatttccagagacatatgaagatctttcaccagactaagagactatcgataggatcaggcttcgtccaggtggacttcgccgcccccgccgcgcctcccgcccacggtgactcgccgccagcggctcgcgccagcctgccttcgtttcgggatatgttgcgcatggcggcgcgaccagtaccggcatcggcctcggtgcaactgccgcggattcagactcctcctgagcaggcgagggtcctgggagaagcggaagagacggccccccatagcctgccctggaatcaggccgtcctgggacggggccgctttcgggaacccatgccatcgtatgaggtaaaacgctccagacagcacccagggcagcaacgcggcgtggattggctcttggcctcgagcaaggagaaagtcgagaagcacgtggccggcgtgatagccgcttggggactcttacccgggcacgaagggacatgtgtcgtgtggcctaaagactgggcgatgctcgagcctagcggtatcgtcgagcgcctcgctttcgagacgtgcccgttaatcggggcaaaccgctcggtgagtctgccccggcggcttcagcgcgattgctcatatttgcaaacgtataaactattagaccacactacgggactggcgcgggctgtcgcctggttcaaggtctggcctcgacgaggaatcgagctcgataattttctgggtgggtctccggccccgtctccttgtttttacccatctctatccactgccgcgactaacttgccacagtaa

SEQ ID NO: 37757 - protein, 287 aa, Muscodor strobelii
  misc_feature: SGI Peptide ID NO. 573108
MLTKRSYRCGERDDNGEICGRHFVRPWNFQRHMKIFHQTKRLSIGSGFVQVDFAAPAAPPAHGDSPPAARASLPSFRDMLRMAARPVPASASVQLPRIQTPPEQARVLGEAEETAPHSLPWNQAVLGRGRFREPMPSYEVKRSRQHPGQQRGVDWLLASSKEKVEKHVAGVIAAWGLLPGHEGTCVVWPKDWAMLEPSGIVERLAFETCPLIGANRSVSLPRRLQRDCSYLQTYKLLDHTTGLARAVAWFKVWPRRGIELDNFLGGSPAPSPCFYPSLSTAATNLPQ

SEQ ID NO: 37758 - DNA, 1770 bp, Muscodor strobelii
  misc_feature: SGI EST ID NO. CUFF.90437.1
  misc_feature: Variant of the nucleotide sequence at SEQ ID NO 37756
ccccgagttccatggtcacgaatacatgtcctagcatacactactgacggcagtgggcgggaatccgccatggaagccctctggcaagtcaaaatgctcacaaagcggtcgtatcggtgcggcgagcgcgacgacaatggcgagatctgcggccgccatttcgtccggccatggaatttccagagacatatgaagatctttcaccagactaagagactatcgataggatcaggcttcgtccaggtggacttcgccgcccccgccgcgcctcccgcccacggtgactcgccgccagcggctcgcgccagcctgccttcgtttcgggatatgttgcgcatggcggcgcgaccagtaccggcatcggcctcggtgcaactgccgcggattcagactcctcctgagcaggcgagggtcctgggagaagcggaagagacggccccccatagcctgccctggaatcaggccgtcctgggacggggccgctttcgggaacccatgccatcgtatgaggtaaaacgctccagacagcacccagggcagcaacgcggcgtggattggctcttggcctcgagcaaggagaaagtcgagaagcacgtggccggcgtgatagccgcttggggactcttacccgggcacgaagggacatgtgtcgtgtggcctaaagactgggcgatgctcgagcctagcggtatcgtcgagcgcctcgctttcgagacgtgcccgttaatcggggcaaaccgctcggtgagtctgccccggcggcttcagcgcgattgctcatatttgcaaacgtataaactattagaccacactacgggactggcgcgggctgtcgcctggttcaaggtctggcctcgacgaggaatcgagctcgataattttctggtaagagatgacaccctcgcccggtagaagggggctgacacgtcctgccgtggaggaatgtggaccacatccccggatggatggctcctaccgttgttacaatccattatgcatcaatccaagccacctcgtgttcgaagcgaccgtcgataatttggggcgccaagaatgtatgagagcagcgcaggccttgcgtacctgcggcgaacaagtgcctcgtctctgcgacgcccaccagcccccgtgtctcatgcagcatgcctgcctcacaatgtttgagaaatgttgcatacaagcctcgacgtatcgtgaaacgtacggcatagcgccggcgccacttctaccccgtcctccgtagcaccgctaccccacgtttgagcctcggctccctctaacctttataaaggacgcagccgtctgcgtaggacccggcgaccgtcgagtacgaccggcacagcgccatattcgccgtccggccctagtatgcggcttttgtcctcggatcaaaagctttggtaatgttgttgctttgtggaggcacttggacaagaagcaccgggaccgcggagagcgtgcgttgatcacagaagccaggaaggcgggtaggctttggaagacctatatccaggctgtgagggggaaaagcgactagaaaggctctacggtggaaaagatcgaacaaatgatgaaggacgacttctcttaagaaaagatgcagacttagagcgcggaacgattctaataaaccctttaaaaatgcttatccgcgatattacttagctctgcggcgtagactacgcggatagcagagattgatcctacatatgcctctaggcatagtaaaataggcagcttgaggtgttaaatagaccgttaaatcccagt

SEQ ID NO: 37759 - DNA, 1080 bp, Muscodor strobelii
  misc_feature: SGI cDNA ID NO. 573109
  misc_feature: Encodes the peptide sequence at SEQ ID NO 37760
atgtcctttggatctaccgagccaacgcggaaatcccgcacagcattacaactgcgttgggattgccgccagaacgaaggcgcaatcggtcagctagttaagtcttgggtcgcggcgatcgacaatgaaaccaaggcagagtccagacatagccctgtcctccatcaagatgaacagcaaacaatcgccaacattctccgaatggagacctctcaggtgaccggcaagatagaaccgctgctccgaatggaccaaagccattttgaacgagttcgcatccaactcctctcgcttctcatcgcctgggaacaagtcatgctagaaaaagagcggtacggcgaggagggcctttgcatttacacaagagacgacaaaacgcagctaagcttgcaagagtttctgctcctgtttaagacagtgttttatcgagctcaagcgggtctgattactttacctattaccattactatgccatcattgcctccggtcactaaatgcgatgtcacacgccttcctatcgagatgcgcgcggaaatcctatgtcttcttccagatctacgcacacttcttgatacaatactcagccattcttcgttctacgctacttataaggagtatccgcgtagcattccgcttgccattttccgtcagcgctgtagccaagtacggcgacgcaacataagcggagtgttttgggaactgatgttcgctctcgatcacggctttatagacatagatactgcaaaggagctgttcgtgtacggatggaccttgttccgaacccgtgggttagaagatctccttttgccccttggtagaaatctagcattgttatactctcgagaacggcgaagcgacgctactaagctgctgcaagagctcgcagacggctccggagaatttcgcccatcggacttgtggtacgtctcttccgagagcgtactcgatccgtcgtattcaaacattatacgatacccgatattcaaacttctcgggaaatgggaagaagaggaaacaggcaaaccggatggtccggagaagcacaggtcgaaccaagtcgaaagcgtcgttagaaattag

SEQ ID NO: 37760 - protein, 359 aa, Muscodor strobelii
  misc_feature: SGI Peptide ID NO. 573109
MSFGSTEPTRKSRTALQLRWDCRQNEGAIGQLVKSWVAAIDNETKAESRHSPVLHQDEQQTIANILRMETSQVTGKIEPLLRMDQSHFERVRIQLLSLLIAWEQVMLEKERYGEEGLCIYTRDDKTQLSLQEFLLLFKTVFYRAQAGLITLPITITMPSLPPVTKCDVTRLPIEMRAEILCLLPDLRTLLDTILSHSSFYATYKEYPRSIPLAIFRQRCSQVRRRNISGVFWELMFALDHGFIDIDTAKELFVYGWTLFRTRGLEDLLLPLGRNLALLYSRERRSDATKLLQELADGSGEFRPSDLWYVSSESVLDPSYSNIIRYPIFKLLGKWEEEETGKPDGPEKHRSNQVESVVRN

SEQ ID NO: 37761 - DNA, 1848 bp, Muscodor strobelii
  misc_feature: SGI EST ID NO. CUFF.90424.0
  misc_feature: Variant of the nucleotide sequence at SEQ ID NO 37759
gacaaaaatgccaatatatagacttgggtactttaatcaaatctagtagaccaggactacggatatagagcatgtgttagtttggatctacactatctcttttcaacagaaatgtcctttggatctaccgagccaacgcggaaatcccgcacagcattacaactgcgttgggattgccgccagaacgaaggcgcaatcggtcagctagttaagtcttgggtcgcggcgatcgacaatgaaaccaaggcagagtccagacatagccctgtcctccatcaagatgaacagcaaacaatcgccaacattctccgaatggagacctctcaggtgaccggcaagatagaaccgctgctccgaatggaccaaagccattttgaacgagttcgcatccaactcctctcgcttctcatcgcctgggaacaagtcatgctagaaaaagagcggtacggcgaggagggcctttgcatttacacaagagacgacaaaacgcagctaagcttgcaagagtttctgctcctgtttaagacagtgttttatcgagctcaagcgggtctgattactttacctattaccattactatgccatcattgcctccggtcactaaatgcgatgtcacacgccttcctatcgagatgcgcgcggaaatcctatgtcttcttccagatctacgcacacttcttgatacaatactcagccattcttcgttctacgctacttataaggagtatccgcgtagcattccgcttgccattttccgtcagcgctgtagccaagtacggcgacgcaacataagcggagtgttttgggaactgatgttcgctctcgatcacggctttatagacatagatactgcaaaggagctgttcgtgtacggatggaccttgttccgaacccgtgggttagaagatctccttttgccccttggtagaaatctagcattgttatactctcgagaacggcgaagcgacgctactaagctgctgcaagagctcgcagacggctccggagaatttcgcccatcggacttgtggtacgtctcttccgagagcgtactcgatccgtcgtattcaaacattatacgatacccgatattcaaacttctcgggaaatgggaagaagaggaaacaggcaaaccggatggtccggagaagcacaggtcgaaccaagtcgaaagcgtcgttagaaattagcactatgatcgcttcagccctttatgtattgcaaagattggtggtgcaaacctcgggatgcgtttcggaaatccatctggccaaattctaggcaacgggatacgtatttggcgtgatgagaagagggcaatggttcctatgcttgatcgcggtcaactggatggtgaactgagcgtggaattcggtagttatgattggcaagtcttggatcggatggtgatttcaggggtagtctacaattcggcttagcgccaccacagcactgattatgctgaaatcggggctattgacgagttgggagtagtcgaaaatgtctggagctgaatgtgtctatcatatgtttatatgtatgcgtctggaaattaagagagagggttgcgtactcggtgctaacctgatttttcggcacgcctcccgctctattttagaattggacgacggtgttagtgttagtcataggtgttatagtaataaagcgagcgcaaaaccagcctattcgtatttttctcccgctatttataaccttataattaacagcgctctaaaataagaattcattccttaatgcttccatcgcttccatcgcttccaatattcgtaagcaagtagttagtagcaccgagatggcggggctcgtctaacaaccccaccttcccc

SEQ ID NO: 37762 - DNA, 1071 bp, Muscodor strobelii
  misc_feature: SGI cDNA ID NO. 573110
  misc_feature: Encodes the peptide sequence at SEQ ID NO 37763
atggagaccaaagagatccatattgagactcctcttgatgtcgggggccaggtgcttctgagtcccagataccaggtccatctctactccctgaagcactctgatgtgtatcggaaactggcagagctcagacgcttgagacggaagagcaaagcaggcaacacatacttcaggaaacagcgagatcgggctgacaatgcaaccaagaaagtggcgagacaattcttctggatgatgcaggatattgcgcgagagttgaatgatgctacagacctcttcaacatcgcacaatcgaaaaaagagattgtttcggtactggattggtgcatggcccccggcgggtttctgagtgtcgtactgcaacataaccgtggtgcccgctgccgcgcgttcagcttaccatgcgaagatggcggacacgaggtgttcctgtcttccaaacagaaagccgacatcaccttcctggacctcaacctcctggcagcagacatgggaatacaagctatcccaccggcccacccagaagcagaaagctttctccctcgccaggtcgagccaggagaagtttttgacttggtcatctgcgacggtcaggtcctccgaacacacaagcgacccgggcaccgcgagcgcctcgagagtacgcgattggtgctcgtccagcttgcgctagggttggaacacgtccgcgagggaggcaagatggtgatccttctgcacaaagttgaaacgtgggacggtttccagctcctgtacatcttcagcaagttctcgtcggtccaactattcaagccgaggacggcccacacaaagaagtcgacatgctatcttgtcgcttcgaacatcaaccctcagcacgaagaggctatcaaggcagtctgtgcctggaaggagacttgggaggttgccacttttggaacctgggaggattataaggagttggttcggcccaccgaggcggaggtcgaagaggtcctgacagaatttggtccgagatttattgaattggctgcggatgtgtgggaggttcaggctagggctttgagagcggcgccgtggatgacggcctaa

SEQ ID NO: 37763 - protein, 356 aa, Muscodor strobelii
  misc_feature: SGI Peptide ID NO. 573110
  misc_feature (83)..(284): Pfam Id: PF01728 Pfam Desc: FtsJ-like methyltransferase
  misc_feature (29)..(356): NCBI GI: 119178221 Blast Desc: CIMG_07967 [Coccidioides immitis RS]
  misc_feature (29)..(356): NCBI GI: 240104792 Blast Desc: FtsJ-like methyltransferase family protein [Coccidioides posadasii C735 delta SOWgp]
  misc_feature (28)..(354): NCBI GI: 225562093 Blast Desc: conserved [Ajellomyces capsulatus G186AR]
  misc_feature (29)..(354): NCBI GI: 238492087 Blast Desc: conserved [Aspergillus flavus NRRL3357] gi|220695774|gb|EED52116.1| conserved [Aspergillus flavus NRRL3357]
  misc_feature (37)..(354): NCBI GI: 115433296 Blast Desc: [Aspergillus terreus NIH2624] gi|114189637|gb|EAU31337.1| [Aspergillus terreus NIH2624]
  misc_feature (29)..(352): NCBI GI: 255953451 Blast Desc: Pc21g04320 [Penicillium chrysogenum Wisconsin 54-1255] gi|211589189|emb|CAP95329.1| Pc21g04320 [Penicillium chrysogenum Wisconsin 54-1255]
  misc_feature (29)..(354): NCBI GI: 67538738 Blast Desc: AN5539.2 [Aspergillus nidulans FGSC A4] gi|40743509|gb|EAA62699.1| AN5539.2 [Aspergillus nidulans FGSC A4] gi|259485005|tpe|CBF81710.1| TPA: conserved [Aspergillus FGSC
  misc_feature (86)..(343): NCBI GI: 242821002 Blast Desc: TSTA_000170 [Talaromyces stipitatus ATCC 10500] gi|218712514|gb|EED11939.1| TSTA_000170 [Talaromyces stipitatus ATCC 10500]
  misc_feature (29)..(356): NCBI GI: 46134143 Blast Desc: FG09211.1 [Gibberella zeae PH-1]
  misc_feature (79)..(354): NCBI GI: 171683097 Blast Desc: protein product [Podospora anserina] gi|170941508|emb|CAP67160.1| protein product [Podospora anserina]
METKEIHIETPLDVGGQVLLSPRYQVHLYSLKHSDVYRKLAELRRLRRKSKAGNTYFRKQRDRADNATKKVARQFFWMMQDIARELNDATDLFNIAQSKKEIVSVLDWCMAPGGFLSVVLQHNRGARCRAFSLPCEDGGHEVFLSSKQKADITFLDLNLLAADMGIQAIPPAHPEAESFLPRQVEPGEVFDLVICDGQVLRTHKRPGHRERLESTRLVLVQLALGLEHVREGGKMVILLHKVETWDGFQLLYIFSKFSSVQLFKPRTAHTKKSTCYLVASNINPQHEEAIKAVCAWKETWEVATFGTWEDYKELVRPTEAEVEEVLTEFGPRFIELAADVWEVQARALRAAPWMTA

SEQ ID NO: 37764 - DNA, 1763 bp, Muscodor strobelii
  misc_feature: SGI EST ID NO. CUFF.90526.1
  misc_feature: Variant of the nucleotide sequence at SEQ ID NO 37762
cgctaacaggcctgacgtccacgctattacgacgttgagtggtggtctgctgtgctaacatacggtctatactagatgcgagatcgtcaatccgtctctgactccatgttaccgttttaattttttttctcccggcgcgccatagcattgacgaagatgcggccaaggccatgagaaagcatctgcatctcggcgggcgaggctaccgccccgtaccgaaaccatggctattgaataccatttcaggtcgggagccggcagcggaaaacatgtgctttaatcatgtcaaacgatggtcacggcatctcattggttcacatggacctttgtagtgagcagcgtatgacgtttccataagcgaacccgattacataaatcccctcgatttctgattatttccgctgtgagagatagcaacagcacgtacgggttcttcgacagccgaaaacgaaatggagaccaaagagatccatattgagactcctcttgatgtcgggggccaggtgcttctgagtcccagataccaggtccatctctactccctgaagcactctgatgtgtatcggaaactggcagagctcagacgcttgagacggaagagcaaagcaggcaacacatacttcaggaaacagcgagatcgggctgacaatgcaaccaagaaagtggcgagacaattcttctggatgatgcaggatattgcgcgagagttgaatgatgctacagacctcttcaacatcgcacaatcgaaaaaagagattgtttcggtactggattggtgcatggcccccggcgggtttctgagtgtcgtactgcaacataaccgtggtgcccgctgccgcgcgttcagcttaccatgcgaagatggcggacacgaggtgttcctgtcttccaaacagaaagccgacatcaccttcctggacctcaacctcctggcagcagacatgggaatacaagctatcccaccggcccacccagaagcagaaagctttctccctcgccaggtcgagccaggagaagtttttgacttggtcatctgcgacggtcaggtcctccgaacacacaagcgacccgggcaccgcgagcgcctcgagagtacgcgattggtgctcgtccagcttgcgctagggttggaacacgtccgcgagggaggcaagatggtgatccttctgcacaaagttgaaacgtgggacggtttccagctcctgtacatcttcagcaagttctcgtcggtccaactattcaagccgaggacggcccacacaaagaagtcgacatgctatcttgtcgcttcgaacatcaaccctcagcacgaagaggctatcaaggcagtctgtgcctggaaggagacttgggaggttgccacttttggaacctgggaggattataaggagttggttcggcccaccgaggcggaggtcgaagaggtcctgacagaatttggtccgagatttattgaattggctgcggatgtgtgggaggttcaggctagggctttgagagcggcgccgtggatgacggcctaattgactggataggtacagctgacatgtgtcgctggcggttgctgaccagaggtcgcggggttggatgccgtgttgagatgagaatggatgggctgtacaccagatagacaataaaaaggtcttgattcataaatagatatcaaatgtcaaattagttctaagtgtcactagcctacaaaatagggtcgtataataggcgggctattgtcctacgcacaatctgtgtgccagaaaatcgtg

SEQ ID NO: 37765 - DNA, 582 bp, Muscodor strobelii
  misc_feature: SGI cDNA ID NO. 573111
  misc_feature: Encodes the peptide sequence at SEQ ID NO 37766
atgggaatacaagctatcccaccggcccacccagaagcagaaagctttctccctcgccaggtcgagccaggagaagtttttgacttggtcatctgcgacggtcaggtcctccgaacacacaagcgacccgggcaccgcgagcgcctcgagagtacgcgattggtgctcgtccagcttgcgctagggttggaacacgtccgcgagggaggcaagatggtgatccttctgcacaaagttgaaacgtgggacggtttccagctcctgtacatcttcagcaagttctcgtcggtccaactattcaagccgaggacggcccacacaaagaagtcgacatgctatcttgtcgcttcgaacatcaaccctcagcacgaagaggctatcaaggcagtctgtgcctggaaggagacttgggaggttgccacttttggaacctgggaggattataaggagttggttcggcccaccgaggcggaggtcgaagaggtcctgacagaatttggtccgagatttattgaattggctgcggatgtgtgggaggttcaggctagggctttgagagcggcgccgtggatgacggcctaa

SEQ ID NO: 37766 - protein, 193 aa, Muscodor strobelii
  misc_feature: SGI Peptide ID NO. 573111
  misc_feature (1)..(193): NCBI GI: 119178221 Blast Desc: CIMG_07967 [Coccidioides immitis RS]
  misc_feature (1)..(193): NCBI GI: 240104792 Blast Desc: FtsJ-like methyltransferase family protein [Coccidioides posadasii C735 delta SOWgp]
  misc_feature (1)..(191): NCBI GI: 238492087 Blast Desc: conserved [Aspergillus flavus NRRL3357] gi|220695774|gb|EED52116.1| conserved [Aspergillus flavus NRRL3357]
  misc_feature (1)..(191): NCBI GI: 225562093 Blast Desc: conserved [Ajellomyces capsulatus G186AR]
  misc_feature (1)..(191): NCBI GI: 115433296 Blast Desc: [Aspergillus terreus NIH2624] gi|114189637|gb|EAU31337.1| [Aspergillus terreus NIH2624]
  misc_feature (1)..(189): NCBI GI: 255953451 Blast Desc: Pc21g04320 [Penicillium chrysogenum Wisconsin 54-1255] gi|211589189|emb|CAP95329.1| Pc21g04320 [Penicillium chrysogenum Wisconsin 54-1255]
  misc_feature (1)..(180): NCBI GI: 242821002 Blast Desc: TSTA_000170 [Talaromyces stipitatus ATCC 10500] gi|218712514|gb|EED11939.1| TSTA_000170 [Talaromyces stipitatus ATCC 10500]
  misc_feature (1)..(192): NCBI GI: 212547028 Blast Desc: conserved [Penicillium marneffei ATCC 18224] gi|210064427|gb|EEA18523.1| conserved [Penicillium marneffei ATCC 18224]
  misc_feature (3)..(191): NCBI GI: 171683097 Blast Desc: protein product [Podospora anserina] gi|170941508|emb|CAP67160.1| protein product [Podospora anserina]
  misc_feature (6)..(191): NCBI GI: 67538738 Blast Desc: AN5539.2 [Aspergillus nidulans FGSC A4] gi|40743509|gb|EAA62699.1| AN5539.2 [Aspergillus nidulans FGSC A4] gi|259485005|tpe|CBF81710.1| TPA: conserved [Aspergillus FGSC
MGIQAIPPAHPEAESFLPRQVEPGEVFDLVICDGQVLRTHKRPGHRERLESTRLVLVQLALGLEHVREGGKMVILLHKVETWDGFQLLYIFSKFSSVQLFKPRTAHTKKSTCYLVASNINPQHEEAIKAVCAWKETWEVATFGTWEDYKELVRPTEAEVEEVLTEFGPRFIELAADVWEVQARALRAAPWMTA

SEQ ID NO: 37767 - DNA, 1901 bp, Muscodor strobelii
  misc_feature: SGI EST ID NO. CUFF.90526.0
  misc_feature: Variant of the nucleotide sequence at SEQ ID NO 37765
cgctaacaggcctgacgtccacgctattacgacgttgagtggtggtctgctgtgctaacatacggtctatactagatgcgagatcgtcaatccgtctctgactccatgttaccgttttaattttttttctcccggcgcgccatagcattgacgaagatgcggccaaggccatgagaaagcatctgcatctcggcgggcgaggctaccgccccgtaccgaaaccatggctattgaataccatttcaggtcgggagccggcagcggaaaacatgtgctttaatcatgtcaaacgatggtcacggcatctcattggttcacatggacctttgtagtgagcagcgtgtgcgcagccatctgtcataatggagacaaacacatcaaacagcgctcataatatgactctaacagatgacgtttccataagcgaacccgattacataaatcccctcgatttctgattatttccgctgtgagagatagcaacagcacgtacgggttcttcgacagccgaaaacgaaatggagaccaaagagatccatattgagactcctcttgatgtcgggggccaggtgcttctgagtcccagataccaggtccatctctactccctgaagcactctgatgtgtatcggaaactggcagagctcagacgcttggtaagtctcttctcaaatttcgctaccgtctttggtacctcaaatggaagatagttactgatcgcgttacagagacggaagagcaaagcaggcaacacatacttcaggaaacagcgagatcgggctgacaatgcaaccaagaaagtggcgagacaattcttctggatgatgcaggatattgcgcgagagttgaatgatgctacagacctcttcaacatcgcacaatcgaaaaaagagattgtttcggtactggattggtgcatggcccccggcgggtttctgagtgtcgtactgcaacataaccgtggtgcccgctgccgcgcgttcagcttaccatgcgaagatggcggacacgaggtgttcctgtcttccaaacagaaagccgacatcaccttcctggacctcaacctcctggcagcagacatgggaatacaagctatcccaccggcccacccagaagcagaaagctttctccctcgccaggtcgagccaggagaagtttttgacttggtcatctgcgacggtcaggtcctccgaacacacaagcgacccgggcaccgcgagcgcctcgagagtacgcgattggtgctcgtccagcttgcgctagggttggaacacgtccgcgagggaggcaagatggtgatccttctgcacaaagttgaaacgtgggacggtttccagctcctgtacatcttcagcaagttctcgtcggtccaactattcaagccgaggacggcccacacaaagaagtcgacatgctatcttgtcgcttcgaacatcaaccctcagcacgaagaggctatcaaggcagtctgtgcctggaaggagacttgggaggttgccacttttggaacctgggaggattataaggagttggttcggcccaccgaggcggaggtcgaagaggtcctgacagaatttggtccgagatttattgaattggctgcggatgtgtgggaggttcaggctagggctttgagagcggcgccgtggatgacggcctaattgactggataggtacagctgacatgtgtcgctggcggttgctgaccagaggtcgcggggttggatgccgtgttgagatgagaatggatgggctgtacaccagatagacaataaaaaggtcttgattcataaatagatatcaaatgtcaaattagttctaagtgtcactagcctacaaaatagggtcgtataataggcgggctattgtcctacgcacaatctgtgtgccagaaaatcgtg

SEQ ID NO: 37768 - DNA, 765 bp, Muscodor strobelii
  misc_feature: SGI cDNA ID NO. 573112
  misc_feature: Elevated expression when VOC is produced
  misc_feature: Encodes the peptide sequence at SEQ ID NO 37769
aacacctgcctgtgttgtcttcggcgtgtgcccgagtctgctctaccatgcggccacgtgctctgcgagaattgcttcagggtctttggccgtcgtgatgagtctgagcctcacgctatttacctagaacgctgcttactctgtggcaccgatctcggtcgaatctatatccgaatcaaaccagacactgcgggtgtgcgagtgctgagcatcgacggcggtgggacacgcgggcgcgcgccgttggaatatctgaaggtgctgcaacaggaactcaagctcccgtaccccgtacagaagcacttcgatctcgtatacggaacaagctcgggtgcgatcattgcttgtgcgttatccatgaatggctggcctattgaaaagtgtatcgaggtatttgagaggttctcgcatgtcgcgtttcagccgccgaggccatggcttaacattcctattctctccgagctttgtcagtttattgcatcaattctctctgatagtcgatattcgaaccgagaactcaagaaaatcttgcaagagatcatgggcacgggtagcatcatgcattgttcgcgggctgccgagaccggtactagaattggcatccccgtggcaacagtgccagaggctgaggccagggtcttcacgagttacaacggagctgggcaacaatgtgatagtagcgactaccagcttgtacagcccaagcaaggcctccgacacatcccactttgggagattcttttgtgcactactgccgcgccatag

SEQ ID NO: 37769 - protein, 254 aa, Muscodor strobelii
  misc_feature: SGI Peptide ID NO. 573112
  misc_feature (69)..(254): Pfam Id: PF01734 Pfam Desc: Patatin-like phospholipase
  misc_feature (1)..(248): NCBI GI: 256725180 Blast Desc: NECHADRAFT_88469 [Nectria haematococca mpVI 77-13-4]
  misc_feature (2)..(254): NCBI GI: 189211822 Blast Desc: conserved [Pyrenophora tritici-repentis Pt-1C-BFP] gi|187979438|gb|EDU46064.1| conserved [Pyrenophora tritici-repentis Pt-1C-BFP]
  misc_feature (1)..(253): NCBI GI: 159123473 Blast Desc: AFUB_080270 [Aspergillus fumigatus A1163]
  misc_feature (2)..(254): NCBI GI: 46127523 Blast Desc: FG08139.1 [Gibberella zeae PH-1]
  misc_feature (2)..(254): NCBI GI: 242773119 Blast Desc: conserved [Talaromyces stipitatus ATCC 10500] gi|218721794|gb|EED21212.1| conserved [Talaromyces stipitatus ATCC 10500]
  misc_feature (3)..(254): NCBI GI: 159128133 Blast Desc: Patatin-like phospholipase, [Aspergillus fumigatus A1163]
  misc_feature (2)..(242): NCBI GI: 242771752 Blast Desc: conserved [Talaromyces stipitatus ATCC 10500] gi|218721526|gb|EED20944.1| conserved [Talaromyces stipitatus ATCC 10500]
  misc_feature (2)..(254): NCBI GI: 154280477 Blast Desc: [Ajellomyces capsulatus NAm1] gi|150411230|gb|EDN06618.1| [Ajellomyces capsulatus NAm1]
  misc_feature (3)..(254): NCBI GI: 242759985 Blast Desc: Patatin-like serine hydrolase, [Talaromyces stipitatus ATCC 10500] gi|218723093|gb|EED22510.1| Patatin-like serine hydrolase, [Talaromyces stipitatus ATCC 10500]
  misc_feature (1)..(254): NCBI GI: 121710548 Blast Desc: phospholipase, patatin family protein [Aspergillus clavatus NRRL 1] gi|119401040|gb|EAW11464.1| phospholipase, patatin family protein [Aspergillus clavatus NRRL 1]
  misc_feature: Useful for introducing or modulating the production of volatile compounds
NTCLCCLRRVPESALPCGHVLCENCFRVFGRRDESEPHAIYLERCLLCGTDLGRIYIRIKPDTAGVRVLSIDGGGTRGRAPLEYLKVLQQELKLPYPVQKHFDLVYGTSSGAIIACALSMNGWPIEKCIEVFERFSHVAFQPPRPWLNIPILSELCQFIASILSDSRYSNRELKKILQEIMGTGSIMHCSRAAETGTRIGIPVATVPEAEARVFTSYNGAGQQCDSSDYQLVQPKQGLRHIPLWEILLCTTAAP

SEQ ID NO: 37770 - DNA, 2329 bp, Muscodor strobelii
  misc_feature: SGI EST ID NO. CUFF.90828.2
  misc_feature: Variant of the nucleotide sequence at SEQ ID NO 37768
tctgtcgagactacgtacggcccacagaaagttgcgacgactgcttagcgccgtcggcccttgtcgagcttattaggcaagaaatggttgtacagttcaaccggctgcgtaaatgcggatcgtctgccgctacccaccgagagcttttacgtcaataccaagatcaattcgctgacactcgcatagagaacacctgcctgtgttgtcttcggcgtgtgcccgagtctgctctaccatgcggccacgtgctctgcgagaattgcttcagggtctttggccgtcgtgatgagtctgagcctcacgctatttacctagaacgctgcttactctgtggcaccgatctcggtcgaatctatatccgaatcaaaccagacactgcgggtgtgcgagtgctgagcatcgacggcggtgggacacgcgggcgcgcgccgttggaatatctgaaggtgctgcaacaggaactcaagctcccgtaccccgtacagaagcacttcgatctcgtatacggaacaagctcgggtgcgatcattgcttgtgcgttatccatgaatggctggcctattgaaaagtgtatcgaggtatttgagaggttctcgcatgtcgcgtttcagccgccgaggccatggcttaacattcctattctctccgagctttgtcagtttattgcatcaattctctctgatagtcgatattcgaaccgagaactcaagaaaatcttgcaagagatcatgggcacgggtagcatcatgcattgttcgcgggctgccgagaccggtactagaattggcatccccgtggcaacagtgccagaggctgaggccagggtcttcacgagttacaacggagctgggcaacaatgtgatagtagcggtagacacatgcagcttaccagtctggagtattagaaaggactaaccaggtgatatagactaccagcttgtacagcccaagcaaggcctccgacacatcccactttgggagattcttttgtgcactactgccgcgccatattactttccaccatggcatatcgaagggcttgggacattccaagatggcggcgtagtctttaataatccggcctccatcgctatacatgaagtccggcgcgtctacgactcgattgaccagccaagccttattgtgtcgctggggactggccagaacaagccggacttgacacagtcaacgggtatctggacctcgtggcatcgttctttcgtgacaagaatactgagagccatggcacaatcgtggagctcccagcgagcttggcagcagttagtcagtcaccaaaaggtaggcaagcaaggtgagtttttccgtttcgacacaacgtttgtagggcctccgccatcgctggataatctctcgcgaatgcaagaggtggccgagctagcgcgcgagacgatccagcggtcgcctgagcttgctggcgtcgtctgcaatatgagagcacagctgtttctattcgaattagaccctgtccgtcccctccgccttcgacgagatggctacgaatgcattggccgcatcatgtgccgattacgtgcagggagcccagagaatatggcctttttatcgcagcttcgtcgaggcaaggcatcattcgtcctagagggccggactattcctgttgtattcgaagacggacttgataaccccgaagatctacgtgtctgccatatggtgcggttcaatgtcgctagccggcaagccaccatatctattgggcttcgagagggttcatgtgacacttacaagatcagtggatcgccgttcacgttacaatggctgcttcaggtgcaaagactagacacgtggttcggctgctcggatcataggaagcggcaggtagatggcaaaatacccagtgagcgtcgaactaagcgtagaaggatacactagactcgaggagcgagtttgtataactacaagcctttggtaaggtttgaatgacactgcgtattattatgtacataaatcagccgaccgtatgacgcgttcaaagagttgcacatccgggttggaggacgcattttgggatgcatcttgatatggtgtatggagaaaccgggggtcccacggcgatttcgagcggaatggcctctcaataatgagctgatccagacgacattatcgctctccgtagcccttcctcagtgtctcatgaacctctggcctataacgttggcatcatgcgccgaaccagccatgccctctattctgtaaagaccaaagtcatataactataaggatttaatggacctatttggccaagtataccataaagcaaagggcaaaagtagttttgaaaacttgcagcatt

SEQ ID NO: 37771 - DNA, 1641 bp, Muscodor strobelii
  misc_feature: SGI cDNA ID NO. 573113
  misc_feature: Elevated expression when VOC is produced
  misc_feature: Encodes the peptide sequence at SEQ ID NO 37772
aacacctgcctgtgttgtcttcggcgtgtgcccgagtctgctctaccatgcggccacgtgctctgcgagaattgcttcagggtctttggccgtcgtgatgagtctgagcctcacgctatttacctagaacgctgcttactctgtggcaccgatctcggtcgaatctatatccgaatcaaaccagacactgcgggtgtgcgagtgctgagcatcgacggcggtgggacacgcgggcgcgcgccgttggaatatctgaaggtgctgcaacaggaactcaagctcccgtaccccgtacagaagcacttcgatctcgtatacggaacaagctcgggtgcgatcattgcttgtgcgttatccatgaatggctggcctattgaaaagtgtatcgaggtatttgagaggttctcgcatgtcgcgtttcagccgccgaggccatggcttaacattcctattctctccgagctttgtcagtttattgcatcaattctctctgatagtcgatattcgaaccgagaactcaagaaaatcttgcaagagatcatgggcacgggtagcatcatgcattgttcgcgggctgccgagaccggtactagaattggcatccccgtggcaacagtgccagaggctgaggccagggtcttcacgagttacaacggagctgggcaacaatgtgatagtagcgactaccagcttgtacagcccaagcaaggcctccgacacatcccactttgggagattcttttttactttccaccatggcatatcgaagggcttgggacattccaagatggcggcgtagtctttaataatccggcctccatcgctatacatgaagtccggcgcgtctacgactcgattgaccagccaagccttattgtgtcgctggggactggccagaacaagccggacttgacacagtcaacgggtatctggacctcgtggcatcgttctttcgtgacaagaatactgagagccatggcacaatcgtggagctcccagcgagcttggcagcagttagtcagtcaccaaaaggtaggcaagcaaggtgagtttttccgtttcgacacaacgtttgtagggcctccgccatcgctggataatctctcgcgaatgcaagaggtggccgagctagcgcgcgagacgatccagcggtcgcctgagcttgctggcgtcgtctgcaatatgagagcacagctgtttctattcgaattagaccctgtccgtcccctccgccttcgacgagatggctacgaatgcattggccgcatcatgtgccgattacgtgcagggagcccagagaatatggcctttttatcgcagcttcgtcgaggcaaggcatcattcgtcctagagggccggactattcctgttgtattcgaagacggacttgataaccccgaagatctacgtgtctgccatatggtgcggttcaatgtcgctagccggcaagccaccatatctattgggcttcgagagggttcatgtgacacttacaagatcagtggatcgccgttcacgttacaatggctgcttcaggtgcaaagactagacacgtggttcggctgctcggatcataggaagcggcaggtagatggcaaaatacccagtgagcgtcgaactaagcgtagaaggatacactag

SEQ ID NO: 37772 - protein, 546 aa, Muscodor strobelii
  misc_feature: SGI Peptide ID NO. 573113
  misc_feature (69)..(276): Pfam Id: PF01734 Pfam Desc: Patatin-like phospholipase
  misc_feature (1)..(541): NCBI GI: 256725180 Blast Desc: NECHADRAFT_88469 [Nectria haematococca mpVI 77-13-4]
  misc_feature (99)..(452): NCBI GI: 156050841 Blast Desc: SS1G_08008 [Sclerotinia sclerotiorum 1980] gi|154692408|gb|EDN92146.1| SS1G_08008 [Sclerotinia sclerotiorum 1980]
  misc_feature (2)..(525): NCBI GI: 189211822 Blast Desc: conserved [Pyrenophora tritici-repentis Pt-1C-BFP] gi|187979438|gb|EDU46064.1| conserved [Pyrenophora tritici-repentis Pt-1C-BFP]
  misc_feature (1)..(545): NCBI GI: 159123473 Blast Desc: AFUB_080270 [Aspergillus fumigatus A1163]
  misc_feature (3)..(525): NCBI GI: 242759985 Blast Desc: Patatin-like serine hydrolase, [Talaromyces stipitatus ATCC 10500] gi|218723093|gb|EED22510.1| Patatin-like serine hydrolase, [Talaromyces stipitatus ATCC 10500]
  misc_feature (2)..(522): NCBI GI: 154280477 Blast Desc: [Ajellomyces capsulatus NAm1] gi|150411230|gb|EDN06618.1| [Ajellomyces capsulatus NAm1]
  misc_feature (1)..(525): NCBI GI: 70983812 Blast Desc: Patatin-like serine hydrolase [Aspergillus fumigatus Af293] gi|66845058|gb|EAL85394.1| Patatin-like serine hydrolase, [Aspergillus fumigatus Af293] gi|159124743|gb|EDP49861.1| serine
  misc_feature (1)..(527): NCBI GI: 154271165 Blast Desc: [Ajellomyces capsulatus NAm1] gi|150409659|gb|EDN05103.1| [Ajellomyces capsulatus NAm1]
  misc_feature (2)..(525): NCBI GI: 242771752 Blast Desc: conserved [Talaromyces stipitatus ATCC 10500] gi|218721526|gb|EED20944.1| conserved [Talaromyces stipitatus ATCC 10500]
  misc_feature (2)..(524): NCBI GI: 145241355 Blast Desc: An08g12250 [Aspergillus niger] gi|134077859|emb|CAK40100.1| protein product [Aspergillus niger]
  misc_feature: Useful for introducing or modulating the production of volatile compounds
NTCLCCLRRVPESALPCGHVLCENCFRVFGRRDESEPHAIYLERCLLCGTDLGRIYIRIKPDTAGVRVLSIDGGGTRGRAPLEYLKVLQQELKLPYPVQKHFDLVYGTSSGAIIACALSMNGWPIEKCIEVFERFSHVAFQPPRPWLNIPILSELCQFIASILSDSRYSNRELKKILQEIMGTGSIMHCSRAAETGTRIGIPVATVPEAEARVFTSYNGAGQQCDSSDYQLVQPKQGLRHIPLWEILFYFPPWHIEGLGTFQDGGVVFNNPASIAIHEVRRVYDSIDQPSLIVSLGTGQNKPDLTQSTGIWTSWHRSFVTRILRAMAQSWSSQRAWQQLVSHQKVGKQGEFFRFDTTFVGPPPSLDNLSRMQEVAELARETIQRSPELAGVVCNMRAQLFLFELDPVRPLRLRRDGYECIGRIMCRLRAGSPENMAFLSQLRRGKASFVLEGRTIPVVFEDGLDNPEDLRVCHMVRFNVASRQATISIGLREGSCDTYKISGSPFTLQWLLQVQRLDTWFGCSDHRKRQVDGKIPSERRTKRRRIH

SEQ ID NO: 37773 - DNA, 2329 bp, Muscodor strobelii; identical to SEQ ID NO: 37770
  misc_feature: SGI EST ID NO. CUFF.90828.2
  misc_feature: Variant of the nucleotide sequence at SEQ ID NO 37771

SEQ ID NO: 37774 - DNA, 1230 bp, Muscodor strobelii
  misc_feature: SGI cDNA ID NO. 573114
  misc_feature: Encodes the peptide sequence at SEQ ID NO 37775
atggccaggggtcaagggtcagggaaggagagtctccaggtgccaggctccaataacatcaacggcggtgtattactcgcacttaataatctcaaggacatcgaagtgactaactcaaatacgacggtcgaggtcggacctggaaacacctggttcgatgtctacagcttccttaacccgtacgacctctacgtcgttggagggcgactcaagacgatcggaatatctgggctcactctttttggtggctaccactacttcatcaacaagtacggttttgggatggataatgttgtgagctacgatgttgttctgggaaacggtactcaggtggtagctaacgcgagctcgcatcccgagctcttctgggcgctgaagggcggagctaacaatttcggtgtcgtgacaaaattcgtgttcaaaacactcgaggtgcctttaataagtaccacgatacagcaattcgcggagaatgaaattgaggatttcatcaaagcttcggtcgatctctcatacaacgacgataatagcttaggcgctggccagataatcacaatccagtacaatgtgactacaaaggtggcatctgcctcaattataggagttcaggaggggtccgagtcgcctccgtctcacttcgccaacttttcaagcattccctcggtttcgacgatcaataatgtgacgaaaccagcgatattccactcacagctcgacaccccgaaccaaatgttccgtggccaattcgcaatgcacactatgatacacccggatgctgcacaattagtaaagatctacggtgcatggaaagatgcggtggactctatcagtgacgttgaaggtttattgccaactttcgtcttgaatgtgacaccacaaggtgccgcccgagttggccaaacgaatggcatcggcaacgtgtggggtcttgatgcttccacccctagtataatctggcaattcgcaaataactgggtcaaccccgcagatgacatccgaatgtcgctatgggtacggcaacttactgattactggcagtcgaaaaacaaggcactcggcttagcgtcagacttcttgtatatgggtgatacttctgagactcaagatcctttccagggctttcctcgcgaaaatgtcgacagaatgattcgtattcgtagcacttacgatccgcttggagtatttacgagcctgaattggggtggctttaagctcccagcatcggcgtga

SEQ ID NO: 37775 - protein, 409 aa, Muscodor strobelii
  misc_feature: SGI Peptide ID NO. 573114
  misc_feature (2)..(114): Pfam Id: PF01565 Pfam Desc: FAD binding domain
  misc_feature (8)..(405): NCBI GI: 146323223 Blast Desc: FAD-binding oxidoreductase [Aspergillus fumigatus Af293] gi|129556526|gb|EBA27281.1| FAD-binding oxidoreductase, [Aspergillus fumigatus Af293]
  misc_feature (8)..(405): NCBI GI: 145233117 Blast Desc: An02g07980 [Aspergillus niger] gi|134056856|emb|CAK37761.1| protein product [Aspergillus niger]
  misc_feature (8)..(405): NCBI GI: 119474413 Blast Desc: FAD binding domain protein [Neosartorya fischeri NRRL 181] gi|119407235|gb|EAW17185.1| FAD binding domain protein [Neosartorya fischeri NRRL 181]
  misc_feature (8)..(401): NCBI GI: 159128206 Blast Desc: AFUB_044950 [Aspergillus fumigatus A1163]
  misc_feature (8)..(406): NCBI GI: 154311750 Blast Desc: BC1G_06334 [Botryotinia fuckeliana B05.10] gi|150850845|gb|EDN26038.1| BC1G_06334 [Botryotinia fuckeliana B05.10]
  misc_feature (8)..(405): NCBI GI: 169766264 Blast Desc: [Aspergillus oryzae RIB40] gi|83765458|dbj|BAE55601.1| protein product [Aspergillus oryzae]
  misc_feature (8)..(405): NCBI GI: 238482969 Blast Desc: FAD-binding oxidoreductase, [Aspergillus flavus NRRL3357] gi|220700773|gb|EED57111.1| FAD-binding oxidoreductase, [Aspergillus flavus NRRL3357]
  misc_feature (8)..(405): NCBI GI: 261356668 Blast Desc: FAD binding domain-containing protein [Verticillium albo-atrum VaMs.102]
  misc_feature (8)..(405): NCBI GI: 256721867 Blast Desc: NECHADRAFT_54505 [Nectria haematococca mpVI 77-13-4]
  misc_feature (148)..(405): NCBI GI: 67524477 Blast Desc: AN2696.2 [Aspergillus nidulans FGSC A4] gi|40743914|gb|EAA63098.1| AN2696.2 [Aspergillus nidulans FGSC A4] gi|259486393|tpe|CBF84193.1| TPA: conserved [Aspergillus FGSC
MARGQGSGKESLQVPGSNNINGGVLLALNNLKDIEVTNSNTTVEVGPGNTWFDVYSFLNPYDLYVVGGRLKTIGISGLTLFGGYHYFINKYGFGMDNVVSYDVVLGNGTQVVANASSHPELFWALKGGANNFGVVTKFVFKTLEVPLISTTIQQFAENEIEDFIKASVDLSYNDDNSLGAGQIITIQYNVTTKVASASIIGVQEGSESPPSHFANFSSIPSVSTINNVTKPAIFHSQLDTPNQMFRGQFAMHTMIHPDAAQLVKIYGAWKDAVDSISDVEGLLPTFVLNVTPQGAARVGQTNGIGNVWGLDASTPSIIWQFANNWVNPADDIRMSLWVRQLTDYWQSKNKALGLASDFLYMGDTSETQDPFQGFPRENVDRMIRIRSTYDPLGVFTSLNWGGFKLPASA

SEQ ID NO: 37776 - DNA, 1170 bp, Muscodor strobelii
  misc_feature: SGI cDNA ID NO. 573115
  misc_feature: Encodes the peptide sequence at SEQ ID NO 37777
atgatcccgggtgcccaaccccgtcctgtcatccccggcatcgactacaatctacgtcatgggcggttctctaacgctagagttctccgtgacagagatcctgcacccccggctggtgaagatgaagccagagagtttgaaagtgtgcctcgacctgcccctacggcacctgttgctggccgtaacccttttcgagcaccgactgtatctcatcaagttccccgaggccgatctcgctttcgcgtcaccctcacgcggctgcagcgaccaccgcctcaggcgatatcggagaatcttagcagcgattcacacatgcccaatctcatgcatcctcagccacttccggagcagaatgtggttaatgaaggaagcggcttgtcgtcattccacactggcctggtgggctatcatgagcctctccctgcgggtatgatgtctcaaggaggtcttagattgccagatcccccgcagcacccggagaatgctcaggggtttcagctcgctgcaggtggtcaacttggtgatcaaccggaaaatcagttccatggccattacgaaggccagtttggagaccagcgtgcaggccagtttggaggccaattgggagatcaggctggtgcccaacttgaagatgtgtttgatggccagtggaacaatcaggcgggcccgcagttgggagaccagttcggtatggagtatggaaatcctcctgatagacaactggcagagccatttggtggacaggctggagatcagttgtctgataacagtcttggacaacttgtacatgaagcccttggtccctatcagattcctgccgaagcagatctaccgcatgaagaaccaactctccccgccggacgcacgaacttccaaggaggccagccagccagaactctgcggcaacacgttgcacgggcagctgctgccccataccctcagccgctcgcagaagatcaagctctttacattgatccggctattcttaacattgagaacgacgatcctgcccctccggctcttcaagatggtgcagcagacggcgaaggaggtggtcttggtgcagaacaggaccgacacgaggaggaagaagccgtggccggaggcgagactggagcggaggaaggacgccatgagggcgaagagaatgcagagggagaggatgagtag

SEQ ID NO: 37777 - protein, 389 aa, Muscodor strobelii
  misc_feature: SGI Peptide ID NO. 573115
  misc_feature (172)..(253): NCBI GI: 154247613 Blast Desc: Xaut_3687 [Xanthobacter autotrophicus Py2] gi|154161698|gb|ABS68914.1| Xaut_3687 [Xanthobacter autotrophicus Py2]
  misc_feature (170)..(268): NCBI GI: 154247613 Blast Desc: Xaut_3687 [Xanthobacter autotrophicus Py2] gi|154161698|gb|ABS68914.1| Xaut_3687 [Xanthobacter autotrophicus Py2]
  misc_feature (170)..(268): NCBI GI: 154247613 Blast Desc: Xaut_3687 [Xanthobacter autotrophicus Py2] gi|154161698|gb|ABS68914.1| Xaut_3687 [Xanthobacter autotrophicus Py2]
MIPGAQPRPVIPGIDYNLRHGRFSNARVLRDRDPAPPAGEDEAREFESVPRPAPTAPVAGRNPFRAPTVSHQVPRGRSRFRVTLTRLQRPPPQAISENLSSDSHMPNLMHPQPLPEQNVVNEGSGLSSFHTGLVGYHEPLPAGMMSQGGLRLPDPPQHPENAQGFQLAAGGQLGDQPENQFHGHYEGQFGDQRAGQFGGQLGDQAGAQLEDVFDGQWNNQAGPQLGDQFGMEYGNPPDRQLAEPFGGQAGDQLSDNSLGQLVHEALGPYQIPAEADLPHEEPTLPAGRTNFQGGQPARTLRQHVARAAAAPYPQPLAEDQALYIDPAILNIENDDPAPPALQDGAADGEGGGLGAEQDRHEEEEAVAGGETGAEEGRHEGEENAEGEDE

SEQ ID NO: 37778 - DNA, 307 bp, Muscodor strobelii
  misc_feature: SGI EST ID NO. CUFF.90470.0
  misc_feature: Variant of the nucleotide sequence at SEQ ID NO 37776
atcctgcacccccggctggtgaagatgaagccagagagtttgaaagtgtgcctcgacctgcccctacggcacctgttgctggccgtaacccttttcgagcaccgactgtatctcatcaagttccccgaggccgatctcgctttcgcgtcaccctcacgcggctgcagcgaccaccgcctcaggcgatatcggagaatcttagcagcgattcacacatgcccaatctcatgcatcctcagccacttccggagcagaatgtggttaatgaaggaagcggcttgtcgtcattccacactggcctggtggg

SEQ ID NO: 37779 - DNA, 615 bp, Muscodor strobelii
  misc_feature: SGI cDNA ID NO. 573116
  misc_feature: Encodes the peptide sequence at SEQ ID NO 37780
atggaagacactgggcttacgacaatgccaaaggcagtcgcagtcatcatgacggtactcagtcttgcctggctactttcggtctatcacgcgtctgcgatcgcctttgaaagagcgacaatgcgagacgtcgcaattggtctcggagtcggtgtgccgtgcgcgcttctattcctcactgccttccatgcctttctgttagagaggcaagtacgaaaatacatggagagacgcgtagaggaagagaagcagagaaagaacgtcatcattacgcaagaggatgctttcaatggcctctgccagcgaatagaactagaagatgcaaccaaagccgcaatcaacgcgtacaggaatcgaatggatcatggggcgaaaggcttccattctcgagcaacggaagaaagttctagagaggctgccattgtcgaaggtgtcaaagccggccttgcggcagttcgaaagcgggtgccgggatactcataccctcccactaaagacagagaaatatctactccccaatcgcaacaaaaagtccccgaatacagtcccaacaatagttctggagaccaagacgaacaggagaaggtagagaaaagaccctcgcagcgtctctag

SEQ ID NO: 37780 - protein, 204 aa, Muscodor strobelii
  misc_feature: SGI Peptide ID NO. 573116
MEDTGLTTMPKAVAVIMTVLSLAWLLSVYHASAIAFERATMRDVAIGLGVGVPCALLFLTAFHAFLLERQVRKYMERRVEEEKQRKNVIITQEDAFNGLCQRIELEDATKAAINAYRNRMDHGAKGFHSRATEESSREAAIVEGVKAGLAAVRKRVPGYSYPPTKDREISTPQSQQKVPEYSPNNSSGDQDEQEKVEKRPSQRL

SEQ ID NO: 37781 - DNA, 1446 bp, Muscodor strobelii
  misc_feature: SGI cDNA ID NO. 573117
  misc_feature: Encodes the peptide sequence at SEQ ID NO 37782
atggaccgagtgcagagactcaagcctagtgctgcaagctcgcgatcgaaagcagcagcgcttgagaccgcaaccagaaggaagaataaaaaggcggcaagaaaggcgaccaccgcccctacagcattatcctcccctttacgttactctcctttacgttcgtcccccttgtcacccgcctcttccacctcctccgtaacctccccctcccatatccctccgtcctctaccagcaacgatgggcccgcgacgcagcagacgcatggcgcaagacacagaatcgagtgccgcaaggcacgtcattatatttgccagcgcacactgctgggtctcctgcaggcccactccttttactcgttgcgccttgtccgtcgcgaggatgccaagcgagttttggtgctcgaagaggatttacctgcggatagctattgtctcgacatggctggaatcatagcgcagctgcgctattctaagcaagttgttgctgcacagaagccgtacctcgaggccgtgcagcaaagtctcgttaaagccttgagtttactgcactctcgcaatatctcttttcccatctctaccctacaagtcaagtttgcccgaaatttgggtgctcaagcaggcgatctccagtctctagtcctgtttttgccctataataaaatggcccgctttgcatccagggcatcaccacagaactggaaagccaccgaaatggccaccgcctcgtccatcttccgtcttcccctattattaacccgactcgctgccgcctctactaccgccccatttgatctggatactgaaagccagcacgttctcgaagcacacttgagagattgccgatgcattgccgaaatagagcagtgtcttgcgattatcagtcccatgacaagagatcttacttataacattgcgtatcacctcgccatacgcgggaaggagacggccgagatgagctgccgcgtcctagaggcttttttcggcggccctatgcctttacccgattcgtctcctacggcatcgccacatgctatatgcagcaaattcagtgatctgcgtcgccgcgcgcttggttcaggaagatcccgcgaagattattctaagacggacggagagttaggccccgaattcttgctaaattccgatttcgaggttatgcgcttcatccaatgtagagccgaggtcgcgatggtacgcaaagacccagacaaaagcgggtggtggcttgtagcaatgaatctttacgacgccttttgtgccaacaaggagcctgagacgatactagacaagtattaccatggcgttcgaactatgcgggactggcgtagcgtagccgcctcgcgggacgatctcgacggcgacgccatcaaggcagaggctgtggtcaaagccgcccaggccaaagctacacaggcgataacagactggcgggaagcttgggcgtaa

SEQ ID NO: 37782 - protein, 481 aa, Muscodor strobelii
  misc_feature: SGI Peptide ID NO. 573117
MDRVQRLKPSAASSRSKAAALETATRRKNKKAARKATTAPTALSSPLRYSPLRSSPLSPASSTSSVTSPSHIPPSSTSNDGPATQQTHGARHRIECRKARHYICQRTLLGLLQAHSFYSLRLVRREDAKRVLVLEEDLPADSYCLDMAGIIAQLRYSKQVVAAQKPYLEAVQQSLVKALSLLHSRNISFPISTLQVKFARNLGAQAGDLQSLVLFLPYNKMARFASRASPQNWKATEMATASSIFRLPLLLTRLAAASTTAPFDLDTESQHVLEAHLRDCRCIAEIEQCLAIISPMTRDLTYNIAYHLAIRGKETAEMSCRVLEAFFGGPMPLPDSSPTASPHAICSKFSDLRRRALGSGRSREDYSKTDGELGPEFLLNSDFEVMRFIQCRAEVAMVRKDPDKSGWWLVAMNLYDAFCANKEPETILDKYYHGVRTMRDWRSVAASRDDLDGDAIKAEAVVKAAQAKATQAITDWREAWA

SEQ ID NO: 37783 - DNA, 1011 bp, Muscodor strobelii
  misc_feature: SGI cDNA ID NO. 573118
  misc_feature: Reduced expression when VOC is produced
  misc_feature: Encodes the peptide sequence at SEQ ID NO 37784
atggagtacgacacgatgatgatggacggcgagtcgctgggcccgtcggtcaagatctcgtcggccggccccgccaacgtcgacttcgagctgagcaacgtcgacctctcgttcgccaactcgctgcgccgcgtcatccaggccgaggtgcccactgtcgccattgatttagttgagatcgaggtcaacacgtcggtgctggcggacgagttcatcgcacaccgcctcgggctcatcccgctcgactcgcgcgagagcgaccagctcaactactcgcgcgactgcgactgcgaccagagctgcggcaagtgtaccgtcaccctcaccctgcacgccaagtgcaccaccgacggcatcatgaacgtctacgcccgcgacctcctcgtcgccatcgaccgccccaacaaccacatcggcaaccccgtcatcaccgaccccgacggcaccggctccctcatcgccaagctgcgccgcggccaggagctcaagctgacctgcatcgccaagaagggcatcgccaaggagcacgccaagtgggcccccaccgccgccgtcggcttcgagtacgacccccacaacaagctgcaccacctcgacctgtggtacgaggccgacgccgaaaaagaatggcccaagtcggagtacgccaaccgcgaagaaccccccgccggcgagcccttcgactacgacgccgtcccctcccgcttctacttcgaggtcgagagcgccggcaacatagagtcagaccagatcatccaagagggcatcaaggagctgcagaagaagctcgccgccctcatccacggcctcggcgagagcgacggcatgaacggcgactacgacggtccccgcagccccgacggtatggacggcggtgctccctggcaggaccaaggcttcactacgccctatgctggggctggtagtgccagtgcctggggcggtggcggtgcggcgacggcttatggcacgacgccgtatggcaattcggggagcggtggcggttggtga

SEQ ID NO: 37784 - protein, 336 aa, Muscodor strobelii
  misc_feature: SGI Peptide ID NO. 573118
  misc_feature (58)..(180): Pfam Id: PF01000 Pfam Desc: RNA polymerase Rpb3/RpoA insert domain
  misc_feature (25)..(268): Pfam Id: PF01193 Pfam Desc: RNA polymerase Rpb3/Rpb11 dimerisation domain
  misc_feature (1)..(334): NCBI GI: 156055988 Blast Desc: SS1G_05346 [Sclerotinia sclerotiorum 1980] gi|154703130|gb|EDO02869.1| SS1G_05346 [Sclerotinia sclerotiorum 1980]
  misc_feature (1)..(330): NCBI GI: 256730836 Blast Desc: [Nectria haematococca mpVI 77-13-4]
  misc_feature (1)..(328): NCBI GI: 85082680 Blast Desc: DNA-directed RNA polymerase II 33 kDa polypeptide [Neurospora crassa OR74A] gi|7801032|emb|CAB91428.1| DNA-directed RNA polymerase II chain RPB3 [Neurospora crassa] DNA-directed RNA
  misc_feature (1)..(334): NCBI GI: 154310335 Blast Desc: RNA polymerase II subunit 3 [Botryotinia fuckeliana B05.10] gi|150851419|gb|EDN26612.1| RNA polymerase II subunit 3 [Botryotinia fuckeliana B05.10]
  misc_feature (1)..(330): NCBI GI: 46109130 Blast Desc: FG01447.1 [Gibberella zeae PH-1]
  misc_feature (1)..(333): NCBI GI: 67540164 Blast Desc: AN6252.2 [Aspergillus nidulans FGSC A4] gi|40739446|gb|EAA58636.1| AN6252.2 [Aspergillus nidulans FGSC A4] gi|259479538|tpe|CBF69852.1| TPA: RNA polymerase II subunit 3
  misc_feature (1)..(328): NCBI GI: 116205067 Blast Desc: CHGG_10417 [Chaetomium globosum CBS 148.51] gi|88176545|gb|EAQ84013.1| CHGG_10417 [Chaetomium globosum CBS 148.51]
  misc_feature (1)..(333): NCBI GI: 119481479 Blast Desc: RNA polymerase II subunit 3 [Neosartorya fischeri NRRL 181] gi|119408922|gb|EAW18871.1| RNA polymerase II subunit 3 [Neosartorya fischeri NRRL 181]
  misc_feature (1)..(329): NCBI GI: 119190113 Blast Desc: CIMG_05104 [Coccidioides immitis RS]
  misc_feature (1)..(313): NCBI GI: 171689616 Blast Desc: protein product [Podospora anserina] gi|170944770|emb|CAP70881.1| protein product [Podospora anserina]
  misc_feature: Useful for introducing or modulating the production of volatile compounds
MEYDTMMMDGESLGPSVKISSAGPANVDFELSNVDLSFANSLRRVIQAEVPTVAIDLVEIEVNTSVLADEFIAHRLGLIPLDSRESDQLNYSRDCDCDQSCGKCTVTLTLHAKCTTDGIMNVYARDLLVAIDRPNNHIGNPVITDPDGTGSLIAKLRRGQELKLTCIAKKGIAKEHAKWAPTAAVGFEYDPHNKLHHLDLWYEADAEKEWPKSEYANREEPPAGEPFDYDAVPSRFYFEVESAGNIESDQIIQEGIKELQKKLAALIHGLGESDGMNGDYDGPRSPDGMDGGAPWQDQGFTTPYAGAGSASAWGGGGAATAYGTTPYGNSGSGGGW

SEQ ID NO: 37785 - DNA, 3397 bp, Muscodor strobelii
  misc_feature: SGI EST ID NO. CUFF.91070.0
  misc_feature: Variant of the nucleotide sequence at SEQ ID NO 37783
cagccttgcattgcactgcacaccttctccattgtttgccgcgccagccttgctgagaaagtcgccgcattctttcatctcgtcaccacatctcatttctttgtaccaccaccatctcaatcgaccacaccccgtcggcgccctgcgacttcaacgcttgcgatcccaccttgattcgatatttgcgtgccgtttgagagtcatctcggctcgctcgcatcgggcgcgatggagtacgacacgatgatgatggacggcgagtcgctgggcccgtcggtcaagatctcgtcggccggccccgccaacgtcgacttcgagctgagcaacgtcgacctctcgttcgccaactcgctgcgccgcgtcatccaggccgaggtgcccactgtcgccattgatttagttgagatcgaggtcaacacgtcggtgctggcggacgagttcatcgcacaccgcctcgggctcatcccgctcgactcgcgcgagagcgaccagctcaactactcgcgcgactgcgactgcgaccagagctgcggcaagtgtaccgtcaccctcaccctgcacgccaagtgcaccaccgacggcatcatgaacgtctacgcccgcgacctcctcgtcgccatcgaccgccccaacaaccacatcggcaaccccgtcatcaccgaccccgacggcaccggctccctcatcgccaagctgcgccgcggccaggagctcaagctgacctgcatcgccaagaagggcatcgccaaggagcacgccaagtgggcccccaccgccgccgtcggcttcgagtacgacccccacaacaagctgcaccacctcgacctgtggtacgaggccgacgccgaaaaagaatggcccaagtcggagtacgccaaccgcgaagaaccccccgccggcgagcccttcgactacgacgccgtcccctcccgcttctacttcgaggtcgagagcgccggcaacatagagtcagaccagatcatccaagagggcatcaaggagctgcagaagaagctcgccgccctcatccacggcctcggcgagagcgacggcatgaacggcgactacgacggtccccgcagccccgacggtatggacggcggtgctccctggcaggaccaaggcttcactacgccctatgctggggctggtagtgccagtgcctggggcggtggcggtgcggcgacggcttatggcacgacgccgtatggcaattcggggagcggtggcggttggtgagtggtcgaggagagatcagcttgaggtggtgcgttgcattttgtagttttataccaaaaacagtctgagatagggactgtcgcgcatggagtttgatggtaaaatcgggcatgaatgacttggggcatttacatacgttacatccataccggctctttgtctgccagtggcagccggtaggatgaagtcatcatatgaatcaaaaaatacattatcactcactcaactgaagcatacgtgcaaagcgaatgggatgacgatcagccatggctaaagtaggctgagatgagatagatggcaaatgcaatgtgctattatcagataacatgacggataccgccaaccaaacggagtgactccctatgcaagacaacattgtatagtacaatgccatgaaagaccccaaactattgatgctccaaacgccgtattatgatggaaaatgaccatgaagcctatatcgaccgcttgccggccctgctcgtctatcctttccgtgccttcttgctcgtctatacaatgtgaaagggaatgctgatgttggtgctacgcatcgctgtatgaaatgtctgttgctggtgcggaatgtcgagccaagttgctattgatattggcgctgccggcgctgctgttaatgctcgttctcgatgcccttgagctttcgatacatgttcctatgcgcctcgaggaagaggaacgtgcatatcgtttgtctatcatgttgtcagtcaagggttccccattccgcattccatcccgccagacactctctgttcttgaactctccacttggaagtatatcgaaaagagaaacaagaagacaaaagagaaaggtgtactcacggtcccaatctcaaaaacgcaggaacccagcccttaaacatccaacccaagccttccttccgataaatatcacccacaagcttcaccaaactgccgttcgtactcgcgctcatgaccctggacttaataacatcgacgggactgcaaatcgtcgtcgcaacaaagccagcacagagcgaactagcgaaatgcgtcgtcgtcgtgtcgcctagtggggtgtaggtcatcaacatgactttgaaggtgtcataggacgcaagctgtgacgcgttcataagcgcagcgcgcgtagaattgggccagacgccgcgaaaccaggaggagagtccctcggtcgtggccattttgtacatgccgtggaggccgttctggtagtgtcgcttggaggcggcgggcagcatggcttcggattgcatgcgcacgtttacgacgtcggcggcgtttccggcgagaccacctaaaagaccggagaatgtggagaggccgattagcaagggcagggagggtttcgtgccttcgggtgtgaaacggcgttttaggtcttcgtatacgccgaaacggacggtggagtatgtcatttggcgcaggagggaggcggttaggccgtcgtagagaccccttggacccgaggttcgcacgatttggacgagggtgccgatcatggtttttgggtcggtgcctgagcggagttggaggcggacttttactgttggatggaaggcatggggttagaattgagatcgcgcaataagtgatgagaggtagattgagaggtgaggcataccgaggtcgagcgggtgtgtcacgcatgctgccatgctactcgcgctgccgccgaaccaaaacgggtagggaatctgcttgtgcttgagttccttcttctggcgcctgggcttgaggcccggactcggaggcacgggaggcatcgcggcgttgtctggcgttggtgatggaggcattgcgacacctgatgttgacattgcacactacttagtcgactggtgtatgcaagatgatgtaggtgtgcggatcgatcctgagagtccttttctccaaatccccaattggagaagtgcagctcagggatggcagggagacgacgacggcgcaaaagggagatgcattaatcggaagtgactgagtatgtgagccataaagaacacattaagaggtagagatatgatgaagaaggctggcgggacaacctctcacgacgagtagcagtgccgtgtgtgcgggttgggtgtcgtcgagagtggatgatgagcttgtgtcgcgggagttgattttcgagcggatttttcctacagctgcg

SEQ ID NO: 37786 - DNA, 930 bp, Muscodor strobelii
  misc_feature: SGI cDNA ID NO. 573119
  misc_feature: Reduced expression when VOC is produced
  misc_feature: Encodes the peptide sequence at SEQ ID NO 37787
atgcctcccgtgcctccgagtccgggcctcaagcccaggcgccagaagaaggaactcaagcacaagcagattccctacccgttttggttcggcggcagcgcgagtagcatggcagcatgcgtgacacacccgctcgacctcgtaaaagtccgcctccaactccgctcaggcaccgacccaaaaaccatgatcggcaccctcgtccaaatcgtgcgaacctcgggtccaaggggtctctacgacggcctaaccgcctccctcctgcgccaaatgacatactccaccgtccgtttcggcgtatacgaagacctaaaacgccgtttcacacccgaaggcacgaaaccctccctgcccttgctaatcggcctctccacattctccggtcttttaggtggtctcgccggaaacgccgccgacgtcgtaaacgtgcgcatgcaatccgaagccatgctgcccgccgcctccaagcgacactaccagaacggcctccacggcatgtacaaaatggccacgaccgagggactctcctcctggtttcgcggcgtctggcccaattctacgcgcgctgcgcttatgaacgcgtcacagcttgcgtcctatgacaccttcaaagtcatgttgatgacctacaccccactaggcgacacgacgacgacgcatttcgctagttcgctctgtgctggctttgttgcgacgacgatttgcagtcccgtcgatgttattaagtccagggtcatgagcgcgagtacgaacggcagtttggtgaagcttgtgggtgatatttatcggaaggaaggcttgggttggatgtttaagggctgggttcctgcgtttttgagattgggaccacaaacgatatgcacgttcctcttcctcgaggcgcataggaacatgtatcgaaagctcaagggcatcgagaacgagcattaa

SEQ ID NO: 37787 - protein, 309 aa, Muscodor strobelii
  misc_feature: SGI Peptide ID NO. 573119
  misc_feature (27)..(112): Pfam Id: PF00153 Pfam Desc: Mitochondrial carrier protein
  misc_feature (116)..(211): Pfam Id: PF00153 Pfam Desc: Mitochondrial carrier protein
  misc_feature (216)..(303): Pfam Id: PF00153 Pfam Desc: Mitochondrial carrier protein
  misc_feature (24)..(307): NCBI GI: 164427976 Blast Desc: NCU01514 [Neurospora crassa OR74A] gi|157071959|gb|EAA27727.2| NCU01514 [Neurospora crassa OR74A]
  misc_feature (24)..(307): NCBI GI: 16416061 Blast Desc: dicarboxylate carrier protein [Neurospora crassa]
  misc_feature (12)..(306): NCBI GI: 46109132 Blast Desc: FG01448.1 [Gibberella zeae PH-1]
  misc_feature (14)..(307): NCBI GI: 156056006 Blast Desc: SS1G_05355 [Sclerotinia sclerotiorum 1980] gi|154703139|gb|EDO02878.1| SS1G_05355 [Sclerotinia sclerotiorum 1980]
  misc_feature (3)..(309): NCBI GI: 171689614 Blast Desc: protein product [Podospora anserina] gi|170944769|emb|CAP70880.1| protein product [Podospora anserina]
  misc_feature (10)..(309): NCBI GI: 119481463 Blast Desc: mitochondrial dicarboxylate carrier, [Neosartorya fischeri NRRL 181] gi|119408914|gb|EAW18863.1| mitochondrial dicarboxylate carrier, [Neosartorya fischeri NRRL 181]
  misc_feature (1)..(305): NCBI GI: 255932043 Blast Desc: Pc12g07430 [Penicillium chrysogenum Wisconsin 54-1255] gi|211582197|emb|CAP80370.1| Pc12g07430 [Penicillium chrysogenum Wisconsin 54-1255]
  misc_feature (22)..(305): NCBI GI: 67540168 Blast Desc: AN6254.2 [Aspergillus nidulans FGSC A4] gi|40739448|gb|EAA58638.1| AN6254.2 [Aspergillus nidulans FGSC A4] gi|259479536|tpe|CBF69848.1| TPA: similar to mitochondrial
  misc_feature (1)..(309): NCBI GI: 261356880 Blast Desc: mitochondrial dicarboxylate transporter [Verticillium albo-atrum VaMs.102]
  misc_feature (22)..(305): NCBI GI: 115384172 Blast Desc: ATEG_01268 [Aspergillus terreus NIH2624] gi|114196325|gb|EAU38025.1| ATEG_01268 [Aspergillus terreus NIH2624]
  misc_feature: Useful for introducing or modulating the production of volatile compounds
MPPVPPSPGLKPRRQKKELKHKQIPYPFWFGGSASSMAACVTHPLDLVKVRLQLRSGTDPKTMIGTLVQIVRTSGPRGLYDGLTASLLRQMTYSTVRFGVYEDLKRRFTPEGTKPSLPLLIGLSTFSGLLGGLAGNAADVVNVRMQSEAMLPAASKRHYQNGLHGMYKMATTEGLSSWFRGVWPNSTRAALMNASQLASYDTFKVMLMTYTPLGDTTTTHFASSLCAGFVATTICSPVDVIKSRVMSASTNGSLVKLVGDIYRKEGLGWMFKGWVPAFLRLGPQTICTFLFLEAHRNMYRKLKGIENEH

SEQ ID NO: 37788 - DNA, 3260 bp, Muscodor strobelii
  misc_feature: SGI EST ID NO. CUFF.91071.1
  misc_feature: Variant of the nucleotide sequence at SEQ ID NO 37786
cgcagctgtaggaaaaatccgctcgaaaatcaactcccgcgacacaagctcatcatccactctcgacgacacccaacccgcacacacggcactgctactcgtcgtgagaggttgtcccgccagccttcttcatcatatctctacctcttaatgtgttctttatggctcacatactcagtcacttccgattaatgcatctcccttttgcgccgtcgtcgtctccctgccatccctgagctgcacttctccaattggggatttggagaaaaggactctcaggatcgatccgcacacctacatcatcttgcatacaccagtcgactaagtagtgtgcaatgtcaacatcaggtgtcgcaatgcctccatcaccaacgccagacaacgccgcgatgcctcccgtgcctccgagtccgggcctcaagcccaggcgccagaagaaggaactcaagcacaagcagattccctacccgttttggttcggcggcagcgcgagtagcatggcagcatgcgtgacacacccgctcgacctcgtaaaagtccgcctccaactccgctcaggcaccgacccaaaaaccatgatcggcaccctcgtccaaatcgtgcgaacctcgggtccaaggggtctctacgacggcctaaccgcctccctcctgcgccaaatgacatactccaccgtccgtttcggcgtatacgaagacctaaaacgccgtttcacacccgaaggcacgaaaccctccctgcccttgctaatcggcctctccacattctccggtcttttaggtggtctcgccggaaacgccgccgacgtcgtaaacgtgcgcatgcaatccgaagccatgctgcccgccgcctccaagcgacactaccagaacggcctccacggcatgtacaaaatggccacgaccgagggactctcctcctggtttcgcggcgtctggcccaattctacgcgcgctgcgcttatgaacgcgtcacagcttgcgtcctatgacaccttcaaagtcatgttgatgacctacaccccactaggcgacacgacgacgacgcatttcgctagttcgctctgtgctggctttgttgcgacgacgatttgcagtcccgtcgatgttattaagtccagggtcatgagcgcgagtacgaacggcagtttggtgaagcttgtgggtgatatttatcggaaggaaggcttgggttggatgtttaagggctgggttcctgcgtttttgagattgggaccacaaacgatatgcacgttcctcttcctcgaggcgcataggaacatgtatcgaaagctcaagggcatcgagaacgagcattaacagcagcgccggcagcgccaatatcaatagcaacttggctcgacattccgcaccagcaacagacatttcatacagcgatgcgtagcaccaacatcagcattccctttcacattgtatagacgagcaagaaggcacggaaaggatagacgagcagggccggcaagcggtcgatataggcttcatggtcattttccatcataatacggcgtttggagcatcaatagtttggggtctttcatggcattgtactatacaatgttgtcttgcatagggagtcactccgtttggttggcggtatccgtcatgttatctgataatagcacattgcatttgccatctatctcatctcagcctactttagccatggctgatcgtcatcccattcgctttgcacgtatgcttcagttgagtgagtgataatgtattttttgattcatatgatgacttcatcctaccggctgccactggcagacaaagagccggtatggatgtaacgtatgtaaatgccccaagtcattcatgcccgattttaccatcaaactccatgcgcgacagtccctatctcagactgtttttggtataaaactacaaaatgcaacgcaccacctcaagctgatctctcctcgaccactcaccaaccgccaccgctccccgaattgccatacggcgtcgtgccataagccgtcgccgcaccgccaccgccccaggcactggcactaccagccccagcatagggcgtagtgaagccttggtcctgccagggagcaccgccgtccataccgtcggggctgcggggaccgtcgtagtcgccgttcatgccgtcgctctcgccgaggccgtggatgagggcggcgagcttcttctgcagctccttgatgccctcttggatgatctggtctgactctatgttgccggcgctctcgacctcgaagtagaagcgggaggggacggcgtcgtagtcgaagggctcgccggcggggggttcttcgcggttggcgtactccgacttgggccttttgtcacctttattagtatggtctagcagagagtatgtgggagagaggggaaagcgacggggatataccattctttttcggcgtcggcctcgtaccacaggtcgaggtggtgcagcttgttgtgggggtcgtactcgaagccgacggcggcggtgggggcccacttggcgtgctccttggcgatgcccttcttggcgatgcaggtcagcttgagctcctggccgcggcgcagcttggcgatgagggagccggtgccgtcggggtcggtgatgacggggttgccgatgtggttgttggggcggtcgatggcgacgaggaggtcgcgggcgtagacgttcatgatgccgtcggtggtgcacttggcgtgcagggtgagggtgacggtacacttgccgcagctctggtcgcagtcgcagtcgcgcgagtagttgagctggtcgctctcgcgcgagtcgagcgggatgagcccgaggcggtgtgcgatgaactcgtccgccagcaccgacgtgttgacctcgatctcaactaaatcaatggcgacagtgggcacctcggcctggatgacgcggcgcagcgagttggcgaacgagaggtcgacgttgctcagctcgaagtcgacgttggcggggccggccgacgagatcttgaccgacgggcccagcgactcgccgtccatcatcatcgtgtcgtactccatcgcgcccgatgcgagcgagccgagatgactctcaaacggcacgcaaatatcgaatcaaggtgggatcgcaagcgttgaagtcgcagggcgccgacggggtgtggtcgattgagatggtggtggtacaaagaaatgagatgtggtgacgagatgaaagaatgcggcgactttctcagcaaggctggcgcggcaaacaatggagaaggtgtgcagtgcaatgcaaggctg

SEQ ID NO: 37789 - DNA, 423 bp, Muscodor strobelii
  misc_feature: SGI cDNA ID NO. 573120
  misc_feature: Encodes the peptide sequence at SEQ ID NO 37790
atgatgctcaaatttctcgtcgcaattgcacctgcattcttcgcgaccactgtcgcggcggccgatccagacttcccacgatggacctcagatattccctccaatgcggttatcggctctgaactcgtcctcgagtgggtgcctcaagataccactgcgactttcaaactccatctcaatgcctataacaacacaccttcaggctactacaccggccccttcggtgctcagcttcccagctacgatggaatgagcgtgtatctcgacgaagcggtaccattctcggacggtgtgtatcgatgggttgttcaggccatgaaaccaacttggaagggcgacgggtttaattatcgactcacggctgaattcctcgacccgctctctgcgacctcgtctccgggcggcttccacgtcgtggactaa

SEQ ID NO: 37790 - protein, 140 aa, Muscodor strobelii
  misc_feature: SGI Peptide ID NO. 573120
MMLKFLVAIAPAFFATTVAAADPDFPRWTSDIPSNAVIGSELVLEWVPQDTTATFKLHLNAYNNTPSGYYTGPFGAQLPSYDGMSVYLDEAVPFSDGVYRWVVQAMKPTWKGDGFNYRLTAEFLDPLSATSSPGGFHVVD

SEQ ID NO: 37791 - DNA, 960 bp, Muscodor strobelii
  misc_feature: SGI cDNA ID NO. 573121
  misc_feature: Encodes the peptide sequence at SEQ ID NO 37792
atggcttcgaccccgatgctcacgtatctctaccgcaaggccgttgtcgtctgcattcggacggtgattgggttcgtggcctccggtatgatcaagcgcgatgcagctttcattcccgctggagtcaaaagggaacgcatccgcatgccgtcgcgagaagccggccgattcatcaacgcggacctgtactcatctgccccccaagacggcaacaacagcttgcaggcgacaaagccctctctcccggcggtcctggtcaacttccatgggtctggattcatgtgccctgggctcggtactgacgcgctgttctgctcacgactagtccatgtctgcggcgacggccttgtggtcctggacgccgactaccgcaagggacccgagacgacgtttccgggcccgcaggaggacatcgaagacgtgctacaatgggtggaacagagcaagcgcttcgactcgtcgcgcgtggcactgtccgggttcagctcaggtgccaccctggccctctgcgccgccgcctcaccgcaggccgtcgacgtccgcgccgtcgttgccacgtatccgctgacggacatgacgttgcagaacgaggtccgggtttcgccgcggcccgtaatgccgcagcctgactggatgatggacgtgatgctcaactgctgcgtgccggatcgtgcgcgaagggcggacccgcgtgtctcgcctgcccacgccgacttgtcggcgtacccgcccaccgtggcgttcctattgtgcgacggcgacagagtgatgccggaggcgaacagactggcggacaggctcgaaggagagcctgggaagaaggttgtaaggtacacggcggcgccgggcatacatcatgggtttgataaaggacctgcgcccgggtccgaggaagcgaggaagcgggatgagatgtatgcaattgcgactgacaccgtccgggaggtatttggattatag

SEQ ID NO: 37792 - protein, 319 aa, Muscodor strobelii
  misc_feature: SGI Peptide ID NO. 573121
  misc_feature (85)..(290): Pfam Id: PF07859 Pfam Desc: alpha/beta hydrolase fold
  misc_feature (7)..(315): NCBI GI: 256728625 Blast Desc: NECHADRAFT_50954 [Nectria haematococca mpVI 77-13-4]
  misc_feature (1)..(316): NCBI GI: 256730298 Blast Desc: NECHADRAFT_82652 [Nectria haematococca mpVI 77-13-4]
  misc_feature (1)..(317): NCBI GI: 46115932 Blast Desc: FG03808.1 [Gibberella zeae PH-1]
  misc_feature (56)..(318): NCBI GI: 256719834 Blast Desc: NECHADRAFT_89544 [Nectria haematococca mpVI 77-13-4]
  misc_feature (7)..(309): NCBI GI: 145234208 Blast Desc: An02g13440 [Aspergillus niger] gi|134057419|emb|CAK47757.1| protein product [Aspergillus niger]
  misc_feature (6)..(306): NCBI GI: 67537326 Blast Desc: AN4833.2 [Aspergillus nidulans FGSC A4] gi|40740878|gb|EAA60068.1| AN4833.2 [Aspergillus nidulans FGSC A4] gi|259482312|tpe|CBF76674.1| TPA: esterase/lipase, nidulans
  misc_feature (6)..(309): NCBI GI: 115385132 Blast Desc: conserved [Aspergillus terreus NIH2624] gi|114196805|gb|EAU38505.1| conserved [Aspergillus terreus NIH2624]
  misc_feature (7)..(310): NCBI GI: 121704958 Blast Desc: esterase/lipase, [Aspergillus clavatus NRRL 1] gi|119398888|gb|EAW09316.1| esterase/lipase, [Aspergillus clavatus NRRL 1]
  misc_feature (7)..(318): NCBI GI: 71018089 Blast Desc: UM03128.1 [Ustilago maydis 521] gi|46098941|gb|EAK84174.1| UM03128.1 [Ustilago maydis 521]
  misc_feature (6)..(309): NCBI GI: 238505750 Blast Desc: AFLA_102120 [Aspergillus flavus NRRL3357] gi|220690197|gb|EED46547.1| AFLA_102120 [Aspergillus flavus NRRL3357]
MASTPMLTYLYRKAVVVCIRTVIGFVASGMIKRDAAFIPAGVKRERIRMPSREAGRFINADLYSSAPQDGNNSLQATKPSLPAVLVNFHGSGFMCPGLGTDALFCSRLVHVCGDGLVVLDADYRKGPETTFPGPQEDIEDVLQWVEQSKRFDSSRVALSGFSSGATLALCAAASPQAVDVRAVVATYPLTDMTLQNEVRVSPRPVMPQPDWMMDVMLNCCVPDRARRADPRVSPAHADLSAYPPTVAFLLCDGDRVMPEANRLADRLEGEPGKKVVRYTAAPGIHHGFDKGPAPGSEEARKRDEMYAIATDTVREVFGL

SEQ ID NO: 37793 - DNA, 704 bp, Muscodor strobelii
  misc_feature: SGI EST ID NO. CUFF.90504.0
  misc_feature: Variant of the nucleotide sequence at SEQ ID NO 37791
gttcgtggcctccggtatgatcaagcgcgatgcagctttcattcccgctggagtcaaaagggaacgcatccgcatgccgtcgcgagaagccggccgattcatcaacgcggacctgtactcatctgccccccaagacggcaacaacagcttgcaggcgacaaagccctctctcccggcggtcctggtcaacttccatgggtctggattcatgtgccctgggctcggtactgacgcgctgttctgctcacgactagtccatgtctgcggcgacggccttgtggtcctggacgccgactaccgcaagggacccgagacgacgtttccgggcccgcaggaggacatcgaagacgtgctacaatgggtggaacagagcaagcgcttcgactcgtcgcgcgtggcactgtccgggttcagctcaggtgccaccctggccctctgcgccgccgcctcaccgcaggccgtcgacgtccgcgccgtcgttgccacgtatccgctgacggacatgacgttgcagaacgaggtccgggtttcgccgcggcccgtaatgccgcagcctgactggatgatggacgtgatgctcaactgctgcgtgccggatcgtgcgcgaagggcggacccgcgtgtctcgcctgcccacgccgacttgtcggcgtacccgcccaccgtggcgttcctattgtgcgacggcgacagagtgatgccgg

SEQ ID NO: 37794 - DNA, 549 bp, Muscodor strobelii
  misc_feature: SGI cDNA ID NO. 573122
  misc_feature: Elevated expression when VOC is produced
  misc_feature: Encodes the peptide sequence at SEQ ID NO 37795
atggtagagttcaacacacaggtagtgcagccgaatatttcggatccattcagccttcaacacaactgggccacgatcccgggaggatgtctcagaccgtccctagactacgaaattcccgttgtctgtcaggtcaaaaagaaaaccgaggcgtataacacagacaatctcggggccgagtttgacgttttcaggcactgttgtttgggcacgagacatgacaacgtgacacaatggaccatgatcgatccgtgcgagccggagtattgcttcacggacaacacgacggttatggcaggctttgacgagtgcattgtcaatagcacgtccgctctttacaagaggttgaacatgccagcgccgaacgacaccttggctgacccgccttatcgcggcctgtgcgattatatcgattacgacagcctgaagaagggcatccgcaccgacgaacagctcggtgccaccaccaacttatcccctcggcttggtgcttgggtggttttgctgatcacaatggctgcctctgttttcacatcaggtctgctatga

SEQ ID NO: 37795 - protein, 182 aa, Muscodor strobelii
  misc_feature: SGI Peptide ID NO. 573122
  misc_feature: Useful for introducing or modulating the production of volatile compounds
MVEFNTQVVQPNISDPFSLQHNWATIPGGCLRPSLDYEIPVVCQVKKKTEAYNTDNLGAEFDVFRHCCLGTRHDNVTQWTMIDPCEPEYCFTDNTTVMAGFDECIVNSTSALYKRLNMPAPNDTLADPPYRGLCDYIDYDSLKKGIRTDEQLGATTNLSPRLGAWVVLLITMAASVFTSGLL

SEQ ID NO: 37796 - DNA, 1083 bp, Muscodor strobelii
  misc_feature: SGI EST ID NO. CUFF.90511.0
  misc_feature: Variant of the nucleotide sequence at SEQ ID NO 37794
cacgcggaaccaacagacatgcttggcgccgtcattgtgctggttgtaacaagtgaaaaaacaactaagaatagtaccaacagcataagtattgcaattgcacaataatcattacatcattctcatgaggaggagcacccactcaatgcgtgacctgaggatgaacaaaccaacagcttctgccctgaaatatcaacaacgtttcgcgccgtcgccgctgcatcaacagtagtctgtcgcactcgcaacacagtttacaaaactccagatcaatcgatcacttcacgtctcggctgtttttatttcgtcccttgattaacaacatggtagagttcaacacacaggtagtgcagccgaatatttcggatccattcagccttcaacacaactgggccacgatcccgggaggatgtctcagaccgtccctagactacgaaattcccgttgtctgtcaggtcaaaaagaaaaccgaggcgtataacacagacaatctcggggccgagtttgacgttttcaggcactgttgtttgggcacgagacatgacaacgtgacacaatggaccatgatcgatccgtgcgagccggagtattgcttcacggacaacacgacggttatggcaggctttgacgagtgcattgtcaatagcacgtccgctctttacaagaggttgaacatgccagcgccgaacgacaccttggctgacccgccttatcgcggcctgtgcgattatatcgattacgacagcctgaagaagggcatccgcaccgacgaacagctcggtgccaccaccaacttatcccctcggcttggtgcttgggtggttttgctgatcacaatggctgcctctgttttcacatcaggtctgctatgatcgatgggaagggaagggcagtgcgtatgtctagctggagcaaactgtaatatcatcgtgtcgtacgagagcagtctcggtccagatcttagggcgactatggtgcaatatcaatagataatcatgagcaagctgtactctatgttatactcaatcaagctttcaaatcactgaatataataacggcaacaaatttgatccgaaaaacggc

SEQ ID NO: 37797 - DNA, 315 bp, Muscodor strobelii
  misc_feature: SGI cDNA ID NO. 573123
  misc_feature: Encodes the peptide sequence at SEQ ID NO 37798
atgtttctcgaggataggactacttgcttcaacttcagagctttaagggcttcgtcggcggtctctactcgccgcgacggcactgttgcgtccgaaaatgtctccaagactggctgctcgaagcgcgtaacgtcttcccatttacataattctacgccagtcactccgaccatcaccccagtcgatcctgctccgccagaagatctggacaacggccgcaccgaacgccagaaactttctggcccagatcacacagcagtcccagacacagcagccccagacacccttggtggtctcacgcatgcaatgttttaa

SEQ ID NO: 37798 - protein, 104 aa, Muscodor strobelii
  misc_feature: SGI Peptide ID NO. 573123
MFLEDRTTCFNFRALRASSAVSTRRDGTVASENVSKTGCSKRVTSSHLHNSTPVTPTITPVDPAPPEDLDNGRTERQKLSGPDHTAVPDTAAPDTLGGLTHAMF

SEQ ID NO: 37799 - DNA, 1542 bp, Muscodor strobelii
  misc_feature: SGI cDNA ID NO. 573124
  misc_feature: Reduced expression when VOC is produced
  misc_feature: Encodes the peptide sequence at SEQ ID NO 37800
atgagctgccacatctgccagcgggtgcatcaccccaagcacctccccttcctctgcgctaccgacgttaggaacgagctgtacgatgggcgcattgcaaatgccaggcttcacatcgaaatgggcgagttggaggcccgcgtcaacaagctgctgctcgacgtcaaggtcgctgacgactctccgacgagccatccttcgcgaacctacctcgagaactgtcggtctgaggaacagatggccaaggacaggacggagcgcatcatagcctccgccgacaggcttcgagacgaggtcgctgcggcaaaaaaagacatcgaacaaaggaaagccgccattgctctcaagaagtccgacatcgccgccgcttcccggggcactgctgcacgccgaactagacagatcgacgagatgttgtcgagcacgcgcatcatcaagtacaactgggacaaagacaacacgggaatgaccagctacagagccgcgctgtgtatggaggtcgccaagctctacaggctgcagcgcatacggcgcgggaaccccgcccgcttcgaatacagtatcgcaggcatcgagcttatcgacttgcagagcatgaacaacgtccaacccgaacatctctcggcatcactcaaccacatcacccacctgctatacctcgcctcccactatctcgccatccgtttgcccgccgaaatcacgctcccacacaatgactacccacgtccaacgatattcagcctcagctcctcttaccaacacgacgaggttgcctttcccggatcatcgcccatccctccagatccgcgtgatgtacaattcgcaaacgtaccatttccccgccccttatttctcgacaaacccctcgtcacactagccaaagaggacccagcaacctacaacgcatttctcgagggcgcctgtctactagcctacgacatagtctggctctgccgaacacagggtgtgccggtgggcgataacactagctccttcgacgcatttgcgaatatggggcggaatttatataatctcctcatcaactcctcgctacagcggaatacacagcagatcgctgacgggacggggaatcatgctactacagtcgatcatcccgagctgggcaagacgggtcctcggatggggttatttacccacgccagtagtcatactttccttggaagtgcggtgggaaacgagttgttacggagtttcaagctacctaatcccgtgaaacttacagacaaactgaagagcaagcttaaccatgagaacccgattccggaatgggaggtactggaggacgatgcttggaccccagacgatgccgatgatggtgtgcttgtcggaggcacgagaccgaagatgaggattggcgaacgagggggcaggtttggggtcgagagtttcatgagtgttgctaccgctaggagtggtgggagtgctgattctccaatgagcattaaggtcgctgcggagaaggatagggacaaggaacgggagaagggtgggaatgggtggacgaagattaaaccgagatag

SEQ ID NO: 37800 - protein, 513 aa, Muscodor strobelii
  misc_feature: SGI Peptide ID NO. 573124
  misc_feature (1)..(438): NCBI GI: 256734747 Blast Desc: NECHADRAFT_75315 [Nectria haematococca mpVI 77-13-4]
  misc_feature (1)..(513): NCBI GI: 261355267 Blast Desc: conserved [Verticillium albo-atrum VaMs.102]
  misc_feature (1)..(439): NCBI GI: 39943236 Blast Desc: MGG_03698 [Magnaporthe grisea 70-15] gi|145009707|gb|EDJ94363.1| MGG_03698 [Magnaporthe grisea 70-15]
  misc_feature (1)..(473): NCBI GI: 46107584 Blast Desc: FG00675.1 [Gibberella zeae PH-1]
  misc_feature (1)..(513): NCBI GI: 156040489 Blast Desc: SS1G_12261 [Sclerotinia sclerotiorum 1980] gi|154696317|gb|EDN96055.1| SS1G_12261 [Sclerotinia sclerotiorum 1980]
  misc_feature (1)..(513): NCBI GI: 85115959 Blast Desc: NCU03105 [Neurospora crassa OR74A] gi|28926763|gb|EAA35728.1| [Neurospora crassa OR74A]
  misc_feature (1)..(452): NCBI GI: 171687789 Blast Desc: protein product [Podospora anserina] gi|170943856|emb|CAP69508.1| protein product [Podospora anserina]
  misc_feature (1)..(513): NCBI GI: 154320792 Blast Desc: BC1G_01868 [Botryotinia fuckeliana B05.10] gi|150853557|gb|EDN28749.1| BC1G_01868 [Botryotinia fuckeliana B05.10]
  misc_feature (1)..(513): NCBI GI: 258575559 Blast Desc: [Uncinocarpus reesii 1704] gi|237902227|gb|EEP76628.1| [Uncinocarpus reesii 1704]
  misc_feature (1)..(513): NCBI GI: 116180442 Blast Desc: CHGG_00849 [Chaetomium globosum CBS 148.51] gi|88185146|gb|EAQ92614.1| CHGG_00849 [Chaetomium globosum CBS 148.51]
  misc_feature: Useful for introducing or modulating the production of volatile compounds
MSCHICQRVHHPKHLPFLCATDVRNELYDGRIANARLHIEMGELEARVNKLLLDVKVADDSPTSHPSRTYLENCRSEEQMAKDRTERIIASADRLRDEVAAAKKDIEQRKAAIALKKSDIAAASRGTAARRTRQIDEMLSSTRIIKYNWDKDNTGMTSYRAALCMEVAKLYRLQRIRRGNPARFEYSIAGIELIDLQSMNNVQPEHLSASLNHITHLLYLASHYLAIRLPAEITLPHNDYPRPTIFSLSSSYQHDEVAFPGSSPIPPDPRDVQFANVPFPRPLFLDKPLVTLAKEDPATYNAFLEGACLLAYDIVWLCRTQGVPVGDNTSSFDAFANMGRNLYNLLINSSLQRNTQQIADGTGNHATTVDHPELGKTGPRMGLFTHASSHTFLGSAVGNELLRSFKLPNPVKLTDKLKSKLNHENPIPEWEVLEDDAWTPDDADDGVLVGGTRPKMRIGERGGRFGVESFMSVATARSGGSADSPMSIKVAAEKDRDKEREKGGNGWTKIKPR

SEQ ID NO: 37801 - DNA, 2203 bp, Muscodor strobelii
  misc_feature: SGI EST ID NO. CUFF.90801.1
  misc_feature: Variant of the nucleotide sequence at SEQ ID NO 37799
ggaccagtgagacggaggacgatctggtgataggccgtggtccttggcttgcatgacgctatctctgaaagaggtgacccgatacagccgataaggcaatgcctgggaccgaaagcggtgcactggtcaggaatgggaacaacctaatccacagtgggacatcacgtcacaaggacacagcaccagccacaaaccctgtcacgactccgacgtcgtctgcctcgccgtacctttcaccttactttagtattcaccttttgtctctgtagtcctcgatcgttcctttccgactcttttggttgcctattgtcttgcgttaccttgtgcattgataatatcattctcttatttaccgcaacatcgaggtcgataatcgatatgcagtctgtctctcgctccgatactttcaacgtcaccgccacgcaccgagacgacctgccctccatacatccataagcttataaatatcggaaccgtgcttcctcaacaatactatttccatactttgtcagtgcaacagactcgataacctgtcgcgatgagctgccacatctgccagcgggtgcatcaccccaagcacctccccttcctctgcgctaccgacgttaggaacgagctgtacgatgggcgcattgcaaatgccaggcttcacatcgaaatgggcgagttggaggcccgcgtcaacaagctgctgctcgacgtcaaggtcgctgacgactctccgacgagccatccttcgcgaacctacctcgagaactgtcggtctgaggaacagatggccaaggacaggacggagcgcatcatagcctccgccgacaggcttcgagacgaggtcgctgcggcaaaaaaagacatcgaacaaaggaaagccgccattgctctcaagaagtccgacatcgccgccgcttcccggggcactgctgcacgccgaactagacagatcgacgagatgttgtcgagcacgcgcatcatcaagtacaactgggacaaagacaacacgggaatgaccagctacagagccgcgctgtgtatggaggtcgccaagctctacaggctgcagcgcatacggcgcgggaaccccgcccgcttcgaatacagtatcgcaggcatcgagcttatcgacttgcagagcatgaacaacgtccaacccgaacatctctcggcatcactcaaccacatcacccacctgctatacctcgcctcccactatctcgccatccgtttgcccgccgaaatcacgctcccacacaatgactacccacgtccaacgatattcagcctcagctcctcttaccaacacgacgaggttgcctttcccggatcatcgcccatccctccagatccgcgtgatgtacaattcgcaaacgtaccatttccccgccccttatttctcgacaaacccctcgtcacactagccaaagaggacccagcaacctacaacgcatttctcgagggcgcctgtctactagcctacgacatagtctggctctgccgaacacagggtgtgccggtgggcgataacactagctccttcgacgcatttgcgaatatggggcggaatttatataatctcctcatcaactcctcgctacagcggaatacacagcagatcgctgacgggacggggaatcatgctactacagtcgatcatcccgagctgggcaagacgggtcctcggatggggttatttacccacgccagtagtcatactttccttggaagtgcggtgggaaacgagttgttacggagtttcaagctacctaatcccgtgaaacttacagacaaactgaagagcaagcttaaccatgagaacccgattccggaatgggaggtactggaggacgatgcttggaccccagacgatgccgatgatggtgtgcttgtcggaggcacgagaccgaagatgaggattggcgaacgagggggcaggtttggggtcgagagtttcatgagtgttgctaccgctaggagtggtgggagtgctgattctccaatgagcattaaggtcgctgcggagaaggatagggacaaggaacgggagaagggtgggaatgggtggacgaagattaaaccgagatagatgacaccagagactcgagtgggctttgggttaagcttttgaatagcatcgcattaagaatgattctggccgaagatggacaagaagcgcgactgtgatgtgccaccacgccgcctcgtaacg

SEQ ID NO: 37802 - DNA, 543 bp, Muscodor strobelii
  misc_feature: SGI cDNA ID NO. 573125
  misc_feature: Encodes the peptide sequence at SEQ ID NO 37803
atgtcgccagctaaggcgccccaaactccagatcgcaccggcgttgaccagtctatgatggtcgagccgcccacacaaattgagcattcgtctcctcaagatgagaccgtcagactacatacaaacatgcagagtccgcgcagacaacagctacgcgaagatcaagtacccgatcagcaataccaggctcagactccggagacgcagaagcgccagagcaacaaatcagccataactgctagccccggccacctggctgactttgactgggaaaatttcgaggctcgctaccagcaggcattagaggaggcagacgcgaatgagagacagatgctcgaggagtttgagcgtttggtaaagtacttcaacgtctgggcctcggctgcgtcaagccacgataatgagcgcgcagtcaaaaggctgcaaacccgccagcggtatgttcgtctcgaggagcggtctctccaacagaagaagcagcatcttaccgaggtagtgaatgcattccagagtgctctagcattattgagtacatcatcatga

SEQ ID NO: 37803 - protein, 180 aa, Muscodor strobelii
  misc_feature: SGI Peptide ID NO. 573125
  misc_feature (62)..(177): NCBI GI: 171687791 Blast Desc: protein product [Podospora anserina] gi|170943857|emb|CAP69509.1| protein product [Podospora anserina]
  misc_feature (80)..(180): NCBI GI: 85115963 Blast Desc: NCU03106 [Neurospora crassa OR74A] gi|28926764|gb|EAA35729.1| [Neurospora crassa OR74A]
  misc_feature (65)..(177): NCBI GI: 261355266 Blast Desc: conserved [Verticillium albo-atrum VaMs.102]
  misc_feature (62)..(166): NCBI GI: 145615922 Blast Desc: MGG_03697 [Magnaporthe grisea 70-15] gi|145009708|gb|EDJ94364.1| MGG_03697 [Magnaporthe grisea 70-15]
  misc_feature (19)..(178): NCBI GI: 256735454 Blast Desc: NECHADRAFT_75314 [Nectria haematococca mpVI 77-13-4]
  misc_feature (62)..(178): NCBI GI: 46107586 Blast Desc: FG00676.1 [Gibberella zeae PH-1]
  misc_feature (85)..(177): NCBI GI: 156040487 Blast Desc: [Sclerotinia sclerotiorum 1980] gi|154696316|gb|EDN96054.1| [Sclerotinia sclerotiorum 1980]
  misc_feature (85)..(176): NCBI GI: 189203251 Blast Desc: PTRG_07629 [Pyrenophora tritici-repentis Pt-1C-BFP] gi|187985060|gb|EDU50548.1| PTRG_07629 [Pyrenophora tritici-repentis Pt-1C-BFP]
  misc_feature (85)..(177): NCBI GI: 154320790 Blast Desc: [Botryotinia fuckeliana B05.10] gi|150853556|gb|EDN28748.1| [Botryotinia fuckeliana B05.10]
  misc_feature (79)..(177): NCBI GI: 145253400 Blast Desc: An16g09160 [Aspergillus niger] gi|134083778|emb|CAK47112.1| protein product [Aspergillus niger]
MSPAKAPQTPDRTGVDQSMMVEPPTQIEHSSPQDETVRLHTNMQSPRRQQLREDQVPDQQYQAQTPETQKRQSNKSAITASPGHLADFDWENFEARYQQALEEADANERQMLEEFERLVKYFNVWASAASSHDNERAVKRLQTRQRYVRLEERSLQQKKQHLTEVVNAFQSALALLSTSS

SEQ ID NO: 37804 - DNA, 3381 bp, Muscodor strobelii
  misc_feature: SGI EST ID NO. CUFF.90800.0
  misc_feature: Variant of the nucleotide sequence at SEQ ID NO 37802
cgttacgaggcggcgtggtggcacatcacagtcgcgcttcttgtccatcttcggccagaatcattcttaatgcgatgctattcaaaagcttaacccaaagcccactcgagtctctggtgtcatctatctcggtttaatcttcgtccacccattcccacccttctcccgttccttgtccctatccttctccgcagcgaccttaatgctcattggagaatcagcactcccaccactcctagcggtagcaacactcatgaaactctcgaccccaaacctgccccctcgttcgccaatcctcatcttcggtctcgtgcctccgacaagcacaccatcatcggcatcgtctggggtccaagcatcgtcctccagtacctcccattccggaatcgggttctcatggttaagcttgctcttcagtttgtctgtaagtttcacgggattaggtagcttgaaactccgtaacaactcgtttcccaccgcacttccaaggaaagtatgactactggcgtgggtaaataaccccatccgaggacccgtcttgcccagctcgggatgatcgactgtagtagcatgattccccgtcccgtcagcgatctgctgtgtattccgctgtagcgaggagttgatgaggagattatataaattccgccccatattcgcaaatgcgtcgaaggagctagtgttatcgcccaccggcacaccctgtgttcggcagagccagactatgtcgtaggctagtagacaggcgccctcgagaaatgcgttgtaggttgctgggtcctctttggctagtgtgacgaggggtttgtcgagaaataaggggcggggaaatggtacgtttgcgaattgtacatcacgcggatctggagggatgggcgatgatccgggaaaggcaacctcgtcgtgttggtaagaggagctgaggctgaatatcgttggacgtgggtagtcattgtgtgggagcgtgatttcggcgggcaaacggatggcgagatagtgggaggcgaggtatagcaggtgggtgatgtggttgagtgatgccgagagatgttcgggttggacgtctgggaaagaagtaagtatgatgtgcacggtatccagaatacgatgacaaggaaaaccatactgttcatgctctgcaagtcgataagctcgatgcctgcgatactgtattcgaagcgggcggggttcccgcgccgtatgcgctgcagcctgtagagcttggcgacctccatacacagcgcggctctgtagctggtcattcccgtgttgtctttgtcccagttgtacttgatgatgcgcgtgctcgacaacatctcgtcgatctgtctagttcggcgtgcagcagtgccccgggaagcggcggcgatgtcggacttcttgagagcaatggcggctttcctttgttcgatgtctttttttgccgcagcgacctcgtctcgaagcctgtcggcggaggctatgatgcgctccgtcctgtccttggccatctgttcctcagaccgacagttctcgaggtaggttcgcgaaggatggctcgtcggagagtcgtcagcgaccttgacgtcgagcagcagcttgttgacgcgggcctccaactcgcccatttcgatgtgaagcctggcatttgcaatgcgcccatcgtacagctcgttcctaacgtcggtagcgcagaggaaggggaggtgcttggggtgatgcacccgctggcagatgtggcagctcatcgcgacaggttatcgagtctgttgcactgacaaagtatggaaatagtattgttgaggaagcacggttccgatatttataagcttatggatgtatggagggcaggtcgtctcggtgcgtggcggtgacgttgaaagtatcggagcgagagacagactgcatatcgattatcgacctcgatgttgcggtaaataagagaatgatattatcaatgcacaaggtaacgcaagacaataggcaaccaaaagagtcggaaaggaacgatcgaggactacagagacaaaaggtgaatactaaagtaaggtgaaaggtacggcgaggcagacgacgtcggagtcgtgacagggtttgtggctggtgctgtgtccttgtgacgtgatgtcccactgtggattaggttgttcccattcctgaccagtgcaccgctttcggtcccaggcattgccttatcggctgtatcgggtcacctctttcagagatagcgtcatgcaagccaaggaccacggcctatcaccagatcgtcctccgtctcactggtcctctctgccacgagcatgcaacagatgaatgcagggcagtatgcagcttttgggctggaatggccatcgttgattgtgcctgatcaaaatactatatgctgaggatcctcaaacttcgtgtaacaagaagggctcatctatacttctgcatacaccagcagactctcgttttgcacttgcggccatgtccacaaccccccaaaccatgtcgccagctaaggcgccccaaactccagatcgcaccggcgttgaccagtctatgatggtcgagccgcccacacaaattgagcattcgtctcctcaagatgagaccgtcagactacatacaaacatgcagagtccgcgcagacaacagctacgcgaagatcaagtacccgatcagcaataccaggctcagactccggagacgcagaagcgccagagcaacaaatcagccataactgctagccccggccacctggctgactttgactgggaaaatttcgaggctcgctaccagcaggcattagaggaggcagacgcgaatgagagacagatgctcgaggagtttgagcgtttggtaaagtacttcaacgtctgggcctcggctgcgtcaagccacgataatgagcgcgcagtcaaaaggctgcaaacccgccagcggtatgttcgtctcgaggagcggtctctccaacagaagaagcagcatcttaccgaggtagtgaatgcattccagagtgctctagcattattgagtacatcatcatgattcgagacttgagagctgcctatatcctcggttgtctcatgagatggtcgcactgtatactgcaaattcgtaagtagtgatgcaagaccaaagggccctaatcttctttaacgaataagaggctcgcagttataatgaattccagctttgtcatttgtcttggtgaggcccaaagattctcgatagattctcgagagagcaaagggggcttttcacttcaaggagttagacgactttcacgaagacacgatttacgacacacatagctcatgaccttgtatggtaacaaatataataatggactgtactcattcatgataattcctattattgaatcaatagtcacggcaacgattgtctgaacactca

SEQ ID NO: 37805 - DNA, 675 bp, Muscodor strobelii
  misc_feature: SGI cDNA ID NO. 573126
  misc_feature: Encodes the peptide sequence at SEQ ID NO 37806
atgtcagcctcgctgtcagcttcgatcccttttgaagcaccagatgtctccgaggcagacatcgcatcatttcacgcgtcgcatttctcccccgacgcagtaaactctttcggctcccatttttggaacagcgagacccgtacgcacgcagggagcatcgagtactacgaagaagaagatgatggacttggctactaccccgacggagtcaaacggaccctaaccgacgaccaaattgccatctttcggcactccgagctcgaggccctgcgccgcgctgaagagcaatcacagaatcgagtgtcgaacaacgatcagccgcacaccaagcccacttctgtcgacacaccaaacacatcgcaatatgacgaaagtatcaaagacgaagagatggctgacgaagctgcggaaggcagcgaggacggcgagatcgaaacggagaaaactgttctcaccaaggcggaattgaaacgccaaaagagacaacgtgccagacagaagaagagagcggcggagcgcaagttcgtaccggagaagaagccggatctgcgcaagaggacgtgggatgtggtcgaggctggtatggacaccctctactacgacgacgttgggactgcgcaaagccaggaggcgacgagggctgccactaggaggcagatttcttacgacgactga

SEQ ID NO: 37806 - protein, 224 aa, Muscodor strobelii
  misc_feature: SGI Peptide ID NO. 573126
  misc_feature (4)..(201): NCBI GI: 256735454 Blast Desc: NECHADRAFT_75314 [Nectria haematococca mpVI 77-13-4]
  misc_feature (13)..(224): NCBI GI: 156040485 Blast Desc: SS1G_12259 [Sclerotinia sclerotiorum 1980] gi|154696315|gb|EDN96053.1| SS1G_12259 [Sclerotinia sclerotiorum 1980]
  misc_feature (20)..(201): NCBI GI: 46107586 Blast Desc: FG00676.1 [Gibberella zeae PH-1]
  misc_feature (7)..(224): NCBI GI: 171687793 Blast Desc: protein product [Podospora anserina] gi|170943858|emb|CAP69510.1| protein product [Podospora anserina]
  misc_feature (7)..(224): NCBI GI: 116180446 Blast Desc: [Chaetomium globosum CBS 148.51] gi|88185148|gb|EAQ92616.1| [Chaetomium globosum CBS 148.51]
  misc_feature (5)..(222): NCBI GI: 164427294 Blast Desc: NCU03111 [Neurospora crassa OR74A] gi|157071684|gb|EAA35734.2| [Neurospora crassa OR74A]
  misc_feature (20)..(221): NCBI GI: 145615922 Blast Desc: MGG_03697 [Magnaporthe grisea 70-15] gi|145009708|gb|EDJ94364.1| MGG_03697 [Magnaporthe grisea 70-15]
  misc_feature (6)..(201): NCBI GI: 261355265 Blast Desc: conserved [Verticillium albo-atrum VaMs.102]
  misc_feature (13)..(100): NCBI GI: 154320788 Blast Desc: BC1G_01866 [Botryotinia fuckeliana B05.10] gi|150853555|gb|EDN28747.1| BC1G_01866 [Botryotinia fuckeliana B05.10]
  misc_feature (9)..(103): NCBI GI: 238845097 Blast Desc: conserved [Microsporum canis CBS 113480]
MSASLSASIPFEAPDVSEADIASFHASHFSPDAVNSFGSHFWNSETRTHAGSIEYYEEEDDGLGYYPDGVKRTLTDDQIAIFRHSELEALRRAEEQSQNRVSNNDQPHTKPTSVDTPNTSQYDESIKDEEMADEAAEGSEDGEIETEKTVLTKAELKRQKRQRARQKKRAAERKFVPEKKPDLRKRTWDVVEAGMDTLYYDDVGTAQSQEATRAATRRQISYDD

SEQ ID NO: 37807 - DNA, 1481 bp, Muscodor strobelii
  misc_feature: SGI EST ID NO. CUFF.90528.0
  misc_feature: Variant of the nucleotide sequence at SEQ ID NO 37805
ctggcattaccttgatgcgctagggcactgttgcttcaagttgcacctcgccgaagcttcacgtctattccagctgtttttttcatcttcgctgtcttcagcatctccataagtcattttgagctgcacgtcttgtatccttattgcattgcgccatgtcagcctcgctgtcagcttcgatcccttttgaagcaccagatgtctccgaggcagacatcgcatcatttcacgcgtcgcatttctcccccgacgcagtaaactctttcggctcccatttttggaacagcgagacccgtacgcacgcagggagcatcgagtactacgaagaagaagatgatggacttggctactaccccgacggagtcaaacggaccctaaccgacgaccaaattgccatctttcggcactccgagctcgaggccctgcgccgcgctgaagagcaatcacagaatcgagtgtcgaacaacgatcagccgcacaccaagcccacttctgtcgacacaccaaacacatcgcaatatgacgaaagtatcaaagacgaagagatggctgacgaagctgcggaaggcagcgaggacggcgagatcgaaacggagaaaactgttctcaccaaggcggaattgaaacgccaaaagagacaacgtgccagacagaagaagagagcggcggagcgcaagttcgtaccggagaagaagccggatctgcgcaagaggacgtgggatgtggtcgaggctggtatggacaccctctactacgacgacgttgggactgcgcaaagccaggaggcgacgagggctgccactaggaggcagatttcttacgacgactgaagcatacccgactttgtctcagctctggatacttttgactagctagcggtgtttactcattcaggacctcccaacaggagaggatctggtatacaggtttccaactgaaagtacaaagacggcgggtaagacgatgacctacagtgcctgagtgagaatttagccgtccaggcatcatataatactagcacgatgtctttcttcccggggaggtaagaaccagagctgggagtctgaaacagacatgccaaagcctggtcaactgaggtagagaccccggaaaggaggcaacatcgaccttcgctacagccacagatataagtgaatatgcgattcataggatgcatgcacggctctaagtcttgccgtagcttctctaggtaggcgaggtaggtagaatagagtgagcattcagaggtaggataccaacccgattgctagtttagtaagagacacaagctatccaatctgtgattcacttataaatgcaaacactggtgactacatgtatccaacattttccgtcccatctgccttgacgtccattataattgcgcctgcacatccaaatccaaccatcgaaaggagactgttgctgcaagtctcacctacctcatatctgccgtgctaaggaatgagcgaggaatgagg

SEQ ID NO: 37808 - DNA, 1020 bp, Muscodor strobelii
  misc_feature: SGI cDNA ID NO. 573127
  misc_feature: Encodes the peptide sequence at SEQ ID NO 37809
atggcgcgcgtctacgcggaggtcaatcagaacatgcctcgggcttattgggactatgactccgtaaatattagctggggcgttctggagaattacgaggttgttaggaagataggccgcggcaaatactctgaagtcttcgagggcattaatgttgtcaactaccagaaatgcgtcatcaaggtcctgaagcccgtcaagaagaagaagatcaagcgagagatcaagatcctccagaatctctccggcgggcccaacatcgtcgctctcctcgacgtcgtcagagacagccagagcaagacgccgtctctcatcttcgaatatgtcaataacaccgacttccgcagcctctaccccaagttcaacgacatcgatgtccgctactacatctacgagcttctcaagggccttgactactgccacagcaagggcattatgcaccgagatgtaaagcctcataacgttatgatcgaccatgagaaccgcaagttacgtctcatcgattggggcttggctgagttctaccatcccggaactgagtacaatgtgcgcgtcgcctcccgctatttcaaggggcccgagctgttggtcgacttccaggaatacgactacagtttagatatgtggagtctcggcgccatgtttgcgtcgatgatctttagaaaggagcccttcttccatggaaacagtaactcggaccagctggtcaagatcgctaaggtccttggcaccgatgatctcttcgactacctggacaagtacgagatcgagctcgacccccagtacgacgaaatcttgggacgatttcaaaagaagccctggcacagctttgtcaactcggagaaccagagattcgtgtctaatgaagcgatcgatttcctcgacaagcttttgagatacgaccaccaggagcgtctcactgcgaaagaagccatggctcacagctactttgcccctatccgtgacgaggcaacgctgaagcagtaccttaacggggccactgttagctccgagacctga

SEQ ID NO: 37809 - protein, 339 aa, Muscodor strobelii
  misc_feature: SGI Peptide ID NO. 573127
  misc_feature (32)..(317): Pfam Id: PF00069 Pfam Desc: Protein kinase domain
  misc_feature (32)..(111): Pfam Id: PF07714 Pfam Desc: Protein tyrosine kinase
  misc_feature (1)..(336): NCBI GI: 30580436 Blast Desc: CSK2A_NEUCR RecName: Full=Casein kinase II subunit alpha; Short=CK II subunit alpha gi|20162521|gb|AAM14624.1|AF494376_1 casein kinase II alpha CKA
  misc_feature (1)..(335): NCBI GI: 171687663 Blast Desc: protein product [Podospora anserina] gi|170943793|emb|CAP69445.1| protein product [Podospora anserina]
  misc_feature (1)..(339): NCBI GI: 261355264 Blast Desc: casein kinase II subunit alpha [Verticillium albo-atrum VaMs.102]
  misc_feature (1)..(337): NCBI GI: 39943232 Blast Desc: casein kinase II [Magnaporthe grisea 70-15] gi|145009709|gb|EDJ94365.1| casein kinase II [Magnaporthe grisea 70-15]
  misc_feature (1)..(337): NCBI GI: 46107588 Blast Desc: KC2A_NEUCR Casein kinase II, alpha chain (CK II alpha subunit) [Gibberella zeae PH-1]
  misc_feature (1)..(334): NCBI GI: 256735453 Blast Desc: [Nectria haematococca mpVI 77-13-4]
  misc_feature (1)..(336): NCBI GI: 116180474 Blast Desc: casein kinase II [Chaetomium globosum CBS 148.51] gi|88185162|gb|EAQ92630.1| casein kinase II [Chaetomium globosum CBS 148.51]
  misc_feature (1)..(327): NCBI GI: 154320770 Blast Desc: casein kinase II alpha chain [Botryotinia fuckeliana B05.10] gi|150853546|gb|EDN28738.1| casein kinase II alpha chain [Botryotinia fuckeliana B05.10]
  misc_feature (1)..(337): NCBI GI: 156040449 Blast Desc: casein kinase II [Sclerotinia sclerotiorum 1980] gi|154696297|gb|EDN96035.1| casein kinase II [Sclerotinia sclerotiorum 1980]
  misc_feature (1)..(336): NCBI GI: 164427285 Blast Desc: casein kinase II [Neurospora crassa OR74A] gi|157071681|gb|EAA35747.2| casein kinase II [Neurospora crassa OR74A]
  misc_feature (1)..(336): SWISSPROT Homolog: EC 2.7.11.1 Non-specific serine/threonine protein kinase
MARVYAEVNQNMPRAYWDYDSVNISWGVLENYEVVRKIGRGKYSEVFEGINVVNYQKCVIKVLKPVKKKKIKREIKILQNLSGGPNIVALLDVVRDSQSKTPSLIFEYVNNTDFRSLYPKFNDIDVRYYIYELLKGLDYCHSKGIMHRDVKPHNVMIDHENRKLRLIDWGLAEFYHPGTEYNVRVASRYFKGPELLVDFQEYDYSLDMWSLGAMFASMIFRKEPFFHGNSNSDQLVKIAKVLGTDDLFDYLDKYEIELDPQYDEILGRFQKKPWHSFVNSENQRFVSNEAIDFLDKLLRYDHQERLTAKEAMAHSYFAPIRDEATLKQYLNGATVSSET

SEQ ID NO: 37810 - DNA, 1906 bp, Muscodor strobelii
  misc_feature: SGI EST ID NO. CUFF.90631.0
  misc_feature: Variant of the nucleotide sequence at SEQ ID NO 37808
cgaggctggatgcttcatcacacccaggctgcctgcccgtgctcagttgagtctcagacatcctgagagtcctcccaggtgcccacccgggcctcgccagtatctactctcttgcatagcattatccagacagtgctacgagcatcgcgagccttgcattcttgttgcatccttcccggcgtagtggggtctttgtatccgtccgcatcgagcatcgtcgtccccgttcccctttcatcgccttcgtcttcggaaatcccccaccacaggcctgcagccagacttgctcccgcccttctcaaacacgagctatcatctgcgtccacgccacccgacaatatcggcgccgacccgcacacgggcagtagcaatcatggcgcgcgtctacgcggaggtcaatcagaacatgcctcgggcttattgggactatgactccgtaaatattagctggggcgttctggagaattacgaggttgttaggaagataggccgcggcaaatactctgaagtcttcgagggcattaatgttgtcaactaccagaaatgcgtcatcaaggtcctgaagcccgtcaagaagaagaagatcaagcgagagatcaagatcctccagaatctctccggcgggcccaacatcgtcgctctcctcgacgtcgtcagagacagccagagcaagacgccgtctctcatcttcgaatatgtcaataacaccgacttccgcagcctctaccccaagttcaacgacatcgatgtccgctactacatctacgagcttctcaagggccttgactactgccacagcaagggcattatgcaccgagatgtaaagcctcataacgttatgatcgaccatgagaaccgcaagttacgtctcatcgattggggcttggctgagttctaccatcccggaactgagtacaatgtgcgcgtcgcctcccgctatttcaaggggcccgagctgttggtcgacttccaggaatacgactacagtttagatatgtggagtctcggcgccatgtttgcgtcgatgatctttagaaaggagcccttcttccatggaaacagtaactcggaccagctggtcaagatcgctaaggtccttggcaccgatgatctcttcgactacctggacaagtacgagatcgagctcgacccccagtacgacgaaatcttgggacgatttcaaaagaagccctggcacagctttgtcaactcggagaaccagagattcgtgtctaatgaagcgatcgatttcctcgacaagcttttgagatacgaccaccaggagcgtctcactgcgaaagaagccatggctcacagctactttgcccctatccgtgacgaggcaacgctgaagcagtaccttaacggggccactgttagctccgagacctgagataaggactgttcggcagttgagcaatcagaagacgaagaccagctgactgtgaccgctttgaccacttcccaagataccccctaaatgaacgagcgaaagcatactccccacccggaatagcatcacagctggctttacacacatgcgatgagatcagacgccaattcccaattctataccaaacatgcattagattcgcagcgccaagtcagtcgatgaagatggcggggagtagttaggaccctgcgggcatcatgaagtcgatcgagttagttagtttgcaatcattgcgcatcggcagatatctactcgatatcatgcgctttgggtctgtatatgatgaatgaatgcattgagatgagtgagggtgcggggagcatggagtaaaaagaagcaggcattaatgcagagtgagaagtccatagcggaatgaaacgaaatgagttaatcgcttagtattgaatgatgtgattgttttgcggatgatatgggtatggtgtgagatgcggg

SEQ ID NO: 37811 - DNA, 867 bp, Muscodor strobelii
  misc_feature: SGI cDNA ID NO. 573128
  misc_feature: Encodes the peptide sequence at SEQ ID NO 37812
atggcctcgcagatacttctcggtctcaccctaggcatattctcacttaaggtgcatgcagcgtctggaacgggtaccacaactcgttattgggattgttgcaagccatcatgttcctggcctggcaaagccctatttaaccatccagtgtacacgtgtgattatgatgacaatcacttggccgaccaaaacgccaaaagcgtgtgcgaaaaggaccctggcccagccacgacatgtacagacaatgcgccctgggccgtcagtcctgagcttgcctatggcttcgccgccactaagattgcgggaggtaccgaaaacagctggtgctgcgcttgctatcagctcacattcggctcctccggcccactgagcggcaagaccatgatcgtccaggccaccaacacgggcgatgatctgcaacccaaccagttcgacctgctcatccccggcggcggagttggcgcatttccgggaggctgcactactgagttcggacacccgttcccgggcatgccatacggcggagttacaagccgtgcggaatgcgaccagcttcccaatcagaacctaataaacggctgcaactggcgtttcgactggtttctcaacaccaacaacccgcctatcacttacactcaagtccaatgccccagcgaaattgttgccaagtccggatgcaagcgagacgacgattcaacattcccgcttccctcgaccggatcatcgacccctggacagcccggagggtctggacaggctgggatatatgagcaatgcggcggtgaagactggactggccctacgacctgcgttgctggtactacttgccaggtccagaatcaatactactcacagtgtcttccgtag

SEQ ID NO: 37812 - protein, 288 aa, Muscodor strobelii
  misc_feature: SGI Peptide ID NO. 573128
  misc_feature (255)..(283): Pfam Id: PF00734 Pfam Desc: Fungal cellulose binding domain
  misc_feature (24)..(227): Pfam Id: PF02015 Pfam Desc: Glycosyl hydrolase family 45
  misc_feature (1)..(286): NCBI GI: 85083355 Blast Desc: endoglucanase V [Neurospora crassa OR74A] gi|28881412|emb|CAD70529.1| [Neurospora crassa] gi|28918192|gb|EAA27871.1| endoglucanase V [Neurospora crassa
  misc_feature (1)..(287): NCBI GI: 171677676 Blast Desc: protein product [Podospora anserina] gi|170936906|emb|CAP61565.1| protein product [Podospora anserina]
  misc_feature (1)..(252): NCBI GI: 46111553 Blast Desc: FG02658.1 [Gibberella zeae PH-1]
  misc_feature (1)..(252): NCBI GI: 37732125 Blast Desc: glycoside hydrolase 45 [Gibberella zeae]
  misc_feature (1)..(235): NCBI GI: 1170140 Blast Desc: GUNK_FUSOX RecName: Full= endoglucanase type K; AltName: Full=Endo-1,4-beta-glucanase; AltName: Full=Cellulase; Flags: Precursor gi|520823|gb|AAA65589.1| K-family cellulase
  misc_feature (25)..(287): NCBI GI: 4249556 Blast Desc: endoglucanase [Humicola grisea var. thermoidea]
  misc_feature (1)..(235): NCBI GI: 256725840 Blast Desc: NECHADRAFT_94623 [Nectria haematococca mpVI 77-13-4]
  misc_feature (25)..(287): NCBI GI: 197267671 Blast Desc: endo-beta-D-1,4-glucanase [Staphylotrichum coccosporum]
  misc_feature (1)..(287): NCBI GI: 156063420 Blast Desc: SS1G_01828 [Sclerotinia sclerotiorum 1980] gi|154697162|gb|EDN96900.1| SS1G_01828 [Sclerotinia sclerotiorum 1980]
  misc_feature (9)..(253): NCBI GI: 154294519 Blast Desc: BC1G_13862 [Botryotinia fuckeliana B05.10] gi|150844702|gb|EDN19895.1| BC1G_13862 [Botryotinia fuckeliana B05.10]
  misc_feature (1)..(231): SWISSPROT Homolog: EC 3.2.1.4 Cellulase
MASQILLGLTLGIFSLKVHAASGTGTTTRYWDCCKPSCSWPGKALFNHPVYTCDYDDNHLADQNAKSVCEKDPGPATTCTDNAPWAVSPELAYGFAATKIAGGTENSWCCACYQLTFGSSGPLSGKTMIVQATNTGDDLQPNQFDLLIPGGGVGAFPGGCTTEFGHPFPGMPYGGVTSRAECDQLPNQNLINGCNWRFDWFLNTNNPPITYTQVQCPSEIVAKSGCKRDDDSTFPLPSTGSSTPGQPGGSGQAGIYEQCGGEDWTGPTTCVAGTTCQVQNQYYSQCLP

SEQ ID NO: 37813 - DNA, 1497 bp, Muscodor strobelii
  misc_feature: SGI cDNA ID NO. 573129
  misc_feature: Encodes the peptide sequence at SEQ ID NO 37814
atgctttcactcgttctgttcctcgttgccaccgcaacagctttctggttgctggccgtcatgcgcactcagcctgagacctcagtggcctacttgcagtttgaaggcgacaattcgagggcacgctatgcgaccgaagctggcgatctcataacgaagggatatagagaccatatccagaaaggcagaccgttttcgatttacaacatcgttgattatcggaaaccattgatcatcctgcctatgcagtatcttgacgaagtcaaagacgcgccaataactcagatgagcttccctctattcatggagaagctctcaattattagggacattggtggccctctcatcactgatgagctgtgcaatatggcgagactcggtttgaatagagggctaccaagactcatgcccttgatgaatgaagaatgctcgacgatctgtgaaaagctgattccgccgtgtctcgactggacaaccatgacgccatatcccatactcgtcgaagtcttcacccgacttactcaacgtgtcctggtcggcccggagctaagcacaaatgaggagtggctaacgctgacgcaagaatacacgaacagtttactacaaggaacaaaaacagtcagagcgaaatatcacccttctatccgctggatagccaaatacctcgaagcggacgtaaaaaccatatatggccatcgtcgacacgccgcagaattactcgcgccagtcatcgccagtcatttagaatcatgcgccgagaatcccaacttccagggcgacgacgccattcactggttgcttgacgagtatgcgaaggtgggaaagaagcctacgtcagaatccatttctcaggagatactaggcgccacggtagccgctactcacaacgcagcggctacagttctgtcatgcctttacgatctgatggaccattcgcacgctttatccgacattagagccgagatccaagcaacaaaacagcgctgtggtacctgggaccgtgcggccctcgcgtcgctgcgcgttttggacagtttcatgtcggagagcttgcgaatgcactctatgccgcaagtgaccgtacagcgattagccgtggtcccgtacacctttaaggacggatttcacgtcgccgccggcacacagctaatgttcgctaaccgggcacgtaatcgagatccgaagctgtacaaagatcctgacgtgttcgatgcgcgacggtttctacgcgacgacggagaagaagataggcaccatggaggcaatttcgccacggtttcggaagatgttctgaatttcggtgcgggcccgcacgcttgtcctggtcgcttttttgctcgagacattatcaagcttgtcttcactcacctgctaatgcagtacgagtttaaatttgtagatgaggagcagggccgcccggaagacgttgtagataacttggttgtgtatccgaatcctagcgtacccattttgatgaagaaaatggctgcagtctaa

SEQ ID NO: 37814 - protein, 498 aa, Muscodor strobelii
  misc_feature: SGI Peptide ID NO. 573129
  misc_feature (41)..(492): Pfam Id: PF00067 Pfam Desc: Cytochrome P450
  misc_feature (274)..(492): Pfam Id: PF00067 Pfam Desc: Cytochrome P450
  misc_feature (2)..(494): NCBI GI: 116191135 Blast Desc: CHGG_05285 [Chaetomium globosum CBS 148.51] gi|88181198|gb|EAQ88666.1| CHGG_05285 [Chaetomium globosum CBS 148.51]
  misc_feature (1)..(498): NCBI GI: 121704569 Blast Desc: cytochrome P450 [Aspergillus clavatus NRRL 1] gi|119398693|gb|EAW09122.1| cytochrome P450 [Aspergillus clavatus NRRL 1]
  misc_feature (128)..(497): NCBI GI: 116203149 Blast Desc: CHGG_09459 [Chaetomium globosum CBS 148.51] gi|88177977|gb|EAQ85445.1| CHGG_09459 [Chaetomium globosum CBS 148.51]
  misc_feature (29)..(442): NCBI GI: 116181228 Blast Desc: CHGG_01242 [Chaetomium globosum CBS 148.51] gi|88185539|gb|EAQ93007.1| CHGG_01242 [Chaetomium globosum CBS 148.51]
  misc_feature (29)..(491): NCBI GI: 39946266 Blast Desc: MGG_08379 [Magnaporthe grisea 70-15] gi|145019963|gb|EDK04191.1| MGG_08379 [Magnaporthe grisea 70-15]
  misc_feature (75)..(496): NCBI GI: 238845677 Blast Desc: GliF [Microsporum canis CBS 113480]
  misc_feature (64)..(498): NCBI GI: 238497528 Blast Desc: cytochrome P450 oxidoreductase GliF [Aspergillus flavus NRRL3357] gi|220693273|gb|EED49618.1| cytochrome P450 oxidoreductase GliF [Aspergillus flavus NRRL3357]
  misc_feature (9)..(496): NCBI GI: 46140043 Blast Desc: FG11536.1 [Gibberella zeae PH-1]
  misc_feature (76)..(494): NCBI GI: 169635726 Blast Desc: cytochrome P450 monooxygenase [Botryotinia fuckeliana]
  misc_feature (120)..(494): NCBI GI: 145604905 Blast Desc: MGG_01950 [Magnaporthe grisea 70-15] gi|145012821|gb|EDJ97462.1| MGG_01950 [Magnaporthe grisea 70-15]
  misc_feature (5)..(494): SWISSPROT Homolog: EC 1.14.13.78 Ent-kaurene oxidase
MLSLVLFLVATATAFWLLAVMRTQPETSVAYLQFEGDNSRARYATEAGDLITKGYRDHIQKGRPFSIYNIVDYRKPLIILPMQYLDEVKDAPITQMSFPLFMEKLSIIRDIGGPLITDELCNMARLGLNRGLPRLMPLMNEECSTICEKLIPPCLDWTTMTPYPILVEVFTRLTQRVLVGPELSTNEEWLTLTQEYTNSLLQGTKTVRAKYHPSIRWIAKYLEADVKTIYGHRRHAAELLAPVIASHLESCAENPNFQGDDAIHWLLDEYAKVGKKPTSESISQEILGATVAATHNAAATVLSCLYDLMDHSHALSDIRAEIQATKQRCGTWDRAALASLRVLDSFMSESLRMHSMPQVTVQRLAVVPYTFKDGFHVAAGTQLMFANRARNRDPKLYKDPDVFDARRFLRDDGEEDRHHGGNFATVSEDVLNFGAGPHACPGRFFARDIIKLVFTHLLMQYEFKFVDEEQGRPEDVVDNLVVYPNPSVPILMKKMAAV

SEQ ID NO: 37815 - DNA, 609 bp, Muscodor strobelii
  misc_feature: SGI cDNA ID NO. 573130
  misc_feature: Encodes the peptide sequence at SEQ ID NO 37816
atgggtgttttgatgattcggcagtgtctcttactgtccattcgagctcggctatacgaaatcatcttaccatcagcccaggccatcagggatgcctttgctgccttctggggcaagcatgtcaccgtcgtcaaccccattccctgcgagaggtacaccggtactgactatctcaccgaggctggcccacagccgcctgacggctacactttcgagcgcctttcccaagtgctggcccagtgccagatgcacgagtgcccgctgacctactattggcgccgcaagagggtcaacgcgcgggctgcggaggttgccaagcgcctctctaaggaggaggtgtttcgatctaacggaccagaaatagaggcagaagagagagcaggagaggcagcgcagaggacagctcagtcgatccgtggagcagaacagagagcgcggctactcccagggacttggatcacattgatcatgtttggtgcgctttcttgcacatgtttgtttacagttgcctggcagggagtttttgggaacaatgccgactttacttgggcccagcctaagagcgagggtgctccatatagccgcgtgtacgccgaagccctgcgatga

SEQ ID NO: 37816 - protein, 202 aa, Muscodor strobelii
  misc_feature: SGI Peptide ID NO. 573130
  misc_feature (30)..(131): NCBI GI: 116205519 Blast Desc: CHGG_10643 [Chaetomium globosum CBS 148.51] gi|88176771|gb|EAQ84239.1| CHGG_10643 [Chaetomium globosum CBS 148.51]
MGVLMIRQCLLLSIRARLYEIILPSAQAIRDAFAAFWGKHVTVVNPIPCERYTGTDYLTEAGPQPPDGYTFERLSQVLAQCQMHECPLTYYWRRKRVNARAAEVAKRLSKEEVFRSNGPEIEAEERAGEAAQRTAQSIRGAEQRARLLPGTWITLIMFGALSCTCLFTVAWQGVFGNNADFTWAQPKSEGAPYSRVYAEALR

SEQ ID NO: 37817 - DNA, 363 bp, Muscodor strobelii
  misc_feature: SGI cDNA ID NO. 573131
  misc_feature: Encodes the peptide sequence at SEQ ID NO 37818
atggtaagtctgatcaagcgcaacaagcccaagactggctctgaggttggctccgaaccattcttcaacgacgaattccagagatggaggccttcgccatcaccatctttgacccccgccgctctttcgaccgctctacccgcttccctgcctaaaaacgaggtttgtggcgatttcatggagtatcaacatctagatgtgaccgagaacgctgcctggaggaagtggttcaagcctatggaagataggctcaaggagaagcacgcccagcaacttaggcacgatgaaaagacggctacgacagatatgagcgacgtaaaagccagatataaagctcttcaggacgacatggcagctttgtga

SEQ ID NO: 37818 - protein, 120 aa, Muscodor strobelii
  misc_feature: SGI Peptide ID NO. 573131
MVSLIKRNKPKTGSEVGSEPFFNDEFQRWRPSPSPSLTPAALSTALPASLPKNEVCGDFMEYQHLDVTENAAWRKWFKPMEDRLKEKHAQQLRHDEKTATTDMSDVKARYKALQDDMAAL

SEQ ID NO: 37819 - DNA, 3183 bp, Muscodor strobelii
  misc_feature: SGI cDNA ID NO. 573132
  misc_feature: Encodes the peptide sequence at SEQ ID NO 37820
atggagccgccgtcgaagcggctgagactggacccgtctccattcgacagcgacgacgaggaaaatcaagatgagctctccatgactcccgtccagtttgacaccattcaagatcctatgtatcagctggataagagccgtgcgaaagcggctggccggctcaaatccactttcgaggacatattcgcgaagtacggcaaagactttggcggcgacgacgacaccataaacttctacaccgacgagatcgaaatcgacaatggccatctccaatctctcgacgcctcggaagctacggaagaggatgctacaatcagcgatagggagaagcgaagatcgaaagacagatcccagaaccgagagaaacagtcacacccactaccctttgcgccttctagctctttattaaatgccactgcaccctcatactttcagtcgccttggacccatggccatagtcatagcgcaaatcaactgccgagtccattaattcaaccatcgccattcgcacacaacccacctttcaattttggtggttctctgtttgggaacggcaccatcgacccggtctggcaagcacccgacttaccgccccaggctttccagtacgcaaccggccacggaagatggggacagtccggacttcacggcatttcggcgtctcaccttggccctaagagattggccagcgctaaggcttttgcagtgcacagctcttcaacctctgtagcagcgaatggtgacaaaacgggagaagaggaggacgatattctgcgtgacaggaacaccccaggtaccccttctagcactaaagaaaagaaacttcggactgggtttgtcgggggtatcacgacgaaaaggggctctccagaattctcaggtctccaagaaagagccgccccatctcaatcggcaactctctttcggcgtcgaagacggccaccgaaaacctcaggccatcagtccagacccatttgtggccctaacatggaaacgactgacggaggtagtccgcctccatctattgaaaggaagattgaaatcattcttcctagattgcctacacctaacctggaagaatacacacgcatatttccaactccgccacatgtctcatcgacaatagcaatcaactcagcagagaaagagcatcatggaagagaacgtcaattgtcaacgaatttcaaccgcgtcaactcaattacggtcccaattttcgaaggcatatcaaaagagtcacgcgagcaacctggcgagcctgacgattctccgcttgttgtagaaaatcgatgtgatgctaaaaatgcacacgatcaaagtcccatttcaacagctccaaatgggacaacaggcgatcatcctagccaatcaaaccatccaattacggagtctgaatacacaagtaaccaatccgcaatggcaagcgtcacaaccattaatttggacgtttcaagcttggaatccagacgatcattgcggtctcagaagtcgatggagctgtatagtccacttgtatggcccaagagacgacaaaagcaccaggagacggtagcaagtatcgcaagacaatccccagaactttcccagttgtccgcgaacgattctgtaactgatacctcctcgttgtttgatgtatgtcggcgatcggatcttgatcatatcaagcattctactctcgaagctccagcattgctaaggatagacgctatgatcgatgaagcacgtgtcgctcatgaagtacgcggtgccacgctcaacgaggaatcggcattaattgtcgccgagaagtctcggggtaagcagctgccagggacatcttcatcaaccgacgagttcacggaaacgacaagcgcgtcaacgaagctcaatccaagttccgacgtggacacaatcatatccgacaggaagattgacctcgaaagtgacaccttgcacggactcggacttccgtgccttcagaacagcggaagttccggccctgtaatccaggacggagatgtaatttcgcagcaatcactgatactcgcggaaagcgaaaaatcagcaacggctccagaagcgccctcagtccagatagctaatagcacggaattgtctaaagccgatgacagaagaggacccacattacgcagcgacgaaacccgagacccggaagtgttaggacaacccaggtcgctagatcccgacgtccgtcggcctccggaatatcaattgacacagaactcagaagggaaccagaaccgaatatccaacgacagtattatctggaccaacttgtctgagccaggaattgactcatacatacaccaaggagatgagagaggtggggtttctgatgacaatacgtcgcacatcgatttcaatgatatcctaaacagcggggatgctgctagtccagaccttggttgctatccatcagagttcggccaaggatacggggttacagtctctcgtgaagatgcgcagcgtagtccgtctctcggagctattcatttacccgatcccgtcgtcctgagcagattacgcgaatctccggggctagaaacaccatattcgccccgatcggtggaagaaatccactttaccagtgattttgacattggccgatccccgagtcccgagctaggaacagcgtcgggacctgaggatgtcctacgtgagaacacgataacttcgcgtgaatcaaacccgacgacacctaaaagacaacgtaaacccaagtctaaacccgagacccgacatccgacatttgagcccttgacattaacttcccttatcccaaatgatgcggacgatgatagtaatgagttgagtgtcgcggagtcaacaaagacaccgactccgcgatggtctagcagcaggaacaactcgcctcagccctcgccgcgcatctcacctcgcaagacgagaagaaaagcaagtactctcagtgaagataggttcccttctccccctgcgacggactctcgcgcactagtcggcaaaagcaaagtccgctcgagaaatgaaagcggtgttcacagttctccgctggcgcgaactgtcgcataccggttattagggacaccgagacgcgcgcgacgggaagcaagtcttgtgcgaactccgaaagggagtatgaagaagtgcggacaaaatgggtatgtgtgcgataaggatttttgctttacttgttgtaagtag

SEQ ID NO: 37820 - protein, 1060 aa, Muscodor strobelii
  misc_feature: SGI Peptide ID NO. 573132
  misc_feature (1)..(271): NCBI GI: 164427287 Blast Desc: NCU03123 [Neurospora crassa OR74A] gi|157071682|gb|EAA35746.2| [Neurospora crassa OR74A]
  misc_feature (1)..(271): NCBI GI: 38567281 Blast Desc: [Neurospora crassa]
  misc_feature (1)..(93): NCBI GI: 261355263 Blast Desc: VDBG_03800 [Verticillium albo-atrum VaMs.102]
  misc_feature (3)..(97): NCBI GI: 171687675 Blast Desc: protein product [Podospora anserina] gi|170943799|emb|CAP69451.1| protein product [Podospora anserina]
  misc_feature (1)..(93): NCBI GI: 256734746 Blast Desc: NECHADRAFT_75312 [Nectria haematococca mpVI 77-13-4]
  misc_feature (19)..(93): NCBI GI: 154320746 Blast Desc: BC1G_01845 [Botryotinia fuckeliana B05.10] gi|150853534|gb|EDN28726.1| BC1G_01845 [Botryotinia fuckeliana B05.10]
  misc_feature (1)..(93): NCBI GI: 156040473 Blast Desc: SS1G_12253 [Sclerotinia sclerotiorum 1980] gi|154696309|gb|EDN96047.1| SS1G_12253 [Sclerotinia sclerotiorum 1980]
  misc_feature (1)..(93): NCBI GI: 145615924 Blast Desc: [Magnaporthe grisea 70-15] gi|145009710|gb|EDJ94366.1| [Magnaporthe grisea 70-15]
  misc_feature (921)..(1060): NCBI GI: 261355263 Blast Desc: VDBG_03800 [Verticillium albo-atrum VaMs.102]
  misc_feature (1)..(109): NCBI GI: 212541096 Blast Desc: Myb-like DNA-binding domain protein [Penicillium marneffei ATCC 18224] gi|210068002|gb|EEA22094.1| Myb-like DNA-binding domain protein [Penicillium marneffei ATCC 18224]
MEPPSKRLRLDPSPFDSDDEENQDELSMTPVQFDTIQDPMYQLDKSRAKAAGRLKSTFEDIFAKYGKDFGGDDDTINFYTDEIEIDNGHLQSLDASEATEEDATISDREKRRSKDRSQNREKQSHPLPFAPSSSLLNATAPSYFQSPWTHGHSHSANQLPSPLIQPSPFAHNPPFNFGGSLFGNGTIDPVWQAPDLPPQAFQYATGHGRWGQSGLHGISASHLGPKRLASAKAFAVHSSSTSVAANGDKTGEEEDDILRDRNTPGTPSSTKEKKLRTGFVGGITTKRGSPEFSGLQERAAPSQSATLFRRRRRPPKTSGHQSRPICGPNMETTDGGSPPPSIERKIEIILPRLPTPNLEEYTRIFPTPPHVSSTIAINSAEKEHHGRERQLSTNFNRVNSITVPIFEGISKESREQPGEPDDSPLVVENRCDAKNAHDQSPISTAPNGTTGDHPSQSNHPITESEYTSNQSAMASVTTINLDVSSLESRRSLRSQKSMELYSPLVWPKRRQKHQETVASIARQSPELSQLSANDSVTDTSSLFDVCRRSDLDHIKHSTLEAPALLRIDAMIDEARVAHEVRGATLNEESALIVAEKSRGKQLPGTSSSTDEFTETTSASTKLNPSSDVDTIISDRKIDLESDTLHGLGLPCLQNSGSSGPVIQDGDVISQQSLILAESEKSATAPEAPSVQIANSTELSKADDRRGPTLRSDETRDPEVLGQPRSLDPDVRRPPEYQLTQNSEGNQNRISNDSIIWTNLSEPGIDSYIHQGDERGGVSDDNTSHIDFNDILNSGDAASPDLGCYPSEFGQGYGVTVSREDAQRSPSLGAIHLPDPVVLSRLRESPGLETPYSPRSVEEIHFTSDFDIGRSPSPELGTASGPEDVLRENTITSRESNPTTPKRQRKPKSKPETRHPTFEPLTLTSLIPNDADDDSNELSVAESTKTPTPRWSSSRNNSPQPSPRISPRKTRRKASTLSEDRFPSPPATDSRALVGKSKVRSRNESGVHSSPLARTVAYRLLGTPRRARREASLVRTPKGSMKKCGQNGYVCDKDFCFTCCK

SEQ ID NO: 37821 - DNA, 4114 bp, Muscodor strobelii
  misc_feature: SGI EST ID NO. CUFF.90571.0
  misc_feature: Variant of the nucleotide sequence at SEQ ID NO 37819
cggagacacagagctatgcgactttagaatatgagtcgagactgtcatgattattcgcaatcttcgtgaggccgtggccaaccgtgtcatgaattgtgaggcatgcagtaggcccatagcgtttatagctccggtcgcagatggggcacctgatagttcaggtttctattgaggggcatgcatggagaggtatctcgttaccatctggagagtgtccgaatttcattctgctcaagcccatcacaattcagagtgctcaagaaatagatgcggaaccatggcagggaggacagaggtcggcctgggtgatgggttacatggtcaaacgcggaggattccagtggagtttgagagcacagagcataccctggaggcgtttttgacgacgcgtcgcgacgtgacttccacaactccaacacaggtagacacacgccttccagattgaatttcgatacgtttccccctcaccgaagcggcgcctgcgaggatctaccctaattgtcatgaaagtcatgtgcaaataacttttttcccccgaaaatccgtcgtgtgatggccgcagaggcgcatatccgcgacaaacccctcgacaatggagccgccgtcgaagcggctgagactggacccgtctccattcgacagcgacgacgaggaaaatcaagatgagctctccatgactcccgtccagtttgacaccattcaagatcctatgtatcagctggataagagccgtgcgaaagcggctggccggctcaaatccactttcgaggacatattcgcgaagtacggcaaagactttggcggcgacgacgacaccataaacttctacaccgacgagatcgaaatcgacaatggccatctccaatctctcgacgcctcggaagctacggaagaggatgctacaatcagcgatagggagaagcgaagatcgaaagacagatcccagaaccgagagaaacagtcacacccactaccctttgcgccttctagctctttattaaatgccactgcaccctcatactttcagtcgccttggacccatggccatagtcatagcgcaaatcaactgccgagtccattaattcaaccatcgccattcgcacacaacccacctttcaattttggtggttctctgtttgggaacggcaccatcgacccggtctggcaagcacccgacttaccgccccaggctttccagtacgcaaccggccacggaagatggggacagtccggacttcacggcatttcggcgtctcaccttggccctaagagattggccagcgctaaggcttttgcagtgcacagctcttcaacctctgtagcagcgaatggtgacaaaacgggagaagaggaggacgatattctgcgtgacaggaacaccccaggtaccccttctagcactaaagaaaagaaacttcggactgggtttgtcgggggtatcacgacgaaaaggggctctccagaattctcaggtctccaagaaagagccgccccatctcaatcggcaactctctttcggcgtcgaagacggccaccgaaaacctcaggccatcagtccagacccatttgtggccctaacatggaaacgactgacggaggtagtccgcctccatctattgaaaggaagattgaaatcattcttcctagattgcctacacctaacctggaagaatacacacgcatatttccaactccgccacatgtctcatcgacaatagcaatcaactcagcagagaaagagcatcatggaagagaacgtcaattgtcaacgaatttcaaccgcgtcaactcaattacggtcccaattttcgaaggcatatcaaaagagtcacgcgagcaacctggcgagcctgacgattctccgcttgttgtagaaaatcgatgtgatgctaaaaatgcacacgatcaaagtcccatttcaacagctccaaatgggacaacaggcgatcatcctagccaatcaaaccatccaattacggagtctgaatacacaagtaaccaatccgcaatggcaagcgtcacaaccattaatttggacgtttcaagcttggaatccagacgatcattgcggtctcagaagtcgatggagctgtatagtccacttgtatggcccaagagacgacaaaagcaccaggagacggtagcaagtatcgcaagacaatccccagaactttcccagttgtccgcgaacgattctgtaactgatacctcctcgttgtttgatgtatgtcggcgatcggatcttgatcatatcaagcattctactctcgaagctccagcattgctaaggatagacgctatgatcgatgaagcacgtgtcgctcatgaagtacgcggtgccacgctcaacgaggaatcggcattaattgtcgccgagaagtctcggggtaagcagctgccagggacatcttcatcaaccgacgagttcacggaaacgacaagcgcgtcaacgaagctcaatccaagttccgacgtggacacaatcatatccgacaggaagattgacctcgaaagtgacaccttgcacggactcggacttccgtgccttcagaacagcggaagttccggccctgtaatccaggacggagatgtaatttcgcagcaatcactgatactcgcggaaagcgaaaaatcagcaacggctccagaagcgccctcagtccagatagctaatagcacggaattgtctaaagccgatgacagaagaggacccacattacgcagcgacgaaacccgagacccggaagtgttaggacaacccaggtcgctagatcccgacgtccgtcggcctccggaatatcaattgacacagaactcagaagggaaccagaaccgaatatccaacgacagtattatctggaccaacttgtctgagccaggaattgactcatacatacaccaaggagatgagagaggtggggtttctgatgacaatacgtcgcacatcgatttcaatgatatcctaaacagcggggatgctgctagtccagaccttggttgctatccatcagagttcggccaaggatacggggttacagtctctcgtgaagatgcgcagcgtagtccgtctctcggagctattcatttacccgatcccgtcgtcctgagcagattacgcgaatctccggggctagaaacaccatattcgccccgatcggtggaagaaatccactttaccagtgattttgacattggccgatccccgagtcccgagctaggaacagcgtcgggacctgaggatgtcctacgtgagaacacgataacttcgcgtgaatcaaacccgacgacacctaaaagacaacgtaaacccaagtctaaacccgagacccgacatccgacatttgagcccttgacattaacttcccttatcccaaatgatgcggacgatgatagtaatgagttgagtgtcgcggagtcaacaaagacaccgactccgcgatggtctagcagcaggaacaactcgcctcagccctcgccgcgcatctcacctcgcaagacgagaagaaaagcaagtactctcagtgaagataggttcccttctccccctgcgacggactctcgcgcactagtcggcaaaagcaaagtccgctcgagaaatgaaagcggtgttcacagttctccgctggcgcgaactgtcgcataccggttattagggacaccgagacgcgcgcgacgggaagcaagtcttgtgcgaactccgaaagggagtatgaagaagtgcggacaaaatgggtatgtgtgcgataaggatttttgctttacttgttgtaagtaggtggtctggtattgcatactgctattgagagcttgtataatattatcaggatgtattcctagtgtaaacattggttgatatgttgttttcaatatgggttataccttttgcattgggaggcgtctagtattgcataggtggtggtcacgatgggatagagatttggggcatcatggaggcaagtttcatttcatgatatatgaccaaaagacaatccggtcgcgtatggagggtgtttcggtgcttgagcaaattatgtagccatctactcagatactgagagagtcacattcgactaccgtcaagcaagatacgagagtcaatgaatcatcaaacgag

SEQ ID NO: 37822 - DNA, 1545 bp, Muscodor strobelii
  misc_feature: SGI cDNA ID NO. 573133
  misc_feature: Encodes the peptide sequence at SEQ ID NO 37823
atgcctcaattcaacattctcacctcaacagctactcaactggagggtctgctgaaaaatggcgaactcactagcgaacaaatcgttcttgaatatcttcatcagattgaaacttataatgggtatctacatgctgtcatatctgtcgcaccgcgcgaaatactgattgcccgatcgcggcaattggacaaggaaaggtctagcggcaaagtcagaggtcctctccacggtattcccattcttatcaaggacaacacaaatacgcaccctgatctcggcatgggaacaacggcaggcacttatgccctagttggagcaagagtccgacgcaatgctgcacatgttgaacagttgatcgaagccggaataatcataatcggtaaggcaaatcttagcgaattgagcaactacaggggctcgcatatgcctagtggatggtcagctgtgggcgggctgactcagtcgccatacgtcgatggaggtaaagtatgggacgacggtaatgttggccacagcgctccaggtggttcttcctccggctcctgcgttgctgtcgcggctggctttgccccgattgccacaggaacagataccaacgcatcactacggtcgccagcgacccggaacgacgtctatgctctaaagccaactattggcatgatatcacaagatggaatttgtcctatctcgtctgatttcgactctgccggcccgatcgctcggtgtgctagagatattgccattttccttgatgcgatggttgctcctgatgaagcatacaaaatcccaaatgagacgtacacgtccgagctcacgggatcctttgaagggtttcgagttggagtgttagatccaactaagtggcatctcgattccgcagagaccttcccgaaccagtcctttgatgaccaagtagatagcgaagtcaaagaagtctacaagaagctcaggtcactaggcgttgtagtcagggatgtgactctaccgccaatcaaggagctggaggtagatgacttccaattccaaggcacgcttgaatcttatcttcaaggacttgagacaagcaacgttcgtaccttgcccgagttgatacagtatatgagaggccatctcgatatagagtttccagagcacattaaaggactacgccttgataatggagaacccaacatgagacgcctagaagcagcactatcgtccaagatgtccaacgagaagtataagataacactcgaagatgtgcgcgacttcggaagaaacaaatgtattgataaatgtttgagagagaacggtgtcgacattattctaggacgtgctgactcaaatataagtgactactatgtggccgcaggctacccaatggtcatattgccactatcctacgcaaaaatgaacggtcgtccattcggcgtctgtgcaatagcctctgcatatcaagaagggctgcttatccgcttcatgagcgcttgggagaaaatattcaataggaacagacagctcccaacatggattggtggtgatcctactggtgcccataaagggtga

SEQ ID NO: 37823 - protein, 514 aa, Muscodor strobelii
  misc_feature: SGI Peptide ID NO. 573133
  misc_feature (27)..(484): Pfam Id: PF01425 Pfam Desc: Amidase
  misc_feature (174)..(333): Pfam Id: PF01425 Pfam Desc: Amidase
  misc_feature (27)..(135): Pfam Id: PF01425 Pfam Desc: Amidase
  misc_feature (4)..(491): NCBI GI: 116205451 Blast Desc: CHGG_10609 [Chaetomium globosum CBS 148.51] gi|88176737|gb|EAQ84205.1| CHGG_10609 [Chaetomium globosum CBS 148.51]
  misc_feature (4)..(498): NCBI GI: 116200662 Blast Desc: CHGG_10876 [Chaetomium globosum CBS 148.51] gi|88175590|gb|EAQ83058.1| CHGG_10876 [Chaetomium globosum CBS 148.51]
  misc_feature (5)..(501): NCBI GI: 256723754 Blast Desc: NECHADRAFT_52302 [Nectria haematococca mpVI 77-13-4]
  misc_feature (1)..(508): NCBI GI: 169621007 Blast Desc: SNOG_13707 [Phaeosphaeria nodorum SN15] gi|160704155|gb|EAT78731.2| SNOG_13707 [Phaeosphaeria nodorum SN15]
  misc_feature (4)..(498): NCBI GI: 256727338 Blast Desc: NECHADRAFT_76112 [Nectria haematococca mpVI 77-13-4]
  misc_feature (1)..(506): NCBI GI: 242775196 Blast Desc: glutamyl-tRNA(gln) amidotransferase subunit A, [Talaromyces stipitatus ATCC 10500] gi|218722214|gb|EED21632.1| glutamyl-tRNA(gln) amidotransferase subunit A, [Talaromyces ATCC
  misc_feature (2)..(502): NCBI GI: 212546065 Blast Desc: amidase family protein [Penicillium marneffei ATCC 18224] gi|210064706|gb|EEA18801.1| amidase family protein [Penicillium marneffei ATCC 18224]
  misc_feature (3)..(501): NCBI GI: 256722562 Blast Desc: NECHADRAFT_85341 [Nectria haematococca mpVI 77-13-4]
  misc_feature (10)..(494): NCBI GI: 28872233 Blast Desc: amidase family protein [Pseudomonas syringae pv. tomato str. DC3000] gi|28855487|gb|AAO58547.1| amidase family protein [Pseudomonas syringae pv. tomato str. DC3000]
  misc_feature (10)..(494): NCBI GI: 213969452 Blast Desc: amidase family protein [Pseudomonas syringae pv. tomato T1] gi|213925823|gb|EEB59381.1| amidase family protein [Pseudomonas syringae pv. tomato T1]
  misc_feature (1)..(494): SWISSPROT Homolog: EC 3.5.1.4 Amidase
MPQFNILTSTATQLEGLLKNGELTSEQIVLEYLHQIETYNGYLHAVISVAPREILIARSRQLDKERSSGKVRGPLHGIPILIKDNTNTHPDLGMGTTAGTYALVGARVRRNAAHVEQLIEAGIIIIGKANLSELSNYRGSHMPSGWSAVGGLTQSPYVDGGKVWDDGNVGHSAPGGSSSGSCVAVAAGFAPIATGTDTNASLRSPATRNDVYALKPTIGMISQDGICPISSDFDSAGPIARCARDIAIFLDAMVAPDEAYKIPNETYTSELTGSFEGFRVGVLDPTKWHLDSAETFPNQSFDDQVDSEVKEVYKKLRSLGVVVRDVTLPPIKELEVDDFQFQGTLESYLQGLETSNVRTLPELIQYMRGHLDIEFPEHIKGLRLDNGEPNMRRLEAALSSKMSNEKYKITLEDVRDFGRNKCIDKCLRENGVDIILGRADSNISDYYVAAGYPMVILPLSYAKMNGRPFGVCAIASAYQEGLLIRFMSAWEKIFNRNRQLPTWIGGDPTGAHKG

SEQ ID NO: 37824 - DNA, 1226 bp, Muscodor strobelii
  misc_feature: SGI EST ID NO. CUFF.90589.0
  misc_feature: Variant of the nucleotide sequence at SEQ ID NO 37822
cccgagttgatacagtatatgagaggccatctcgatatagagtttccagagcacattaaaggactacgccttgataatggagaacccaacatgagacgcctagaagcagcactatcgtccaagatgtccaacgagaagtataagataacactcgaagatgtgcgcgacttcggaagaaacaaatgtattgataaatgtttgagagagaacggtgtcgacattattctaggacgtgctgactcaaatataagtgactactatgtggccgcaggctacccaatggtcatattgccactatcctacgcaaaaatgaacggtcgtccattcggcgtctgtgcaatagcctctgcatatcaagaagggctgcttatccgcttcatgagcgcttgggagaaaatattcaataggaacagacagctcccaacatggattggtggtgatcctactggtgcccataaagggtgacaaatctattaatagattagagaatagtgatactcgctgaaagatgcgtgttagttgcgattatgcttcaactctaacccatatggtctaaccatatgattgtctgagggccgccagctattgttgcgccatacagtggtaagtcgctgtcgaaagagggcgtgcggcgttttcttggcagcatacagaagaggctgcttcttaccccagctgatgctgcacccttcaagcagaagccctccaatgacaccagtaaataaggcaattgaagtaacacaacacagagcctctctgcggggtaagaccacttcacgtgcgtgtccaagaatggcgaccgagtcgtgaggtgccagacattgtacaaactgcgattgccctctgtcgtcgtccgtctttaaaaatagaacaatgaacattggtaaaacctcggcggccctagtggccggcgtcaacgaaaatacattagcacttgccaacgtgaacctggatgtgtcgatgatcaaggtacaggtccctacagaatatcgtggcgtcgatgccgctattacgaagagaagacgacaagctgcagaagacggaaatgcacaccggactgcgcgacgcctcggtattttgtttcatgacgtgataccagctactccggaactcattcgcgcctacggcaaccgagtcacggaaatatgcaacaaacccccacgatcgcaagaaggatctagcaaacccgatattttctcgaattttgttggagctgacgtaacctc

SEQ ID NO: 37825 - DNA, 2910 bp, Muscodor strobelii
  misc_feature: SGI cDNA ID NO. 573134
  misc_feature: Encodes the peptide sequence at SEQ ID NO 37826
atgttagcctcagctccacgcgatcgctcagatatttatattgcaatcatctgtgcactgcgcgttgaggcggatgcagttcacaacatcttggataagtgttgggatgacgagggccacgagtatggtagagatgaacatgatacgaacttctacactgtaggatcagttggccaacacaatgtcgttgtcgtccgcttgtctggcatgggaactatacgatcgacggacgctgcaaataacatacgccacagttttcccaatcttcaactagctttagtagttggcgtatgcggggccgttcctacaccacctggacgggacatctacttgggtgatttggtcataagctcaagggttatccaatataactttggccgacagtatcccaatggatttcaacggaagagtgccgtggacgatgggttgcctgggacttctcgtcaagtcctcaacttcttaagcttcatggaacaagagcgcagcaatcgaaagattcgagacgatattagatcgagcttgttagaacttgagggaggcagtactatcctcccataccctggggctgaacatgaccagctttatgacccctcgttcatacataagcacacgattcgcgccttttgtcttaaaacccgcggccctgcgaaaagtcgtaaaaaatatctaacccaatacctttctggctaccagaagggcgtctgtgactacgccgatagccacaagaacaaggactggcagccctatgcggctattgttgcagccgttggtatgaaggcttttctgaatcagtggacaccaaccgtaccccgtcgaatactggagcgacccgacccaacactctcgcgtgcggaattcctgtcgtcaaagctagctgaagcactccaatacgaggggaagtatacacgatatgaccatcttagctctcataaaatcccctcgaaatcattcgattgggtgtggagtaccaagatccgcagctggttaagagacaactctgtccaatctacccctttttggattaccggcaaacctgggtcaggtaaatcgacgttgatgaaatatctgtctgagtccaagcagactaggaagttattgggcaagacgagcaataatttcagcattgcaacattctttttcgactttcgcgccgggacatccacagccaataatcgtcttggtgtcatgaaaatgcttatttctcacttgtgtgaaacagacaagcgggttgcaactagactagccgagcgaaacgagcacgaccctatcgagaatatgagcgaggacagattgatccaatttttcggcacagctctcgatgacatgaagattcggacttacgcatttattgatggtctggacgagtttaccggcgaatacttcctcgagaaactccagaacaatacaccaatacgaatgtgtttggcaagccggccagaagcggttctgaaacgctacaccgcaaggttcccttctttcgccatgcaagattataacgctactagcatcaaagcttatattaagcacgctgtgctgtcagcagaggaccggcatatggaatgcgaggcacttaaagattccaacttgcaagagggcatagttcgcaaagcacagggtgtcgttatttgggccaggtttgctgtcgacagcctgcttcgcatgggtcagcgtcaagtatcactaacagctctagaagatgcactcgatcagttaccagaagacctggatcgcatgtacgagcgaacattaaagatgattcccgacaacatatccaatgaggctgccctactcctggagtgtatgcttggtggcaaaatggacattaaagtcatgtatgggtactggcactggttctttctcgaacatcgtggtattttacctgcgggctctgcgctcgtgggagacgccgcggtggactcctttacatcacggttgtggcagatcctcggctcttttattgacatgtttcacgttgctgatgagcatttgttcgcctggaactacttctactacgactctaagaaacacaagttcaggcaacgtatcaggtcaactgtaccttttatgatgttaggtttcataacaccgatcccacggattccggacaagacgaactatgtccaaatagcacacaaaactgcagttgacttcctgcggcaatctgaattcttttcttcccttataccaatggaagtgcgaaatactgatccattacatacagcggcgaaaatcctcgcgtcagtaacagcacatggtgatatcaatcttacgacgcttttgtctgtttttaaatcgctgggtaaaggggccaccgtctggcccttgagaccgtctagccgctcttgcgatttactggtgcttgatctggtccaaaacagaacatggaagccccgggccgctttgatccgcttttgtatcttcggcttcacccactcttgtaactctgaaagcaacgtggaccccgaagtgtttagagccgcacttgagtcaccacttttggcattagacatatcggcatgtttcgactggagtggggcagatctttacacagatttgacgtcgaacactacatctgtcgctcggctctcccaatttgcgtctctctcactcgttgttcgcaagcagatgtcaagctacttgcgaggtgcattcgcgacttctaacccgggttctgcactgttgcctcgagattggaaccgtttagccggcttgaaatactcgcgattcaccacagaggacatcgagatagttaacttgatcgtaccgcgctgcagtgagatacccgagcatatacgcccgtatattcagggccagccggcatgcaccatagcaaatgatgttcccgatagcgcccttaaatctgagaacagttcttctaccgccgaacaaagcaaatcgttagctggctaa

SEQ ID NO: 37826 - protein, 969 aa, Muscodor strobelii
  misc_feature: SGI Peptide ID NO. 573134
  misc_feature (3)..(592): NCBI GI: 145236174 Blast Desc: protein product [Aspergillus niger] gi|134075186|emb|CAK96499.1| protein product [Aspergillus niger]
  misc_feature (6)..(520): NCBI GI: 145602422 Blast Desc: MGG_04914 [Magnaporthe grisea 70-15] gi|145010850|gb|EDJ95506.1| MGG_04914 [Magnaporthe grisea 70-15]
  misc_feature (6)..(269): NCBI GI: 67526179 Blast Desc: AN3547.2 [Aspergillus nidulans FGSC A4] gi|40740565|gb|EAA59755.1| AN3547.2 [Aspergillus nidulans FGSC A4] gi|259481930|tpe|CBF75912.1| TPA: conserved [Aspergillus FGSC
  misc_feature (6)..(269): NCBI GI: 67902940 Blast Desc: AN8457.2 [Aspergillus nidulans FGSC A4] gi|40747923|gb|EAA67079.1| AN8457.2 [Aspergillus nidulans FGSC A4] gi|259484403|tpe|CBF80593.1| TPA: Pfs, NB-ARC and TPR domain
  misc_feature (6)..(244): NCBI GI: 169771161 Blast Desc: [Aspergillus oryzae RIB40] gi|83767909|dbj|BAE58048.1| protein product [Aspergillus oryzae]
  misc_feature (6)..(244): NCBI GI: 238486314 Blast Desc: Pfs, NB-ARC and TPR domain protein [Aspergillus flavus NRRL3357] gi|220699274|gb|EED55613.1| Pfs, NB-ARC and TPR domain protein [Aspergillus flavus NRRL3357]
  misc_feature (6)..(255): NCBI GI: 145252916 Blast Desc: An16g06690 [Aspergillus niger] gi|134083526|emb|CAK47003.1| protein product [Aspergillus niger]
  misc_feature (1)..(209): NCBI GI: 145237250 Blast Desc: An07g01850 [Aspergillus niger] gi|134075739|emb|CAK48087.1| protein product [Aspergillus niger]
  misc_feature (4)..(231): NCBI GI: 238508130 Blast Desc: conserved [Aspergillus flavus NRRL3357] gi|220688785|gb|EED45137.1| conserved [Aspergillus flavus NRRL3357]
  misc_feature (6)..(203): NCBI GI: 154285076 Blast Desc: conserved [Ajellomyces capsulatus NAm1] gi|150406974|gb|EDN02515.1| conserved [Ajellomyces capsulatus NAm1]
MLASAPRDRSDIYIAIICALRVEADAVHNILDKCWDDEGHEYGRDEHDTNFYTVGSVGQHNVVVVRLSGMGTIRSTDAANNIRHSFPNLQLALVVGVCGAVPTPPGRDIYLGDLVISSRVIQYNFGRQYPNGFQRKSAVDDGLPGTSRQVLNFLSFMEQERSNRKIRDDIRSSLLELEGGSTILPYPGAEHDQLYDPSFIHKHTIRAFCLKTRGPAKSRKKYLTQYLSGYQKGVCDYADSHKNKDWQPYAAIVAAVGMKAFLNQWTPTVPRRILERPDPTLSRAEFLSSKLAEALQYEGKYTRYDHLSSHKIPSKSFDWVWSTKIRSWLRDNSVQSTPFWITGKPGSGKSTLMKYLSESKQTRKLLGKTSNNFSIATFFFDFRAGTSTANNRLGVMKMLISHLCETDKRVATRLAERNEHDPIENMSEDRLIQFFGTALDDMKIRTYAFIDGLDEFTGEYFLEKLQNNTPIRMCLASRPEAVLKRYTARFPSFAMQDYNATSIKAYIKHAVLSAEDRHMECEALKDSNLQEGIVRKAQGVVIWARFAVDSLLRMGQRQVSLTALEDALDQLPEDLDRMYERTLKMIPDNISNEAALLLECMLGGKMDIKVMYGYWHWFFLEHRGILPAGSALVGDAAVDSFTSRLWQILGSFIDMFHVADEHLFAWNYFYYDSKKHKFRQRIRSTVPFMMLGFITPIPRIPDKTNYVQIAHKTAVDFLRQSEFFSSLIPMEVRNTDPLHTAAKILASVTAHGDINLTTLLSVFKSLGKGATVWPLRPSSRSCDLLVLDLVQNRTWKPRAALIRFCIFGFTHSCNSESNVDPEVFRAALESPLLALDISACFDWSGADLYTDLTSNTTSVARLSQFASLSLVVRKQMSSYLRGAFATSNPGSALLPRDWNRLAGLKYSRFTTEDIEIVNLIVPRCSEIPEHIRPYIQGQPACTIANDVPDSALKSENSSSTAEQSKSLAG

SEQ ID NO: 37827 - DNA, 415 bp, Muscodor strobelii
  misc_feature: SGI EST ID NO. CUFF.90608.0
  misc_feature: Variant of the nucleotide sequence at SEQ ID NO 37825
gccctatgcggctattgttgcagccgttggtatgaaggcttttctgaatcagtggacaccaaccgtaccccgtcgaatactggagcgacccgacccaacactctcgcgtgcggaattcctgtcgtcaaagctagctgaagcactccaatacgaggggaagtatacacgatatgaccatcttagctctcataaaatcccctcgaaatcattcgattgggtgtggagtaccaagatccgcagctggttaagagacaactctgtccaatctacccctttttggattaccggcaaacctgggtcaggtaaatcgacgttgatgaaatatctgtctgagtccaagcagactaggaagttattgggcaagacgagcaataatttcagcattgcaacattctttttcgactttcgcgccggg

SEQ ID NO: 37828 - DNA, 1659 bp, Muscodor strobelii
  misc_feature: SGI cDNA ID NO. 573135
  misc_feature: Elevated expression when VOC is produced
  misc_feature: Encodes the peptide sequence at SEQ ID NO 37829
atgggagggaggccggggtggctcttgcgttgcaaagccaatcagctacttgttctcagaagaggccgcatccggcccgctcggaatgtttgggtactccaggcgcaaaacgaaagccagtccgcgaagcaacatgaccaacgacccaagaagaatagcgaggaggatgaacctcaaaccagctggaggaagacgaccttcacaaagttcgttgagggaagtgcaactgcgttcggctcgatattgattctaggacttgccgggtattcctatgacaagtactacaaggcccatgtgctacgcaagatggccaatgccttcacggaggggtactccagcttggaactggccgctctcagcaggcatgtagatctccatgacccaaacgcaaattcatccaacgtaggtctagatgaaaatgactggattccccgggaagagcaacaaatcatcgactctatcgtggatggcacgactaagggccagtaccatcttatcacgggcgaaaagggcacgggcaagacatctatgctactaaaagcgctaagcaaagtaggcggtgatagggtagccatgtttgaggcccacggagatcctgagatatttcgtcagcgccttggcaaagcgctcgatttcgagtttcacgaagattacatcggtggactattcagctacagaggcccgcgagacacgacggcactactcgacatcgagcgtgccttcaacaagatggagaaggtcgcgatacagcgtaagcagcaagatgggcggccgctgatcctcattgtcacgagcgtacacctggtacgcgacgacgaagatggccaagacctgctcgagctcattcagcagcgggctgagctctgggcggccagcaacctcgttacggtggtattctgcagcgacgattattggacgatagagcgccttatgtggcaggcgacgagactccgcatcactccggtccgcgacatagctagacctatagctatcgagtcactgaagaaatttcgtgctagaatgtttagcgaagatgtatctgacgatgttttatcgcaagtctacgaaaaggttggaggacggcttaatttcctcagccgtgtggccaagtcagatgacatgattaaaacctgcaatgtcatctgcgagcgagaaaagcgatggctcttgaacaagtactggattcttggggacgacttagaccctggaggcgaggagcaacaagatctctcctcggccgctatgttgctcgctaaagctctagtagacaaggaagcggcgatgaggaaggacggcacgtatgatggaaggttgccgcagataccgctacacattgcgcgacagatcatgactaacgccagctggatcaagagccatgaccatcataatatttttactatcaactcggacgggatggttcaagccgattccgttgcaatgcagaacgcgatgcgcgaagtctgcggtcaagagggcttcgaaaagcttttgcgcgcgacgctagatcgcctcgacgaaatcgaaagcctccagaggacaagagagatcgtgctcaaggatttgacagaggacggagaatacactgccactattggaaagggtcagggacagacaggtaatgcagtcatctcaatcaaagttgctcctcgatctgcgtag

SEQ ID NO: 37829 - protein, 552 aa, Muscodor strobelii
  misc_feature: SGI Peptide ID NO. 573135
  misc_feature (25)..(536): NCBI GI: 67537480 Blast Desc: AN4910.2 [Aspergillus nidulans FGSC A4] gi|40741798|gb|EAA60988.1| AN4910.2 [Aspergillus nidulans FGSC A4] gi|259482222|tpe|CBF76498.1| TPA: conserved [Aspergillus FGSC
  misc_feature (64)..(546): NCBI GI: 159127553 Blast Desc: conserved [Aspergillus fumigatus A1163]
  misc_feature (64)..(546): NCBI GI: 70999646 Blast Desc: conserved [Aspergillus fumigatus Af293] gi|66852177|gb|EAL92502.1| conserved [Aspergillus fumigatus Af293]
  misc_feature (64)..(546): NCBI GI: 119491769 Blast Desc: NFIA_066460 [Neosartorya fischeri NRRL 181] gi|119411539|gb|EAW21482.1| conserved [Neosartorya fischeri NRRL 181]
  misc_feature (64)..(542): NCBI GI: 121705640 Blast Desc: conserved [Aspergillus clavatus NRRL 1] gi|119399229|gb|EAW09657.1| conserved [Aspergillus clavatus NRRL 1]
  misc_feature (7)..(550): NCBI GI: 225681968 Blast Desc: conserved [Paracoccidioides brasiliensis Pb03]
  misc_feature (27)..(550): NCBI GI: 225555834 Blast Desc: conserved [Ajellomyces capsulatus G186AR]
  misc_feature (5)..(551): NCBI GI: 258564004 Blast Desc: conserved [Uncinocarpus reesii 1704] gi|237908254|gb|EEP82655.1| conserved [Uncinocarpus reesii 1704]
  misc_feature (48)..(550): NCBI GI: 226289134 Blast Desc: conserved [Paracoccidioides brasiliensis Pb18]
  misc_feature (46)..(547): NCBI GI: 238486916 Blast Desc: conserved [Aspergillus flavus NRRL3357] gi|220699575|gb|EED55914.1| conserved [Aspergillus flavus NRRL3357]
  misc_feature: Useful for introducing or modulating the production of volatile compounds
MGGRPGWLLRCKANQLLVLRRGRIRPARNVWVLQAQNESQSAKQHDQRPKKNSEEDEPQTSWRKTTFTKFVEGSATAFGSILILGLAGYSYDKYYKAHVLRKMANAFTEGYSSLELAALSRHVDLHDPNANSSNVGLDENDWIPREEQQIIDSIVDGTTKGQYHLITGEKGTGKTSMLLKALSKVGGDRVAMFEAHGDPEIFRQRLGKALDFEFHEDYIGGLFSYRGPRDTTALLDIERAFNKMEKVAIQRKQQDGRPLILIVTSVHLVRDDEDGQDLLELIQQRAELWAASNLVTVVFCSDDYWTIERLMWQATRLRITPVRDIARPIAIESLKKFRARMFSEDVSDDVLSQVYEKVGGRLNFLSRVAKSDDMIKTCNVICEREKRWLLNKYWILGDDLDPGGEEQQDLSSAAMLLAKALVDKEAAMRKDGTYDGRLPQIPLHIARQIMTNASWIKSHDHHNIFTINSDGMVQADSVAMQNAMREVCGQEGFEKLLRATLDRLDEIESLQRTREIVLKDLTEDGEYTATIGKGQGQTGNAVISIKVAPRSA

SEQ ID NO: 37830 - DNA, 2215 bp, Muscodor strobelii
  misc_feature: SGI EST ID NO. CUFF.90653.1
  misc_feature: Variant of the nucleotide sequence at SEQ ID NO 37828
atttcatcgctcagcgcgtccttagatcatgttgtcgcagactttttgccatttctctccttttgtatcagaattttagtatgcatctcataatttagctagctaggggcgaattggtcgctcgccagtcacagccgctagcgcaatgggagggaggccggggtggctcttgcgttgcaaagccaatcagctacttgttctcagaagaggccgcatccggcccgctcggaatgtttgggtactccaggcgcaaaacgaaagccagtccgcgaagcaacatgaccaacgacccaagaagaatagcgaggaggatgaacctcaaaccagctggaggaagacgaccttcacaaagttcgttgagggaagtgcaactgcgttcggctcgatattgattctaggacttgccgggtattcctatgacaagtactacaaggcccatgtgctacgcaagatggccaatgccttcacggaggggtactccagcttggaactggccgctctcagcaggcatgtagatctccatgacccaaacgcaaattcatccaacgtaggtctagatgaaaatgactggattccccgggaagagcaacaaatcatcgactctatcgtggatggcacgactaagggccagtaccatcttatcacgggcgaaaagggcacgggcaagacatctatgctactaaaagcgctaagcaaagtaggcggtgatagggtagccatgtttgaggcccacggagatcctgagatatttcgtcagcgccttggcaaagcgctcgatttcgagtttcacgaagattacatcggtggactattcagctacagaggcccgcgagacacgacggcactactcgacatcgagcgtgccttcaacaagatggagaaggtcgcgatacagcgtaagcagcaagatgggcggccgctgatcctcattgtcacgagcgtacacctggtacgcgacgacgaagatggccaagacctgctcgagctcattcagcagcgggctgagctctgggcggccagcaacctcgttacggtggtattctgcagcgacgattattggacgatagagcgccttatgtggcaggcgacgagactccgcatcactccggtccgcgacatagctagacctatagctatcgagtcactgaagaaatttcgtgctagaatgtttagcgaagatgtatctgacgatgttttatcgcaagtctacgaaaaggttggaggacggcttaatttcctcagccgtgtggccaagtcagatgacatgattaaaacctgcaatgtcatctgcgagcgagaaaagcgatggctcttgaacaagtactggattcttggggacgacttagaccctggaggcgaggagcaacaagatctctcctcggccgctatgttgctcgctaaagctctagtagacaaggaagcggcgatgaggaaggacggcacgtatgatggaaggttgccgcagataccgctacacattgcgcgacagatcatgactaacgccagctggatcaagagccatgaccatcataatatttttactatcaactcggacgggatggttcaagccgattccgttgcaatgcagaacgcgatgcgcgaagtctgcggtcaagagggcttcgaaaagcttttgcgcgcgacgctagatcgcctcgacgaaatcgaaagcctccagaggacaagagagatcgtgctcaaggatttgacagaggacggagaatacactgccactattggaaagggtcagggacagacaggtaatgcagtcatctcaatcaaagttgctcctcgatctgcgtagaatcatcccttggtagaaaagggctttacgagcaattcaacttccagcgtttgagaattagcaattagaaacacggagagtaactagagattgtgcgaatgagttgaaatctgtagaatttgcaaggttatagagctagtattctgaagggagcgcctcccatgggtctttgacacactcgtccgggactttttctcctgcgatatagaagcgagcttacatcatctctatgtattttttctgcattctaatcaatttgctgtacaggaacttaggaatcgtgtgttgtttcatgttccctcgatcgtatggatgacaacatgccctaattttggaacggaatggacagccaagcatctgccgacaatgaaaggaccataacgtcctatttcgtacaagtttataaaaaat

SEQ ID NO: 37831 - DNA, 1653 bp, Muscodor strobelii
  misc_feature: SGI cDNA ID NO. 573136
  misc_feature: Reduced expression when VOC is produced
  misc_feature: Encodes the peptide sequence at SEQ ID NO 37832
atgggagggaggccggggtggctcttgcgttgcaaagccctacttgttctcagaagaggccgcatccggcccgctcggaatgtttgggtactccaggcgcaaaacgaaagccagtccgcgaagcaacatgaccaacgacccaagaagaatagcgaggaggatgaacctcaaaccagctggaggaagacgaccttcacaaagttcgttgagggaagtgcaactgcgttcggctcgatattgattctaggacttgccgggtattcctatgacaagtactacaaggcccatgtgctacgcaagatggccaatgccttcacggaggggtactccagcttggaactggccgctctcagcaggcatgtagatctccatgacccaaacgcaaattcatccaacgtaggtctagatgaaaatgactggattccccgggaagagcaacaaatcatcgactctatcgtggatggcacgactaagggccagtaccatcttatcacgggcgaaaagggcacgggcaagacatctatgctactaaaagcgctaagcaaagtaggcggtgatagggtagccatgtttgaggcccacggagatcctgagatatttcgtcagcgccttggcaaagcgctcgatttcgagtttcacgaagattacatcggtggactattcagctacagaggcccgcgagacacgacggcactactcgacatcgagcgtgccttcaacaagatggagaaggtcgcgatacagcgtaagcagcaagatgggcggccgctgatcctcattgtcacgagcgtacacctggtacgcgacgacgaagatggccaagacctgctcgagctcattcagcagcgggctgagctctgggcggccagcaacctcgttacggtggtattctgcagcgacgattattggacgatagagcgccttatgtggcaggcgacgagactccgcatcactccggtccgcgacatagctagacctatagctatcgagtcactgaagaaatttcgtgctagaatgtttagcgaagatgtatctgacgatgttttatcgcaagtctacgaaaaggttggaggacggcttaatttcctcagccgtgtggccaagtcagatgacatgattaaaacctgcaatgtcatctgcgagcgagaaaagcgatggctcttgaacaagtactggattcttggggacgacttagaccctggaggcgaggagcaacaagatctctcctcggccgctatgttgctcgctaaagctctagtagacaaggaagcggcgatgaggaaggacggcacgtatgatggaaggttgccgcagataccgctacacattgcgcgacagatcatgactaacgccagctggatcaagagccatgaccatcataatatttttactatcaactcggacgggatggttcaagccgattccgttgcaatgcagaacgcgatgcgcgaagtctgcggtcaagagggcttcgaaaagcttttgcgcgcgacgctagatcgcctcgacgaaatcgaaagcctccagaggacaagagagatcgtgctcaaggatttgacagaggacggagaatacactgccactattggaaagggtcagggacagacaggtaatgcagtcatctcaatcaaagttgctcctcgatctgcgtag

SEQ ID NO: 37832 - protein, 550 aa, Muscodor strobelii
  misc_feature: SGI Peptide ID NO. 573136
  misc_feature (23)..(534): NCBI GI: 67537480 Blast Desc: AN4910.2 [Aspergillus nidulans FGSC A4] gi|40741798|gb|EAA60988.1| AN4910.2 [Aspergillus nidulans FGSC A4] gi|259482222|tpe|CBF76498.1| TPA: conserved [Aspergillus FGSC
  misc_feature (62)..(544): NCBI GI: 159127553 Blast Desc: conserved [Aspergillus fumigatus A1163]
  misc_feature (62)..(544): NCBI GI: 70999646 Blast Desc: conserved [Aspergillus fumigatus Af293] gi|66852177|gb|EAL92502.1| conserved [Aspergillus fumigatus Af293]
  misc_feature (62)..(544): NCBI GI: 119491769 Blast Desc: NFIA_066460 [Neosartorya fischeri NRRL 181] gi|119411539|gb|EAW21482.1| conserved [Neosartorya fischeri NRRL 181]
  misc_feature (62)..(540): NCBI GI: 121705640 Blast Desc: conserved [Aspergillus clavatus NRRL 1] gi|119399229|gb|EAW09657.1| conserved [Aspergillus clavatus NRRL 1]
  misc_feature (46)..(548): NCBI GI: 225681968 Blast Desc: conserved [Paracoccidioides brasiliensis Pb03]
  misc_feature (5)..(549): NCBI GI: 258564004 Blast Desc: conserved [Uncinocarpus reesii 1704] gi|237908254|gb|EEP82655.1| conserved [Uncinocarpus reesii 1704]
  misc_feature (5)..(548): NCBI GI: 225555834 Blast Desc: conserved [Ajellomyces capsulatus G186AR]
  misc_feature (46)..(548): NCBI GI: 226289134 Blast Desc: conserved [Paracoccidioides brasiliensis Pb18]
  misc_feature (44)..(545): NCBI GI: 238486916 Blast Desc: conserved [Aspergillus flavus NRRL3357] gi|220699575|gb|EED55914.1| conserved [Aspergillus flavus NRRL3357]
  misc_feature: Useful for introducing or modulating the production of volatile compounds
MGGRPGWLLRCKALLVLRRGRIRPARNVWVLQAQNESQSAKQHDQRPKKNSEEDEPQTSWRKTTFTKFVEGSATAFGSILILGLAGYSYDKYYKAHVLRKMANAFTEGYSSLELAALSRHVDLHDPNANSSNVGLDENDWIPREEQQIIDSIVDGTTKGQYHLITGEKGTGKTSMLLKALSKVGGDRVAMFEAHGDPEIFRQRLGKALDFEFHEDYIGGLFSYRGPRDTTALLDIERAFNKMEKVAIQRKQQDGRPLILIVTSVHLVRDDEDGQDLLELIQQRAELWAASNLVTVVFCSDDYWTIERLMWQATRLRITPVRDIARPIAIESLKKFRARMFSEDVSDDVLSQVYEKVGGRLNFLSRVAKSDDMIKTCNVICEREKRWLLNKYWILGDDLDPGGEEQQDLSSAAMLLAKALVDKEAAMRKDGTYDGRLPQIPLHIARQIMTNASWIKSHDHHNIFTINSDGMVQADSVAMQNAMREVCGQEGFEKLLRATLDRLDEIESLQRTREIVLKDLTEDGEYTATIGKGQGQTGNAVISIKVAPRSA

SEQ ID NO: 37833 - DNA, 2215 bp, Muscodor strobelii; identical to SEQ ID NO: 37830
  misc_feature: SGI EST ID NO. CUFF.90653.1
  misc_feature: Variant of the nucleotide sequence at SEQ ID NO 37831

SEQ ID NO: 37834 - DNA, 1233 bp, Muscodor strobelii
  misc_feature: SGI cDNA ID NO. 573137
  misc_feature: Encodes the peptide sequence at SEQ ID NO 37835
atggcaatcaaggtaccttccatctatcaggatgccctggagcctgtcgaaaaccatgaatcaagaacggatgaggagatcctccaatctcttctggagttcaagcccgtaactgagagcgaaaagaatatctgggctttctgggatagcggtttcaaggggatgcccgcctggtgtcagcgaaacatcgtctcatgggtgcgaatttgtggccctgagtggacagtgcgggttctcgatgatgttccagaatcccctaactatgccgcgaagtacatcccccagggctcgactccaaagctacctgataagtactacgatcgctcgctcaatgatacgcatgccggaccccacatcgcggacttcctcagaggcgcttgtactttcaaatacggaggcgtgtgggttgattgcagtaccttcctgacgcgaaatatggatgacctgtgctggaacatgctcagtgaccctgggtccccttaccagatcgccgtgccatggcaatttggcatcatgctcaacagtttcattgcagcgcgaaaaggcgaccccttcattgagcgatggcacaacttattcatccaaatctgggaaggcaaggaaaacgcagatggattagctcaacaccccttgttgactccgatttcgccctatttcctcgggtacttccagggagccgcaaagtgggagttcaaggcttcgttcgacaaactgatcgaatacggcgcacagattgtatgctggtcgcgcttggtaatgctcgaaaaagacaagacaggatttgcttgcgctgactacgcggtaaacaacatcgcctggctcgactgctcacgcgaggttgtacgatccttctacaccgacgacatgcaattcgacgtatctatggtcggccaaagactagttgatttactcgccaccccggttgacggtgataaggaatctaaaacgtatcaagatgctgagaaactagtatggagagagctaaccacttcgtccatggtcaagattgggactatcaagggtatggtagactggatttccgcggcaactctatggaagaggccggagcatctcgggaaagacggcgcgccaggcagctttggtgagttgcttagaactgttccagagcatttcaagcaaacacgcaaagggatcacgcttatcccggtgaagaagtcgcctgtcacctttacagaattgccggatgatagtctggtatcgatggtgctgtag

SEQ ID NO: 37835 - protein, 410 aa, Muscodor strobelii
  misc_feature: SGI Peptide ID NO. 573137
  misc_feature (1)..(392): NCBI GI: 67538582 Blast Desc: AN5461.2 [Aspergillus nidulans FGSC A4] gi|40743431|gb|EAA62621.1| [Aspergillus nidulans FGSC A4] gi|259485092|tpe|CBF81870.1| TPA: capsule polysaccharide protein,
  misc_feature (5)..(392): NCBI GI: 225683101 Blast Desc: conserved [Paracoccidioides brasiliensis Pb03]
  misc_feature (3)..(392): NCBI GI: 255952538 Blast Desc: Pc17g00710 [Penicillium chrysogenum Wisconsin 54-1255] gi|211586525|emb|CAP79358.1| Pc17g00710 [Penicillium chrysogenum Wisconsin 54-1255]
  misc_feature (5)..(397): NCBI GI: 261188905 Blast Desc: capsule polysaccharide biosynthesis protein [Ajellomyces dermatitidis SLH14081] gi|239591869|gb|EEQ74450.1| capsule polysaccharide biosynthesis protein [Ajellomyces
  misc_feature (4)..(392): NCBI GI: 242779945 Blast Desc: conserved [Talaromyces stipitatus ATCC 10500] gi|218719639|gb|EED19058.1| conserved [Talaromyces stipitatus ATCC 10500]
  misc_feature (5)..(397): NCBI GI: 239609144 Blast Desc: capsule polysaccharide biosynthesis protein [Ajellomyces dermatitidis ER-3]
  misc_feature (5)..(410): NCBI GI: 225683496 Blast Desc: conserved [Paracoccidioides brasiliensis Pb03]
  misc_feature (101)..(392): NCBI GI: 226288433 Blast Desc: conserved [Paracoccidioides brasiliensis Pb18]
  misc_feature (5)..(392): NCBI GI: 212526066 Blast Desc: conserved [Penicillium marneffei ATCC 18224] gi|210072588|gb|EEA26675.1| conserved [Penicillium marneffei ATCC 18224]
  misc_feature (15)..(391): NCBI GI: 70985642 Blast Desc: capsule polysaccharide biosynthesis protein [Aspergillus fumigatus Af293] gi|66845955|gb|EAL86289.1| capsule polysaccharide biosynthesis protein, [Aspergillus fumigatus
MAIKVPSIYQDALEPVENHESRTDEEILQSLLEFKPVTESEKNIWAFWDSGFKGMPAWCQRNIVSWVRICGPEWTVRVLDDVPESPNYAAKYIPQGSTPKLPDKYYDRSLNDTHAGPHIADFLRGACTFKYGGVWVDCSTFLTRNMDDLCWNMLSDPGSPYQIAVPWQFGIMLNSFIAARKGDPFIERWHNLFIQIWEGKENADGLAQHPLLTPISPYFLGYFQGAAKWEFKASFDKLIEYGAQIVCWSRLVMLEKDKTGFACADYAVNNIAWLDCSREVVRSFYTDDMQFDVSMVGQRLVDLLATPVDGDKESKTYQDAEKLVWRELTTSSMVKIGTIKGMVDWISAATLWKRPEHLGKDGAPGSFGELLRTVPEHFKQTRKGITLIPVKKSPVTFTELPDDSLVSMVL

SEQ ID NO: 37836 - DNA, 1121 bp, Muscodor strobelii
  misc_feature: SGI EST ID NO. CUFF.90625.0
  misc_feature: Variant of the nucleotide sequence at SEQ ID NO 37834
gcgaatttgtggccctgagtggacagtgcgggttctcgatgatgttccagaatcccctaactatgccgcgaagtacatcccccagggctcgactccaaagctacctgataagtactacgatcgctcgctcaatgatacgcatgccggaccccacatcgcggacttcctcagaggcgcttgtactttcaaatacggaggcgtgtgggttgattgcagtaccttcctgacgcgaaatatggatgacctgtgctggaacatgctcagtgaccctgggtccccttaccagatcgccgtgccatggcaatttggcatcatgctcaacagtttcattgcagcgcgaaaaggcgaccccttcattgagcgatggcacaacttattcatccaaatctgggaaggcaaggaaaacgcagatggattagctcaacaccccttgttgactccgatttcgccctatttcctcgggtacttccagggagccgcaaagtgggagttcaaggcttcgttcgacaaactgatcgaatacggcgcacagattgtatgctggtcgcgcttggtaatgctcgaaaaagacaagacaggatttgcttgcgctgactacgcggtaaacaacatcgcctggctcgactgctcacgcgaggttgtacgatccttctacaccgacgacatgcaattcgacgtatctatggtcggccaaagactagttgatttactcgccaccccggttgacggtgataaggaatctaaaacgtatcaagatgctgagaaactagtatggagagagctaaccacttcgtccatggtcaagattgggactatcaagggtatggtagactggatttccgcggcaactctatggaagaggccggagcatctcgggaaagacggcgcgccaggcagctttggtgagttgcttagaactgttccagagcatttcaagcaaacacgcaaagggatcacgcttatcccggtgaagaagtcgcctgtcacctttacagaattgccggatgatagtctggtatcgatggtgctgtagatcaactacgcacaaaagatgcgatgcctttctatactgggctttaggccacgtttgtacaagaagctggttactaattactattgcg

SEQ ID NO: 37837 - DNA, 468 bp, Muscodor strobelii
  misc_feature: SGI cDNA ID NO. 573138
  misc_feature: Elevated expression when VOC is produced
  misc_feature: Encodes the peptide sequence at SEQ ID NO 37838
atgccaggaagtgtgttgcgcggctttgctgcatcacgcattgcccaaactaccgaaatacttggtatggggcttggcgaagacctcggtgatggtatgggccgccattcgacagcagggagctggaatgcacagattactccgcgactcgctgctgtcgtcgaacctatagacgtgcagtgtgctaaaaatcgaatttcgggaatgtggacgccaacgcagccgctctggcagcatttggagaagactgggaagactacattactattcactggagttaatacagacgagtgtgtgcaaggaactctcttcgatgcgtataacgctggctgggactgcattttgttggacgactgctgcggaaccacgaccccgaatggtcatagtacgacgctgtacaatgtttcggtgttttacggatttgtatctgacagtaaggccttcgcagctggcgtactcggagcctag

SEQ ID NO: 37838 - protein, 155 aa, Muscodor strobelii
  misc_feature: SGI Peptide ID NO. 573138
  misc_feature (34)..(150): Pfam Id: PF00857 Pfam Desc: Isochorismatase family
  misc_feature (1)..(148): NCBI GI: 189204189 Blast Desc: isochorismatase hydrolase [Pyrenophora tritici-repentis Pt-1C-BFP] gi|187985529|gb|EDU51017.1| isochorismatase hydrolase [Pyrenophora tritici-repentis
  misc_feature (1)..(148): NCBI GI: 169623873 Blast Desc: SNOG_15183 [Phaeosphaeria nodorum SN15] gi|160705061|gb|EAT77408.2| SNOG_15183 [Phaeosphaeria nodorum SN15]
  misc_feature (22)..(152): NCBI GI: 119485377 Blast Desc: Isochorismatase hydrolase [Lyngbya sp. PCC 8106] gi|119457133|gb|EAW38259.1| Isochorismatase hydrolase [Lyngbya sp. PCC 8106]
  misc_feature (22)..(148): NCBI GI: 75907800 Blast Desc: isochorismatase hydrolase [Anabaena variabilis ATCC 29413] gi|75701525|gb|ABA21201.1| Isochorismatase hydrolase [Anabaena variabilis ATCC 29413]
  misc_feature (10)..(146): NCBI GI: 186682741 Blast Desc: isochorismatase hydrolase [Nostoc punctiforme PCC 73102] gi|186465193|gb|ACC80994.1| isochorismatase hydrolase [Nostoc punctiforme PCC 73102]
  misc_feature (22)..(148): NCBI GI: 119510535 Blast Desc: N9414_12678 [Nodularia spumigena CCY9414] gi|119464802|gb|EAW45708.1| N9414_12678 [Nodularia spumigena CCY9414]
  misc_feature (22)..(152): NCBI GI: 86610291 Blast Desc: isochorismatase family protein [Synechococcus sp. JA-2-3B'a(2-13)] gi|86558833|gb|ABD03790.1| isochorismatase family protein [Synechococcus sp. JA-2-3B'a(2-13)]
  misc_feature (1)..(152): NCBI GI: 39940872 Blast Desc: MGG_05348 [Magnaporthe grisea 70-15] gi|145021976|gb|EDK05996.1| MGG_05348 [Magnaporthe grisea 70-15]
  misc_feature (22)..(146): NCBI GI: 254411432 Blast Desc: isochorismatase family protein [Microcoleus chthonoplastes PCC 7420] gi|196181933|gb|EDX76920.1| isochorismatase family protein [Microcoleus chthonoplastes PCC
  misc_feature (24)..(152): NCBI GI: 169621227 Blast Desc: SNOG_13822 [Phaeosphaeria nodorum SN15] gi|160704208|gb|EAT78846.2| SNOG_13822 [Phaeosphaeria nodorum SN15]
  misc_feature: Useful for introducing or modulating the production of volatile compounds
MPGSVLRGFAASRIAQTTEILGMGLGEDLGDGMGRHSTAGSWNAQITPRLAAVVEPIDVQCAKNRISGMWTPTQPLWQHLEKTGKTTLLFTGVNTDECVQGTLFDAYNAGWDCILLDDCCGTTTPNGHSTTLYNVSVFYGFVSDSKAFAAGVLGA

SEQ ID NO: 37839 - DNA, 745 bp, Muscodor strobelii
  misc_feature: SGI EST ID NO. CUFF.90697.2
  misc_feature: Variant of the nucleotide sequence at SEQ ID NO 37837
ctttatcagatcatctggctgaattggggtctgacagaagaagacctcgctaacatgccaggaagtgtgttgcgcggctttgctgcatcacgcattgcccaaactaccgaaatacttggtatggggcttggcgaagacctcggtgatggtatgggccgccattcgacagcagggagctggaatgcacagattactccgcgactcgctgctgtcgtcgaacctatagacgtgcagtgtgctaaaaatcgaatttcgggaatgtggacgccaacgcagccgctctggcagcatttggagaagactgggaagactacattactattcactggagttaatacagacgagtgtgtgcaaggaactctcttcgatgcgtataacgctggctgggactgcattttgttggacgactgctgcggaaccacgaccccgaatggtcatagtacgacgctgtacaatgtttcggtgttttacggatttgtatctgacagtaaggccttcgcagctggcgtactcggagcctagagatgttgcgggcaaaatgagggttgatctatgaagagtctgggctagccgaattttatcgacggcgcatcatgcagttgcctcataattgagtctgttcggattggacagcatttgtcaaaaactcgatggtcagttcggccgatagcaaaagtgtgagaaatgattccaacatgatgatggactatgcttgtcgccactctcaatgttggtatgattcctg

SEQ ID NO: 37840 - DNA, 951 bp, Muscodor strobelii
  misc_feature: SGI cDNA ID NO. 573139
  misc_feature: Encodes the peptide sequence at SEQ ID NO 37841
atgtctgctgctaagagaatcatcactgtcttcggcgccactggcaaccagggcggtgccattgtcaagacctttttgaacgatcccgttctcaagagctcttgggcagttcgcggtgtcactcgcgatgtttccaaagactcatctaagaaactggctgcgcagggtgtcgaagttgttgctgcggatatcaacgacaaagcttctatcgccaaagcacttgctggctcagacaccgcgtttgccgtcacgaactactgggagaaaatggacatgaagctcgaggagcagcaaggtcgcaatattgctgatgccgccaaggagactggcctgaagcacctcatctggagttccctactaaacattgagaaactgactaatgggaagcttcctcatgtctaccattttgacagcaaggccaacgtcgaggagtatatccgagctcaggggattccggccacattcttcatgccgggcttctacatgcccaacttccccggtggcatgctttctaagcagggcgacaactatgtcttgagcatgcccattgcctcctcatcacctattcccctctatgaccccgccgacaccggtaaatacatcaaggccatcgtccagaacaaggaagcccttctcggcaagcgcttcctcggtgccactcagtacttgacagcgcaagaagtccttgacacattcaagagtgtcttccctgagactggcaagaccgctggttactacgagacgccgaaagaaggcttttacagcttcatgtcgagcactggcatgcctcctcatgctgtcgaggagatgtacgagaacatggttctcatgcaggacttcggttactacggtggtgagccccttgatgagtcgcacaagtacgtcaaggacgagcttacaacctgggctgtccacgctaaaaatgctgctgcttgggctgagttgaagtaa

SEQ ID NO: 37841 - protein, 316 aa, Muscodor strobelii
  misc_feature: SGI Peptide ID NO. 573139
  misc_feature (8)..(247): Pfam Id: PF05368 Pfam Desc: NmrA-like family
  misc_feature (3)..(314): NCBI GI: 171681174 Blast Desc: protein product [Podospora anserina] gi|170940545|emb|CAP65773.1| protein product [Podospora anserina]
  misc_feature (4)..(315): NCBI GI: 261356993 Blast Desc: NMRAL1 protein [Verticillium albo-atrum VaMs.102]
  misc_feature (1)..(316): NCBI GI: 85091800 Blast Desc: NCU09169 [Neurospora crassa OR74A] gi|28920477|gb|EAA29843.1| conserved [Neurospora crassa OR74A]
  misc_feature (3)..(303): NCBI GI: 39975395 Blast Desc: MGG_00156 [Magnaporthe grisea 70-15] gi|145018993|gb|EDK03272.1| MGG_00156 [Magnaporthe grisea 70-15]
  misc_feature (2)..(316): NCBI GI: 154320808 Blast Desc: BC1G_01876 [Botryotinia fuckeliana B05.10] gi|150853565|gb|EDN28757.1| BC1G_01876 [Botryotinia fuckeliana B05.10]
  misc_feature (3)..(315): NCBI GI: 156040497 Blast Desc: SS1G_12265 [Sclerotinia sclerotiorum 1980] gi|154696321|gb|EDN96059.1| SS1G_12265 [Sclerotinia sclerotiorum 1980]
  misc_feature (5)..(309): NCBI GI: 261360024 Blast Desc: conserved [Verticillium albo-atrum VaMs.102]
  misc_feature (6)..(313): NCBI GI: 212536955 Blast Desc: NmrA family transcriptional regulator, [Penicillium marneffei ATCC 18224] gi|210068375|gb|EEA22466.1| NmrA family transcriptional regulator, [Penicillium marneffei ATCC 18224]
  misc_feature (5)..(316): NCBI GI: 238839505 Blast Desc: hscarg protein [Microsporum canis CBS 113480]
  misc_feature (6)..(305): NCBI GI: 242810577 Blast Desc: NmrA family transcriptional regulator, [Talaromyces stipitatus ATCC 10500] gi|218716234|gb|EED15656.1| NmrA family transcriptional regulator, [Talaromyces stipitatus ATCC 10500]
MSAAKRIITVFGATGNQGGAIVKTFLNDPVLKSSWAVRGVTRDVSKDSSKKLAAQGVEVVAADINDKASIAKALAGSDTAFAVTNYWEKMDMKLEEQQGRNIADAAKETGLKHLIWSSLLNIEKLTNGKLPHVYHFDSKANVEEYIRAQGIPATFFMPGFYMPNFPGGMLSKQGDNYVLSMPIASSSPIPLYDPADTGKYIKAIVQNKEALLGKRFLGATQYLTAQEVLDTFKSVFPETGKTAGYYETPKEGFYSFMSSTGMPPHAVEEMYENMVLMQDFGYYGGEPLDESHKYVKDELTTWAVHAKNAAAWAELK

SEQ ID NO: 37842 - DNA, 2077 bp, Muscodor strobelii
  misc_feature: SGI EST ID NO. CUFF.90634.0
  misc_feature: Variant of the nucleotide sequence at SEQ ID NO 37840
attaatcaatcgctactaaggcttcagccctaacatgcatattcggggttgcaagagaaagttgagtgcctcgaccgctcgatcgagcaagacggcttggcatgaaccaattcccggtccccatctcaagccactacatttggattacattctgactccggccattggtggggatgagcggaatccagaggacgaacatcatgaccaatctcttcgcggcttggaatgtcgaaagtgaacgattcgaaggcacacacagagatgagttaacatatcatggaaggcagcaagatggatgcttcgtgtatatatattgatggcatcgccatgttggaaacaatacattctttctcatcaccaacaacatcgcagctcatccacccgacgcacaagcaatcaaagcaataccggctcaatacactactaaccaagtctcaatcataatatttacattatatatcagagatcattaccccatcacttcaaaatgtctgctgctaagagaatcatcactgtcttcggcgccactggcaaccagggcggtgccattgtcaagacctttttgaacgatcccgttctcaagagctcttgggcagttcgcggtgtcactcgcgatgtttccaaagactcatctaagaaactggctgcgcagggtgtcgaagttgttgctgcggatatcaacgacaaagcttctatcgccaaagcacttgctggctcagacaccgcgtttgccgtcacgaactactgggagaaaatggacatgaagctcgaggagcagcaaggtcgcaatattgctgatgccgccaaggagactggcctgaagcacctcatctggagttccctactaaacattgagaaactgactaatgggaagcttcctcatgtctaccattttgacagcaaggccaacgtcgaggagtatatccgagctcaggggattccggccacattcttcatgccgggcttctacatgcccaacttccccggtggcatgctttctaagcagggcgacaactatgtcttgagcatgcccattgcctcctcatcacctattcccctctatgaccccgccgacaccggtaaatacatcaaggccatcgtccagaacaaggaagcccttctcggcaagcgcttcctcggtgccactcagtacttgacagcgcaagaagtccttgacacattcaagagtgtcttccctgagactggcaagaccgctggttactacgagacgccgaaagaaggcttttacagcttcatgtcgagcactggcatgcctcctcatgctgtcgaggagatgtacgagaacatggttctcatgcaggacttcggttactacggtggtgagccccttgatgagtcgcacaagtacgtcaaggacgagcttacaacctgggctgtccacgctaaaaatgctgctgcttgggctgagttgaagtaaatgttataaacactggttcgatcttccaaattgtacactaaacatagtaaatgcattcgtttggccagttttcaaaaatctcttctagttaatatctaacggttgtgatcacgcctttgacaaggacgatgctccatgcaaagtctgcaacttcaaaggctgttcgaaaatagacaaccgtttatgcagccgagaaacgtagaggctaagacaaggatgaaggcgtccccatacttaagatgtgactgaacaggtggagaatgtgtgcggctctgatctggctgccgctgcggggcaaaaagcttccacgccttgacgtcacacattaagctgtagaatgactgatatgaaatatgcgacgacaaacccatctgcaaaagattctgtagagctggaacacaaactccgttctcattcatcttaccacttctcaatttaacaaaacatcttgccttcgagttctttattttcacgatcgcatttgatcgtcgtgtgagtcaagcttgcagatatctagggtatcttgaagatctgtgtttcctggccggaggttatctccgggatgcgacagcacagtagtcaggtacggactggcatccacttggagacccgtattattacttgataggaatatttgag

SEQ ID NO: 37843 - DNA, 1476 bp, Muscodor strobelii
  misc_feature: SGI cDNA ID NO. 573140
  misc_feature: Encodes the peptide sequence at SEQ ID NO 37844
atgtcgcaaccaatcgacgacggaactcatgcatcaacacctcttgagccgattgaggagtcaggtgttcaagggtatatgcctagcctcacatccggcacgaggcataccacatcccatccaataaggaccagacctccatttcgcaacgcagtttcgagcctgcggggaagatcactaggtgtcgcgagccatggtacagaggacttcggacaacagcaatcaaggaggccgcgaagaaatgtgaaatggatcgacgaaacttactaccaagacaacccatggcacgaccagaaagctcaaagaccagtctttagtcttggtgcccccttgcctcgcaagacacgatggaagaccgaaagatcagactatgaggacaccgaaaatacgaagaaaccgaaagacgaactcgcagagttgggacaagtaccgtccttagtatcctctttagacacagagcatcccgagcagcgctcgcaaccccttcgaaggactgtcaatggtgtcacccacggtgacaaatataacgacgcagggcagcctgtctttgagtatatgccggataactcaaatgatgaaaaacaggaagagggtcagtctgtcgacgcgagaagtagacaaagtcgtcccgagtttgggattgatagcgagccactcggtcaacgagaacaagatgccgtggacgaggggaatgttgatccgaacgaatatcggaattggtgggctcgcattcgtgcgaggcatccggaacctcttgctgagtttcttgccacattcgtagctatattcatgggtctagcaagcacactttcggttaatctcacaaagaaccaatcctaccaatacggcacctacgaaacgacatgctgggcatggggcttcgcctggatgttcggcatctacctcggcggtggcgtctcggcgcagttcctcgcaagtttcgctgctggcgcattggcgtttggtatcttccaagatacgatataccatatcgatccgacgatggagacgacggctaacacgttcttctcaaccccacaagattgggtgtcgacaggctcagcgtgcttcaatcagattgtagggagtgcaatcatgatgcttgctgtttttgcgctgggagacgatcaaaataatccgccaggcgctgggatgcatgcatttgtccttgggctactagtcacgacgctgaagttcacattaggatacaacatcggatcggctttgaatcctgcctcagactttggacctcgcgtcatagcttatactgttggatatcgacagccagaggttttttatacgcgatggtggctgtacggcccttggctgtcgactttggctggttcgatgattggatgttcgctatatgatggcttcgtcttcgtgggatcggagagcccgatcaactggcgtctacctaagaagtatgaagatcgagctcgaaaaatggtgaggttcagcaaggtcgatgagtag

SEQ ID NO: 37844 - protein, 491 aa, Muscodor strobelii
  misc_feature: SGI Peptide ID NO. 573140
  misc_feature (245)..(456): Pfam Id: PF00230 Pfam Desc: Major intrinsic protein
  misc_feature (245)..(307): Pfam Id: PF00230 Pfam Desc: Major intrinsic protein
  misc_feature (308)..(425): Pfam Id: PF00230 Pfam Desc: Major intrinsic protein
  misc_feature (86)..(477): NCBI GI: 46115876 Blast Desc: FG03780.1 [Gibberella zeae PH-1]
  misc_feature (68)..(491): NCBI GI: 189210804 Blast Desc: glycerol uptake facilitator protein [Pyrenophora tritici-repentis Pt-1C-BFP] gi|187977826|gb|EDU44452.1| glycerol uptake facilitator protein [Pyrenophora tritici-repentis
  misc_feature (76)..(488): NCBI GI: 238497285 Blast Desc: aquaporin, [Aspergillus flavus NRRL3357] gi|220694758|gb|EED51102.1| aquaporin, [Aspergillus flavus NRRL3357]
  misc_feature (72)..(481): NCBI GI: 169623674 Blast Desc: SNOG_15081 [Phaeosphaeria nodorum SN15] gi|160705023|gb|EAT77624.2| SNOG_15081 [Phaeosphaeria nodorum SN15]
  misc_feature (211)..(475): NCBI GI: 156061255 Blast Desc: SS1G_02770 [Sclerotinia sclerotiorum 1980] gi|154700174|gb|EDN99912.1| SS1G_02770 [Sclerotinia sclerotiorum 1980]
  misc_feature (84)..(480): NCBI GI: 121704501 Blast Desc: MIP transporter, [Aspergillus clavatus NRRL 1] gi|119398659|gb|EAW09088.1| MIP transporter, [Aspergillus clavatus NRRL 1]
  misc_feature (84)..(485): NCBI GI: 115402313 Blast Desc: conserved [Aspergillus terreus NIH2624] gi|114189079|gb|EAU30779.1| conserved [Aspergillus terreus NIH2624]
  misc_feature (186)..(488): NCBI GI: 145248249 Blast Desc: An13g02350 [Aspergillus niger] gi|134081124|emb|CAK41634.1| protein product [Aspergillus niger]
  misc_feature (166)..(485): NCBI GI: 67901262 Blast Desc: AN7618.2 [Aspergillus nidulans FGSC A4] gi|40742614|gb|EAA61804.1| AN7618.2 [Aspergillus nidulans FGSC A4] gi|259483947|tpe|CBF79753.1| TPA: MIP aquaporin (Eurofung)
  misc_feature (241)..(474): NCBI GI: 119474197 Blast Desc: MIP transporter, [Neosartorya fischeri NRRL 181] gi|119407127|gb|EAW17077.1| MIP transporter, [Neosartorya fischeri NRRL 181]
MSQPIDDGTHASTPLEPIEESGVQGYMPSLTSGTRHTTSHPIRTRPPFRNAVSSLRGRSLGVASHGTEDFGQQQSRRPRRNVKWIDETYYQDNPWHDQKAQRPVFSLGAPLPRKTRWKTERSDYEDTENTKKPKDELAELGQVPSLVSSLDTEHPEQRSQPLRRTVNGVTHGDKYNDAGQPVFEYMPDNSNDEKQEEGQSVDARSRQSRPEFGIDSEPLGQREQDAVDEGNVDPNEYRNWWARIRARHPEPLAEFLATFVAIFMGLASTLSVNLTKNQSYQYGTYETTCWAWGFAWMFGIYLGGGVSAQFLASFAAGALAFGIFQDTIYHIDPTMETTANTFFSTPQDWVSTGSACFNQIVGSAIMMLAVFALGDDQNNPPGAGMHAFVLGLLVTTLKFTLGYNIGSALNPASDFGPRVIAYTVGYRQPEVFYTRWWLYGPWLSTLAGSMIGCSLYDGFVFVGSESPINWRLPKKYEDRARKMVRFSKVDE

SEQ ID NO: 37845 - DNA, 1307 bp, Muscodor strobelii
  misc_feature: SGI EST ID NO. CUFF.90646.0
  misc_feature: Variant of the nucleotide sequence at SEQ ID NO 37843
cgacgatggagacgacggctaacacgttcttctcaaccccacaagattgggtgtcgacaggctcagcgtgcttcaatcagattgtagggagtgcaatcatgatgcttgctgtttttgcgctgggagacgatcaaaataatccgccaggcgctgggatgcatgcatttgtccttgggctactagtcacgacgctgaagttcacattaggatacaacatcggatcggctttgaatcctgcctcagactttggacctcgcgtcatagcttatactgttggatatcgacagccagaggttttttatacgcgatggtggctgtacggcccttggctgtcgactttggctggttcgatgattggatgttcgctatatgatggcttcgtcttcgtgggatcggagagcccgatcaactggcgtctacctaagaagtatgaagatcgagctcgaaaaatggtgaggttcagcaaggtcgatgagtagtgaatgtgatgaagggcggctttacagtactactacaagcaggtctttcaaaatggcccactcaaaccatccggtagatttacacatccgccatatcaacaagaagtggcaaaaaataacaggaaaaaaatacaaatggcgaactgaaacaagagccttggataagtggagcgaacgttctcaacacaaccgcagcattccccgatctacacaggaggcacgacccggcgtcgaaccccatggctccagtcttagaaacaccttcattaccactaagccattcgtgaaagaacagcttgttaattgcactgataaggttgggtagcgtgcattcactctgctggtgaatggacttgctgcgatagggtagcgatgctgctgattattcgaatggttattcggaaaataggtatattcaatggccaaacataagttgcacagccattgcatgacggcacagctacgaacgtcacatattttaggtgatctattcagtaactatgcgtctgtgctggcgcctgagagatgaaatcagagaaacccaaacctgcttcgaatccatgatcggaacgaagcaaggaataggagaccgcatcagagcactctcatgtcaacagctcaattataatggtcacatagatgatcacagtcttgatgagatgagcgacgatttgcgtcacgtgatcttgaatgtaccgcggatgaaaggcagcactgccagccgaggcatcttgacccgcctttggagatctgcatgacgggctattactatgaagacgcccttgattaatctaggaacactcctcactcgagactgatgtggtcaag

SEQ ID NO: 37846 - DNA, 1263 bp, Muscodor strobelii
  misc_feature: SGI cDNA ID NO. 573141
  misc_feature: Reduced expression when VOC is produced
  misc_feature: Encodes the peptide sequence at SEQ ID NO 37847
atggcctcgccaccaaagccctgggaacgacctggtgcgacaggcgctgcagccacagcaaccatagccacaccaccggcgacaactaccggcgctgcccttccggccatgtcgacttctacctcggatctcacaccagcgataccagcgcgaccggattctctctccgcagcagtgaatcagaacgcatcagcctacagccgcgtcggcgcttcgccatataactcagcatactcgtccccatattcatctccctactcacgaatgggaggctacggatatggtagtatgggcggatacgggggctatggaggctatggtggtggcatgtacggcggaatgggtacgatgggcggcatgtacggaggcatgggtggcatgatgcccaacgatccgaataatcccaacagcttgacgaaccgctttggcaacagtacgcaggccaccttccagatgctagagggtattgtcggcgcgttcggaggctttgctcagatgctggaaagcacctacatggcgacacactcgagtttctttgcaatggtatctgttgctgagcaattcggaaacttgcgcgatactttgggttccgtattaggcatattcactttgatgcgatggatccggacactgatcgccaaattgacgggccgacctcctcccgtcgacgccatggcgcttacacccgcagcttttgcccgcttcgaaggcagacaagcccctgccggtcctaacggcgccccgggccaaccaaagcccagcaaaaagcctctcatcttcttcctcctcgctgccttcggtttaccgtacttgatgggcaaggccatccgatctatggccgcatcagcagaggaagaagaacgcaagagaatggaagcaatggagcagaacgctgtcttggatcccagcaagcttgagttctgccgcgttctatacgatttcacaccagaggctggcaatgcgacacaaggagtggaccttgctgtgaagaagggcgattttatcgctgtcctgagcaagagtgatcctctcggtaacccaagtgaatggtggcggtgcagagccagagatggacgtcttggatatctgccatcgactttcttagaagtggcacgtaagccaggccagcccgtcgccgcgatcaaagcggctagcgaacctgcaagtccgatcccagcggccacccctcagcctcctgtcgtcactggcaaggctggtgatattactgctgagagtttccaaaagtcgcagttttactcatag

SEQ ID NO: 37847 - protein, 420 aa, Muscodor strobelii
  misc_feature: SGI Peptide ID NO. 573141
  misc_feature (123)..(277): Pfam Id: PF04088 Pfam Desc: Peroxin 13, N-terminal
  misc_feature (306)..(371): Pfam Id: PF00018 Pfam Desc: SH3 domain
  misc_feature (307)..(371): Pfam Id: PF07653 Pfam Desc: Variant SH3 domain
  misc_feature (1)..(420): NCBI GI: 239735464 Blast Desc: Pex13 protein [Colletotrichum orbiculare]
  misc_feature (16)..(420): NCBI GI: 116182052 Blast Desc: CHGG_01654 [Chaetomium globosum CBS 148.51] gi|88185951|gb|EAQ93419.1| CHGG_01654 [Chaetomium globosum CBS 148.51]
  misc_feature (1)..(420): NCBI GI: 156040499 Blast Desc: SS1G_12266 [Sclerotinia sclerotiorum 1980] gi|154696322|gb|EDN96060.1| SS1G_12266 [Sclerotinia sclerotiorum 1980]
  misc_feature (1)..(420): NCBI GI: 154320810 Blast Desc: BC1G_01877 [Botryotinia fuckeliana B05.10] gi|150853566|gb|EDN28758.1| BC1G_01877 [Botryotinia fuckeliana B05.10]
  misc_feature (129)..(420): NCBI GI: 171695470 Blast Desc: protein product [Podospora anserina] gi|170947977|emb|CAP60141.1| protein product [Podospora anserina]
  misc_feature (1)..(420): NCBI GI: 39975393 Blast Desc: MGG_00157 [Magnaporthe grisea 70-15] gi|145018992|gb|EDK03271.1| MGG_00157 [Magnaporthe grisea 70-15]
  misc_feature (3)..(420): NCBI GI: 255945623 Blast Desc: peroxisomal docking factor component Pex13-Penicillium chrysogenum [Penicillium chrysogenum Wisconsin 54-1255] gi|111609730|gb|ABH11420.1| peroxin 13 [Penicillium chrysogenum]
  misc_feature (1)..(420): NCBI GI: 46107566 Blast Desc: FG00666.1 [Gibberella zeae PH-1]
  misc_feature (3)..(420): NCBI GI: 212541088 Blast Desc: peroxisomal membrane protein (Pex13), [Penicillium marneffei ATCC 18224] gi|210067998|gb|EEA22090.1| peroxisomal membrane protein (Pex13), [Penicillium marneffei ATCC 18224]
  misc_feature (2)..(420): NCBI GI: 261197868 Blast Desc: peroxisomal membrane protein [Ajellomyces dermatitidis SLH14081] gi|239595299|gb|EEQ77880.1| peroxisomal membrane protein [Ajellomyces dermatitidis SLH14081] peroxisomal membrane
  misc_feature: Useful for introducing or modulating the production of volatile compounds
MASPPKPWERPGATGAAATATIATPPATTTGAALPAMSTSTSDLTPAIPARPDSLSAAVNQNASAYSRVGASPYNSAYSSPYSSPYSRMGGYGYGSMGGYGGYGGYGGGMYGGMGTMGGMYGGMGGMMPNDPNNPNSLTNRFGNSTQATFQMLEGIVGAFGGFAQMLESTYMATHSSFFAMVSVAEQFGNLRDTLGSVLGIFTLMRWIRTLIAKLTGRPPPVDAMALTPAAFARFEGRQAPAGPNGAPGQPKPSKKPLIFFLLAAFGLPYLMGKAIRSMAASAEEEERKRMEAMEQNAVLDPSKLEFCRVLYDFTPEAGNATQGVDLAVKKGDFIAVLSKSDPLGNPSEWWRCRARDGRLGYLPSTFLEVARKPGQPVAAIKAASEPASPIPAATPQPPVVTGKAGDITAESFQKSQFYS

SEQ ID NO: 37848 - DNA, 1678 bp, Muscodor strobelii
  misc_feature: SGI EST ID NO. CUFF.90679.0
  misc_feature: Variant of the nucleotide sequence at SEQ ID NO 37846
tgatcatccaaatcgctctcgacattttcaatcacattgcatcgtcgcatatcacatcagcgctgtcctttttcatttgaccctgaaatttgataacaatcaagcctgatctcatttcctcggtcgcacgccaatcaagcccggccgggcgatctcactaatcgcgcgatggcctcgccaccaaagccctgggaacgacctggtgcgacaggcgctgcagccacagcaaccatagccacaccaccggcgacaactaccggcgctgcccttccggccatgtcgacttctacctcggatctcacaccagcgataccagcgcgaccggattctctctccgcagcagtgaatcagaacgcatcagcctacagccgcgtcggcgcttcgccatataactcagcatactcgtccccatattcatctccctactcacgaatgggaggctacggatatggtagtatgggcggatacgggggctatggaggctatggtggtggcatgtacggcggaatgggtacgatgggcggcatgtacggaggcatgggtggcatgatgcccaacgatccgaataatcccaacagcttgacgaaccgctttggcaacagtacgcaggccaccttccagatgctagagggtattgtcggcgcgttcggaggctttgctcagatgctggaaagcacctacatggcgacacactcgagtttctttgcaatggtatctgttgctgagcaattcggaaacttgcgcgatactttgggttccgtattaggcatattcactttgatgcgatggatccggacactgatcgccaaattgacgggccgacctcctcccgtcgacgccatggcgcttacacccgcagcttttgcccgcttcgaaggcagacaagcccctgccggtcctaacggcgccccgggccaaccaaagcccagcaaaaagcctctcatcttcttcctcctcgctgccttcggtttaccgtacttgatgggcaaggccatccgatctatggccgcatcagcagaggaagaagaacgcaagagaatggaagcaatggagcagaacgctgtcttggatcccagcaagcttgagttctgccgcgttctatacgatttcacaccagaggctggcaatgcgacacaaggagtggaccttgctgtgaagaagggcgattttatcgctgtcctgagcaagagtgatcctctcggtaacccaagtgaatggtggcggtgcagagccagagatggacgtcttggatatctgccatcgactttcttagaagtggcacgtaagccaggccagcccgtcgccgcgatcaaagcggctagcgaacctgcaagtccgatcccagcggccacccctcagcctcctgtcgtcactggcaaggctggtgatattactgctgagagtttccaaaagtcgcagttttactcatagaaagcattgtagcatcggagatggggacagggctatcatatcgcgttgatacaatgccgatatctcatttgtacaaaattcgaagtaatgggtcgattggtgcttggcgttgtggtctctggcatgagttgttctcatcattatcatcattcgtgtagcgataattccattgaacataggtctctttctaacgagagcatttatttgatcatctgtcattgtgctgactacgactaataatctagcg

SEQ ID NO: 37849 - DNA, 306 bp, Muscodor strobelii
  misc_feature: SGI cDNA ID NO. 573142
  misc_feature: Encodes the peptide sequence at SEQ ID NO 37850
atggctacccagtcttctttcgccggtgctttaggcccatcagctggtaatgccattgagctcgtcaacaacccgtatccttgcttcgtatgtgccaaggtcatcgcgaatggcaacttcgaccacaaatgccagtacaataaacggatcaattgccgacagtacgatcgattacagtggatcgtgcaccttcggatcgacaacgacgtgtgctctcgctttggcgacaatgcgcgtgacagcttttacaaactacacgacatggcatccttcaaaaaggtcattttcggctctctgggcacttga

SEQ ID NO: 37850 - protein, 101 aa, Muscodor strobelii
  misc_feature: SGI Peptide ID NO. 573142
MATQSSFAGALGPSAGNAIELVNNPYPCFVCAKVIANGNFDHKCQYNKRINCRQYDRLQWIVHLRIDNDVCSRFGDNARDSFYKLHDMASFKKVIFGSLGT

SEQ ID NO: 37851 - DNA, 1101 bp, Muscodor strobelii
  misc_feature: SGI cDNA ID NO. 573143
  misc_feature: Encodes the peptide sequence at SEQ ID NO 37852
atgcctcctatgtggtcttcgcagccgctcaaggcgacgtttattaccctgcacatcttgagaacactagggtcactaccatggatactgtttcgctatagtcttaaaaatggaaggccttctccagagtgcaccatgaagttttgtgtcctcaatgccttagcccgacagctcatggtgtatcatacccagaccaggtccaatgctatgtctgccgtcatctcggaccacgaaaaggcgaaagagcggtcagctacggcaaatctctcgaacctcgagcattattccgatatactctcttctgcaactgtaaagcctgcagatgtgaaagggctgtggtatccagcacctccgcgctcatcggatgttgcaagggagaaggtcgtgttgcatcttcccggcggcgcattcgtcctcgccttcggaacggaggcgtacggaaaaccagtgtctactgccatgaataaatatttcaaagcgacacgtacgttctttgctcagtaccgggtggctaccgatgattcaacccgttttccagcggcgattcaggacgtagttacgttctatgcttatatactctccttggggtataacccgagtaatgttgttgtgtctggagattctgcgggcgcaaattatgtgactgcatttctgagacacctagagagttcgaagactcttcccttcccaggtggtgcgattttatggtccccttgggttcatgtaacctctcacgctggcactgattacgaggcttgcaagaactcggataatgactgtctcataccgtcattactccaatggggggtagaagcttatttacccaagcatcagctaacagttgaggaaacaccttatgtctcaccccttcatcatccttttcagacccaggtccctctgttcataaacgcaggcaccattgaggccttcttcagctcgatcgaagagttcgcgggtcaaatggcaggcataccaggcaatcgggtgaagtttcatgccacaaatctcatgacacacaatttgatcatgtcgtatcatggtttgggactagaaaatgaggtgaagagtgccttagaagatgctttgtcgtttctgggatga

SEQ ID NO: 37852 - protein, 366 aa, Muscodor strobelii
  misc_feature: SGI Peptide ID NO. 573143
  misc_feature (129)..(343): Pfam Id: PF07859 Pfam Desc: alpha/beta hydrolase fold
  misc_feature (177)..(306): Pfam Id: PF07859 Pfam Desc: alpha/beta hydrolase fold
  misc_feature (8)..(365): NCBI GI: 154299871 Blast Desc: BC1G_10826 [Botryotinia fuckeliana B05.10] gi|150857106|gb|EDN32298.1| BC1G_10826 [Botryotinia fuckeliana B05.10]
  misc_feature (6)..(353): NCBI GI: 189201383 Blast Desc: alpha/beta hydrolase fold-3 domain containing protein [Pyrenophora tritici-repentis Pt-1C-BFP] gi|187984127|gb|EDU49615.1| alpha/beta hydrolase fold-3 domain
  misc_feature (6)..(365): NCBI GI: 169619948 Blast Desc: SNOG_13174 [Phaeosphaeria nodorum SN15] gi|111058381|gb|EAT79501.1| SNOG_13174 [Phaeosphaeria nodorum SN15]
  misc_feature (4)..(364): NCBI GI: 156042101 Blast Desc: SS1G_11601 [Sclerotinia sclerotiorum 1980] gi|154695984|gb|EDN95722.1| SS1G_11601 [Sclerotinia sclerotiorum 1980]
  misc_feature (46)..(361): NCBI GI: 67537732 Blast Desc: AN5036.2 [Aspergillus nidulans FGSC A4] gi|40741924|gb|EAA61114.1| AN5036.2 [Aspergillus nidulans FGSC A4] gi|259482088|tpe|CBF76233.1| TPA: conserved [Aspergillus FGSC
  misc_feature (4)..(364): NCBI GI: 154299472 Blast Desc: BC1G_10998 [Botryotinia fuckeliana B05.10] gi|150857340|gb|EDN32532.1| BC1G_10998 [Botryotinia fuckeliana B05.10]
  misc_feature (4)..(318): NCBI GI: 256721227 Blast Desc: NECHADRAFT_34839 [Nectria haematococca mpVI 77-13-4]
  misc_feature (98)..(365): NCBI GI: 156040848 Blast Desc: SS1G_11402 [Sclerotinia sclerotiorum 1980] gi|154695786|gb|EDN95524.1| SS1G_11402 [Sclerotinia sclerotiorum 1980]
  misc_feature (3)..(365): NCBI GI: 242789662 Blast Desc: acetyl-hydrolase, [Talaromyces stipitatus ATCC 10500] gi|218717997|gb|EED17417.1| acetyl-hydrolase, [Talaromyces stipitatus ATCC 10500]
  misc_feature (93)..(365): NCBI GI: 255946570 Blast Desc: Pc22g00020 [Penicillium chrysogenum Wisconsin 54-1255] gi|211591069|emb|CAP97290.1| Pc22g00020 [Penicillium chrysogenum Wisconsin 54-1255]
MPPMWSSQPLKATFITLHILRTLGSLPWILFRYSLKNGRPSPECTMKFCVLNALARQLMVYHTQTRSNAMSAVISDHEKAKERSATANLSNLEHYSDILSSATVKPADVKGLWYPAPPRSSDVAREKVVLHLPGGAFVLAFGTEAYGKPVSTAMNKYFKATRTFFAQYRVATDDSTRFPAAIQDVVTFYAYILSLGYNPSNVVVSGDSAGANYVTAFLRHLESSKTLPFPGGAILWSPWVHVTSHAGTDYEACKNSDNDCLIPSLLQWGVEAYLPKHQLTVEETPYVSPLHHPFQTQVPLFINAGTIEAFFSSIEEFAGQMAGIPGNRVKFHATNLMTHNLIMSYHGLGLENEVKSALEDALSFLG

SEQ ID NO: 37853 - DNA, 573 bp, Muscodor strobelii
  misc_feature: SGI cDNA ID NO. 573144
  misc_feature: Encodes the peptide sequence at SEQ ID NO 37854
atgccaccactcaaacgtgccttcttcttccccctggccgtcacaatagcgttgcttgcgatgactgcgccatgtactcaggttcaagcagcaaccagtcattatggcccccatcatagttcacaagacgtcattgccaagttcaatctcacgccaagcgacgagaagggttatttccacgagacgtttcgagactctacactcttatctgggacgaatcgatccatcaataccgccatctactacctactcgagggatccgaaggccagtcactttggcatcgattggacgccgctgaggtctggcattactatgccggcgctccgctgactctcttcatttccaacgacgatggatcgccatgcgaacagcgtttgatgggtagtgatattttcgccagtcaggaacctcaggtggtaatacctaagggggtatggcagagcgctaagagctggggagagtggacgctcgtgggtacaactgtttcaccggcatttgtgcccgagggttttgaactcgctcccacgggatgggctcctaatggaagttgtgacatcgagaacccgtgttga

SEQ ID NO: 37854 - protein, 190 aa, Muscodor strobelii
  misc_feature: SGI Peptide ID NO. 573144
  misc_feature (41)..(175): Pfam Id: PF06172 Pfam Desc: Cupin superfamily (DUF985)
  misc_feature (5)..(183): NCBI GI: 156054764 Blast Desc: SS1G_06230 [Sclerotinia sclerotiorum 1980] gi|154704010|gb|EDO03749.1| SS1G_06230 [Sclerotinia sclerotiorum 1980]
  misc_feature (38)..(184): NCBI GI: 157488550 Blast Desc: [Claviceps fusiformis]
  misc_feature (3)..(184): NCBI GI: 46115358 Blast Desc: FG03521.1 [Gibberella zeae PH-1]
  misc_feature (38)..(183): NCBI GI: 261200349 Blast Desc: conserved [Ajellomyces dermatitidis SLH14081] gi|239593647|gb|EEQ76228.1| conserved [Ajellomyces dermatitidis SLH14081]
  misc_feature (38)..(183): NCBI GI: 239607472 Blast Desc: conserved [Ajellomyces dermatitidis ER-3]
  misc_feature (39)..(182): NCBI GI: 256730148 Blast Desc: NECHADRAFT_45328 [Nectria haematococca mpVI 77-13-4]
  misc_feature (40)..(180): NCBI GI: 171685126 Blast Desc: protein product [Podospora anserina] gi|170942524|emb|CAP68175.1| protein product [Podospora anserina]
  misc_feature (38)..(183): NCBI GI: 225555978 Blast Desc: conserved [Ajellomyces capsulatus G186AR]
  misc_feature (40)..(185): NCBI GI: 156054760 Blast Desc: SS1G_06228 [Sclerotinia sclerotiorum 1980] gi|154704008|gb|EDO03747.1| SS1G_06228 [Sclerotinia sclerotiorum 1980]
  misc_feature (38)..(183): NCBI GI: 154276054 Blast Desc: conserved [Ajellomyces capsulatus NAm1] gi|150413945|gb|EDN09310.1| conserved [Ajellomyces capsulatus NAm1]
MPPLKRAFFFPLAVTIALLAMTAPCTQVQAATSHYGPHHSSQDVIAKFNLTPSDEKGYFHETFRDSTLLSGTNRSINTAIYYLLEGSEGQSLWHRLDAAEVWHYYAGAPLTLFISNDDGSPCEQRLMGSDIFASQEPQVVIPKGVWQSAKSWGEWTLVGTTVSPAFVPEGFELAPTGWAPNGSCDIENPC

SEQ ID NO: 37855 - DNA, 1052 bp, Muscodor strobelii
  misc_feature: SGI EST ID NO. CUFF.90676.0
  misc_feature: Variant of the nucleotide sequence at SEQ ID NO 37853
cagcgacagccactcgacaattcagaaaaacgtatttcttaaacatagatagcttacaatatgccaccactcaaacgtgccttcttcttccccctggccgtcacaatagcgttgcttgcgatgactgcgccatgtactcaggttcaagcagcaaccagtcattatggcccccatcatagttcacaagacgtcattgccaagttcaatctcacgccaagcgacgagaagggttatttccacgagacgtttcgagactctacactcttatctgggacgaatcgatccatcaataccgccatctactacctactcgagggatccgaaggccagtcactttggcatcgattggacgccgctgaggtctggcattactatgccggcgctccgctgactctcttcatttccaacgacgatggatcgccatgcgaacagcgtttgatgggtagtgatattttcgccagtcaggaacctcaggtggtaatacctaagggggtatggcagagcgctaagagctggggagagtggacgctcgtgggtacaactgtttcaccggcatttgtgcccgagggttttgaactcgctcccacgggatgggctcctaatggaagttgtgacatcgagaacccgtgttgatggaagccggggtgctgatcaaccctaaaatgcgcgtatgcaccattacgtgtcttaaacgatcatcattttcttcccgttattgcctctgagattcgggtgttcaacggatcgtattactgtcagagagtcaatggatgtcaattttactaggtcgcatgcatataaaattaacgggcgacttgaagttcattcaatgcttagaacaaacgttctcgtgtaatagcatcacagagcgccagctatcttgaatggagcatgactagcagcatgactagaaagcaagtagttcaatcctagagcatcgtactgtcgattatgtagatgagcaccagatctccgaacgcgtgccgcgccatcaggtatgccatctccaattgtgctagcttttttcatacttttaattgtttgtcccgtca

SEQ ID NO: 37856 - DNA, 1266 bp, Muscodor strobelii
  misc_feature: SGI cDNA ID NO. 573145
  misc_feature: Encodes the peptide sequence at SEQ ID NO 37857
atggcgcccgcgcacccttctagctcagagaagggctccgcttcgcaatccatccccaactcggtagagagcggcaggatcagaaagagcaggaagaaagacggttccaaaggaaaagcagctcccgacaagacaccggggaagtcacgcagatccagggctcgaagcgccaaaaaatcgagtctcgccggcacttcttcgactaatgacgccatagtcgcgaataacaatgcctcaacgaatctggaaaacgcaggttacgattcgacaaagcacttcgcctccggcgtctcgtttcacaaattagagccaaaacatgccttgctattcgggaagagtgtggtcgtgccgacgtcctcggagccgatctgtgctatcttcgcccactcaaccgtcactgatccgggtagatatgttgggatcggtctcgagattcatctgctcaacgacttgcaacaagattggtctggctgtacctaccagtcgtttgcggtctgcgcgccgctggagagggacgctgggcagaccctcgcattgtactgcgcctatcgaatggcgtggtctatatcacagctctggttcgctacccataagaatcacgatgtaccgttccaacccattcgcttcgagatactcaccgattcggagtcagcccacgaacggttccagcggctatacgagaatccagactcgcagtcctatggttccctacccgaggtatatcggaaccacctacttaagcctatccgactgctcgagaagcctcgcggatatcaaaagcgtctccccttagccagcggatttacttcatgcgctccagaggtacgaacctcgtggatcccgtcaaaggatagtatagatagcataaccaatgcttgtcttatcgcgcatttgggagttgaattctgcagacgattcgcaaatgtctacggtattccaaacgtcccaggaattgtatccttatcctccttcttaaccgatcgggacctggaccatctaagactggatattaagaatataccagtcaagagagagagcattcgtcttaatttcggcccgcaatacacataccaggcgctattggcctcccgcaagatgactccggacgaccaagcacagtatctgaagaagataggggataacatcgaggcggccctgaaagagtcacgtaacgggactccagtctatacgcctgacgttgattcagaggatgatacagatatgcacgaccaggatgcgaagaataatccatgtctagctttgtaa

SEQ ID NO: 37857 - protein, 421 aa, Muscodor strobelii
  misc_feature: SGI Peptide ID NO. 573145
MAPAHPSSSEKGSASQSIPNSVESGRIRKSRKKDGSKGKAAPDKTPGKSRRSRARSAKKSSLAGTSSTNDAIVANNNASTNLENAGYDSTKHFASGVSFHKLEPKHALLFGKSVVVPTSSEPICAIFAHSTVTDPGRYVGIGLEIHLLNDLQQDWSGCTYQSFAVCAPLERDAGQTLALYCAYRMAWSISQLWFATHKNHDVPFQPIRFEILTDSESAHERFQRLYENPDSQSYGSLPEVYRNHLLKPIRLLEKPRGYQKRLPLASGFTSCAPEVRTSWIPSKDSIDSITNACLIAHLGVEFCRRFANVYGIPNVPGIVSLSSFLTDRDLDHLRLDIKNIPVKRESIRLNFGPQYTYQALLASRKMTPDDQAQYLKKIGDNIEAALKESRNGTPVYTPDVDSEDDTDMHDQDAKNNPCLAL

SEQ ID NO: 37858 - DNA, 1548 bp, Muscodor strobelii
  misc_feature: SGI cDNA ID NO. 573146
  misc_feature: Encodes the peptide sequence at SEQ ID NO 37859
atgagggcggctccaccgctcttgataatgttggccaccggcgccgccgctaaacgggtcgtgcctgtgagcttctcgcgacaacgcggcgacgctctcgctagacgtgacgatagtgacaacggcacatactcacaaagtcttctgaataacatcagccccgccgcctactacgctgatgtgtctgtcggcacaccgccgcaaaaggtctacctcgtcgttgacacaggtagcagcgacgtctgggtattagacagccatgctgacctctgccaatccagcgcgctgcagtccaagtatggtaaatgtcttgcaacgtataatccggacgagagcagctcctatgaggttgctgtggagggcggcttcaacatcacatacgcagacttaaatagcgccactggtgactacatcaaggacgacttgcacatcgctggtaccactgtgtctggccttcagatcggcttggcgagtaacacgactatcaattctggtgtgctcggtatcggctttgataccggcgagtctacgttggatatttaccccaacgtcattactctgctgatgagtcagggtctcatcgatgccgaggcctatagcttatttctagatgatcttgacgcggaccaggggaccattctcttcggtggtattgacaccgagaagtacactggcgagcttaaggtcattgacattgttcccgatggcttcacgggaaaaatcacatcgttttcggttgatttaacgtctttgacaatctcgccgccggatgccgatagtcttagtgttctaccggagactatcccggtagtcctcgactctggcacgaccttgacatatctcccctcggacgtcgctgacgagatatacgatacagtaggtgccgtcaatgacattgaaggcactggactggtctatattagctgtagcatagtcgattccgatgactggaaagacaccacttttgacttccgcttcggcgaagacgacgggcctatcattcgtgttggcttggccgacttggtcatcgacaatgtcgcgggcttcgttagtcaaggcttccagattcccgacaatctgcccttcgacgatccttgcagtttcgggattcagacgctacaaggatactacctgctcggcgacacgtttctgcggtcggcgtacgttgtttatgatttgacgaataaacaaattggcctagcacaggccaatccggatagtgactctagcaacattatagaaatcacgaaggacgacggcattccaatcgtgagcggtggcggctctaacacgtcaactggagcgccgtcttccactagttccacgtccacctcttctcggactacttctgctagtgggtcaaccacggccgcctcgactacggcagccttatctactggtccatctcctactgatgcatcacctacgccgtccaatactgatagcggcgcggcgcggctgactccctcgtggagctgggagtcatgctccgtgacggttatcgcactatttttcagtttcgcaggggcctcgctgttttcgctctag

SEQ ID NO: 37859 - protein, 515 aa, Muscodor strobelii
  misc_feature: SGI Peptide ID NO. 573146
  misc_feature (56)..(403): Pfam Id: PF00026 Pfam Desc: Eukaryotic aspartyl protease
  misc_feature (56)..(310): Pfam Id: PF00026 Pfam Desc: Eukaryotic aspartyl protease
  misc_feature (364)..(403): Pfam Id: PF00026 Pfam Desc: Eukaryotic aspartyl protease
  misc_feature (43)..(515): NCBI GI: 39971095 Blast Desc: MGG_03014 [Magnaporthe grisea 70-15] gi|149210653|ref|XP_001522701.1| MGCH7_ch7g799 [Magnaporthe grisea 70-15] gi|86196754|gb|EAQ71392.1| MGCH7_ch7g799 grisea
  misc_feature (1)..(420): NCBI GI: 85113736 Blast Desc: NCU03168 [Neurospora crassa OR74A] gi|28926361|gb|EAA35338.1| conserved [Neurospora crassa OR74A] gi|38567249|emb|CAE76540.1| related to aspartyl proteinase SAP3
  misc_feature (1)..(461): NCBI GI: 171684437 Blast Desc: protein product [Podospora anserina] gi|170942179|emb|CAP67831.1| protein product [Podospora anserina]
  misc_feature (14)..(515): NCBI GI: 171695874 Blast Desc: protein product [Podospora anserina] gi|170948179|emb|CAP60343.1| protein product [Podospora anserina]
  misc_feature (7)..(426): NCBI GI: 46128411 Blast Desc: FG08583.1 [Gibberella zeae PH-1]
  misc_feature (7)..(463): NCBI GI: 116181454 Blast Desc: CHGG_01355 [Chaetomium globosum CBS 148.51] gi|88185652|gb|EAQ93120.1| CHGG_01355 [Chaetomium globosum CBS 148.51]
  misc_feature (30)..(483): NCBI GI: 154312485 Blast Desc: BC1G_05845 [Botryotinia fuckeliana B05.10] gi|114149216|gb|AAR87746.3| aspartic proteinase precursor [Botryotinia fuckeliana] gi|150849946|gb|EDN25139.1| BC1G_05845
  misc_feature (5)..(515): NCBI GI: 85117939 Blast Desc: NCU02956 [Neurospora crassa OR74A] gi|28927151|gb|EAA36107.1| conserved [Neurospora crassa OR74A] gi|38566948|emb|CAE76250.1| related to acid proteinase PEPI
  misc_feature (16)..(515): NCBI GI: 156035531 Blast Desc: SS1G_12969 [Sclerotinia sclerotiorum 1980] gi|154698374|gb|EDN98112.1| SS1G_12969 [Sclerotinia sclerotiorum 1980]
  misc_feature (7)..(426): NCBI GI: 154322142 Blast Desc: BC1G_01218 [Botryotinia fuckeliana B05.10] gi|150850465|gb|EDN25658.1| BC1G_01218 [Botryotinia fuckeliana B05.10]
  misc_feature (19)..(409): SWISSPROT Homolog: EC 3.4.23.24 Candidapepsin
MRAAPPLLIMLATGAAAKRVVPVSFSRQRGDALARRDDSDNGTYSQSLLNNISPAAYYADVSVGTPPQKVYLVVDTGSSDVWVLDSHADLCQSSALQSKYGKCLATYNPDESSSYEVAVEGGFNITYADLNSATGDYIKDDLHIAGTTVSGLQIGLASNTTINSGVLGIGFDTGESTLDIYPNVITLLMSQGLIDAEAYSLFLDDLDADQGTILFGGIDTEKYTGELKVIDIVPDGFTGKITSFSVDLTSLTISPPDADSLSVLPETIPVVLDSGTTLTYLPSDVADEIYDTVGAVNDIEGTGLVYISCSIVDSDDWKDTTFDFRFGEDDGPIIRVGLADLVIDNVAGFVSQGFQIPDNLPFDDPCSFGIQTLQGYYLLGDTFLRSAYVVYDLTNKQIGLAQANPDSDSSNIIEITKDDGIPIVSGGGSNTSTGAPSSTSSTSTSSRTTSASGSTTAASTTAALSTGPSPTDASPTPSNTDSGAARLTPSWSWESCSVTVIALFFSFAGASLFSL

SEQ ID NO: 37860 - DNA, 1972 bp, Muscodor strobelii
  misc_feature: SGI EST ID NO. CUFF.90691.0
  misc_feature: Variant of the nucleotide sequence at SEQ ID NO 37858
cctggttcgcctagtcgccatgccgccggtcatagaccgaaggaaacggaaggctggcgcgctggaatgaggcgcagtcataacaatataggcaagtaataaatactgcaaactacccaccaacttgtgcaacctacgacagatctgtcccctctttcgtctgtgtcgcctgttgtgtcgttcggagtgttcctattgagtaatcgcatatcactcgcctgcccgtctcaccactttcatcgtccaccatgagggcggctccaccgctcttgataatgttggccaccggcgccgccgctaaacgggtcgtgcctgtgagcttctcgcgacaacgcggcgacgctctcgctagacgtgacgatagtgacaacggcacatactcacaaagtcttctgaataacatcagccccgccgcctactacgctgatgtgtctgtcggcacaccgccgcaaaaggtctacctcgtcgttgacacaggtagcagcgacgtctgggtattagacagccatgctgacctctgccaatccagcgcgctgcagtccaagtatggtaaatgtcttgcaacgtataatccggacgagagcagctcctatgaggttgctgtggagggcggcttcaacatcacatacgcagacttaaatagcgccactggtgactacatcaaggacgacttgcacatcgctggtaccactgtgtctggccttcagatcggcttggcgagtaacacgactatcaattctggtgtgctcggtatcggctttgataccggcgagtctacgttggatatttaccccaacgtcattactctgctgatgagtcagggtctcatcgatgccgaggcctatagcttatttctagatgatcttgacgcggaccaggggaccattctcttcggtggtattgacaccgagaagtacactggcgagcttaaggtcattgacattgttcccgatggcttcacgggaaaaatcacatcgttttcggttgatttaacgtctttgacaatctcgccgccggatgccgatagtcttagtgttctaccggagactatcccggtagtcctcgactctggcacgaccttgacatatctcccctcggacgtcgctgacgagatatacgatacagtaggtgccgtcaatgacattgaaggcactggactggtctatattagctgtagcatagtcgattccgatgactggaaagacaccacttttgacttccgcttcggcgaagacgacgggcctatcattcgtgttggcttggccgacttggtcatcgacaatgtcgcgggcttcgttagtcaaggcttccagattcccgacaatctgcccttcgacgatccttgcagtttcgggattcagacgctacaaggatactacctgctcggcgacacgtttctgcggtcggcgtacgttgtttatgatttgacgaataaacaaattggcctagcacaggccaatccggatagtgactctagcaacattatagaaatcacgaaggacgacggcattccaatcgtgagcggtggcggctctaacacgtcaactggagcgccgtcttccactagttccacgtccacctcttctcggactacttctgctagtgggtcaaccacggccgcctcgactacggcagccttatctactggtccatctcctactgatgcatcacctacgccgtccaatactgatagcggcgcggcgcggctgactccctcgtggagctgggagtcatgctccgtgacggttatcgcactatttttcagtttcgcaggggcctcgctgttttcgctctagagaacattaagagacaacaagagatggaatgtgttaatgatgtaatgaagagattgagtatgtagttggatgtagcgaagcggtatccttcgtctcaaaatactcacatacagagtcgagtgttactataatttagcataatacaataataatcccaatcaaaacctgcctacgca

SEQ ID NO: 37861 - DNA, 741 bp, Muscodor strobelii
  misc_feature: SGI cDNA ID NO. 573147
  misc_feature: Encodes the peptide sequence at SEQ ID NO 37862
atgaccactcctcgaattttcctcgtgagacacggcgagaccgaatggtcgctcagcggcaaacacacaggcagaaccgacattcctctcacggcgaatggagagaagcgtgtcaaagccaccggccgggctctcgtcggcgatgatcgtttgattgtgcccaagcaacttgcacacatctacgtatcaccccggaagcgagcacaacgcactttcgagttactgaacctaggaatcaaagatcccctcccttggcaccaccacggcgagcagccaacagacaaacccgcaagtgacaaatgttccgctcgcgtcgaggtcacggagaacatccgcgaatgggactacggcgactatgagggcataacgagcgccgagatccgcgacattcgcgagaagcaaggcctgaaccgtaattgggacatctggacagatggctgtgttggtggcgagagccctgaggaaataaccaagcgtcttgatggccttatcgaggagattaaatccaaataccatgcaccggtcattggcaagcccccggggtctgtgccgcatggtgatattttgattgttgctcatggacatatcttacgggcttttgcgatgcggtgggtgaagaagacgttgtcggagggtccggctttcttgttagaggctggtggtgttggtaccttaagttacgaacatcataacctcgacgagcctgccattctgctaggtggagcgttcattgttgattag

SEQ ID NO: 37862 - protein, 246 aa, Muscodor strobelii
  misc_feature: SGI Peptide ID NO. 573147
  misc_feature (5)..(200): Pfam Id: PF00300 Pfam Desc: Phosphoglycerate mutase family
  misc_feature (1)..(246): NCBI GI: 149210543 Blast Desc: MGCH7_ch7g746 [Magnaporthe grisea 70-15] gi|86196701|gb|EAQ71339.1| MGCH7_ch7g746 [Magnaporthe grisea 70-15]
  misc_feature (1)..(246): NCBI GI: 256733754 Blast Desc: [Nectria haematococca mpVI 77-13-4]
  misc_feature (1)..(246): NCBI GI: 156031158 Blast Desc: SS1G_14187 [Sclerotinia sclerotiorum 1980] gi|154700578|gb|EDO00317.1| SS1G_14187 [Sclerotinia sclerotiorum 1980]
  misc_feature (1)..(246): NCBI GI: 154305749 Blast Desc: BC1G_07689 [Botryotinia fuckeliana B05.10] gi|150853208|gb|EDN28400.1| BC1G_07689 [Botryotinia fuckeliana B05.10]
  misc_feature (1)..(246): NCBI GI: 116193813 Blast Desc: CHGG_06624 [Chaetomium globosum CBS 148.51] gi|88182537|gb|EAQ90005.1| CHGG_06624 [Chaetomium globosum CBS 148.51]
  misc_feature (1)..(246): NCBI GI: 46130636 Blast Desc: FG08922.1 [Gibberella zeae PH-1]
  misc_feature (1)..(225): NCBI GI: 145609810 Blast Desc: MGG_02967 [Magnaporthe grisea 70-15] gi|145017200|gb|EDK01563.1| MGG_02967 [Magnaporthe grisea 70-15]
  misc_feature (1)..(246): NCBI GI: 189199250 Blast Desc: phosphoglycerate mutase family protein [Pyrenophora tritici-repentis Pt-1C-BFP] gi|187983061|gb|EDU48549.1| phosphoglycerate mutase family protein [Pyrenophora Pt-1C-BFP]
  misc_feature (2)..(245): NCBI GI: 261189155 Blast Desc: phosphoglycerate mutase [Ajellomyces dermatitidis SLH14081] gi|239591774|gb|EEQ74355.1| phosphoglycerate mutase [Ajellomyces dermatitidis SLH14081] gi|239614690|gb|EEQ91677.1|
  misc_feature (3)..(245): NCBI GI: 115386682 Blast Desc: ATEG_07196 [Aspergillus terreus NIH2624] gi|114190880|gb|EAU32580.1| ATEG_07196 [Aspergillus terreus NIH2624]
  misc_feature (4)..(206): SWISSPROT Homolog: EC 5.4.2.1 Phosphoglycerate mutase
MTTPRIFLVRHGETEWSLSGKHTGRTDIPLTANGEKRVKATGRALVGDDRLIVPKQLAHIYVSPRKRAQRTFELLNLGIKDPLPWHHHGEQPTDKPASDKCSARVEVTENIREWDYGDYEGITSAEIRDIREKQGLNRNWDIWTDGCVGGESPEEITKRLDGLIEEIKSKYHAPVIGKPPGSVPHGDILIVAHGHILRAFAMRWVKKTLSEGPAFLLEAGGVGTLSYEHHNLDEPAILLGGAFIVD

SEQ ID NO: 37863 - DNA, 2529 bp, Muscodor strobelii
  misc_feature: SGI EST ID NO. CUFF.91135.0
  misc_feature: Variant of the nucleotide sequence at SEQ ID NO 37861
cggctttgtattcttgctgtgattttaatccagcgccgtatatcgcgcctaccatcgtcacggctgcgaaggcgccggtccatattaagcgctttactgtgaggcctgatatgcttatcgaagggatcttggcgttgccttggtgtggaggtcgtggggcgcggttcgggggtggtggtcgggaggacatttttgatgtgtggatgagaaggaggttggtgaggagtcaaggggattgttcaggcccagtactccctccagcaggtctcgctcgctcgagaagtccgccgacggcgagactggctcttggagctgtttcgcgatgcgctactcccggctcgtagacgtctgggtgtgcattcgtcgttccaagttcccgatactgaggaattgacgatattgctgcgtcccctgtttcttagtccactattgtccgctattctatcaccaaagcttgaagtgctagatgtcgtcgagatgctttcgaaagagtcggcgcggctaatgggacgaattgatgctggaagtgaggagagtctcgttctgtactcgattatgctaggatgtatcgtgcagttctcgctcaattgttcagtcgtgtcgttcgcgggattgccgttgtcgctattgtcgtcgtaatgataaggcgaggaaaaagaaatcgaatccgtcgcgattggccaaagctcgagttcaacctcagccgagctggcggactcggcatccggcgcatcagcggggcggcggccctcccgctgtaactcgaccctcagcggcatcaaggtatgtagtaatcggcgtgcagcccccgccaacgccatcttgtcgcttagcaattttgaaatgtggtaatgataagatcctcctggccgattggtagtgtattatgaatgatgtataagtgccaggtgggtttcgttgacgtagtgtcttgagatgcaagtgttccgaatccccgcgttcgaatgttaagcccgacacgcgaaatatgtctctaatcgtaagcaccaggcttgagttcagctcattctaattgccgagttttagaaatagtcgagagttacgaagttcatttcattgaggctcaactggactataagactatactaccagctctgaccccaacgctgtctgccgttgcagccgtcctatctctcgagtctggcgcttgttagcacacgaaaccgagtccagtgtgtgaagtgtggggtggttaccagagacaccagccagacttgcatcgtccacgtttcatagtgccaagaacccacaactcctaagtatcttcatcttttgtggcgacagaagaagtatttaggatacattgagtcttacctctgcagacgaacagaaaacatcaagccgaggaaggaaagggtcatacaatagacgtcatgaccactcctcgaattttcctcgtgagacacggcgagaccgaatggtcgctcagcggcaaacacacaggcagaaccgacattcctctcacggcgaatggagagaagcgtgtcaaagccaccggccgggctctcgtcggcgatgatcgtttgattgtgcccaagcaacttgcacacatctacgtatcaccccggaagcgagcacaacgcactttcgagttactgaacctaggaatcaaagatcccctcccttggcaccaccacggcgagcagccaacagacaaacccgcaagtgacaaatgttccgctcgcgtcgaggtcacggagaacatccgcgaatgggactacggcgactatgagggcataacgagcgccgagatccgcgacattcgcgagaagcaaggcctgaaccgtaattgggacatctggacagatggctgtgttggtggcgagagccctgaggaaataaccaagcgtcttgatggccttatcgaggagattaaatccaaataccatgcaccggtcattggcaagcccccggggtctgtgccgcatggtgatattttgattgttgctcatggacatatcttacgggcttttgcgatgcggtgggtgaagaagacgttgtcggagggtccggctttcttgttagaggctggtggtgttggtaccttaagttacgaacatcataacctcgacgagcctgccattctgctaggtggagcgttcattgttgattagactgatgtttttcttggattggtatcatgtgccattggctagatctattttgccatgtcatttctaatccgagagagaagactactttttggtaccgtagttggcttcgtcaatcgatccaaaaatacagtatcaagattgctttagcaattgacggtgtagaaatatgccattcgtattgagccgtggttctctatctgacctcaaatgaagattaccatgtcacttgataaataggaacattgagtttatgggcgagatactgcatcgtcaaccgatccgccatcgtttgatcatccggtattgaaaattgaggtatgtgactggtaattcatagctttcttcccatctggggtcagcaacctccatttcttgtaatagcgcaagtatgtta

SEQ ID NO: 37864 - DNA, 345 bp, Muscodor strobelii
  misc_feature: SGI cDNA ID NO. 573148
  misc_feature: Reduced expression when VOC is produced
  misc_feature: Encodes the peptide sequence at SEQ ID NO 37865
atgtcctcccgaccaccacccccgaaccgcgccccacgacctccacaccaaggcaacgccaagatcccttcgataagcatatcaggcctcacagtaaagcgcttaatatggaccggcgccttcgcagccgtgacgatggtaggcgcgatatacggcgctggattaaaatcacagcaagaatacaaagccgaaaaaagacaaataatagaagaaacacccgaagaacggatccgcgccctcgagcaacgccgcgctcagctactcatggcgaggttaccgctcgagcggaaactggagaaggtgcggagacgtgttgaggaggaggatcgtggatcttcgtcttga

SEQ ID NO: 37865 - protein, 114 aa, Muscodor strobelii
  misc_feature: SGI Peptide ID NO. 573148
  misc_feature (33)..(111): NCBI GI: 171676183 Blast Desc: protein product [Podospora anserina] gi|170936157|emb|CAP60817.1| protein product [Podospora anserina]
  misc_feature (30)..(111): NCBI GI: 156031154 Blast Desc: [Sclerotinia sclerotiorum 1980] gi|154700576|gb|EDO00315.1| [Sclerotinia sclerotiorum 1980]
  misc_feature (31)..(110): NCBI GI: 189200326 Blast Desc: [Pyrenophora tritici-repentis Pt-1C-BFP] gi|187983599|gb|EDU49087.1| [Pyrenophora tritici-repentis Pt-1C-BFP]
  misc_feature (30)..(111): NCBI GI: 154305747 Blast Desc: [Botryotinia fuckeliana B05.10] gi|150853207|gb|EDN28399.1| [Botryotinia fuckeliana B05.10]
  misc_feature (32)..(105): NCBI GI: 39971005 Blast Desc: [Magnaporthe grisea 70-15] gi|149210545|ref|XP_001522647.1| MGCH7_ch7g747 [Magnaporthe grisea 70-15] gi|86196702|gb|EAQ71340.1| MGCH7_ch7g747 grisea
  misc_feature (32)..(98): NCBI GI: 116193815 Blast Desc: [Chaetomium globosum CBS 148.51] gi|88182538|gb|EAQ90006.1| [Chaetomium globosum CBS 148.51]
  misc_feature (32)..(111): NCBI GI: 169608640 Blast Desc: SNOG_07405 [Phaeosphaeria nodorum SN15] gi|160701686|gb|EAT84871.2| SNOG_07405 [Phaeosphaeria nodorum SN15]
  misc_feature (32)..(107): NCBI GI: 259483060 Blast Desc: TPA: conserved [Aspergillus nidulans FGSC A4]
  misc_feature (31)..(108): NCBI GI: 255951058 Blast Desc: Pc22g24060 [Penicillium chrysogenum Wisconsin 54-1255] gi|211593313|emb|CAP99694.1| Pc22g24060 [Penicillium chrysogenum Wisconsin 54-1255]
  misc_feature (32)..(107): NCBI GI: 145247254 Blast Desc: An12g08250 [Aspergillus niger] gi|134080609|emb|CAK41275.1| [Aspergillus niger]
  misc_feature: Useful for introducing or modulating the production of volatile compounds
MSSRPPPPNRAPRPPHQGNAKIPSISISGLTVKRLIWTGAFAAVTMVGAIYGAGLKSQQEYKAEKRQIIEETPEERIRALEQRRAQLLMARLPLERKLEKVRRRVEEEDRGSSS

SEQ ID NO: 37866 - DNA, 4343 bp, Muscodor strobelii
  misc_feature: SGI EST ID NO. CUFF.91134.2
  misc_feature: Variant of the nucleotide sequence at SEQ ID NO 37864
atgtgtgcaagttgcttgggcacaatcaaacgatcatcgccgacgagagcccggccggtggctttgacacgcttctctccattcgccgtgagaggaatgtcggttctgcctgtgtgtttgccgctgagcgaccattcggtctcgccgtgtctcacgaggaaaattcgaggagtggtcatgacgtctattgtatgaccctttccttcctcggcttgatgttttctgttcgtctgcagaggtaagactcaatgtatcctaaatacttcttctgtcgccacaaaagatgaagatacttaggagttgtgggttcttggcactatgaaacgtggacgatgcaagtctggctggtgtctctggtaaccaccccacacttcacacactggactcggtttcgtgtgctaacaagcgccagactcgagagataggacggctgcaacggcagacagcgttggggtcagagctggtagtatagtcttatagtccagttgagcctcaatgaaatgaacttcgtaactctcgactatttctaaaactcggcaattagaatgagctgaactcaagcctggtgcttacgattagagacatatttcgcgtgtcgggcttaacattcgaacgcggggattcggaacacttgcatctcaagacactacgtcaacgaaacccacctggcacttatacatcattcataatacactaccaatcggccaggaggatcttatcattaccacatttcaaaattgctaagcgacaagatggcgttggcgggggctgcacgccgattactacataccttgatgccgctgagggtcgagttacagcgggagggccgccgccccgctgatgcgccggatgccgagtccgccagctcggctgaggttgaactcgagctttggccaatcgcgacggattcgatttctttttcctcgccttatcattacgacgacaatagcgacaacggcaatcccgcgaacgacacgactgaacaattgagcgagaactgcacgatacatcctagcataatcgagtacagaacgagactctcctcacttccagcatcaattcgtcccattagccgcgccgactctttcgaaagcatctcgacgacatctagcacttcaagctttggtgatagaatagcggacaatagtggactaagaaacaggggacgcagcaatatcgtcaattcctcagtatcgggaacttggaacgacgaatgcacacccagacgtctacgagccgggagtagcgcatcgcgaaacagctccaagagccagtctcgccgtcggcggacttctcgagcgagcgagacctgctggagggagtactgggcctgaacaatccccttgactcctcaccaacctccttctcatccacacatcaaaaatgtcctcccgaccaccacccccgaaccgcgccccacgacctccacaccaaggcaacgccaagatcccttcgataagcatatcaggcctcacagtaaagcgcttaatatggaccggcgccttcgcagccgtgacgatggtaggcgcgatatacggcgctggattaaaatcacagcaagaatacaaagccgaaaaaagacaaataatagaagaaacacccgaagaacggatccgcgccctcgagcaacgccgcgctcagctactcatggcgaggttaccgctcgagcggaaactggagaaggtgcggagacgtgttgaggaggaggatcgtggatcttcgtcttgaggggttctagcagataaaactttcctcctcttataaacaatgagcctgaaaggagggtcttgaatggagtgccttcgatggattgcagtcatgcacctcgaagtgaacaggacaaatttccctcgtagataaggaagccttgacgtggtgtcttgatattgcgtttttggatcaaagacgtgctttgatacctcatgcaacaccgaatatcgaataggcaccgacatatctctttgcctcatagattacagaggtagcgccgtggttggcgtcatgttgtctgcgctttgcaggtaaacaatgaattagccctcccagccttctaggtgctttagttcaacctcaattgcaatggagggcaagttggagagcaaactccggaatgcttgtgtcaccataatgtacaatatatcacaaatatacccatgagaatgtgctgctacatcaattattcatctattcatcagaaatttcttttggacacagtacaggtgtcgggcgaatctatactaggccttcatgaaaattcataataacgccctccgtgatgccaacccaggaatcccatcctggcatatgtcagtcgagtagtatctacaattcatccccttcatttactccgtctcctcgggtacgggcagttcaatggccttgtagagaaggatgagggctgaatgggactcgccgcctccagctagggcctcaaccttgtctgctgtcacctcagagaccttgtcgtcattgaaccaccaccacttgccatcctcctctttcctcttgccggtcttggcatctatgggaccagtcttcttgacatatgcggtgtaatggccgctgtcagcactcgcaccttgatgtgtaaccacgccgcgaagctcatagagacccgactgattggcaccatcatccttcgctaaacctggatcaaccagcgcggctagctctttcttcatcgcgagaagcgttgcggcacgctcggcgtctatttcggcatccgtcttgtatgtctcggccatttcgacgtcaccgtctcccgatgtagctgctttggcctctttcttctcgtccttctttgcggtcttcgggttggacacctcgggcacatcatcgccctgttcaccattgcgcttgcggcgcttgcgggcgcgctcgacgtcctcttcttccttgcgaacctctcggactttgtctcgaacaggtaccagcagcttcttcaggttctcatcacagaactcaacaacatccagttcatgggggaaggtgaccttgcgcataatcttggccttcttctgcgtctcgcgcttccagaagaaacgcacgaagtggacagtaaggtacttgggtaatcgtgagatcttggaagtcttggtataagtagcatcccgtccaagaacttcggatctcttctcaagtgtctccttcagaccattgacaatgccatctcgtaaatggttggtgttgccgtcgatgtggcaattgagtttcaggaatgagtccttggagacgatgggctgctcgccgccctcagtcgccgctgcctcatcgcagacaagctcggaggagaactcgccggacatgtacttgtcaatgaaggaggtctcgcttgccgatccgtcaatgtccttgatgcgaagtttctggcgaacctgggagacgatctgcgaccatgcctcttcggcgtcctgctgagcatagccattaccagtgcgagagcgctcggcgaactggggaaaggccgtacgcagcgaggtgaggaaggagtgcggggtgtaggctccctgggtatcagacatgtacttgtaggtatcccgaagctgtcgcgtcaaatccaactgaggcagcgtgccggtggcaccagcactggatggctcgtatttggagaggttgtcctggagctcgggaatggcgcgcagggcctggagagtggaattgaggtagcatgtgtttcctaagttgtccaaaccggcggggatagcaccctcttggcgggcggcttcggcctcagtcatgtcctcgacgaacttgacaggagtagaaggtcgtacgagagccttgccgtcacctccgggctttcccatcatggtgatcacttggccgggctggagtttgatgttgctcatgagatcgtcatctttcactaggcgactcttgaacatgactttttggcgatcgggctcgacatcggtgagactgtagagctgtagcttgaagtccgcacatgtggtacctggctctatctctacctggtacctgggggcactcttggtgatgccgtgggcgacctcgactgcgtgtgcatcatcgttagcaagagatggcacaatagtgacacgaagggtttgggtagggccgctacgtacggaccgacgccattttcaagatagccgactgctggacgactagatggacagttgaattattgtcaaggtgtaggcaaggtcgaaaacagaagcgtgcaattgaaggaaaagaaaggagaagtagagcccaagggaagctgtagctcttgtcgaatgctagctcaccaatcgactacaactaaccaggcaaacctaaagtgcgtcacccacagatcctagtaatccatgtgtttctacggccagcatcgactttcc

SEQ ID NO: 37867 - DNA, 1686 bp, Muscodor strobelii
  misc_feature: SGI cDNA ID NO. 573149
  misc_feature: Encodes the peptide sequence at SEQ ID NO 37868
atggcgtcggtcctcgaggtcgcccacggcatcaccaagagtgcccccaggtaccaggtagagatagagccaggtaccacatgtgcggacttcaagctacagctctacagtctcaccgatgtcgagcccgatcgccaaaaagtcatgttcaagagtcgcctagtgaaagatgacgatctcatgagcaacatcaaactccagcccggccaagtgatcaccatgatgggaaagcccggaggtgacggcaaggctctcgtacgaccttctactcctgtcaagttcgtcgaggacatgactgaggccgaagccgcccgccaagagggtgctatccccgccggtttggacaacttaggaaacacatgctacctcaattccactctccaggccctgcgcgccattcccgagctccaggacaacctctccaaatacgagccatccagtgctggtgccaccggcacgctgcctcagttggatttgacgcgacagcttcgggatacctacaagtacatgtctgatacccagggagcctacaccccgcactccttcctcacctcgctgcgtacggcctttccccagttcgccgagcgctctcgcactggtaatggctatgctcagcaggacgccgaagaggcatggtcgcagatcgtctcccaggttcgccagaaacttcgcatcaaggacattgacggatcggcaagcgagacctccttcattgacaagtacatgtccggcgagttctcctccgagcttgtctgcgatgaggcagcggcgactgagggcggcgagcagcccatcgtctccaaggactcattcctgaaactcaattgccacatcgacggcaacaccaaccatttacgagatggcattgtcaatggtctgaaggagacacttgagaagagatccgaagttcttggacgggatgctacttataccaagacttccaagatctcacgattacccaagtaccttactgtccacttcgtgcgtttcttctggaagcgcgagacgcagaagaaggccaagattatgcgcaaggtcaccttcccccatgaactggatgttgttgagttctgtgatgagaacctgaagaagctgctggtacctgttcgagacaaagtccgagaggttcgcaaggaagaagaggacgtcgagcgcgcccgcaagcgccgcaagcgcaatggtgaacagggcgatgatgtgcccgaggtgtccaacccgaagaccgcaaagaaggacgagaagaaagaggccaaagcagctacatcgggagacggtgacgtcgaaatggccgagacatacaagacggatgccgaaatagacgccgagcgtgccgcaacgcttctcgcgatgaagaaagagctagccgcgctggttgatccaggtttagcgaaggatgatggtgccaatcagtcgggtctctatgagcttcgcggcgtggttacacatcaaggtgcgagtgctgacagcggccattacaccgcatatgtcaagaagactggtcccatagatgccaagaccggcaagaggaaagaggaggatggcaagtggtggtggttcaatgacgacaaggtctctgaggtgacagcagacaaggttgaggccctagctggaggcggcgagtcccattcagccctcatccttctctacaaggccattgaactgcccgtacccgaggagacggagtaa

SEQ ID NO: 37868 - protein, 561 aa, Muscodor strobelii
  misc_feature: SGI Peptide ID NO. 573149
  misc_feature (11)..(79): Pfam Id: PF00240 Pfam Desc: Ubiquitin family
  misc_feature (109)..(549): Pfam Id: PF00443 Pfam Desc: Ubiquitin carboxyl-terminal hydrolase
  misc_feature (11)..(558): NCBI GI: 116193817 Blast Desc: CHGG_06626 [Chaetomium globosum CBS 148.51] gi|88182539|gb|EAQ90007.1| CHGG_06626 [Chaetomium globosum CBS 148.51]
  misc_feature (1)..(558): NCBI GI: 171676193 Blast Desc: protein product [Podospora anserina] gi|170936162|emb|CAP60822.1| protein product [Podospora anserina]
  misc_feature (1)..(561): NCBI GI: 256733753 Blast Desc: NECHADRAFT_67700 [Nectria haematococca mpVI 77-13-4]
  misc_feature (3)..(558): NCBI GI: 46130632 Blast Desc: FG08920.1 [Gibberella zeae PH-1]
  misc_feature (11)..(555): NCBI GI: 39971007 Blast Desc: MGG_02970 [Magnaporthe grisea 70-15] gi|149210547|ref|XP_001522648.1| MGCH7_ch7g748 [Magnaporthe grisea 70-15] gi|86196703|gb|EAQ71341.1| MGCH7_ch7g748 grisea
  misc_feature (11)..(558): NCBI GI: 154294744 Blast Desc: BC1G_13587 [Botryotinia fuckeliana B05.10] gi|150844545|gb|EDN19738.1| BC1G_13587 [Botryotinia fuckeliana B05.10]
  misc_feature (11)..(558): NCBI GI: 156055650 Blast Desc: SS1G_05177 [Sclerotinia sclerotiorum 1980] gi|154702961|gb|EDO02700.1| SS1G_05177 [Sclerotinia sclerotiorum 1980]
  misc_feature (1)..(559): NCBI GI: 169609002 Blast Desc: SNOG_07586 [Phaeosphaeria nodorum SN15] gi|111063932|gb|EAT85052.1| SNOG_07586 [Phaeosphaeria nodorum SN15]
  misc_feature (1)..(559): NCBI GI: 189198638 Blast Desc: ubiquitin carboxyl-terminal hydrolase 14 [Pyrenophora tritici-repentis Pt-1C-BFP] gi|187982755|gb|EDU48243.1| ubiquitin carboxyl-terminal hydrolase 14 [Pyrenophora tritici-repentis
  misc_feature (17)..(561): NCBI GI: 85118957 Blast Desc: NCU01919 [Neurospora crassa OR74A] gi|28927360|gb|EAA36314.1| NCU01919 [Neurospora crassa OR74A]
  misc_feature (17)..(551): SWISSPROT Homolog: EC 3.1.2.15 Ubiquitin thiolesterase
MASVLEVAHGITKSAPRYQVEIEPGTTCADFKLQLYSLTDVEPDRQKVMFKSRLVKDDDLMSNIKLQPGQVITMMGKPGGDGKALVRPSTPVKFVEDMTEAEAARQEGAIPAGLDNLGNTCYLNSTLQALRAIPELQDNLSKYEPSSAGATGTLPQLDLTRQLRDTYKYMSDTQGAYTPHSFLTSLRTAFPQFAERSRTGNGYAQQDAEEAWSQIVSQVRQKLRIKDIDGSASETSFIDKYMSGEFSSELVCDEAAATEGGEQPIVSKDSFLKLNCHIDGNTNHLRDGIVNGLKETLEKRSEVLGRDATYTKTSKISRLPKYLTVHFVRFFWKRETQKKAKIMRKVTFPHELDVVEFCDENLKKLLVPVRDKVREVRKEEEDVERARKRRKRNGEQGDDVPEVSNPKTAKKDEKKEAKAATSGDGDVEMAETYKTDAEIDAERAATLLAMKKELAALVDPGLAKDDGANQSGLYELRGVVTHQGASADSGHYTAYVKKTGPIDAKTGKRKEEDGKWWWFNDDKVSEVTADKVEALAGGGESHSALILLYKAIELPVPEETE

SEQ ID NO: 37869 - DNA, 2685 bp, Muscodor strobelii
  misc_feature: SGI EST ID NO. CUFF.91135.3
  misc_feature: Variant of the nucleotide sequence at SEQ ID NO 37867
gccgtagaaacacatggattactaggatctgtgggtgacgcactttaggtttgcctggttagttgtagtcgattggtgagctagcattcgacaagagctacagcttcccttgggctctacttctcctttcttttccttcaattgcacgcttctgttttcgaccttgcctacaccttgacaataattcaactgtccatctagtcgtccagcagtcggctatcttgaaaatggcgtcggtcctcgaggtcgcccacggcatcaccaagagtgcccccaggtaccaggtagagatagagccaggtaccacatgtgcggacttcaagctacagctctacagtctcaccgatgtcgagcccgatcgccaaaaagtcatgttcaagagtcgcctagtgaaagatgacgatctcatgagcaacatcaaactccagcccggccaagtgatcaccatgatgggaaagcccggaggtgacggcaaggctctcgtacgaccttctactcctgtcaagttcgtcgaggacatgactgaggccgaagccgcccgccaagagggtgctatccccgccggtttggacaacttaggaaacacatgctacctcaattccactctccaggccctgcgcgccattcccgagctccaggacaacctctccaaatacgagccatccagtgctggtgccaccggcacgctgcctcagttggatttgacgcgacagcttcgggatacctacaagtacatgtctgatacccagggagcctacaccccgcactccttcctcacctcgctgcgtacggcctttccccagttcgccgagcgctctcgcactggtaatggctatgctcagcaggacgccgaagaggcatggtcgcagatcgtctcccaggttcgccagaaacttcgcatcaaggacattgacggatcggcaagcgagacctccttcattgacaagtacatgtccggcgagttctcctccgagcttgtctgcgatgaggcagcggcgactgagggcggcgagcagcccatcgtctccaaggactcattcctgaaactcaattgccacatcgacggcaacaccaaccatttacgagatggcattgtcaatggtctgaaggagacacttgagaagagatccgaagttcttggacgggatgctacttataccaagacttccaagatctcacgattacccaagtaccttactgtccacttcgtgcgtttcttctggaagcgcgagacgcagaagaaggccaagattatgcgcaaggtcaccttcccccatgaactggatgttgttgagttctgtgatgagaacctgaagaagctgctggtacctgttcgagacaaagtccgagaggttcgcaaggaagaagaggacgtcgagcgcgcccgcaagcgccgcaagcgcaatggtgaacagggcgatgatgtgcccgaggtgtccaacccgaagaccgcaaagaaggacgagaagaaagaggccaaagcagctacatcgggagacggtgacgtcgaaatggccgagacatacaagacggatgccgaaatagacgccgagcgtgccgcaacgcttctcgcgatgaagaaagagctagccgcgctggttgatccaggtttagcgaaggatgatggtgccaatcagtcgggtctctatgagcttcgcggcgtggttacacatcaaggtgcgagtgctgacagcggccattacaccgcatatgtcaagaagactggtcccatagatgccaagaccggcaagaggaaagaggaggatggcaagtggtggtggttcaatgacgacaaggtctctgaggtgacagcagacaaggttgaggccctagctggaggcggcgagtcccattcagccctcatccttctctacaaggccattgaactgcccgtacccgaggagacggagtaaatgaaggggatgaattgtagatactactcgactgacatatgccaggatgggattcctgggttggcatcacggagggcgttattatgaattttcatgaaggcctagtatagattcgcccgacacctgtactgtgtccaaaagaaatttctgatgaatagatgaataattgatgtagcagcacattctcatgggtatatttgtgatatattgtacattatggtgacacaagcattccggagtttgctctccaacttgccctccattgcaattgaggttgaactaaagcacctagaaggctgggagggctaattcattgtttacctgcaaagcgcagacaacatgacgccaaccacggcgctacctctgtaatctatgaggcaaagagatatgtcggtgcctattcgatattcggtgttgcatgaggtatcaaagcacgtctttgatccaaaaacgcaatatcaagacaccacgtcaaggcttccttatctacgagggaaatttgtcctgttcacttcgaggtgcatgactgcaatccatcgaaggcactccattcaagaccctcctttcaggctcattgtttataagaggaggaaagttttatctgctagaacccctcaagacgaagatccacgatcctcctcctcaacacgtctccgcaccttctccagtttccgctcgagcggtaacctcgccatgagtagctgagcgcggcgttgctcgagggcgcggatccgttcttcgggtgtttcttctattatttgtcttttttcct

SEQ ID NO: 37870 - DNA, 510 bp, Muscodor strobelii
  misc_feature: SGI cDNA ID NO. 573150
  misc_feature: Encodes the peptide sequence at SEQ ID NO 37871
atgtctcaatccctccgcccatatctccagtgcgtccggagctctgtcacggccgctctctgtctctccaactttgcctctcagacttccgagcgtcacaatgtacccgagatcgaagcccagacctctcccgaggtcttattaaatcctctcgtcgttgcccgcaacgagaacgagaaggtcctcatcgagcctagcatcaacagcatacgtatcagcatcaagatcaaacaggcagacgagatcgagaacatccttgtccacaagttcactcgcttcttgacccagagagcagaggccttcttcatcctgaggagaaagccgatcaagggctacgacatatctttcttgataacaaacttccacaccgaggaaatgttgaagcataagctagtcgacttcataatccagttcatggaggaggttgacaaggagatttctgagatgaaattattcttgaacgcgagagcacgttttgttgccgagtctttcttaacaccttttgattaa

SEQ ID NO: 37871 - protein, 169 aa, Muscodor strobelii
  misc_feature: SGI Peptide ID NO. 573150
  misc_feature (1)..(168): Pfam Id: PF05856 Pfam Desc: ARP2/3 complex 20 kDa subunit (ARPC4)
  misc_feature (1)..(169): NCBI GI: 156055652 Blast Desc: conserved [Sclerotinia sclerotiorum 1980] gi|154702962|gb|EDO02701.1| conserved [Sclerotinia sclerotiorum 1980]
  misc_feature (1)..(169): NCBI GI: 116193819 Blast Desc: CHGG_06627 [Chaetomium globosum CBS 148.51] gi|88182540|gb|EAQ90008.1| CHGG_06627 [Chaetomium globosum CBS 148.51]
  misc_feature (1)..(169): NCBI GI: 256734257 Blast Desc: [Nectria haematococca mpVI 77-13-4]
  misc_feature (1)..(169): NCBI GI: 85118953 Blast Desc: ARP2/3 complex 20 kDa subunit [Neurospora crassa OR74A] gi|28927359|gb|EAA36313.1| ARP2/3 complex 20 kDa subunit [Neurospora crassa OR74A]
  misc_feature (1)..(169): NCBI GI: 226279579 Blast Desc: ARP2/3 complex 20 kDa subunit [Paracoccidioides brasiliensis Pb01]
  misc_feature (1)..(169): NCBI GI: 171676195 Blast Desc: protein product [Podospora anserina] gi|170936163|emb|CAP60823.1| protein product [Podospora anserina]
  misc_feature (1)..(169): NCBI GI: 226287597 Blast Desc: ARP2/3 complex 20 kDa subunit [Paracoccidioides brasiliensis Pb18]
  misc_feature (1)..(169): NCBI GI: 154294746 Blast Desc: actin related protein 2/3 complex, subunit 4 [Botryotinia fuckeliana B05.10] gi|150844546|gb|EDN19739.1| actin related protein 2/3 complex, subunit 4 [Botryotinia fuckeliana
  misc_feature (2)..(169): NCBI GI: 225558010 Blast Desc: conserved [Ajellomyces capsulatus G186AR]
  misc_feature (1)..(169): NCBI GI: 240108974 Blast Desc: ARP2/3 complex 20 kDa subunit, [Coccidioides posadasii C735 delta SOWgp]
MSQSLRPYLQCVRSSVTAALCLSNFASQTSERHNVPEIEAQTSPEVLLNPLVVARNENEKVLIEPSINSIRISIKIKQADEIENILVHKFTRFLTQRAEAFFILRRKPIKGYDISFLITNFHTEEMLKHKLVDFIIQFMEEVDKEISEMKLFLNARARFVAESFLTPFD

SEQ ID NO: 37872 - DNA, 1153 bp, Muscodor strobelii
  misc_feature: SGI EST ID NO. CUFF.91138.0
  misc_feature: Variant of the nucleotide sequence at SEQ ID NO 37870
ccacgctggcgcagctcgcaacgtcctgggtaacaggcgagcaggctgataggcacccctttcggcacagctcgccctcaccccacttcgagcttcaggtcaattgcgacaacaggtggtgacagcgacaacgacgatcccgccacactgtctctacgaaacccctctcaccatgtctcaatccctccgcccatatctccagtgcgtccggagctctgtcacggccgctctctgtctctccaactttgcctctcagacttccgagcgtcacaatgtacccgagatcgaagcccagacctctcccgaggtcttattaaatcctctcgtcgttgcccgcaacgagaacgagaaggtcctcatcgagcctagcatcaacagcatacgtatcagcatcaagatcaaacaggcagacgagatcgagaacatccttgtccacaagttcactcgcttcttgacccagagagcagaggccttcttcatcctgaggagaaagccgatcaagggctacgacatatctttcttgataacaaacttccacaccgaggaaatgttgaagcataagctagtcgacttcataatccagttcatggaggaggttgacaaggagatttctgagatgaaattattcttgaacgcgagagcacgttttgttgccgagtctttcttaacaccttttgattaagaggctatcggcaagatactgaggggagcaaacaccatagacttcacttaacgaagacacgtgccgtatgggagttatgatgagatcccaccaaaactacgcgtcaacgacatgacgaagcgtcgatagtggtacacttagacatgtgctatgatgggattcagagtccctaaaagctctactaaaaagattcaaaaactctatattaacctacccttttcccggatgatgacgatctcgtgtgtatgctcaccagtggcttgtggccatgacctgagcttttaatccagtatttgaaaataacaagtcaaatactttagaccactaacatttacggatgcatcaacgtaatcaatttcaactaattcgaagacagttgcgcaggttgtcattttcatatctttccttatccattgtttgactacaaaccaccactaggcacctcatacgattgtattcatcacgtttcaa

SEQ ID NO: 37873 - DNA, 3330 bp, Muscodor strobelii
  misc_feature: SGI cDNA ID NO. 573151
  misc_feature: Elevated expression when VOC is produced
  misc_feature: Encodes the peptide sequence at SEQ ID NO 37874
atggacaagagcttgtctagggctaaagatgccctcgatatcgtgttgcgcgagcgacaaaatccgaacgcagtcagcacagcaggaaagtcaactgctgtttcgcttgatgcacagcagaatccccaggatcaggatccccaagggccgacggctcccaagggctgtagcactcagatcacactaagtctatgggaacaagcaatagcaacactttccggagaggaaaggtcatggattacacaggcaaccagcgatgcttccatgcctgtgaacgatgttgtacaccaaatcattgacactactgaaagaagacaagaacagtgtgctaagaaagggtgggaaacattcaaactcggtaatcgcactatttcttttgacgacagcgctagaaaagtgttgatctggttgaacaaattcaaagagattggagacatcattgttcagtatgatcccgttcatgctgccctaccttgggctgccgtacggtttgttctgcaggtcgtggtcacaaccgaggaacagatggctgcatcctctgccgtgcttgaagaagcaagtcgaattatccacaggtgccaagtgtatgaggaattatataaccgcatgactttgggccatggcgttgttgagaacctcgagtctgctttaattaagctctacgtttccgtccttcaggggcttttcgaagtttccaaatttctcgaaaggagtactcttgtccgtgctttggtcggcgttgtaaatgctgattcaatcgtcgacttacttgcgaggcttgagacggacgagaatcgcgcaattaaagaagtcgatgcttgtgagaaccaacgcagggctaagtcagagggcgagatccaggagcagctatgcaatctcttggaacttacgcaccccattcttcgtactgatgaaaatataaggaaggtgcttcagcgtatggaacatcaagaacttattgaagtcctagagtggatttcccccatcgaatatagatcacatcatgacacggtcaacgaacggaggacgaagggcacctgcgactggctcctccagcgctctatctatagccaatggagctcttcgaactcatcaattactctatggctccaaggttttcctggttctggtaaaacatttcttacatcaagagtcattgatgatctggaagcaaatcttcttagcgtaggaaacgatgaaagtatcgcatttttctattgcaaccgaactgaggagattcgtcggaacgctattgatgtccttcggagctatgttagacaactctcgaccactcctcagatgtctggtttcattcatccggacctaagagatctccacgccgcctcaaaaatgaagggctccggatggacactcaaactgtgtcagaaatatctaattaagctgttcgattggtaccctcgtactactctaatccttgatgcattggatgagtgtcgcatagaaggcagggaaatcctgctcgactttttttattcgattccgaatttgacagataagcccgtcagaattttcatttcgagccgtccggaaggtgacatccgacaacgtctgctctttcttcccagcattgaaatttttgcgacagacaacgaagacgatatttccaaatacgtccaaaaaagcctcgagaggaatggccgctggagtgagaccatatcgagaaacgaattattaaagaaggagatcgtggacactctgctagcccaaagcaaagggatgtttcaatggacacagttacagatcaatcaattgctcaatctacgcactgagtatcaaatcaggagccgactagggaagctaccgaacgatctcgaagccgcttacgatgagatttttgggaacatcgaagccttggaaccatatgcgagagaaatatctttcagagcccttcgatgggtcatgtgtgcttcacagcccctttccgatcaagcgcttctagcggccatcggcatagacctggaaaatgacactattatatctgcgcatgaaataacagttgacgatgttcttgactggtgtgcaaacctacttcgaagaaatggcctaatttatgaaggagtacaatatttcgtatggcaggtctctcatctgtctgttcttgaatatcttgaaaagaagtggacgttattggaggcacacaattacgtcgcaaaggcttgtctgacggtgttgttaaacaggactatacagaatttgtgggatgaggcgtcagctgaaatcccggaattcaattcaaggggagataacatccttgcactggctgctggcgcaggctgtttgcctatctgtgagaagctttgtacgctagggataccagtcgatctgcctttcgaagaccacacagagataccctatggtagtgcgctcggagccgctgtatatgaaaaccatcgcgctatcatcaatttcctctttgagagaggggcggatgtcaatttgcagatttggaatagctacggaagtgctctcgcaaccgccgtcggccgagggcatatcgatactgtcaaataccttgttggaaaaggagcagatataaatatgcagctcatatcgggtaggtatggcagtgccctcgcacacgcttgttgcgcgggcaatccagatatagtcaagtaccttgttgaaaatggagctgatattaatatgccgctcaagctggacgcaattggtagcgctcttgcgaatgcactggctgctggtgcactggaagagactaaatatctgctagagaaaggtgccgatataaatatgccgctcatgccggtcaacaaaggcggatttgatgatgcatatcatggtagtgctgtcactatcgcggtatccggaccacttcgtcatgtcttcctgtccgagaaatggcttaccgtctacggcgtagatgttaacttacagcttcaatatggaatctacggtagccctctggccgcagcatgcactcgcggggatagtaatttagacgtcgtcgagtatctcatccgaggaggggcagagatcaacttgcccctcatgtatggaaaatatggtaacgcactcgccgcagctgttgagggggtgtgtataccgggaaaggtggactcgttaagactcatacagttccttctcaacgagggggcaaacgtcaatatgctcctcgggatggaagatctatctgttcttgatatcgtagaacgttggccgaaattggacgaggttcgggactatggcctcttcagggtgcgtccggaggagcaacgaaaaagacgagagatgaaggtcaagatcaaggaactacttatccaaaatggagcaagaaggagtcatgaattgtga

SEQ ID NO: 37874 - protein, 1109 aa, Muscodor strobelii
  misc_feature: SGI Peptide ID NO. 573151
  misc_feature (860)..(892): Pfam Id: PF00023 Pfam Desc: Ankyrin repeat
  misc_feature (863)..(892): Pfam Id: PF00023 Pfam Desc: Ankyrin repeat
  misc_feature (828)..(857): Pfam Id: PF00023 Pfam Desc: Ankyrin repeat
  misc_feature (87)..(1051): NCBI GI: 255956259 Blast Desc: Pc21g18910 [Penicillium chrysogenum Wisconsin 54-1255] gi|211590593|emb|CAP96788.1| Pc21g18910 [Penicillium chrysogenum Wisconsin 54-1255]
  misc_feature (42)..(729): NCBI GI: 255956753 Blast Desc: Pc21g21550 [Penicillium chrysogenum Wisconsin 54-1255] gi|211590840|emb|CAP97052.1| Pc21g21550 [Penicillium chrysogenum Wisconsin 54-1255]
  misc_feature (94)..(1052): NCBI GI: 145228539 Blast Desc: An01g01380 [Aspergillus niger] gi|134054669|emb|CAK43510.1| protein product [Aspergillus niger]
  misc_feature (95)..(1058): NCBI GI: 255950134 Blast Desc: Pc22g19310 [Penicillium chrysogenum Wisconsin 54-1255] gi|211592851|emb|CAP99219.1| Pc22g19310 [Penicillium chrysogenum Wisconsin 54-1255]
  misc_feature (63)..(734): NCBI GI: 46117768 Blast Desc: FG04653.1 [Gibberella zeae PH-1]
  misc_feature (65)..(752): NCBI GI: 46139847 Blast Desc: FG11438.1 [Gibberella zeae PH-1]
  misc_feature (93)..(775): NCBI GI: 189193223 Blast Desc: conserved [Pyrenophora tritici-repentis Pt-1C-BFP] gi|187978514|gb|EDU45140.1| conserved [Pyrenophora tritici-repentis Pt-1C-BFP]
  misc_feature (63)..(740): NCBI GI: 115390316 Blast Desc: [Aspergillus terreus NIH2624] gi|114195059|gb|EAU36759.1| [Aspergillus terreus NIH2624]
  misc_feature (41)..(556): NCBI GI: 238502767 Blast Desc: ankyrin repeat-containing protein, [Aspergillus flavus NRRL3357] gi|220691427|gb|EED47775.1| ankyrin repeat-containing protein, [Aspergillus flavus NRRL3357]
  misc_feature (57)..(732): NCBI GI: 145244174 Blast Desc: An11g06060 [Aspergillus niger] gi|134079279|emb|CAK40761.1| protein product [Aspergillus niger]
  misc_feature: Useful for introducing or modulating the production of volatile compounds
MDKSLSRAKDALDIVLRERQNPNAVSTAGKSTAVSLDAQQNPQDQDPQGPTAPKGCSTQITLSLWEQAIATLSGEERSWITQATSDASMPVNDVVHQIIDTTERRQEQCAKKGWETFKLGNRTISFDDSARKVLIWLNKFKEIGDIIVQYDPVHAALPWAAVRFVLQVVVTTEEQMAASSAVLEEASRIIHRCQVYEELYNRMTLGHGVVENLESALIKLYVSVLQGLFEVSKFLERSTLVRALVGVVNADSIVDLLARLETDENRAIKEVDACENQRRAKSEGEIQEQLCNLLELTHPILRTDENIRKVLQRMEHQELIEVLEWISPIEYRSHHDTVNERRTKGTCDWLLQRSIYSQWSSSNSSITLWLQGFPGSGKTFLTSRVIDDLEANLLSVGNDESIAFFYCNRTEEIRRNAIDVLRSYVRQLSTTPQMSGFIHPDLRDLHAASKMKGSGWTLKLCQKYLIKLFDWYPRTTLILDALDECRIEGREILLDFFYSIPNLTDKPVRIFISSRPEGDIRQRLLFLPSIEIFATDNEDDISKYVQKSLERNGRWSETISRNELLKKEIVDTLLAQSKGMFQWTQLQINQLLNLRTEYQIRSRLGKLPNDLEAAYDEIFGNIEALEPYAREISFRALRWVMCASQPLSDQALLAAIGIDLENDTIISAHEITVDDVLDWCANLLRRNGLIYEGVQYFVWQVSHLSVLEYLEKKWTLLEAHNYVAKACLTVLLNRTIQNLWDEASAEIPEFNSRGDNILALAAGAGCLPICEKLCTLGIPVDLPFEDHTEIPYGSALGAAVYENHRAIINFLFERGADVNLQIWNSYGSALATAVGRGHIDTVKYLVGKGADINMQLISGRYGSALAHACCAGNPDIVKYLVENGADINMPLKLDAIGSALANALAAGALEETKYLLEKGADINMPLMPVNKGGFDDAYHGSAVTIAVSGPLRHVFLSEKWLTVYGVDVNLQLQYGIYGSPLAAACTRGDSNLDVVEYLIRGGAEINLPLMYGKYGNALAAAVEGVCIPGKVDSLRLIQFLLNEGANVNMLLGMEDLSVLDIVERWPKLDEVRDYGLFRVRPEEQRKRREMKVKIKELLIQNGARRSHEL

SEQ ID NO: 37875 - DNA, 4206 bp, Muscodor strobelii
  misc_feature: SGI EST ID NO. CUFF.90706.0
  misc_feature: Variant of the nucleotide sequence at SEQ ID NO 37873
gtttcatcgtcgactgcttaccccgctgattagtgcgctcatgtctatggcaatggacaagagcttgtctagggctaaagatgccctcgatatcgtgttgcggtttatggcattcatcccggcctggagacaacaccggacaatccaaaccgaacctagccaccaagaatgagtcgagcgacaaaatccgaacgcagtcagcacagtcagttataaagactcccttacttattgccgtacccgaaacggttcgccaggcaggaaagtcaactgctgtttcgcttgatgcacagcagaatccccaggatcaggatccccaagggccgacggctcccaagggctgtagcactcagatcacactaagtctatgggaacaagcaatagcaacactttccggagaggaaaggtcatggattacacaggcaaccagcgatgcttccatgcctgtgaacgatgttgtacaccaaatcattgacactactgaaagaagacaagaacagtgtgctaagaaagggtgggaaacattcaaactcggtaatcgcactatttcttttgacgacagcgctagaaaagtgttgatctggttgaacaaattcaaagagattggagacatcattgttcagtatgatcccgttcatgctgccctaccttgggctgccgtacggtttgttctgcaggtcgtggtcacaaccgaggaacagatggctgcatcctctgccgtgcttgaagaagcaagtcgaattatccacaggtgccaagtgtatgaggaattatataaccgcatgactttgggccatggcgttgttgagaacctcgagtctgctttaattaagctctacgtttccgtccttcaggggcttttcgaagtttccaaatttctcgaaaggagtactcttgtccgtgctttggtcggcgttgtaaatgctgattcaatcgtcgacttacttgcgaggcttgagacggacgagaatcgcgcaattaaagaagtcgatgcttgtgagaaccaacgcagggctaagtcagagggcgagatccaggagcagctatgcaatctcttggaacttacgcaccccattcttcgtactgatgaaaatataaggaaggtgcttcagcgtatggaacatcaagaacttattgaagtcctagagtggatttcccccatcgaatatagatcacatcatgacacggtcaacgaacggaggacgaagggcacctgcgactggctcctccagcgctctatctatagccaatggagctcttcgaactcatcaattactctatggctccaaggttttcctggttctggtaaaacatttcttacatcaagagtcattgatgatctggaagcaaatcttcttagcgtaggaaacgatgaaagtatcgcatttttctattgcaaccgaactgaggagattcgtcggaacgctattgatgtccttcggagctatgttagacaactctcgaccactcctcagatgtctggtttcattcatccggacctaagagatctccacgccgcctcaaaaatgaagggctccggatggacactcaaactgtgtcagaaatatctaattaagctgttcgattggtaccctcgtactactctaatccttgatgcattggatgagtgtcgcatagaaggcagggaaatcctgctcgactttttttattcgattccgaatttgacagataagcccgtcagaattttcatttcgagccgtccggaaggtgacatccgacaacgtctgctctttcttcccagcattgaaatttttgcgacagacaacgaagacgatatttccaaatacgtccaaaaaagcctcgagaggaatggccgctggagtgagaccatatcgagaaacgaattattaaagaaggagatcgtggacactctgctagcccaaagcaaagggatgtttcaatggacacagttacagatcaatcaattgctcaatctacgcactgagtatcaaatcaggagccgactagggaagctaccgaacgatctcgaagccgcttacgatgagatttttgggaacatcgaagccttggaaccatatgcgagagaaatatctttcagagcccttcgatgggtcatgtgtgcttcacagcccctttccgatcaagcgcttctagcggccatcggcatagacctggaaaatgacactattatatctgcgcatgaaataacagttgacgatgttcttgactggtgtgcaaacctacttcgaagaaatggcctaatttatgaaggagtacaatatttcgtatggcaggtctctcatctgtctgttcttgaatatcttgaaaagaagtggacgttattggaggcacacaattacgtcgcaaaggcttgtctgacggtgttgttaaacaggtatggaaacgaaaatctaaatatggatcgtgcactagatcgatccaaaacgtatagctcatacggttcatctgattcatccgacgagccggttgttatctacgattcagtccatggccttcaaacttatgtgcggagtttttgggttgatcacgttcgtacacaagaagatgaagccgccgatcccaaattggctaatctcttgcagcttttttgggatcgctggaggaatctagtgtttattatcgccgatggcatcgtcgagctgcaactgactgggataatagttttccgcagagttctgtgattttatcagacgttatggatcgcatttctcccaatacctctcccgtctttctcgcatgcttgctccctctgtataggactatacagaatttgtgggatgaggcgtcagctgaaatcccggaattcaattcaaggggagataacatccttgcactggctgctggcgcaggctgtttgcctatctgtgagaagctttgtacgctagggataccagtcgatctgcctttcgaagaccacacagagataccctatggtagtgcgctcggagccgctgtatatgaaaaccatcgcgctatcatcaatttcctctttgagagaggggcggatgtcaatttgcagatttggaatagctacggaagtgctctcgcaaccgccgtcggccgagggcatatcgatactgtcaaataccttgttggaaaaggagcagatataaatatgcagctcatatcgggtaggtatggcagtgccctcgcacacgcttgttgcgcgggcaatccagatatagtcaagtaccttgttgaaaatggagctgatattaatatgccgctcaagctggacgcaattggtagcgctcttgcgaatgcactggctgctggtgcactggaagagactaaatatctgctagagaaaggtgccgatataaatatgccgctcatgccggtcaacaaaggcggatttgatgatgcatatcatggtagtgctgtcactatcgcggtatccggaccacttcgtcatgtcttcctgtccgagaaatggcttaccgtctacggcgtagatgttaacttacagcttcaatatggaatctacggtagccctctggccgcagcatgcactcgcggggatagtaatttagacgtcgtcgagtatctcatccgaggaggggcagagatcaacttgcccctcatgtatggaaaatatggtaacgcactcgccgcagctgttgagggggtgtgtataccgggaaaggtggactcgttaagactcatacagttccttctcaacgagggggcaaacgtcaatatgctcctcgggatggaagatctatctgttcttgatatcgtagaacgttggccgaaattggacgaggttcgggactatggcctcttcagggtgcgtccggaggagcaacgaaaaagacgagagatgaaggtcaagatcaaggaactacttatccaaaatggagcaagaaggagtcatgaattgtgaaatgactagctaagaccatgatatggagagtatgtaatttaggcctctatccaagtatcccagacacagataaaagtcagtccgacagcatctcaggctataacaaggctagcttgcgcaatttgtggtcggaaacattataggggcgggggctggtacacaaacgagttatatggaatctgttccagggagtgcagatcaagaggaattgaaggtgagctgcctcatactgaacggcataggatataagaccagaactcttaggtgtgtatcgtcgaaatatttttggtggtttatagggaggtgtaacatgttca

SEQ ID NO: 37876 - DNA, 2769 bp, Muscodor strobelii
  misc_feature: SGI cDNA ID NO. 573152
  misc_feature: Reduced expression when VOC is produced
  misc_feature: Encodes the peptide sequence at SEQ ID NO 37877
atggggtcccacgaccgcgaccccgactccgcagccgctcctgctgctggtgcacctgccgcctccgagatgaccaatgacgaccgcccacgcgagcgcagaagcaagagcgaccgctccaagtcggacagggacagggactccaaggacagagagtctcgcgactcgaaagacagagactccaaggatggccaccgccaccgccataaatccacacgctcctccaagctcaagcccttcgtcgacggcgagtcctccctagcctcctcctccacccagaagcgacgccgccaccgcaccgaggaagagaaggaacgcgaccgacagaagaaggcctcctccatgacggaccttgtccccgagctgggaaggacctcagctgccggtagtagagtcagcctgaactatcccaccttcagcaaggcccacagcaaggagtcggtctacggccgcgaagacctcaatgcctcgacccctcgccatgaccccctcacccccgaccctacagacctcagctccaaggacaggcgacgtagtaagtcagccgaaggctccaaggagaataccaagagctcgcgcaaggagcagcgtcccccgagcccacccgagacagacttgtctggcgagaagaagcagcgcagcaagacgtccagcccgagatttgcagaggatggcacagagcgacccagatcccgaacgtcgggcgtatctcgatccgattcgcgtcacgaggacaggtccaaagtctctatacactccaagacctcgagtcaggctacttacgtccaagccccgaagcgcccgccgcctcctcccccgtatgttaagaccgtggttgatgaggagtatatggtgagcgatgacaagactgctggcgctcgatcagctgcaacttctgttgctcccaaaagatcagtttctaccaaagcttccaagaccccaagcttagaatctgatgattccccgaactctgttcaagagtcatcgcccaagacacccactgccactcaacagttccctccaccgagggtctatcccagtcacaatactaacacgagttcctactcaacattcgaatatgacgacaaagatcgtcctactcctacagcaacccccgccacagattttggccccccacctccgcctcccccgccacctttggacattcaggaggcgccccgtgttgactacttactccagaacggtggtctgcatcacaagattcccaagaactttttggatgctctaccgcgccagaacggaactcggccctccaatccaccgttggcaggctgtgaaaccttgttcgcacccttcttcaacctcctcgaccagtatcagacagtcatccagaatcagggctcagttgcagtagccacgggtcacaagtcagtggcacgccgattactcgatcgcctagaggatgtcttttctcgcgatcttcccgttgagggatgcacgtgtatcatgtgcgaaaagactcaacatgaacacagaggtctgggttggggagaggttctcgaacgagttggtggcagggtggagatgccttcatggccgccatttgacctctccgctgtcgttgccacggctattgagaacactgccgaactgcctcccaggccgtcctctcccatcaagctcgaccccgatattggtgaggaatttcgtgagcactacttacgccaatcgaaaaaggtccggtcttccgtggacaagtggatgaataattgtgcagagacacccgctcctccgccctctgatgtggatgatgagacattgactttcgctattctgacaagcctcgagcaagaagagcgcccttatttcaatgctctagtttctggcgcaaaagagcttcagcctgccatgcgagcaccgacgccgatgagaaaacctcgaacggacttcatggtcaagaccggactccagctccagcgcctctatcgtcttccgcaggcaccccgagatgcagagaccgctgtgtatctcgtcaagaacccctttcatcatgatctactagctaccatgactgacattagcccccaagaatgggagattctcatttctggcaggttcgatgggttcctctggtctggtgccgatggcgacgatgccattacgcccactatggaaaatccgctttcgagaggtgcgacacccgccaaaggcttcttctcgcctcctccatcccgtggccctatgacgcctggcatgggaatgcgacagactcctggatttggcggttctcgtagcacgacgcctttctcggatgtttactcgcgcggtacgaccccagcctccttcatatctctctcttcttccacagcaccaggccataatcgcggccctgtctcccacgatgaagaagtcgagatggtcgctctggccgaaattgaacgagacatctaccggggcatggaggcattggaggacgcgtttgaaaagttgcatcatcgtgccgagatcgtacggaatgctcttcgacaacgcaataatggcttgatagcgaatcgtcaacaccgtcgtcccggacacattgatgttctcccccaactttcgggtggttcgtcggcctatgagaggcccccttgggcgactggcgatgatgacgccgttactagtgagagcgattggggtggtgatgatttcgatctggcccccgaagattcagcgagcaatatctcaagctccagacacagacgcccgaaacgaagaaccgagcgtcgaacccctgcacctattgaagaggacgaggaggagaactag

SEQ ID NO: 37877 - protein, 922 aa, Muscodor strobelii
  misc_feature: SGI Peptide ID NO. 573152
  misc_feature (67)..(922): NCBI GI: 261353460 Blast Desc: conserved [Verticillium albo-atrum VaMs.102]
  misc_feature (65)..(921): NCBI GI: 171685097 Blast Desc: protein product [Podospora anserina] gi|170942509|emb|CAP68161.1| protein product [Podospora anserina]
  misc_feature (65)..(921): NCBI GI: 116193689 Blast Desc: CHGG_06562 [Chaetomium globosum CBS 148.51] gi|88182475|gb|EAQ89943.1| CHGG_06562 [Chaetomium globosum CBS 148.51]
  misc_feature (112)..(920): NCBI GI: 256734215 Blast Desc: NECHADRAFT_35658 [Nectria haematococca mpVI 77-13-4]
  misc_feature (70)..(920): NCBI GI: 85112448 Blast Desc: NCU01984 [Neurospora crassa OR74A] gi|28926126|gb|EAA35112.1| NCU01984 [Neurospora crassa OR74A] gi|38567070|emb|CAE76367.1| [Neurospora crassa]
  misc_feature (27)..(921): NCBI GI: 46129378 Blast Desc: FG08874.1 [Gibberella zeae PH-1]
  misc_feature (100)..(920): NCBI GI: 149209775 Blast Desc: MGCH7_ch7g370 [Magnaporthe grisea 70-15] gi|86196325|gb|EAQ70963.1| MGCH7_ch7g370 [Magnaporthe grisea 70-15]
  misc_feature (107)..(920): NCBI GI: 39970355 Blast Desc: MGG_02644 [Magnaporthe grisea 70-15] gi|145017571|gb|EDK01934.1| MGG_02644 [Magnaporthe grisea 70-15]
  misc_feature (49)..(921): NCBI GI: 154297150 Blast Desc: BC1G_12234 [Botryotinia fuckeliana B05.10] gi|150843063|gb|EDN18256.1| BC1G_12234 [Botryotinia fuckeliana B05.10]
  misc_feature (68)..(921): NCBI GI: 156057177 Blast Desc: SS1G_04319 [Sclerotinia sclerotiorum 1980] gi|154702105|gb|EDO01844.1| SS1G_04319 [Sclerotinia sclerotiorum 1980]
  misc_feature: Useful for introducing or modulating the production of volatile compounds
MGSHDRDPDSAAAPAAGAPAASEMTNDDRPRERRSKSDRSKSDRDRDSKDRESRDSKDRDSKDGHRHRHKSTRSSKLKPFVDGESSLASSSTQKRRRHRTEEEKERDRQKKASSMTDLVPELGRTSAAGSRVSLNYPTFSKAHSKESVYGREDLNASTPRHDPLTPDPTDLSSKDRRRSKSAEGSKENTKSSRKEQRPPSPPETDLSGEKKQRSKTSSPRFAEDGTERPRSRTSGVSRSDSRHEDRSKVSIHSKTSSQATYVQAPKRPPPPPPYVKTVVDEEYMVSDDKTAGARSAATSVAPKRSVSTKASKTPSLESDDSPNSVQESSPKTPTATQQFPPPRVYPSHNTNTSSYSTFEYDDKDRPTPTATPATDFGPPPPPPPPPLDIQEAPRVDYLLQNGGLHHKIPKNFLDALPRQNGTRPSNPPLAGCETLFAPFFNLLDQYQTVIQNQGSVAVATGHKSVARRLLDRLEDVFSRDLPVEGCTCIMCEKTQHEHRGLGWGEVLERVGGRVEMPSWPPFDLSAVVATAIENTAELPPRPSSPIKLDPDIGEEFREHYLRQSKKVRSSVDKWMNNCAETPAPPPSDVDDETLTFAILTSLEQEERPYFNALVSGAKELQPAMRAPTPMRKPRTDFMVKTGLQLQRLYRLPQAPRDAETAVYLVKNPFHHDLLATMTDISPQEWEILISGRFDGFLWSGADGDDAITPTMENPLSRGATPAKGFFSPPPSRGPMTPGMGMRQTPGFGGSRSTTPFSDVYSRGTTPASFISLSSSTAPGHNRGPVSHDEEVEMVALAEIERDIYRGMEALEDAFEKLHHRAEIVRNALRQRNNGLIANRQHRRPGHIDVLPQLSGGSSAYERPPWATGDDDAVTSESDWGGDDFDLAPEDSASNISSSRHRRPKRRTERRTPAPIEEDEEEN

SEQ ID NO: 37878 - DNA, 3742 bp, Muscodor strobelii
  misc_feature: SGI EST ID NO. CUFF.90700.0
  misc_feature: Variant of the nucleotide sequence at SEQ ID NO 37876
cgccgccaaccatcacgtcttcctcgccgtacaatcaactgcgccgagcgatccccttccttttgctgctagcctagtctcgcatatacatttatctaccaggcacgcatcacatctacgaacacgtacctccgcatctacgcgaccacaccagcgcccgcgcccgcacccgcatccaacgctgggaacagacaccacgctgctgcacgacacagcgctcgcaacgacgcaaccacacacacgccattgccactgaacgctactcacactactcacagctatccacgcagtcgggcccagttgggctgcaaaggccaccgccatggggtcccacgaccgcgaccccgactccgcagccgctcctgctgctggtgcacctgccgcctccgagatgaccaatgacgaccgcccacgcgagcgcagaagcaagagcgaccgctccaagtcggacagggacagggactccaaggacagagagtctcgcgactcgaaagacagagactccaaggatggccaccgccaccgccataaatccacacgctcctccaagctcaagcccttcgtcgacggcgagtcctccctagcctcctcctccacccagaagcgacgccgccaccgcaccgaggaagagaaggaacgcgaccgacagaagaaggcctcctccatgacggaccttgtccccgagctgggaaggacctcagctgccggtagtagagtcagcctgaactatcccaccttcagcaaggcccacagcaaggagtcggtctacggccgcgaagacctcaatgcctcgacccctcgccatgaccccctcacccccgaccctacagacctcagctccaaggacaggcgacgtagtaagtcagccgaaggctccaaggagaataccaagagctcgcgcaaggagcagcgtcccccgagcccacccgagacagacttgtctggcgagaagaagcagcgcagcaagacgtccagcccgagatttgcagaggatggcacagagcgacccagatcccgaacgtcgggcgtatctcgatccgattcgcgtcacgaggacaggtccaaagtctctatacactccaagacctcgagtcaggctacttacgtccaagccccgaagcgcccgccgcctcctcccccgtatgttaagaccgtggttgatgaggagtatatggtgagcgatgacaagactgctggcgctcgatcagctgcaacttctgttgctcccaaaagatcagtttctaccaaagcttccaagaccccaagcttagaatctgatgattccccgaactctgttcaagagtcatcgcccaagacacccactgccactcaacagttccctccaccgagggtctatcccagtcacaatactaacacgagttcctactcaacattcgaatatgacgacaaagatcgtcctactcctacagcaacccccgccacagattttggccccccacctccgcctcccccgccacctttggacattcaggaggcgccccgtgttgactacttactccagaacggtggtctgcatcacaagattcccaagaactttttggatgctctaccgcgccagaacggaactcggccctccaatccaccgttggcaggctgtgaaaccttgttcgcacccttcttcaacctcctcgaccagtatcagacagtcatccagaatcagggctcagttgcagtagccacgggtcacaagtcagtggcacgccgattactcgatcgcctagaggatgtcttttctcgcgatcttcccgttgagggatgcacgtgtatcatgtgcgaaaagactcaacatgaacacagaggtctgggttggggagaggttctcgaacgagttggtggcagggtggagatgccttcatggccgccatttgacctctccgctgtcgttgccacggctattgagaacactgccgaactgcctcccaggccgtcctctcccatcaagctcgaccccgatattggtgaggaatttcgtgagcactacttacgccaatcgaaaaaggtccggtcttccgtggacaagtggatgaataattgtgcagagacacccgctcctccgccctctgatgtggatgatgagacattgactttcgctattctgacaagcctcgagcaagaagagcgcccttatttcaatgctctagtttctggcgcaaaagagcttcagcctgccatgcgagcaccgacgccgatgagaaaacctcgaacggacttcatggtcaagaccggactccagctccagcgcctctatcgtcttccgcaggcaccccgagatgcagagaccgctgtgtatctcgtcaagaacccctttcatcatgatctactagctaccatgactgacattagcccccaagaatgggagattctcatttctggcaggttcgatgggttcctctggtctggtgccgatggcgacgatgccattacgcccactatggaaaatccgctttcgagaggtgcgacacccgccaaaggcttcttctcgcctcctccatcccgtggccctatgacgcctggcatgggaatgcgacagactcctggatttggcggttctcgtagcacgacgcctttctcggatgtttactcgcgcggtacgaccccagcctccttcatatctctctcttcttccacagcaccaggccataatcgcggccctgtctcccacgatgaagaagtcgagatggtcgctctggccgaaattgaacgagacatctaccggggcatggaggcattggaggacgcgtttgaaaagttgcatcatcgtgccgagatcgtacggaatgctcttcgacaacgcaataatggcttgatagcgaatcgtcaacaccgtcgtcccggacacattgatgttctcccccaactttcgggtggttcgtcggcctatgagaggcccccttgggcgactggcgatgatgacgccgttactagtgagagcgattggggtggtgatgatttcgatctggcccccgaagattcagcgagcaatatctcaagctccagacacagacgcccgaaacgaagaaccgagcgtcgaacccctgcacctattgaagaggacgaggaggagaactaggggttccacatatggaagatggacccacgcgtatacgagattacgaattgaacggtaattcatcctgatttgagcggaaagcaggatttctttccaaggcttttcggcttcttgcagataccacaccatacccgcatagcaccgttgattttaaattcgcttttggtggttgttcttcccgcatttgagattggcttttctcaagtttttgcatctggaagggtaggaatggcaaggaaaggacgggcggtggattgattacctacaaacaatagtacaaacgacagcaagaaaaggggaaagcccgctaggttctgcgaatcgagggtggctttgtttctccaccatgacttttcgtcccatctcatcagcatcacatccgaagttcgcttgcaaccgctgtggctgtgacaaaaagggagactgcccatggccgaaaggaaggagagaagcgagagaaaatacggagatgaggatcaatggaaaaggcaggatggcctgaagtctatactgatactgaccctgatgacggaggtgtgtaatgtagaccggtacgtagggtcttttaggagtcatagggcaggacattatgcatcgttatgcatcacatggcatggtaggcgttagttaattgagaaatgaaatggcatt

SEQ ID NO: 37879 - DNA, 1623 bp, Muscodor strobelii
  misc_feature: SGI cDNA ID NO. 573153
  misc_feature: Reduced expression when VOC is produced
  misc_feature: Encodes the peptide sequence at SEQ ID NO 37880
atggctgcagtcactaacggcgatgcagctgctgctctggacgacctgaagcctccccagggtgtggtcatccctcccaaagagtttcgaaatatcctcgagaagaccgccggatttgttgccagaagcggcctgcccttcgaagagcgtgtccgagagaaggagaggggcaaccccaagttcagcttcctgaatcccaccgatgcatacaacccctactacctatggaggctaagcgagatcaaggagggccgcggcaccgccgtggctgctggccgagtcggcgaggctgctgcccccgtcgatgagaagccaaagggccctcccgagcccgagagctttcagttctccgcgcgcatgcccaatatcagtgcccaggatctcgaggtcgttagactaaccgccctgttcgtcgcaaagaatggccgtcagttcatgaccgtcctatcccagcgtgagactggcaactaccagttcgactttctccgtcccacccacacccttcacatcttctttcaacatctaatcgatcagtactctctcctactccgagctggcggtatcgatggcgaaggcggaagcgtccagcaagaacgcgtcgccgagctccagaagaacgtcgatgataaatatcacgtcttgaaccgcgccaagaaccgcgccgaatggtccaaataccaggaaaccgagaagcaggccaaggaagaacaggagcagaaagagaagctctcgtatgcgcagatcgactggcacgactttactgttgtcgagactgtcgtgttcacggatgccgacgaccagtccaacctaccgccccccacgtccctgtccgagctgcaatatgcttcgctggagcagaaggccaagatctctgttagcgcaaacctacgcatcgaggaagccttcccatcggaagaagatgaggatttccatgctaatgggcaaaataacttcaatatcccacatcacccagcttacccggcccaacagccacctgcaccggcttaccagcctgcaccacccccaccgcaagctgcgttccagatggctccgcctcccagaccgaacggaacagcagaagacgaagaatcgcagaggatgcgtgagagagaagaggcacgtctgaggatgcagcaagcccaggctggcgccaaaggcggtgcgggcacgatgaagatcaaggagaactacgtcccccgcgccgctgcccgggccgccaatcggcaaggtacccagatggccctctgccctaattgtaaggagcagatacccatgaatgaactcgaggcacacatgcgcattgagcttcttgatccgcagtggaaggagcagaaggccaaggccgagtcgcggtatgcgacaaccaacctctcggactcagatgtggccaacaacctcaagcggttctccagccagcgagccgatatcttcgatccagtgacgggccagtcggtttcggaagaggagctagccagacggaaaagagtggcgctcaatagttttgacgggaacttggaaggccggaatcctgctcacatcagccacatgcagaacgtcaacgtcgatgaacaaattgctcggattcaccagaaatttgcaaaggacagccaacagacgcactga

SEQ ID NO: 37880 - protein, 540 aa, Muscodor strobelii
  misc_feature: SGI Peptide ID NO. 573153
  misc_feature (33)..(77): Pfam Id: PF01805 Pfam Desc: Surp module
  misc_feature (131)..(175): Pfam Id: PF01805 Pfam Desc: Surp module
  misc_feature (7)..(533): NCBI GI: 156056571 Blast Desc: SS1G_04016 [Sclerotinia sclerotiorum 1980] gi|154701802|gb|EDO01541.1| SS1G_04016 [Sclerotinia sclerotiorum 1980]
  misc_feature (1)..(533): NCBI GI: 256734266 Blast Desc: [Nectria haematococca mpVI 77-13-4]
  misc_feature (7)..(518): NCBI GI: 154291735 Blast Desc: BC1G_15158 [Botryotinia fuckeliana B05.10] gi|150846658|gb|EDN21851.1| BC1G_15158 [Botryotinia fuckeliana B05.10]
  misc_feature (1)..(533): NCBI GI: 46130658 Blast Desc: FG08933.1 [Gibberella zeae PH-1]
  misc_feature (28)..(533): NCBI GI: 116193827 Blast Desc: CHGG_06631 [Chaetomium globosum CBS 148.51] gi|88182544|gb|EAQ90012.1| CHGG_06631 [Chaetomium globosum CBS 148.51]
  misc_feature (3)..(533): NCBI GI: 171676203 Blast Desc: protein product [Podospora anserina] gi|170936167|emb|CAP60827.1| protein product [Podospora anserina]
  misc_feature (1)..(533): NCBI GI: 85118932 Blast Desc: NCU01913 [Neurospora crassa OR74A] gi|28927354|gb|EAA36308.1| conserved [Neurospora crassa OR74A]
  misc_feature (13)..(533): NCBI GI: 39970959 Blast Desc: MGG_02946 [Magnaporthe grisea 70-15] gi|145017222|gb|EDK01585.1| MGG_02946 [Magnaporthe grisea 70-15]
  misc_feature (13)..(533): NCBI GI: 149210489 Blast Desc: MGCH7_ch7g719 [Magnaporthe grisea 70-15] gi|86196674|gb|EAQ71312.1| MGCH7_ch7g719 [Magnaporthe grisea 70-15]
  misc_feature (5)..(532): NCBI GI: 121704798 Blast Desc: pre-mRNA splicing factor, [Aspergillus clavatus NRRL 1] gi|119398808|gb|EAW09236.1| pre-mRNA splicing factor, [Aspergillus clavatus NRRL 1]
  misc_feature: Useful for introducing or modulating the production of volatile compounds
MAAVTNGDAAAALDDLKPPQGVVIPPKEFRNILEKTAGFVARSGLPFEERVREKERGNPKFSFLNPTDAYNPYYLWRLSEIKEGRGTAVAAGRVGEAAAPVDEKPKGPPEPESFQFSARMPNISAQDLEVVRLTALFVAKNGRQFMTVLSQRETGNYQFDFLRPTHTLHIFFQHLIDQYSLLLRAGGIDGEGGSVQQERVAELQKNVDDKYHVLNRAKNRAEWSKYQETEKQAKEEQEQKEKLSYAQIDWHDFTVVETVVFTDADDQSNLPPPTSLSELQYASLEQKAKISVSANLRIEEAFPSEEDEDFHANGQNNFNIPHHPAYPAQQPPAPAYQPAPPPPQAAFQMAPPPRPNGTAEDEESQRMREREEARLRMQQAQAGAKGGAGTMKIKENYVPRAAARAANRQGTQMALCPNCKEQIPMNELEAHMRIELLDPQWKEQKAKAESRYATTNLSDSDVANNLKRFSSQRADIFDPVTGQSVSEEELARRKRVALNSFDGNLEGRNPAHISHMQNVNVDEQIARIHQKFAKDSQQTH

SEQ ID NO: 37881 - DNA, 2502 bp, Muscodor strobelii
  misc_feature: SGI EST ID NO. CUFF.91261.1
  misc_feature: Variant of the nucleotide sequence at SEQ ID NO 37879
cgacaacgcacaacgcctggaccgcgcagccagtgcacctcgacagccatctcgcgccgactatcatccgactcgctgcggcgctgagtattgcacagcgacgacgattatatcggaaacgtcaaggaggctgctgctctggacgacctgaagcctccccagggtgtggtcatccctcccaaagagtttcgaaatatcctcgagaagaccgccggatttgttgccagaagcggcctgcccttcgaagagcgtgtccgagagaaggagaggggcaaccccaagttcagcttcctgaatcccaccgatgcatacaacccctactacctatggaggctaagcgagatcaaggagggccgcggcaccgccgtggctgctggccgagtcggcgaggctgctgcccccgtcgatgagaagccaaagggccctcccgagcccgagagctttcagttctccgcgcgcatgcccaatatcagtgcccaggatctcgaggtcgttagactaaccgccctgttcgtcgcaaagaatggccgtcagttcatgaccgtcctatcccagcgtgagactggcaactaccagttcgactttctccgtcccacccacacccttcacatcttctttcaacatctaatcgatcagtactctctcctactccgagctggcggtatcgatggcgaaggcggaagcgtccagcaagaacgcgtcgccgagctccagaagaacgtcgatgataaatatcacgtcttgaaccgcgccaagaaccgcgccgaatggtccaaataccaggaaaccgagaagcaggccaaggaagaacaggagcagaaagagaagctctcgtatgcgcagatcgactggcacgactttactgttgtcgagactgtcgtgttcacggatgccgacgaccagtccaacctaccgccccccacgtccctgtccgagctgcaatatgcttcgctggagcagaaggccaagatctctgttagcgcaaacctacgcatcgaggaagccttcccatcggaagaagatgaggatttccatgctaatgggcaaaataacttcaatatcccacatcacccagcttacccggcccaacagccacctgcaccggcttaccagcctgcaccacccccaccgcaagctgcgttccagatggctccgcctcccagaccgaacggaacagcagaagacgaagaatcgcagaggatgcgtgagagagaagaggcacgtctgaggatgcagcaagcccaggctggcgccaaaggcggtgcgggcacgatgaagatcaaggagaactacgtcccccgcgccgctgcccgggccgccaatcggcaaggtacccagatggccctctgccctaattgtaaggagcagatacccatgaatgaactcgaggcacacatgcgcattgagcttcttgatccgcagtggaaggagcagaaggccaaggccgagtcgcggtatgcgacaaccaacctctcggactcagatgtggccaacaacctcaagcggttctccagccagcgagccgatatcttcgatccagtgacgggccagtcggtttcggaagaggagctagccagacggaaaagagtggcgctcaatagttttgacgggaacttggaaggccggaatcctgctcacatcagccacatgcagaacgtcaacgtcgatgaacaaattgctcggattcaccagaaatttgcaaaggacagccaacagacgcactgattaggggcacagtgatattctcgacgggacggatatcattgctcattcagggacaactaccgtatgaattaagagcatctcaggtcttgaactccagatgagcagccggaagaaaacctcggtggctactttgatggacacatggccaggctacaaatcctggcttttgatacaacagtcgctccagatgatgaggagagagcgttgaggtcgaccaattgtatagtaagggttcgctgcaaggtacacaaaaagaaaattttggttcatgtacaggtaaacaatgcccatcatgtcgagcgttgatcattgtcgatcgaggcttgcattcgtgtacttttcatagcactgattcaggaaacagactctcacagtctatgcttgtagccatatagaggccaagagaccactccggcatggttacagtggtcctgaaatacaattaaattgtcgaaacgcattggatcatgttcgaaacgcaagtcactatcttaccttggcatacttgtattagtctgcgtcgtggaagtctgctctgcaaatgtaactgtattttatatggtcacgatatgggagtacaagtgtgattggagtgattgcatagctgttggtgataaatgttcagcatcttctcagcgcgctaaggtgaaaccaggtgcactaaggcattgactgctttggcccgccacaaactttgcatgcattcaaacctctatgtgaatgttagatattagtaattagataagtgatatacaggcgagttgataatacttggcc

SEQ ID NO: 37882 - DNA, 2784 bp, Muscodor strobelii
  misc_feature: SGI cDNA ID NO. 573154
  misc_feature: Reduced expression when VOC is produced
  misc_feature: Encodes the peptide sequence at SEQ ID NO 37883
atgggcaaatccaactccaccaagccgtccgcggcaaagggaggctacgctcctctgaagcagcccaagcaggtcaacgacgactacacctcggacggcgtggtagacaacgatgtcttcctgctgcccgtctctgactactactggatgatgctcgtcaccgtcctcggtgctatcgtgcgagtcttccgcatataccagcccaccagtgtcgtcttcgatgaggtccacttcggcggcttcgctaccaagtatatcaagggcaagttcttcatggatgtccaccctcccctcgccaagatgctcattgctctcgccggatggttggctggcttcactggagacttcgacttcaaggagatcggcaaggactacgtcgagccaggtgtgccatatgtggccatgcgcatgttcccggccatttgcggaatcctcttgatccccaccgccttcttgactctcaaggctgttggatgccgcactgctactgccgtcatgggcgcttcgttgctcgtctttgagaacggtcttctgacccaagctcgtcttatcctcctcgactccccgcttatgatcgctgtcgccttcaccgccatggctttcacctcgttcacgaaccagcatgagcaaggccctcccaaggccttcgatattagctggtggttctggctcgtcatgactggtctgggccttggtgtctgcctcagcatcaaatgggtcggccttttcacctttgcctgggtcggttgtttgactcttgtccagctctgggtcctgctcggagacaccaagacagtcacgatgcgcatattcgccaagcacttcatggcccgtgctttctgcctcatcatcatccccattaccttctacatggccatgttcggtatccacttcctgatcctgaccaaccctggtgatggcgatggattcatgagctccgaattccaagctaccctgaacaacaagggcatgcaggatgttccggtcgatgtcgccttcggcagtcgtgtctccattcgccatgtcaacacccaaggaggctatcttcactcccatcctcttatgtacccgaccggcagtcaacagcagcaaatcaccctctaccctcacaaggacgagaacaatgtctggcttctcgagaatcaaacccagcccctggaccccaatggcgtcgagatgaatggtactcatgtatgggataacgtcaagaacatgacggagaactatatcagggatggtgatgttcttcgactttaccacatccagacccaccgtcgcctgcactcccatgacgtccggccaccagtcagtgagcaggagtggcaaaatgaagtgtctgcttatggttacgagggcttccctggcgatgcaaacgatcttttccgagtcgagattgtgaagaagcaatctctcacgagtgaagctggggagcgacttcgaactatccagagcaaattcagacttgtccatatcatgacgggatgtgtgttgttctctcacaaggtcaagcttcccgagtgggcgtcagagcaacaagaggtaacatgcgccaaaggcggtactatccccaacagtctttggtacattgagggcaacatgcatccggcacttccggaagatgccgagaaggtgaactacgtcaatcctggattccttggaaagttctgggagttgcaaaaggtcatgtggaagaccaatgccgggctcgttgagtcccatgcttgggattcgcgccctgagtcttggcctatccttcgccgtggtatcaacttttggggcaggcataaccgacaaatctatctgattggtaatccctttgtctggtggacctctactcttgccgttgttctctacgttgctatcaagggcctggctgttcttcgctggcaacgaagctgcaacgactatgccaacgtcacattcaagcgattcgactacgaggtcggcacgtgggtgcttggttgggcccttcactacttcccattcttcatcatgggacgccagcttttcttgcaccattatttccctgcactatttttcgctgtcctggccttctgccagatatttgaatatgctaccacccggattccgattcccgctattcgaaacaacccgatcgttaacaagattggcgttgtcgccatcttggccgtcacgagcgttgtattcgctctttacgccccgttggcatatggaaatgcttggactaagtcggagtgccagcgtgtcaagctttttgagctctgggattgggactgcaacacattcctcgatacctatgatgcatacaatgcactcgacacaaatccaattccgagctctgcggcaccatccatagacgccaagccgaacaacccttctaccgaggaatccccaaacggggtaatctctggggctcccaagttcgagccccagggacaaaaggtggtaggccgggaggagaggatcgagtaccgagaccaggacgggaatctcctcgacgaagagcaagtgaaagctctagagggcaaagtcgagttcaaaaccaagtacgaaacgaggacgcgcgtgatcgacggcgacggcaacgaagtgccaattccgccagaagagctagccgcagccggcgtggcgccgccacacccagacgtgcagggagctaaccaagaaaccaaaaaggtagctcaagacagcgctgctccttcagaggcttcgccgagtaaggacggggaggtagaatcggaacggtctgcccctaagccagccagcgaagggaatgaagctactgttcaaaaagaggcttga

SEQ ID NO: 37883 - protein, 927 aa, Muscodor strobelii
  misc_feature: SGI Peptide ID NO. 573154
  misc_feature (347)..(538): Pfam Id: PF02815 Pfam Desc: MIR domain
  misc_feature (51)..(302): Pfam Id: PF02366 Pfam Desc: Dolichyl-phosphate-mannose-protein mannosyltransferase
  misc_feature (13)..(924): NCBI GI: 121704800 Blast Desc: protein mannosyltransferase 1 [Aspergillus clavatus NRRL 1] gi|119398809|gb|EAW09237.1| protein mannosyltransferase 1 [Aspergillus clavatus NRRL 1]
  misc_feature (13)..(922): NCBI GI: 71000555 Blast Desc: protein mannosyltransferase 1 [Aspergillus fumigatus Af293] gi|66852598|gb|EAL92923.1| protein mannosyltransferase 1 [Aspergillus fumigatus Af293] gi|159127974|gb|EDP53089.1| protein
  misc_feature (32)..(922): NCBI GI: 145245359 Blast Desc: An11g09890 [Aspergillus niger] gi|134079647|emb|CAK97073.1| protein product [Aspergillus niger]
  misc_feature (20)..(922): NCBI GI: 255945045 Blast Desc: Pc20g07670 [Penicillium chrysogenum Wisconsin 54-1255] gi|211588025|emb|CAP86096.1| Pc20g07670 [Penicillium chrysogenum Wisconsin 54-1255]
  misc_feature (20)..(922): NCBI GI: 67537182 Blast Desc: AN4761.2 [Aspergillus nidulans FGSC A4] gi|40741613|gb|EAA60803.1| AN4761.2 [Aspergillus nidulans FGSC A4] gi|259482397|tpe|CBF76842.1| TPA: protein mannosyltransferase
  misc_feature (11)..(922): NCBI GI: 115402577 Blast Desc: ATEG_08779 [Aspergillus terreus NIH2624] gi|114189211|gb|EAU30911.1| ATEG_08779 [Aspergillus terreus NIH2624]
  misc_feature (28)..(922): NCBI GI: 238505946 Blast Desc: protein mannosyltransferase 1 [Aspergillus flavus NRRL3357] gi|220690289|gb|EED46639.1| protein mannosyltransferase 1 [Aspergillus flavus NRRL3357]
  misc_feature (9)..(927): NCBI GI: 226279297 Blast Desc: dolichyl-phosphate-mannose-protein mannosyltransferase [Paracoccidioides brasiliensis Pb01]
  misc_feature (28)..(922): NCBI GI: 169780016 Blast Desc: [Aspergillus oryzae RIB40] gi|83773212|dbj|BAE63339.1| protein product [Aspergillus oryzae]
  misc_feature (20)..(782): NCBI GI: 119192122 Blast Desc: dolichyl-phosphate-mannose--protein mannosyltransferase [Coccidioides immitis RS]
  misc_feature (48)..(778): SWISSPROT Homolog: EC 2.4.1.109 Dolichyl-phosphate-mannose-protein mannosyltransferase
  misc_feature: Useful for introducing or modulating the production of volatile compounds
MGKSNSTKPSAAKGGYAPLKQPKQVNDDYTSDGVVDNDVFLLPVSDYYWMMLVTVLGAIVRVFRIYQPTSVVFDEVHFGGFATKYIKGKFFMDVHPPLAKMLIALAGWLAGFTGDFDFKEIGKDYVEPGVPYVAMRMFPAICGILLIPTAFLTLKAVGCRTATAVMGASLLVFENGLLTQARLILLDSPLMIAVAFTAMAFTSFTNQHEQGPPKAFDISWWFWLVMTGLGLGVCLSIKWVGLFTFAWVGCLTLVQLWVLLGDTKTVTMRIFAKHFMARAFCLIIIPITFYMAMFGIHFLILTNPGDGDGFMSSEFQATLNNKGMQDVPVDVAFGSRVSIRHVNTQGGYLHSHPLMYPTGSQQQQITLYPHKDENNVWLLENQTQPLDPNGVEMNGTHVWDNVKNMTENYIRDGDVLRLYHIQTHRRLHSHDVRPPVSEQEWQNEVSAYGYEGFPGDANDLFRVEIVKKQSLTSEAGERLRTIQSKFRLVHIMTGCVLFSHKVKLPEWASEQQEVTCAKGGTIPNSLWYIEGNMHPALPEDAEKVNYVNPGFLGKFWELQKVMWKTNAGLVESHAWDSRPESWPILRRGINFWGRHNRQIYLIGNPFVWWTSTLAVVLYVAIKGLAVLRWQRSCNDYANVTFKRFDYEVGTWVLGWALHYFPFFIMGRQLFLHHYFPALFFAVLAFCQIFEYATTRIPIPAIRNNPIVNKIGVVAILAVTSVVFALYAPLAYGNAWTKSECQRVKLFELWDWDCNTFLDTYDAYNALDTNPIPSSAAPSIDAKPNNPSTEESPNGVISGAPKFEPQGQKVVGREERIEYRDQDGNLLDEEQVKALEGKVEFKTKYETRTRVIDGDGNEVPIPPEELAAAGVAPPHPDVQGANQETKKVAQDSAAPSEASPSKDGEVESERSAPKPASEGNEATVQKEA

SEQ ID NO: 37884 - DNA, 3840 bp, Muscodor strobelii
  misc_feature: SGI EST ID NO. CUFF.91796.0
  misc_feature: Variant of the nucleotide sequence at SEQ ID NO 37882
ggcgcaacctaggactcgtattcttgcagtggtgtttcatcgacctcactgtcaagcactgtcactatcgaaacactgacggcgcctatccaatagtcggatggcagctggagctgaaaaaagggaccccatctgtgccacattgcgcccctacccctagccccctgccggcactatactcgtcgtatacaccgtccaggccaatttgcatgaggccacttcagcaacaccacaataggagctccaaaatagcagcagctgctacccgtggtcattgatctgctgcccctgaggaaacatttcccgttcttcgttctcctccatccacggcttcgcgaccactcctccaccgcattgcattgggtgtcttttttatcacctcttcacctcttctgcccttcttatctgtgtgcatacgggctctgccttgttatgccactgtccaagttgtaattgacattttgacacttcttgactctcgttaatctaaccaatctgacatcaatttcatttcttcccgtcctgcccttcagtcctacgtgtgctgtgtaccgttgtgcaaattgaccacctcttactcaaccaccgcccgcccgagctcgagttccgagtgtcgagagccttgccacaactcctcgacccccttttctccttcccaaaacccggacactggtgctcttcgaccgcgttgagccacaacctgcacattgcccaccatgggcaaatccaactccaccaagccgtccgcggcaaagggaggctacgctcctctgaagcagcccaagcaggtcaacgacgactacacctcggacggcgtggtagacaacgatgtcttcctgctgcccgtctctgactactactggatgatgctcgtcaccgtcctcggtgctatcgtgcgagtcttccgcatataccagcccaccagtgtcgtcttcgatgaggtccacttcggcggcttcgctaccaagtatatcaagggcaagttcttcatggatgtccaccctcccctcgccaagatgctcattgctctcgccggatggttggctggcttcactggagacttcgacttcaaggagatcggcaaggactacgtcgagccaggtgtgccatatgtggccatgcgcatgttcccggccatttgcggaatcctcttgatccccaccgccttcttgactctcaaggctgttggatgccgcactgctactgccgtcatgggcgcttcgttgctcgtctttgagaacggtcttctgacccaagctcgtcttatcctcctcgactccccgcttatgatcgctgtcgccttcaccgccatggctttcacctcgttcacgaaccagcatgagcaaggccctcccaaggccttcgatattagctggtggttctggctcgtcatgactggtctgggccttggtgtctgcctcagcatcaaatgggtcggccttttcacctttgcctgggtcggttgtttgactcttgtccagctctgggtcctgctcggagacaccaagacagtcacgatgcgcatattcgccaagcacttcatggcccgtgctttctgcctcatcatcatccccattaccttctacatggccatgttcggtatccacttcctgatcctgaccaaccctggtgatggcgatggattcatgagctccgaattccaagctaccctgaacaacaagggcatgcaggatgttccggtcgatgtcgccttcggcagtcgtgtctccattcgccatgtcaacacccaaggaggctatcttcactcccatcctcttatgtacccgaccggcagtcaacagcagcaaatcaccctctaccctcacaaggacgagaacaatgtctggcttctcgagaatcaaacccagcccctggaccccaatggcgtcgagatgaatggtactcatgtatgggataacgtcaagaacatgacggagaactatatcagggatggtgatgttcttcgactttaccacatccagacccaccgtcgcctgcactcccatgacgtccggccaccagtcagtgagcaggagtggcaaaatgaagtgtctgcttatggttacgagggcttccctggcgatgcaaacgatcttttccgagtcgagattgtgaagaagcaatctctcacgagtgaagctggggagcgacttcgaactatccagagcaaattcagacttgtccatatcatgacgggatgtgtgttgttctctcacaaggtcaagcttcccgagtgggcgtcagagcaacaagaggtaacatgcgccaaaggcggtactatccccaacagtctttggtacattgagggcaacatgcatccggcacttccggaagatgccgagaaggtgaactacgtcaatcctggattccttggaaagttctgggagttgcaaaaggtcatgtggaagaccaatgccgggctcgttgagtcccatgcttgggattcgcgccctgagtcttggcctatccttcgccgtggtatcaacttttggggcaggcataaccgacaaatctatctgattggtaatccctttgtctggtggacctctactcttgccgttgttctctacgttgctatcaagggcctggctgttcttcgctggcaacgaagctgcaacgactatgccaacgtcacattcaagcgattcgactacgaggtcggcacgtgggtgcttggttgggcccttcactacttcccattcttcatcatgggacgccagcttttcttgcaccattatttccctgcactatttttcgctgtcctggccttctgccagatatttgaatatgctaccacccggattccgattcccgctattcgaaacaacccgatcgttaacaagattggcgttgtcgccatcttggccgtcacgagcgttgtattcgctctttacgccccgttggcatatggaaatgcttggactaagtcggagtgccagcgtgtcaagctttttgagctctgggattgggactgcaacacattcctcgatacctatgatgcatacaatgcactcgacacaaatccaattccgagctctgcggcaccatccatagacgccaagccgaacaacccttctaccgaggaatccccaaacggggtaatctctggggctcccaagttcgagccccagggacaaaaggtggtaggccgggaggagaggatcgagtaccgagaccaggacgggaatctcctcgacgaagagcaagtgaaagctctagagggcaaagtcgagttcaaaaccaagtacgaaacgaggacgcgcgtgatcgacggcgacggcaacgaagtgccaattccgccagaagagctagccgcagccggcgtggcgccgccacacccagacgtgcagggagctaaccaagaaaccaaaaaggtagctcaagacagcgctgctccttcagaggcttcgccgagtaaggacggggaggtagaatcggaacggtctgcccctaagccagccagcgaagggaatgaagctactgttcaaaaagaggcttgaagatagcaagctacattgatgttataaccacactataactcacgatatagagaaatcggcgtttgtacttggccgtccaggcttgttaccgagcgggaatgaaacgtttgtctctattttctgtacactaccaatctactaatcatgagattcgggtgaaatgttgggaacgggggatgtgaacaaaaaatgaaaaatgcattgggcggttatatcgaggcaaagggcgacggagcctcgtcgcaaaacactacttgctgcgtgtcatcgctggcaatctatctcctttaatagaagaacctcttcaatctgtgtattttccgctttgttaagagtgacg

SEQ ID NO: 37885 - DNA, 1218 bp, Muscodor strobelii
  misc_feature: SGI cDNA ID NO. 573155
  misc_feature: Encodes the peptide sequence at SEQ ID NO 37886
atggctgagttatcaataacatgccactgcggcaccgccgctcaaacagtccgtctgagaggttccgggacgcacgatgttgatttgtgtcattgtgtggcttgtcgacatactactggggtgttgtgcacgagttatctggtgattgaacgaccggggagggtcgagggacttgttgagtatacggcgagggaagataagggcccggggggagagtgcctcacgagtttgttttgtggggtgtgcggatgtcatgttttcaatagtagtataggggaggaagagtggatggttgctactggggttattgttggtgaggtggacgatgatggtgaggtgaaagagggagagggagagggaaagggaaaggaaagggaagagttgtggaggtttgtacgacatgttgggacggatggtaccagagatggtggattgagccagtttatacgggatattggggggcgagaagttggggtttgtggtaggtcgggtgagggcttgcggagcgaaacgcgagagagggagaagacgagcgaggaaaaggtgctggatgggtactgtcattgcaaaaacgttcgcttccatatcacaagacccgatgcagcgagttcgaatccgaagtcggggtttccggatcttatgattccgtatcatactggtaccgaagagattaagaatccacgagatgtgaagtggtggttacgtcctcctcctcctggggctgatcccgcggaggaggagagtgaggagaggaaaacgagatatatggccgggacttgcgcgtgtcgctcctgtcgcctgatttcagggttcgagattcagacttgggcctttgtcccgaaggcgaatatcttcttccatgtgccatcatccaacgacggggacgactcatcgacgataacgataccccttgactttgagacgctcccgaagggcatattgtcttcgtatgagagtaaagctggtgttcgccgagaattctgtgctaggtgcggcgcgacggttttctggagagatcgttggaggagcgatcttatggatgttagtgttgggcttctcgatgctagagagggtgcgagggcggagaactggctggattggtggagggagagggttagttttgaggaggaggctgggacggggaggttgggtgatgtgaagagggatgcggaggaattggttgggagtttggctagggggttgaaggaggtggcataa

SEQ ID NO: 37886 - protein, 405 aa, Muscodor strobelii
  misc_feature: SGI Peptide ID NO. 573155
  misc_feature (258)..(370): Pfam Id: PF04828 Pfam Desc: Glutathione-dependent formaldehyde-activating enzyme
  misc_feature (310)..(370): Pfam Id: PF04828 Pfam Desc: Glutathione-dependent formaldehyde-activating enzyme
  misc_feature (4)..(402): NCBI GI: 256728456 Blast Desc: NECHADRAFT_54314 [Nectria haematococca mpVI 77-13-4]
  misc_feature (6)..(402): NCBI GI: 145247911 Blast Desc: An13g00640 [Aspergillus niger] gi|134080950|emb|CAK41465.1| protein product [Aspergillus niger]
  misc_feature (6)..(378): NCBI GI: 119482614 Blast Desc: NFIA_025100 [Neosartorya fischeri NRRL 181] gi|119409490|gb|EAW19438.1| conserved [Neosartorya fischeri NRRL 181]
  misc_feature (6)..(378): NCBI GI: 159123132 Blast Desc: DUF636 domain protein [Aspergillus fumigatus A1163]
  misc_feature (6)..(378): NCBI GI: 70987235 Blast Desc: DUF636 domain protein [Aspergillus fumigatus Af293] gi|66846726|gb|EAL87058.1| DUF636 domain protein [Aspergillus fumigatus Af293]
  misc_feature (3)..(378): NCBI GI: 67539050 Blast Desc: AN5695.2 [Aspergillus nidulans FGSC A4] gi|40743598|gb|EAA62788.1| AN5695.2 [Aspergillus nidulans FGSC A4] gi|259484831|tpe|CBF81389.1| TPA: DUF636 domain protein FGSC
  misc_feature (5)..(402): NCBI GI: 255953513 Blast Desc: Pc21g04630 [Penicillium chrysogenum Wisconsin 54-1255] gi|211589220|emb|CAP95360.1| Pc21g04630 [Penicillium chrysogenum Wisconsin 54-1255]
  misc_feature (25)..(402): NCBI GI: 242775364 Blast Desc: DUF636 domain protein [Talaromyces stipitatus ATCC 10500] gi|218722248|gb|EED21666.1| DUF636 domain protein [Talaromyces stipitatus ATCC 10500]
  misc_feature (6)..(376): NCBI GI: 115395042 Blast Desc: conserved [Aspergillus terreus NIH2624] gi|114193039|gb|EAU34739.1| conserved [Aspergillus terreus NIH2624]
  misc_feature (5)..(353): NCBI GI: 212532363 Blast Desc: DUF636 domain protein [Penicillium marneffei ATCC 18224] gi|210071702|gb|EEA25791.1| DUF636 domain protein [Penicillium marneffei ATCC 18224]
MAELSITCHCGTAAQTVRLRGSGTHDVDLCHCVACRHTTGVLCTSYLVIERPGRVEGLVEYTAREDKGPGGECLTSLFCGVCGCHVFNSSIGEEEWMVATGVIVGEVDDDGEVKEGEGEGKGKEREELWRFVRHVGTDGTRDGGLSQFIRDIGGREVGVCGRSGEGLRSETREREKTSEEKVLDGYCHCKNVRFHITRPDAASSNPKSGFPDLMIPYHTGTEEIKNPRDVKWWLRPPPPGADPAEEESEERKTRYMAGTCACRSCRLISGFEIQTWAFVPKANIFFHVPSSNDGDDSSTITIPLDFETLPKGILSSYESKAGVRREFCARCGATVFWRDRWRSDLMDVSVGLLDAREGARAENWLDWWRERVSFEEEAGTGRLGDVKRDAEELVGSLARGLKEVA

SEQ ID NO: 37887 - DNA, 672 bp, Muscodor strobelii
  misc_feature: SGI EST ID NO. CUFF.91802.0
  misc_feature: Variant of the nucleotide sequence at SEQ ID NO 37885
ggaaaacgagatatatggccgggacttgcgcgtgtcgctcctgtcgcctgatttcagggttcgagattcagacttgggcctttgtcccgaaggcgaatatcttcttccatgtgccatcatccaacgacggggacgactcatcgacgataacgataccccttgactttgagacgctcccgaagggcatattgtcttcgtatgagagtaaagctggtgttcgccgagaattctgtgctaggtgcggcgcgacggttttctggagagatcgttggaggagcgatcttatggatgttagtgttgggcttctcgatgctagagagggtgcgagggcggagaactggctggattggtggagggagagggttagttttgaggaggaggctgggacggggaggttgggtgatgtgaagagggatgcggaggaattggttgggagtttggctagggggttgaaggaggtggcataatggtttgaggagtgaataggagataagaaatagtgatatgatcgggtcaagatggggaagaacggagtggtttcgttttgtgctcatactctttggcagacggtattacgtcttgcgaagaggctgtgtgattgaaggagctaggtcgctttctgaattctgtactttgtaaccagtgcaaagacgcaaattatatcgtatacta

SEQ ID NO: 37888 - DNA, 1083 bp, Muscodor strobelii
  misc_feature: SGI cDNA ID NO. 573156
  misc_feature: Encodes the peptide sequence at SEQ ID NO 37889
atgactgccacgacctactcagaattcggtgcggacaccgaagcgcttgaggttgctaaagcatttgctcaaggcatcgtgggcaagacgatcctcgtaacaggggtaaatccgggaggtattggttttacagccgcacaggcttttgcatcgcagtcccctgcgcatctcattgtggccggtcgcaatgagtcaaaactcaatgaagcgattaagaagatgaaggccgactaccctgatgttgactatcgcactcttatagtcaatcttggaagccagaaatcagttcgcacagcagcagcagacatcctctcccgggatgatataccagctatcgacataattgtcaacagcgctggtattatgggcgttgacgagcgaacccttagcgaagatggtatagagctacactttgcgactaaccatatcggtcattggctcctgtcctgccttctcatgcccaaattgatgaaatcagctaaggcaaacccaaaggggaccaccaggatagtgaacgtatctgctcagtcacctacaactggagtcatgcgattcagcgacatcaatttcgacaagctgaacaaggacttgcctactgaggagcagccaatctacccacagatcgaattctggggttacaaagacgtacagaatcagaaatataccggcatacaggggtatggccagagtaaagtggccaatcttctgttcggtatcgaagccaataaaaggctgtatgaaaagcacggcatcttgacactgggtgtccatccaggagtaatcagaggcacagagcttggccgaaatttcccggccgaaaacattgccgtcgtgaacgagtttatgagctccggcgcatttgcgaccaagtcggttggtgcaggatcgtcaacatctctcgttgcggcactggacccgaagcttggagtcgctgaagccaagaatggacaggaaaactatggcgcatacatggctgactgccaaatcaacgaaacggccaatccacgcgcggtatcgagctcagaagcagagaagctatggaagttgtctgaggagttggttcagcagaaattcgactggtaa

SEQ ID NO: 37889 - protein, 360 aa, Muscodor strobelii
  misc_feature: SGI Peptide ID NO. 573156
  misc_feature (29)..(194): Pfam Id: PF00106 Pfam Desc: short chain dehydrogenase
  misc_feature (1)..(360): NCBI GI: 242812765 Blast Desc: short-chain dehydrogenase, [Talaromyces stipitatus ATCC 10500] gi|218714364|gb|EED13787.1| short-chain dehydrogenase, [Talaromyces stipitatus ATCC 10500]
  misc_feature (1)..(360): NCBI GI: 46120814 Blast Desc: FG04938.1 [Gibberella zeae PH-1]
  misc_feature (4)..(360): NCBI GI: 212544574 Blast Desc: short-chain dehydrogenase, [Penicillium marneffei ATCC 18224] gi|210065410|gb|EEA19504.1| short-chain dehydrogenase, [Penicillium marneffei ATCC 18224]
  misc_feature (1)..(360): NCBI GI: 116202819 Blast Desc: CHGG_09294 [Chaetomium globosum CBS 148.51] gi|88177812|gb|EAQ85280.1| CHGG_09294 [Chaetomium globosum CBS 148.51]
  misc_feature (5)..(358): NCBI GI: 240277511 Blast Desc: oxidoreductase [Ajellomyces capsulatus H143]
  misc_feature (5)..(358): NCBI GI: 154285114 Blast Desc: [Ajellomyces capsulatus NAm1] gi|150406993|gb|EDN02534.1| [Ajellomyces capsulatus NAm1]
  misc_feature (5)..(358): NCBI GI: 225556965 Blast Desc: oxidoreductase [Ajellomyces capsulatus G186AR]
  misc_feature (4)..(358): NCBI GI: 226281700 Blast Desc: retinol dehydrogenase [Paracoccidioides brasiliensis Pb01]
  misc_feature (4)..(358): NCBI GI: 226291192 Blast Desc: retinol dehydrogenase [Paracoccidioides brasiliensis Pb18]
  misc_feature (5)..(358): NCBI GI: 239612426 Blast Desc: short-chain dehydrogenase [Ajellomyces dermatitidis ER-3]
  misc_feature (30)..(353): SWISSPROT Homolog: EC 1.3.1.33 Protochlorophyllide reductase
MTATTYSEFGADTEALEVAKAFAQGIVGKTILVTGVNPGGIGFTAAQAFASQSPAHLIVAGRNESKLNEAIKKMKADYPDVDYRTLIVNLGSQKSVRTAAADILSRDDIPAIDIIVNSAGIMGVDERTLSEDGIELHFATNHIGHWLLSCLLMPKLMKSAKANPKGTTRIVNVSAQSPTTGVMRFSDINFDKLNKDLPTEEQPIYPQIEFWGYKDVQNQKYTGIQGYGQSKVANLLFGIEANKRLYEKHGILTLGVHPGVIRGTELGRNFPAENIAVVNEFMSSGAFATKSVGAGSSTSLVAALDPKLGVAEAKNGQENYGAYMADCQINETANPRAVSSSEAEKLWKLSEELVQQKFDW

SEQ ID NO: 37890 - DNA, 697 bp, Muscodor strobelii
  misc_feature: SGI EST ID NO. CUFF.90718.0
  misc_feature: Variant of the nucleotide sequence at SEQ ID NO 37888
agcgaggtggccgcgggctaccgaatagccacactgggcgccaattcccttgacacgggttggtgtataagtagaggcggtattccacagcgttcctgagtgttcaaagatattatccatcaagccttttacctgatatcttagctacacaaaacaccctccgcattcccaggcgctactattgccatgactgccacgacctactcagaattcggtgcggacaccgaagcgcttgaggttgctaaagcatttgctcaaggcatcgtgggcaagacgatcctcgtaacaggggtaaatccgggaggtattggttttacagccgcacaggcttttgcatcgcagtcccctgcgcatctcattgtggccggtcgcaatgagtcaaaactcaatgaagcgattaagaagatgaaggccgactaccctgatgttgactatcgcactcttatagtcaatcttggaagccagaaatcagttcgcacagcagcagcagacatcctctcccgggatgatataccagctatcgacataattgtcaacagcgctggtattatgggcgttgacgagcgaacccttagcgaagatggtatagagctacactttgcgactaaccatatcggtcattggctcctgtcctgccttctcatgcccaaattgatgaaatcagctaaggcaaacccaaaggggaccaccaggatag

SEQ ID NO: 37891 - DNA, 438 bp, Muscodor strobelii
  misc_feature: SGI cDNA ID NO. 573157
  misc_feature: Encodes the peptide sequence at SEQ ID NO 37892
tatgaacccatcaacgacactcccatcgcggtatccattgaaacgaagaccaccaccgtctctcgtgaccctttattacaactaggaatatgggtggcagcctggcacaagcgcatgtacgacttacgtcgtatacgattgcggcttctaccgccgccagagccaaacaacgggcacgaagtccgaaaccagacgcaatctcccacaatccctaatctggtcaccgtacccctgatagttgtcgtcgcccacgagtgggatgcatattttgcctccgacaacggcagttcgatcaccatgtttggtcccgtcccgctcggttcaactaaaactatcttaaagatctactctttattagaatcgctgaaggcgatcaggaagtgggcggagtccacatttcttgacgatcttgcaacttggttcatctgcaacgcctaa

SEQ ID NO: 37892 - protein, 145 aa, Muscodor strobelii
  misc_feature: SGI Peptide ID NO. 573157
  misc_feature (1)..(133): NCBI GI: 256719922 Blast Desc: NECHADRAFT_4538 [Nectria haematococca mpVI 77-13-4]
  misc_feature (1)..(142): NCBI GI: 116194203 Blast Desc: CHGG_06819 [Chaetomium globosum CBS 148.51] gi|88182732|gb|EAQ90200.1| CHGG_06819 [Chaetomium globosum CBS 148.51]
  misc_feature (1)..(133): NCBI GI: 116194328 Blast Desc: CHGG_03762 [Chaetomium globosum CBS 148.51] gi|88179675|gb|EAQ87143.1| CHGG_03762 [Chaetomium globosum CBS 148.51]
  misc_feature (1)..(141): NCBI GI: 149209015 Blast Desc: MGCH7_ch7g3 [Magnaporthe grisea 70-15] gi|86195958|gb|EAQ70596.1| MGCH7_ch7g3 [Magnaporthe grisea 70-15]
  misc_feature (1)..(119): NCBI GI: 116197324 Blast Desc: CHGG_05260 [Chaetomium globosum CBS 148.51] gi|88181173|gb|EAQ88641.1| CHGG_05260 [Chaetomium globosum CBS 148.51]
  misc_feature (1)..(133): NCBI GI: 256721214 Blast Desc: NECHADRAFT_82331 [Nectria haematococca mpVI 77-13-4]
  misc_feature (1)..(133): NCBI GI: 256722137 Blast Desc: NECHADRAFT_55546 [Nectria haematococca mpVI 77-13-4]
  misc_feature (1)..(133): NCBI GI: 256722133 Blast Desc: NECHADRAFT_9732 [Nectria haematococca mpVI 77-13-4]
  misc_feature (1)..(135): NCBI GI: 256721058 Blast Desc: NECHADRAFT_55443 [Nectria haematococca mpVI 77-13-4]
  misc_feature (1)..(133): NCBI GI: 256721098 Blast Desc: NECHADRAFT_9404 [Nectria haematococca mpVI 77-13-4]
YEPINDTPIAVSIETKTTTVSRDPLLQLGIWVAAWHKRMYDLRRIRLRLLPPPEPNNGHEVRNQTQSPTIPNLVTVPLIVVVAHEWDAYFASDNGSSITMFGPVPLGSTKTILKIYSLLESLKAIRKWAESTFLDDLATWFICNA

SEQ ID NO: 37893 - DNA, 1322 bp, Muscodor strobelii
  misc_feature: SGI EST ID NO. CUFF.90945.2
  misc_feature: Variant of the nucleotide sequence at SEQ ID NO 37891
ggattccatttccgcttggtctgcatcaaatacggttacggggactagccagtcgcaaagcgtcgacgagctccaatctccgccagcaatacttgagcgaagcgattctaagaaaatcgactttgtggtggtaatctctatggtcgattcgcatccatttaaaaggctcatccgagaattaatcataaatgcccaaactgcgagaagctcgctgacgcctcacttcaaccaaacaggatatgaacccatcaacgacactcccatcgcggtatccattgaaacgaagaccaccaccgtctctcgtgaccctttattacaactaggaatatgggtggcagcctggcacaagcgcatgtacgacttacgtcgtatacgattgcggcttctaccgccgccagagccaaacaacgggcacgaagtccgaaaccagacgcaatctcccacaatccctaatctggtcaccgtacccctgatagttgtcgtcgcccacgagtgggatgcatattttgcctccgacaacggcagttcgatcaccatgtttggtcccgtcccgctcggttcaactaaaactatcttaaagatctactctttattagaatcgctgaaggcgatcaggaagtgggcggagtccacatttcttgacgatcttgcaacttggttcatctgcaacgcctaagcagatagccgcaagagagaatcgccgtatggcgggcttcggatcagtgtgacgccataagtactatcaggtcgatacttcgttgtctatcatagtcgaacaagccggcggtatgagtcccctttacaggtcttacatagcgtgaaactgctgggactgtcaccctcatggcgtcccgtttcagggaactcagttaatactattgcctcatacaacaccgctacgaagccctgcaatccgcggctatcatatctctttatttgttggagtcagttgtacttccgaattaccgctcggggatttggtcttccccggcgggggtctgtttagaaagcaacacctccgaagtgtctagtaacttcgtttaggtttgcgagcttcgacgaagaccaggctcatttgtgtcattggacggcgaggtaagtgctttgatgcattagcaacgccttctgggcctaccgctccattgcttgaccactactgactctcagagggctctgctagtatctgaaacgatgtggctaagttatgctttggcaggtaaatgctcttcgacgttacagcaagtgataattaccctagttgcatcaatttgctatgaaaataggcatcgagggctcgggacgctagtaccgcgagcgcatca

SEQ ID NO: 37894 - DNA, 2382 bp, Muscodor strobelii
  misc_feature: SGI cDNA ID NO. 573159
  misc_feature: Elevated expression when VOC is produced
  misc_feature: Encodes the peptide sequence at SEQ ID NO 37895
aagccggagaacatgcctagtctgaaagttgtctgcttccggtcgcgataccttgaagtagactgtcgccaacactggctcggcaaagtccagatcctacttgtctacgggccagcgggcgcctgtcctttagggctttccgcggtagaaatatcggacgatgacgccaccccgtgctttccgaggccctttatgggaaacttctggatagtgagcccaggagatcaccaaagattgatgcccgttggggctgttggcgaacttttgattggcggggcggccgttgctcaacgccttgacgcagacagtcgccatgcacaccgttacgacgccggcaaggcaaacggcggcacatcaacatctcttggtgacctggcgggctcacttcttaagactgggcactttgctcgatactgtgaacagggcgggatcgagttcgtcatccccggaagcaatggcgccgggtcggatggaggtctctcccaccttgatgtagagcgacatctacgccaatgcctcggccgcagcttgaatgtcgttgttcaggctgtcacattcaacgacgcgcactcgcagccgactctatgcgcgttcatcgagatgggcgatggtctatatcgcggagcagaagacctgtccggaattagtcacaccactaaagcacagctgcgtcgtgctaagaaggcaatggctactttgcacccaagtcctcttccggtgcacaaggtgccctcaatctacatccccgttaagtgcatgccattgacacgatcatttgatatcgaccgatcaatcttgcgaagaatggtaactactgtaaccagtgcatctagagaacagctgctcgcgctagcagaatcccaacccccggaaccacaagcaaataggctcaagccgctgcctctcacggcagtagaaaaaagaatgcgatctgtttgggccgaagtccttggcaggaacgagaggcacatagctggaaatgtaggtttccgaacattaggggccgatatcttcctctgcaagcaacttgttatcgcctgtcgacaacgaggcattgagatttccattaccgacgtgctccatgatcatgcgttgatccagttatgccatagtgtgagcgcatggccgtcaacgcctacttcacagcaaggccgccgtggccttggtaaagagctcataccggaggcggagatggtggtggatggtgacgtccaaccggtacgtagcgcaggtagcgaagtgattgaagacatcatcgaggcctcggcgctgcaagctatgtatgtagggtctgggacgctccgccgccgcgggaacgttgattatctgacggttcatatcgctggagccctggacggggacagattaaaaacggcatgcctcgatctggtcaaagcccacccaagcttgcgcacggcattcatggcccaagatcgccaactatatcagactgtcctccgatcgttcagtcccgagatagtttggcgtcggtgccggacctggcagctgaactcttgcgtggcgaaagctgtggatgaggatcggctcttaccgctcgacttccgattgccagctaccaaagttttttatttctttgccaaaaggcgatctatattaattgtgcgtctatcaaaagcccagtatgatcaagtctcgttacatacgcttgtccgagatctcagccagttttatagtgatggtggcgatgtgcctcggcgacccgggttctgccagatactccgagctgtccaggcggcttactctgataacaccgttcggtactggcatgaattgctccaaggtgcctcggtcactcaggtcatccctcaaccatcacctgcaagtgtcagcttgaacctgccgactgttcgcaaaaccgtcgatatgcggcattcacagagcgaagatatgccgtttgatgtgatcctaaagagtgcatggtctatagtcctatcgaatttatcggcaactcgagatgtggtattcggcgagcttgtagactatagagacacgagcatagcaaagaatcaagccattgcatccgtggtcggaccgctaagcaatgtaatcccggtgcgtgctcgactgccagccatgccagtcttgcctcgccagtatatcgactctatgttgaaccagcatctagcaagaatcccgcatcaacatatgcagactgaagacattgtgcgccggtgcacgtcttggccagcctggactcggttcagcactgtggttcagcacgaggatcgcgcggattctggaaggtcgatccatttcacgttaggcaatgccagctgcgagctcgctgggactgaagtatgctaccagagctatgatatattggctcgaggacgtgttggcaatgctatgtgcgacaattaa

SEQ ID NO: 37895 - protein, 793 aa, Muscodor strobelii
  misc_feature: SGI Peptide ID NO. 573159
  misc_feature (415)..(697): Pfam Id: PF00668 Pfam Desc: Condensation domain
  misc_feature (3)..(147): Pfam Id: PF00501 Pfam Desc: AMP-binding enzyme
  misc_feature (2)..(772): NCBI GI: 164425711 Blast Desc: NCU04531 [Neurospora crassa OR74A] gi|157071032|gb|EAA27706.2| [Neurospora crassa OR74A]
  misc_feature (2)..(768): NCBI GI: 116205980 Blast Desc: CHGG_02283 [Chaetomium globosum CBS 148.51] gi|88182880|gb|EAQ90348.1| CHGG_02283 [Chaetomium globosum CBS 148.51]
  misc_feature (3)..(748): NCBI GI: 39942642 Blast Desc: MGG_03401 [Magnaporthe grisea 70-15] gi|145015580|gb|EDK00070.1| MGG_03401 [Magnaporthe grisea 70-15]
  misc_feature (2)..(786): NCBI GI: 171678561 Blast Desc: protein product [Podospora anserina] gi|170937350|emb|CAP62008.1| protein product [Podospora anserina]
  misc_feature (1)..(793): NCBI GI: 261360420 Blast Desc: conserved [Verticillium albo-atrum VaMs.102]
  misc_feature (2)..(779): NCBI GI: 256734955 Blast Desc: NECHADRAFT_31971 [Nectria haematococca mpVI 77-13-4]
  misc_feature (1)..(747): NCBI GI: 46138017 Blast Desc: FG10523.1 [Gibberella zeae PH-1]
  misc_feature (4)..(768): NCBI GI: 121704124 Blast Desc: nonribosomal peptide synthase, [Aspergillus clavatus NRRL 1] gi|119398470|gb|EAW08900.1| nonribosomal peptide synthase, [Aspergillus clavatus NRRL 1]
  misc_feature (1)..(749): NCBI GI: 115436950 Blast Desc: [Aspergillus terreus NIH2624] gi|114188501|gb|EAU30201.1| [Aspergillus terreus NIH2624]
  misc_feature (4)..(749): NCBI GI: 238845960 Blast Desc: peptide synthetase [Microsporum canis CBS 113480]
  misc_feature (22)..(693): SWISSPROT Homolog: EC 5.1.1.13 Aspartate racemase
  misc_feature (22)..(693): SWISSPROT Homolog: EC 5.1.1.11 Phenylalanine racemase (ATP-hydrolyzing)
  misc_feature: Useful for introducing or modulating the production of volatile compounds
KPENMPSLKVVCFRSRYLEVDCRQHWLGKVQILLVYGPAGACPLGLSAVEISDDDATPCFPRPFMGNFWIVSPGDHQRLMPVGAVGELLIGGAAVAQRLDADSRHAHRYDAGKANGGTSTSLGDLAGSLLKTGHFARYCEQGGIEFVIPGSNGAGSDGGLSHLDVERHLRQCLGRSLNVVVQAVTFNDAHSQPTLCAFIEMGDGLYRGAEDLSGISHTTKAQLRRAKKAMATLHPSPLPVHKVPSIYIPVKCMPLTRSFDIDRSILRRMVTTVTSASREQLLALAESQPPEPQANRLKPLPLTAVEKRMRSVWAEVLGRNERHIAGNVGFRTLGADIFLCKQLVIACRQRGIEISITDVLHDHALIQLCHSVSAWPSTPTSQQGRRGLGKELIPEAEMVVDGDVQPVRSAGSEVIEDIIEASALQAMYVGSGTLRRRGNVDYLTVHIAGALDGDRLKTACLDLVKAHPSLRTAFMAQDRQLYQTVLRSFSPEIVWRRCRTWQLNSCVAKAVDEDRLLPLDFRLPATKVFYFFAKRRSILIVRLSKAQYDQVSLHTLVRDLSQFYSDGGDVPRRPGFCQILRAVQAAYSDNTVRYWHELLQGASVTQVIPQPSPASVSLNLPTVRKTVDMRHSQSEDMPFDVILKSAWSIVLSNLSATRDVVFGELVDYRDTSIAKNQAIASVVGPLSNVIPVRARLPAMPVLPRQYIDSMLNQHLARIPHQHMQTEDIVRRCTSWPAWTRFSTVVQHEDRADSGRSIHFTLGNASCELAGTEVCYQSYDILARGRVGNAMCDN

SEQ ID NO: 37896 - DNA, 930 bp, Muscodor strobelii
  misc_feature: SGI cDNA ID NO. 573160
  misc_feature: Elevated expression when VOC is produced
  misc_feature: Encodes the peptide sequence at SEQ ID NO 37897
atgattattgccgttttgaagggaaacctaggcggccacattcatttggatgatcagggccgcatcgcatttgacgacactctggttgtattcttgcagacggagttcgtcactcagcttgtgtccattttgtccctgttcttcacaaaactgtcagttgtcgtgttttatagacgcatcttcaccggaaaagcgttctccattgccagcgtcattcttctctacgcaatagctgcgtggggactcacgttctttcttgcaactctgcttcagtgcttaccagttgatcaattctggaaaacattatttggtacacctgaacatgcaaagtactgctataacacgattccaatgttcaaagcaacggcaatcacagacatgctggtcgatgttgctatcctaacactaccaatgccctttgtgtggcgattgaatatgtccaagaagcaaaaagttgcgatcagcggcatttttttgttgggtgcatttgttgtcggaataacaatcgctaggatcaagtttttctacgcatctagttctagctacgccaatgccttagatataacagttaatattgcaccaacactttattggactcagcttgaggtcagcatcgctgtgatcagtgcatgcttgcctacattgcggccgctgttcacgggcgtgtctcttgagaagatggttcaacagtttggtagcatgttttcactccgcagcttcacaaaatcatccctcaatattgttacacctcgaaaggggtgggcacagtcacagcaggccgatgggggctcatcgacatccaaaattgtccatcaatgtgaggcagttcgactctcaagtctcgaagagcctcgagcggggcagatcaaccagtctggaatcatagtgcccgagccagagagccaatcgaatcagaattgcacagtttga

SEQ ID NO: 37897 - protein, 309 aa, Muscodor strobelii
  misc_feature: SGI Peptide ID NO. 573160
  misc_feature (1)..(244): NCBI GI: 212534488 Blast Desc: conserved [Penicillium marneffei ATCC 18224] gi|210069799|gb|EEA23889.1| conserved [Penicillium marneffei ATCC 18224]
  misc_feature (36)..(265): NCBI GI: 242816288 Blast Desc: conserved [Talaromyces stipitatus ATCC 10500] gi|218715084|gb|EED14507.1| conserved [Talaromyces stipitatus ATCC 10500]
  misc_feature (1)..(252): NCBI GI: 212533581 Blast Desc: integral membrane protein [Penicillium marneffei ATCC 18224] gi|210072311|gb|EEA26400.1| integral membrane protein [Penicillium marneffei ATCC 18224]
  misc_feature (1)..(218): NCBI GI: 146323527 Blast Desc: integral membrane protein [Aspergillus fumigatus Af293] gi|129558246|gb|EAL92076.2| integral membrane protein, [Aspergillus fumigatus Af293]
  misc_feature (40)..(223): NCBI GI: 67900566 Blast Desc: AN7270.2 [Aspergillus nidulans FGSC A4] gi|40741951|gb|EAA61141.1| AN7270.2 [Aspergillus nidulans FGSC A4] gi|259483384|tpe|CBF78730.1| TPA: conserved [Aspergillus FGSC
  misc_feature (1)..(231): NCBI GI: 121712242 Blast Desc: conserved [Aspergillus clavatus NRRL 1] gi|119401888|gb|EAW12310.1| conserved [Aspergillus clavatus NRRL 1]
  misc_feature (1)..(216): NCBI GI: 242800339 Blast Desc: conserved [Talaromyces stipitatus ATCC 10500] gi|218716912|gb|EED16333.1| conserved [Talaromyces stipitatus ATCC 10500]
  misc_feature (19)..(218): NCBI GI: 212536598 Blast Desc: integral membrane protein, [Penicillium marneffei ATCC 18224] gi|210070854|gb|EEA24944.1| integral membrane protein, [Penicillium marneffei ATCC 18224]
  misc_feature (40)..(265): NCBI GI: 242816292 Blast Desc: conserved [Talaromyces stipitatus ATCC 10500] gi|218715085|gb|EED14508.1| conserved [Talaromyces stipitatus ATCC 10500]
  misc_feature (1)..(216): NCBI GI: 242800335 Blast Desc: conserved [Talaromyces stipitatus ATCC 10500] gi|218716911|gb|EED16332.1| conserved [Talaromyces stipitatus ATCC 10500]
  misc_feature: Useful for introducing or modulating the production of volatile compounds
MIIAVLKGNLGGHIHLDDQGRIAFDDTLVVFLQTEFVTQLVSILSLFFTKLSVVVFYRRIFTGKAFSIASVILLYAIAAWGLTFFLATLLQCLPVDQFWKTLFGTPEHAKYCYNTIPMFKATAITDMLVDVAILTLPMPFVWRLNMSKKQKVAISGIFLLGAFVVGITIARIKFFYASSSSYANALDITVNIAPTLYWTQLEVSIAVISACLPTLRPLFTGVSLEKMVQQFGSMFSLRSFTKSSLNIVTPRKGWAQSQQADGGSSTSKIVHQCEAVRLSSLEEPRAGQINQSGIIVPEPESQSNQNCTV

SEQ ID NO: 37898 - DNA, 1559 bp, Muscodor strobelii
  misc_feature: SGI EST ID NO. CUFF.90795.0
  misc_feature: Variant of the nucleotide sequence at SEQ ID NO 37896
cgatatcgcgccacaccaagagtacgccgtgatagaattgaaggcgaacgctatcggacttgtgcacatattttagtagctagtatttgtatcccatttcatgatgccgtcgcgactcagtaccaacatcctcattgtctcgatagtcttctccgtcctaccaacaattttagttcttttaaggcttcgagctcgggccgtcattcgtgtcggcctttctaccgacgactacttgattttacctgctttaatatttagcctcggcctatctgccaacatgattattggttcgaatcttcgggctctctgtgttgaataacaagtaacattgctaccagccgttttgaagggaaacctaggcggccacattcatttggatgatcagggccgcatcgcatttgacgacactctggttgtattcttgcagacggagttcgtcactcagcttgtgtccattttgtccctgttcttcacaaaactgtcagttgtcgtgttttatagacgcatcttcaccggaaaagcgttctccattgccagcgtcattcttctctacgcaatagctgcgtggggactcacgttctttcttgcaactctgcttcagtgcttaccagttgatcaattctggaaaacattatttggtacacctgaacatgcaaagtactgctataacacgattccaatgttcaaagcaacggcaatcacagacatgctggtcgatgttgctatcctaacactaccaatgccctttgtgtggcgattgaatatgtccaagaagcaaaaagttgcgatcagcggcatttttttgttgggtgcatttgttgtcggaataacaatcgctaggatcaagtttttctacgcatctagttctagctacgccaatgccttagatataacagttaatattgcaccaacactttattggactcagcttgaggtcagcatcgctgtgatcagtgcatgcttgcctacattgcggccgctgttcacgggcgtgtctcttgagaagatggttcaacagtttggtagcatgttttcactccgcagcttcacaaaatcatccctcaatattgttacacctcgaaaggggtgggcacagtcacagcaggccgatgggggctcatcgacatccaaaattgtccatcaatgtgaggcagttcgactctcaagtctcgaagagcctcgagcggggcagatcaaccagtctggaatcatagtgcccgagccagagagccaatcgaatcagaattgcacagtttgagaacgtcatagatgttgaatgagatacaggttttcccgacatacgcagagacggaattgatggtgtcctctatgttgcagttgtgtaacacgactatctctggcaagtcagctgctcaggctatctgcaggctatcactaggtacacgcgacgttacatggtccgtgcctgaatctttatgtaattgacgcgtatatgaatacaatgtactgaaaagggccattattgttgaaatttgtactattggaaacctcactgttggcggtgcatctatacacgtagatataattaaggaattcac

SEQ ID NO: 37899 - DNA, 516 bp, Muscodor strobelii
  misc_feature: SGI cDNA ID NO. 573161
  misc_feature: Encodes the peptide sequence at SEQ ID NO 37900
atggtgtcctttttctggggaaggcattttgaaagacaggctacagagtccgattggcttgaccctcctggtcaaatcgacgcagagttcacatataaaaaggaatttgcattgaggcctgacagtgagtctcaagtgtggtgggatcaagtatttccagtcggtcgtggtttcgtccaacaccccaatatttcgccttcgccacacggagttgctgctttccatcagcttcactgtcttgacgccctccgtcatgggtactgggctgcgaaggatggaaccaaacccagtcacttcgcaatgccgggccacattcgccattgcatagactatcttcgacaatcgctcatgtgccatgccgacacgaacttagagccgattaatcctgagctcggcggtgttacagggtttggacaagtcaaaaaatgccgagattatacgcgcttgctgcaatgggcgcagaagtggcgtacgaataacgagacgaatcatgatggaattattgctgtgacctga

SEQ ID NO: 37900 - protein, 171 aa, Muscodor strobelii
  misc_feature: SGI Peptide ID NO. 573161
  misc_feature (4)..(164): NCBI GI: 116192633 Blast Desc: CHGG_06034 [Chaetomium globosum CBS 148.51] gi|88181947|gb|EAQ89415.1| CHGG_06034 [Chaetomium globosum CBS 148.51]
  misc_feature (22)..(168): NCBI GI: 242800506 Blast Desc: conserved [Talaromyces stipitatus ATCC 10500] gi|218716948|gb|EED16369.1| conserved [Talaromyces stipitatus ATCC 10500]
  misc_feature (6)..(161): NCBI GI: 212534484 Blast Desc: conserved [Penicillium marneffei ATCC 18224] gi|210069797|gb|EEA23887.1| conserved [Penicillium marneffei ATCC 18224]
  misc_feature (20)..(161): NCBI GI: 242800316 Blast Desc: conserved [Talaromyces stipitatus ATCC 10500] gi|218716907|gb|EED16328.1| conserved [Talaromyces stipitatus ATCC 10500]
  misc_feature (30)..(157): NCBI GI: 169626156 Blast Desc: SNOG_16357 [Phaeosphaeria nodorum SN15] gi|111055223|gb|EAT76343.1| SNOG_16357 [Phaeosphaeria nodorum SN15]
  misc_feature (2)..(160): NCBI GI: 242817089 Blast Desc: TSTA_052920 [Talaromyces stipitatus ATCC 10500] gi|218713347|gb|EED12771.1| TSTA_052920 [Talaromyces stipitatus ATCC 10500]
  misc_feature (51)..(161): NCBI GI: 242800311 Blast Desc: conserved [Talaromyces stipitatus ATCC 10500] gi|218716906|gb|EED16327.1| conserved [Talaromyces stipitatus ATCC 10500]
  misc_feature (38)..(157): NCBI GI: 169779515 Blast Desc: [Aspergillus oryzae RIB40] gi|83772961|dbj|BAE63089.1| protein product [Aspergillus oryzae]
  misc_feature (20)..(157): NCBI GI: 154302913 Blast Desc: [Botryotinia fuckeliana B05.10] gi|150855124|gb|EDN30316.1| [Botryotinia fuckeliana B05.10]
  misc_feature (77)..(168): NCBI GI: 238501770 Blast Desc: conserved [Aspergillus flavus NRRL3357] gi|220692356|gb|EED48703.1| conserved [Aspergillus flavus NRRL3357]
MVSFFWGRHFERQATESDWLDPPGQIDAEFTYKKEFALRPDSESQVWWDQVFPVGRGFVQHPNISPSPHGVAAFHQLHCLDALRHGYWAAKDGTKPSHFAMPGHIRHCIDYLRQSLMCHADTNLEPINPELGGVTGFGQVKKCRDYTRLLQWAQKWRTNNETNHDGIIAVT

SEQ ID NO: 37901 - DNA, 938 bp, Muscodor strobelii
  misc_feature: SGI EST ID NO. CUFF.90837.1
  misc_feature: Variant of the nucleotide sequence at SEQ ID NO 37899
ccgacttggactctgcatctacaccacccggattgctagtgagcctaagtttgaatcgcctccctcgacccccatctcctcctgccacctttgctattggttttttcacagatttcttctattctcgggaagtaattatgtcatttcacattaaatacaatcctttggctagtaggagtgacgaagtactcgagaatgaagtcaagtgccctgaacccatacgcggctcatcttactgttgcgattccaaaaggtgcggcagaacgccatgctggttcattctctccatattgctcatgattttgttctcaatggtgtcctttttctggggaaggcattttgaaagacaggctacagagtccgattggcttgaccctcctggtcaaatcgacgcagagttcacatataaaaaggaatttgcattgaggcctgacagtgagtctcaagtgtggtgggatcaagtatttccagtcggtcgtggtttcgtccaacaccccaatatttcgccttcgccacacggagttgctgctttccatcagcttcactgtcttgacgccctccgtcatgggtactgggctgcgaaggatggaaccaaacccagtcacttcgcaatgccgggccacattcgccattgcatagactatcttcgacaatcgctcatgtgccatgccgacacgaacttagagccgattaatcctgagctcggcggtgttacagggtttggacaagtcaaaaaatgccgagattatacgcgcttgctgcaatgggcgcagaagtggcgtacgaataacgagacgaatcatgatggaattattgctgtgacctgagtagagtaaatgcgaatccagcaccttgtggaggaaaacttgcgacgacttcattatagaattcaaatcattacgtctcctatcatcatcccaattgtctgacgaacttcc

SEQ ID NO: 37902 - DNA, 660 bp, Muscodor strobelii
  misc_feature: SGI cDNA ID NO. 573162
  misc_feature: Encodes the peptide sequence at SEQ ID NO 37903
atggaggccacaccgtttcttgcccacgaaggctgctctgctgcttcttttcagcccgacgagcacatcaaatgctcgcatcaagcgcccgcacaaggggcacttgagtttgaaacaaggcctgtcgacggtcatgccgatgagagtatcttcgctggatatccgaccccagagtcggaggctgcatggaaccatcttatggaagcaacaaatgtcagaatctttccagaagagatgaaaatgctcaaagaaacctcgctggaattaaaagacggatctgctttcgttggcgtcttgggggtgtatcatgagcttcactgcgcaaagaaacgaattcgcaaatggttctatcaagattattactaccctaacatgacggcgcttgaatacgacgagaagcttacacatgcagagcattgtcttgaagtccttcgccaagcatctatgtgccacggtgatgttacagtgacttctttcaaatggctgcacgacccgaaaggccacattatcgaacccaccacaaaggaaggggcatatcatgagtgtgtgaagtgggatagtatctccgggtgggctcattcacgtagaatcaatctgtatgatcatagtatccttgccccagaacagcttgaggaggacatagcaaaggaatgggaatga

SEQ ID NO: 37903 - protein, 219 aa, Muscodor strobelii
  misc_feature: SGI Peptide ID NO. 573162
  misc_feature (29)..(206): NCBI GI: 238501772 Blast Desc: conserved [Aspergillus flavus NRRL3357] gi|220692357|gb|EED48704.1| conserved [Aspergillus flavus NRRL3357]
  misc_feature (29)..(205): NCBI GI: 67900556 Blast Desc: AN7265.2 [Aspergillus nidulans FGSC A4] gi|40741946|gb|EAA61136.1| AN7265.2 [Aspergillus nidulans FGSC A4] gi|259483389|tpe|CBF78739.1| TPA: conserved [Aspergillus FGSC
  misc_feature (29)..(199): NCBI GI: 116204067 Blast Desc: CHGG_09917 [Chaetomium globosum CBS 148.51] gi|88176045|gb|EAQ83513.1| CHGG_09917 [Chaetomium globosum CBS 148.51]
  misc_feature (43)..(199): NCBI GI: 225562435 Blast Desc: conserved [Ajellomyces capsulatus G186AR]
  misc_feature (29)..(199): NCBI GI: 154279258 Blast Desc: [Ajellomyces capsulatus NAm1] gi|150412385|gb|EDN07772.1| [Ajellomyces capsulatus NAm1]
  misc_feature (29)..(205): NCBI GI: 169602899 Blast Desc: SNOG_04454 [Phaeosphaeria nodorum SN15] gi|160706284|gb|EAT88214.2| SNOG_04454 [Phaeosphaeria nodorum SN15]
  misc_feature (51)..(210): NCBI GI: 212534486 Blast Desc: conserved [Penicillium marneffei ATCC 18224] gi|210069798|gb|EEA23888.1| conserved [Penicillium marneffei ATCC 18224]
  misc_feature (16)..(210): NCBI GI: 242800331 Blast Desc: conserved [Talaromyces stipitatus ATCC 10500] gi|218716910|gb|EED16331.1| conserved [Talaromyces stipitatus ATCC 10500]
  misc_feature (16)..(210): NCBI GI: 242800321 Blast Desc: conserved [Talaromyces stipitatus ATCC 10500] gi|218716908|gb|EED16329.1| conserved [Talaromyces stipitatus ATCC 10500]
  misc_feature (16)..(210): NCBI GI: 242800326 Blast Desc: conserved [Talaromyces stipitatus ATCC 10500] gi|218716909|gb|EED16330.1| conserved [Talaromyces stipitatus ATCC 10500]
MEATPFLAHEGCSAASFQPDEHIKCSHQAPAQGALEFETRPVDGHADESIFAGYPTPESEAAWNHLMEATNVRIFPEEMKMLKETSLELKDGSAFVGVLGVYHELHCAKKRIRKWFYQDYYYPNMTALEYDEKLTHAEHCLEVLRQASMCHGDVTVTSFKWLHDPKGHIIEPTTKEGAYHECVKWDSISGWAHSRRINLYDHSILAPEQLEEDIAKEWE
